(19) United States
(12) Patent Application Publication
(10) Pub. No.: US 2009/0307807 A1
(43) Pub. Date: Dec. 10, 2009

(54) Nucleic acid molecules and other molecules associated with plants

(76) Inventors: Joseph R. Byrum, West Des Moines, IA (US); David K. Kovalic, University City, MO (US)

Correspondence Address: ARNOLD & PORTER LLP, 555 TWELFTH STREET, N.W., ATTN: IP DOCKETING, WASHINGTON, DC, 20004, US

(21) Appl. No.: 12/453,479

(22) Filed: May 12, 2009

Related U.S. Application Data
(63) Continuation of application No. 09/552,087, filed on Apr. 21, 2000.
Application No. 09/552,087 is a continuation-in-part of application No. 09/521,640, filed on Mar. 10, 2000, now abandoned.
Application No. 09/521,640 is a continuation-in-part of application No. 09/421,106, filed on Oct. 15, 1999, now abandoned.
(60) Provisional application No. 60/130,465, filed on Apr. 22, 1999.

(51) Int. Cl. A01H 5/00; C12N 15/11

(52) U.S. Cl. 800/298; 536/23.6

(57) ABSTRACT

The present invention is in the field of plant genetics. More specifically the invention relates to nucleic acid molecules and nucleic acid molecules that contain markers, in particular, single nucleotide polymorphism (SNP) and repetitive element markers. In addition, the present invention provides nucleic acid molecules having regulatory elements or encoding proteins or fragments thereof. The invention also relates to proteins and fragments of proteins so encoded and antibodies capable of binding the proteins. The invention also relates to methods of using the nucleic acid molecules, markers, repetitive elements and fragments of repetitive elements, regulatory elements, proteins and fragments of proteins.

### CROSS-REFERENCE TO RELATED APPLICATIONS

[0001] This application is a continuation of U.S. application Ser. No. 09/552,087 (pending) filed Apr. 21, 2000, which is a continuation-in-part of U.S. application Ser. No. 09/521,640 (abandoned), filed Mar. 10, 2000, which is a continuation-in-part of U.S. application Ser. No. 09/421,106 (abandoned), filed Oct. 15, 1999, which claims priority to U.S. Provisional Appln. No. 60/130,465 (expired), filed Apr. 22, 1999, all of which are herein incorporated by reference in their entirety.

### INCORPORATION OF SEQUENCE LISTING

[0002] This application contains a sequence listing, which is contained on three CD-ROMs: two copies of a sequence listing (Copy 1 and Copy 2) and a sequence listing Computer Readable Form (CRF), all of which are herein incorporated by reference in their entirety All three CD-ROMs each contain one file called “SequenceListing.txt” which is 13,456,901 bytes in size (measured in Windows XP) and which was created on Jan. 23, 2002.

### FIELD OF THE INVENTION

[0003] The present invention is in the field of plant genetics. More specifically the invention relates to nucleic acid molecules and nucleic acid molecules that contain markers, in particular, single nucleotide polymorphism (SNP) and repetitive element markers. In addition, the present invention provides nucleic acid molecules having regulatory elements or encoding proteins or fragments thereof and nucleic acid molecules present in non-coding regions. The invention also relates to proteins and fragments of proteins so encoded and antibodies capable of binding the proteins. The invention also relates to methods of using the nucleic acid molecules, for example, for gene identification and analysis, markers, repetitive elements and fragments of repetitive elements, regulatory elements, proteins and fragments of proteins.

### BACKGROUND OF THE INVENTION

### I. Sequence Tagged Connector Nucleic Acid Molecules and the Bacterial Artificial Chromosomes (BACS) Containing these Sequences

[0004] Sequence tagged connectors, or STCs, are sequences of insert data generated from both ends (at the vector-insert point) of a BAC clone in a genomic library. These sequences, and BACs containing these STC sequences, can be used, for example, for marker development, genetic mapping or linkage analysis, marker assisted breeding, and physical genome mapping (Venter, et al., Nature, 381:364-366 (1996), the entirety of which is herein incorporated by reference; Choi and Wing, available on the world wide web at genome.clemson.edu/protocols2-nj.html July, 1998). STCs can represent a copy of up to a full length of a mRNA transcript, a promoter element or part of a promoter, can contain simple sequence repeats (also called microsatellites) repetitive elements or fragments of repetitive elements, other DNA markers, or any combination thereof.

[0005] Markers have been used in genetic mapping which can be a step in isolating a gene. Genetic mapping or linkage analysis is based on the level at which markers and genes are co-inherited (Rothwell, Understanding Genetics. 4th Ed., Oxford University Press, New York, p. 703 (1988). Statistical tests like chi-square analysis can be used to test the randomness of segregation or linkage (Kochert, The Rockefeller Foundation International Program on Rice Biotechnology, University of Georgia, Athens, Ga., pp 1-14 (1989), the entirety of which is herein incorporated by reference. In linkage mapping, the proportion of recombinant individuals out of the total mapping population provides the information for determining the genetic distance between the loci (Young, Encyclopedia of Agricultural Science, Vol. 3, pp 275-282 (1994), the entirety of which is herein incorporated by reference).

[0006] Classical mapping studies utilize easily observable, visible traits instead of molecular markers. These visible traits are also known as naked eye polymorphisms. These traits can be morphological like plant height, fruit size, shape and color or physiological like disease response, photoperiod sensitivity or crop maturity. Visible traits are useful and are still in use because they represent actual phenotypes and are easy to score without any specialized lab equipment. By contrast, the other types of genetic markers are arbitrary loci for use in linkage mapping and often not associated to specific plant phenotypes (Young, Encyclopedia of Agricultural Science, Vol. 3, pp. 275-282 (1994). Many morphological markers cause such large effects on phenotype that they are undesirable in breeding programs. Many other visible traits have the disadvantage of being developmentally regulated (i.e., expressed only at certain stages; or in specific tissues and organs). Often times, visible traits mask the effects of linked minor genes making it nearly impossible to identify desirable linkages for selection (Tanksely, et al., Biotech. 7:257-264 (1989), the entirety of which is herein incorporated by reference).

[0007] Although a number of important agronomic characters are controlled by loci having major effects on phenotype, many economically important traits, such as yield and some forms of disease resistance, are quantitative in nature. This type of phenotypic variation in a trait is characterized by continuous, normal distribution of phenotypic values in a particular population (Beckmann and Soller, Oxford Surveys of Plant Molecular Biology, Miffen. (ed.), Vol. 3, Oxford University Press, UK., pp. 196-250 (1986), the entirety of which is herein incorporated by reference). Such traits are governed by a large number of loci, Quantitative Trait Loci (QTL), each of which can make a small positive or negative effect to the final phenotype value of the trait (Beckmann and Soller, Oxford Surveys of Plant Molecular Biology, Miffen. (ed.), Vol. 3, Oxford University Press, U.K., pp. 196-250 (1986). Loci contributing to such genetic variation are often termed minor genes as opposed to major genes with large effects that follow a Mendelian pattern of inheritance. Polygenic traits are also predicted to follow a Mendelian type of inheritance, however the contribution of each locus is expressed as an increase or decrease in the final trait value.

[0008] Markers have been used in physical mapping studies with BAC libraries made from plant genomes. Such mapping studies have been carried out in rice (Kim et al., Genomics 34:213-218 (1996), herein incorporated by reference; Hang, Plant Mol. Biol. 35:129-133 (1997), herein incorporated by reference; Zhang and Wing., Plant Mol. Bio. 35:115-127 (1997) herein incorporated by reference; Chen et al., Proc. Acad. Sci. (U.S.A.) 94:3431-3435 (1997) herein incorporated by reference; Wang et al., Plant J. 7:525-533 (1995) herein incorporated by reference) sorghum (Zwick et al., Genetics 148:1983-1992 (1998) herein incorporated by reference; Zhang, et al., Molecular Breeding 2:11-24 (1996) the entirety of which is herein incorporated by reference) maize, (Chen, et al., Proc. Acad. Sci. (U.S.A.) 94:3431-3435 (1997), and Arabidopsis (Kim, et al., Genomics 34:213-218 (1996) the entirety of which is herein incorporated by reference.

[0009] Repetitive elements have been used in physical mapping in cereals (Ananiev, et al., Proc. Acad. Sci. (U.S.A.) 95:13073-8 (1998), the entirety of which is herein incorporated by reference; McLean et al., Mol Gen Genet. 253:687-694 (1997), the entirety of which is herein incorporated by reference).

### II. Sequence Comparisons

[0010] STCs and sequenced BACs can be compared, for example, to sequences that encode promoters or proteins. These homologies can be determined by similarity searches (Adams, et al., Science 252:1651-1656 (1991), herein incorporated by reference).

[0011] A characteristic feature of a DNA sequence is that it can be compared with other DNA sequences. Sequence comparisons can be undertaken by determining the similarity of the test or query sequence with sequences in publicly available or propriety databases (“similarity analysis”) or by searching for certain motifs (“intrinsic sequence analysis”)(e.g., cis elements)(Coulson, Trends in Biotechnology, 12:76-80 (1994), the entirety of which is herein incorporated by reference; Birren, et al., Genome Analysis, 1:543-559 (1997), the entirety of which is herein incorporated by reference).

[0012] Similarity analysis includes database search and alignment. Examples of public databases include the DNA Database of Japan (DDBJ) available on the world wide web at ddbj.nig.ac.jp; Genebank available on the world wide web at ncbi.nlm.nih.gov/web/Genbank/Index.htlm; and the European Molecular Biology Laboratory Nucleic Acid Sequence Database (EMBL) available on the world wide web at ebi.ac.uk.ebi_docs/embl_db.html. A number of different search algorithms have been developed, one example of which are the suite of programs referred to as BLAST programs. There are five implementations of BLAST, three designed for nucleotide sequences queries (BLASTN, BLASTX, and TBLASTX) and two designed for protein sequence queries (BLASTP and TBLASTN) (Coulson, Trends in Biotechnology, 12:76-80 (1994); Birren, et al., Genome Analysis, 1:543-559 (1997)).

[0013] BLASTN takes a nucleotide sequence (the query sequence) and its reverse complement and searches them against a nucleotide sequence database. BLASTN was designed for speed, not maximum sensitivity, and may not find distantly related coding sequences. BLASTX takes a nucleotide sequence, translates it in three forward reading frames and three reverse complement reading frames, and then compares the six translations against a protein sequence database. BLASTX is useful for sensitive analysis of preliminary (single-pass) sequence data and is tolerant of sequencing errors (Gish and States, Nature Genetics, 3:266-272 (1993), the entirety of which is herein incorporated by reference). BLASTN and BLASTX may be used in concert for analyzing STC data (Coulson, Trends in Biotechnology, 12:76-80 (1994); Birren, et al., Genome Analysis, 1:543-559 (1997).

[0014] Given a coding nucleotide sequence and the protein it encodes, it is often preferable to use the protein as the query sequence to search a database because of the greatly increased sensitivity to detect more subtle relationships. This is due to the larger alphabet of proteins (20 amino acids) compared with the alphabet of nucleic acid sequences (4 bases), where it is far easier to obtain a match by chance. In addition, with nucleotide alignments, only a match (positive score) or a mismatch (negative score) is obtained, but with proteins, the presence of conservative amino acid substitutions can be taken into account. Here, a mismatch may yield a positive score if the non-identical residue has physical/chemical properties similar to the one it replaced. Various scoring matrices are used to supply the substitution scores of all possible amino acid pairs. A general purpose scoring system is the BLOSUM62 matrix (Henikoff and Henikoff, Proteins, 17:49-61 (1993), the entirety of which is herein incorporated by reference), which is currently the default choice for BLAST programs. BLOSUM62 is tailored for alignments of moderately diverged sequences and thus may not yield the best results under all conditions. Altschul, J. Mol. Biol. 36:290-300 (1993), the entirety of which is herein incorporated by reference, uses a combination of three matrices to cover all contingencies. This may improve sensitivity, but at the expense of slower searches. In practice, a single BLOSUM62 matrix is often used but others (PAM40 and PAM250) may be attempted when additional analysis is necessary. Low PAM matrices are directed at detecting very strong but localized sequence similarities, whereas high PAM matrices are directed at detecting long but weak alignments between very distantly related sequences.

[0015] Homologues in other organisms are available that can be used for comparative sequence analysis. Multiple alignments are performed to study similarities and differences in a group of related sequences. CLUSTAL W is a multiple sequence alignment package available that performs progressive multiple sequence alignments based on the method of Feng and Doolittle, J. Mol. Evol. 25:351-360 (1987), the entirety of which is herein incorporated by reference. Each pair of sequences is aligned and the distance between each pair is calculated; from this distance matrix, a guide tree is calculated, and all of the sequences are progressively aligned based on this tree. A feature of the program is its sensitivity to the effect of gaps on the alignment; gap penalties are varied to encourage the insertion of gaps in probable loop regions instead of in the middle of structured regions. Users can specify gap penalties, choose between a number of scoring matrices, or supply their own scoring matrix for both the pairwise alignments and the multiple alignments. CLUSTAL W for UNIX and VMS systems is available at: ftp.ebi.ac.uk. Another program is MACAW (Schuler et al., Proteins, Struct. Func. Genet, 9:180-190 (1991), the entirety of which is herein incorporated by reference, for which both Macintosh and Microsoft Windows versions are available. MACAW uses a graphical interface, provides a choice of several alignment algorithms, and is available by anonymous ftp at: ncbi.nlm.nih.gov (directory/pub/macaw).

[0016] Sequence motifs are derived from multiple alignments and can be used to examine individual sequences or an entire database for subtle patterns. With motifs, it is sometimes possible to detect distant relationships that may not be demonstrable based on comparisons of primary sequences alone. Currently, the largest collection of sequence motifs in the world is PROSITE (Bairoch and Bucher, Nucleic Acid Research, 22:3583-3589 (1994), the entirety of which is herein incorporated by reference). PROSITE may be accessed via either the ExPASy server on the World Wide Web or anonymous ftp site. Many commercial sequence analysis packages also provide search programs that use PROSITE data.

[0017] A resource for searching protein motifs is the BLOCKS E-mail server developed by S. Henikoff, Trends Biochem Sci., 18:267-268 (1993), the entirety of which is herein incorporated by reference; Henikoff and Henikoff, Nucleic Acid Research, 19:6565-6572 (1991), the entirety of which is herein incorporated by reference; Henikoff and Henikoff, Proteins, 17:49-61 (1993). BLOCKS searches a protein or nucleotide sequence against a database of protein motifs or “blocks.” Blocks are defined as short, ungapped multiple alignments that represent highly conserved protein patterns. The blocks themselves are derived from entries in PROSITE as well as other sources. Either a protein or nucleotide query can be submitted to the BLOCKS server; if a nucleotide sequence is submitted, the sequence is translated in all six reading frames and motifs are sought in these conceptual translations. Once the search is completed, the server will return a ranked list of significant matches, along with an alignment of the query sequence to the matched BLOCKS entries.

[0018] Conserved protein domains can be represented by two-dimensional matrices, which measure either the frequency or probability of the occurrences of each amino acid residue and deletions or insertions in each position of the domain. This type of model, when used to search against protein databases, is sensitive and usually yields more accurate results than simple motif searches. Two popular implementations of this approach are profile searches (such as GCG program ProfileSearch) and Hidden Markov Models (HMMs) (Krough, et al., J. Mol. Biol. 235:1501-1531 (1994); Eddy, Current Opinion in Structural Biology 6:361-365 (1996), both of which are herein incorporated by reference in their entirety). In both cases, a large number of common protein domains have been converted into profiles, as present in the PROSITE library, or HHM models, as in the Pfam protein domain library (Sonnhammer, et al., Proteins 28:405-420 (1997), the entirety of which is herein incorporated by reference). Pfam contains more than 500 HMM models for enzymes, transcription factors, signal transduction molecules, and structural proteins. Protein databases can be queried with these profiles or HMM models, which will identify proteins containing the domain of interest. For example, HMMSW or HMMFS, two programs in a public domain package called HMMER (Sonnhammer, et al., Proteins 28:405-420 (1997)) can be used.

[0019] PROSITE and BLOCKS represent collected families of protein motifs. Thus, searching these databases entails submitting a single sequence to determine whether or not that sequence is similar to the members of an established family. Programs working in the opposite direction compare a collection of sequences with individual entries in the protein databases. An example of such a program is the Motif Search Tool, or MoST (Tatusov, et al., Proc. Natl. Acad. Sci. 91:12091-12095 (1994), the entirety of which is herein incorporated by reference). On the basis of an aligned set of input sequences, a weight matrix is calculated by using one of four methods (selected by the user); a weight matrix is simply a representation, position by position in an alignment, of how likely a particular amino acid will appear. The calculated weight matrix is then used to search the databases. To increase sensitivity, newly found sequences are added to the original data set, the weight matrix is recalculated, and the search is performed again. This procedure continues until no new sequences are found.

### SUMMARY OF THE INVENTION

[0020] The present invention provides a substantially purified nucleic acid molecule having a nucleic acid sequence selected from the group consisting of SEQ ID NO: 1 through SEQ ID NO: 20082 or complements thereof.

[0021] The present invention also provides a substantially purified nucleic acid molecule, the nucleic acid molecule capable of specifically hybridizing to a second nucleic acid molecule having a nucleic acid sequence selected from the group consisting of SEQ ID NO: 1 through SEQ ID NO: 20082 or complements thereof.

[0022] The present invention also provides a substantially purified nucleic acid molecule encoding a protein or fragment thereof, wherein the protein or fragment thereof is selected from the group consisting a Glycine max protein or fragment thereof from Table 1 of U.S. application Ser. No. 09/552,087.

[0023] The present invention also provides a substantially purified nucleic acid molecule encoding a Glycine max protein or fragment thereof, wherein the Glycine max protein or fragment thereof is encoded by a nucleic acid sequence selected from the group consisting of SEQ ID NO: 1 through SEQ ID NO: 20082 or complements thereof or fragments of either.

[0024] The present invention also provides a substantially purified protein or fragment thereof encoded by a nucleic acid sequence selected from the group that encodes a Glycine max protein or fragment thereof from Table 1 of U.S. application Ser. No. 09/552,087.

[0025] The present invention also provides a substantially purified protein or fragment thereof encoded by a first nucleic acid molecule which specifically hybridizes to a second nucleic acid molecule, the second nucleic acid molecule selected from the group that encodes a Glycine max protein or fragments thereof from Table 1 of U.S. application Ser. No. 09/552,087.

[0026] The present invention also provides a substantially purified protein or fragment thereof encoded by a nucleic acid molecule comprising a nucleic acid sequence selected from the group consisting of SEQ ID NO: 1 through SEQ ID NO: 20082 or complements thereof or fragments of either.

[0027] The present invention also provides a transformed cell having a nucleic acid molecule which comprises: (A) an exogenous promoter region which functions in the cell to cause the production of a mRNA molecule; which is linked to (B) a structural nucleic acid molecule, wherein the structural nucleic acid molecule encodes a protein or fragment thereof selected from the group consisting of a Glycine max protein or fragment thereof in Table 1 of U.S. application Ser. No. 09/552,087; which is linked to (C) a 3′ non-translated sequence that functions in the cell to cause termination of transcription and addition of polyadenylated ribonucleotides to a 3′ end of the mRNA molecule.

[0028] The present invention also provides a plant cell, a mammalian cell, a bacterial cell, an insect cell and a fungal cell transformed with a nucleic acid molecule of the present invention.

[0029] The present invention also provides a computer readable medium having recorded thereon one or more of the nucleotide sequences depicted in SEQ ID NO: 1 through SEQ ID NO: 20082 or complements thereof.

[0030] The present invention also provides a computer readable medium having recorded thereon one or more of the nucleotide sequences encoding a protein or fragment thereof, wherein the protein or fragment thereof is selected from the group consisting of a Glycine max protein or fragment thereof in Table 1 of U.S. application Ser. No. 09/552,087.

[0031] The present invention provides a computer readable medium having recorded thereon one or more of the nucleotide sequences depicted in SEQ ID NO: 1 through SEQ ID NO: 20082.

[0032] The present invention provides a method of introgressing a trait into a plant comprising using a nucleic acid marker for marker assisted selection of the plant, the nucleic acid marker complementary to a nucleic acid sequence selected from the group consisting of SEQ ID NO: 1 through SEQ ID NO: 20082 or complements thereof, and introgressing the trait into a plant.

[0033] The present invention provides a method for screening for a trait comprising interrogating genomic DNA for the presence or absence of a marker molecule that is genetically linked to a nucleic acid sequence complementary to a nucleic acid sequence selected from the group consisting of SEQ ID NO: 1 through SEQ ID NO: 20082 or complements thereof; and detecting the presence or absence of the marker.

[0034] The present invention provides a method for determining the likelihood of the level, presence or absence of a trait in a plant comprising the steps of: (A) obtaining genomic DNA from the plant; (B) detecting a marker nucleic acid molecule; the marker nucleic acid molecule wherein the marker nucleic acid molecule specifically hybridizes with a nucleic acid sequence that is genetically linked to a nucleic acid sequence complementary to a nucleic acid sequence selected from the group consisting of SEQ ID NO: 1 through SEQ ID NO: 20082 or complements thereof; (C) and determining the level, presence or absence of the marker nucleic acid molecule, wherein the level, presence or absence of the marker nucleic acid molecule is indicative of the likely presence in the plant of the trait.

[0035] The present invention provides a method for determining a genomic polymorphism in a plant that is predictive of a trait comprising the steps: (A) incubating a marker nucleic acid molecule, under conditions permitting nucleic acid hybridization, and a complementary nucleic acid molecule obtained from the plant, the marker nucleic acid molecule having a nucleic acid sequence selected from the group consisting of SEQ ID NO: 1 through SEQ ID NO: 20082 or complements thereof; (B) permitting hybridization between the marker nucleic acid molecule and the complementary nucleic acid molecule obtained from the plant; and (C) detecting the presence of the polymorphism.

[0036] The present invention provides a method of determining an association between a polymorphism and a plant trait comprising: (A) hybridizing a nucleic acid molecule specific for the polymorphism to genetic material of a plant, wherein the nucleic acid molecule comprises a nucleic acid sequence selected from the group consisting of SEQ ID NO: 1 through SEQ ID NO: 20082 or complements thereof; and (B) calculating the degree of association between the polymorphism and the plant trait.

### DETAILED DESCRIPTION OF THE INVENTION

### Agents of the Invention

[0037] (a) Nucleic Acid Molecules

[0038] Agents of the present invention include nucleic acid molecules and more specifically BACs and STC nucleic acid molecules or nucleic acid fragment molecules thereof.

[0039] A subset of the nucleic acid molecules of the present invention includes nucleic acid molecules that are marker molecules. Another subset of the nucleic molecules of the present invention include nucleic acid molecules that are promoters and/or regulatory elements. Another subset of the nucleic acid molecules of the present invention include nucleic acid molecules that encode proteins or fragments of proteins. In a preferred embodiment the nucleic acid molecules of the present invention are derived from Glycine max (soybean) and more preferably Glycine max, genotype A3244 (Asgrow, Des Moines, Iowa).

[0040] Fragment STC nucleic acid molecules and fragments of BACs may encode significant portion(s) of, or indeed most of, the STC or BAC nucleic acid molecule. In addition, a fragment nucleic acid molecule can encode a Glycine max protein or fragment thereof. Alternatively, the fragments may comprise smaller oligonucleotides (having from about 15 to about 250 nucleotide residues, and more preferably, about 15 to about 30 nucleotide residues).

[0041] The term “substantially purified”, as used herein, refers to a molecule separated from substantially all other molecules normally associated with it in its native state. More preferably a substantially purified molecule is the predominant species present in a preparation. A substantially purified molecule may be greater than 60% free, preferably 75% free, more preferably 90% free, and most preferably 95% free from the other molecules (exclusive of solvent) present in the natural mixture. The term “substantially purified” is not intended to encompass molecules present in their native state.

[0042] The agents of the present invention will preferably be “biologically active” with respect to either a structural attribute, such as the capacity of a nucleic acid to hybridize to another nucleic acid molecule, or the ability of a protein to be bound by an antibody (or to compete with another molecule for such binding). Alternatively, such an attribute may be catalytic, and thus involve the capacity of the agent to mediate a chemical reaction or response.

[0043] The agents of the present invention may also be recombinant. As used herein, the term recombinant means any agent (e.g., DNA, peptide etc.), that is, or results, however indirect, from human manipulation of a nucleic acid molecule.

[0044] It is understood that the agents of the present invention may be labeled with reagents that facilitate detection of the agent (e.g., fluorescent labels (Prober, et al., Science 238:336-340 (1987); Albarella et al., EP 144914, chemical labels (Sheldon et al., U.S. Pat. No. 4,582,789; Albarella et al., U.S. Pat. No. 4,563,417, modified bases (Miyoshi et al., EP 119448, all of which are hereby incorporated by reference in their entirety).

[0045] It is further understood, that the present invention provides bacterial, viral, microbial, insect, fungal and plant cells comprising the agents of the present invention.

[0046] The genetic variability resulting from transposable elements ranges from changes in the size and arrangement of whole genomes to changes in single nucleotides. They may produce major effects on phenotypic traits or small silent changes detectable only at the DNA sequence level. Transposable elements may also produce variation when they excise, leaving small footprints of their previous presence (Kidwell and Lisch, Proc. Natl. Acad. Sci. (U.S.A.) 94:7704-7711 (1997)).

[0047] In addition, other markers such as AFLP markers, RFLP markers, RAPD markers, phenotypic markers or isozyme markers can be utilized (Walton, Seed World 22-29 (July, 1993), the entirety of which is herein incorporated by reference; Burow and Blake, Molecular Dissection of Complex Traits, 13-29, Eds. Paterson, CRC Press, New York (1988), the entirety of which is herein incorporated by reference). DNA markers can be developed from nucleic acid molecules using restriction endonucleases, the PCR and/or DNA sequence information. RFLP markers result from single base changes or insertions/deletions. These codominant markers are highly abundant in plant genomes, have a medium level of polymorphism and are developed by a combination of restriction endonuclease digestion and Southern blotting hybridization. CAPS are similarly developed from restriction nuclease digestion but only of specific PCR products. These markers are also codominant, have a medium level of polymorphism and are highly abundant in the genome. The CAPS result from single base changes and insertions/deletions. Another marker type, RAPDs, are developed from DNA amplification with random primers and result from single base changes and insertions/deletions in plant genomes. They are dominant markers with a medium level of polymorphisms and are highly abundant. AFLP markers require using the PCR on a subset of restriction fragments from extended adapter primers. These markers are both dominant and codominant, are highly abundant in genomes and exhibit a medium level of polymorphism. SSRs require DNA sequence information. These codominant markers result from repeat length changes, are highly polymorphic, and do not exhibit as high a degree of abundance in the genome as CAPS, AFLPs and RAPDs. SNPs also require DNA sequence information. These codominant markers result from single base substitutions. They are highly abundant and exhibit a medium of polymorphism (Rafalski, et al., In: Nonmammalian Genomic Analysis, ed. Birren and Lai, Academic Press, San Diego, Calif., pp. 75-134 (1996), the entirety of which is herein incorporated by reference). Methods to isolate such markers are known in the art.

[0048] Long Terminal repeat retrotransposons and MITEs have been found to be associated with the genes of many plants where some of the transposable elements contribute regulatory sequences. MITEs such as the Tourist element in maize and the Stowaway element in Sorghum are found frequently in the 5′ and 3′ noncoding regions of genes and are frequently associated with the regulatory regions of genes of diverse flowering plants (Kidwell and Lisch, Proc. Natl. Acad. Sci. (U.S.A.) 94:7704-7711 (1997)). It is understood that one or more of the Long Terminal repeat retrotransposons and/or MITES may be a marker, and even more preferably a marker for a gene.

[0049] (ii) Nucleic Acid Molecules Comprising Regulatory Elements

[0050] Another class of agents of the present invention are nucleic acid molecules having promoter regions or partial promoter regions, including those located within SEQ ID NO: 1 through SEQ ID NO:20082. Such promoter regions are typically found upstream of the trinucleotide ATG sequence at the start site of a protein coding region.

[0051] As used herein, a promoter region is a region of a nucleic acid molecule that is capable, when located in cis to a nucleic acid sequence that encodes for a protein or fragment thereof to function in a way that directs expression of one or more mRNA molecules that encodes for the protein or fragment thereof.

[0052] Promoters of the present invention can include between about 300 bp upstream and about 10 kb upstream of the trinucleotide ATG sequence at the start site of a protein coding region. Promoters of the present invention can preferably include between about 300 bp upstream and about 5 kb upstream of the trinucleotide ATG sequence at the start site of a protein coding region. Promoters of the present invention can more preferably include between about 300 bp upstream and about 2 kb upstream of the trinucleotide ATG sequence at the start site of a protein coding region. Promoters of the present invention can include between about 300 bp upstream and about 1 kb upstream of the trinucleotide ATG sequence at the start site of a protein coding region. While in many circumstances a 300 bp promoter may be sufficient for expression, additional sequences may act to further regulate expression, for example, in response to biochemical, developmental or environmental signals.

[0053] It is also preferred that the promoters of the present invention contain a CAAT and a TATA cis element. Moreover, the promoters of the present invention can contain one or more cis elements in addition to a CAAT and a TATA box.

[0054] By “regulatory element” it is intended a series of nucleotides that determines if, when, and at what level a particular gene is expressed. The regulatory DNA sequences specifically interact with regulatory or other proteins. Many regulatory elements act in cis (“cis elements”) and are believed to affect DNA topology, producing local conformations that selectively allow or restrict access of RNA polymerase to the DNA template or that facilitate selective opening of the double helix at the site of transcriptional initiation. Cis elements occur within, but are not limited to promoters, and promoter modulating sequences (inducible elements). Cis elements can be identified using known cis elements as a target sequence or target motif in the BLAST programs of the present invention.

[0055] Promoters of the present invention include homologues of cis elements known to effect gene regulation that show homology with the nucleic acid molecules of the present invention. These cis elements include, but are not limited to, oxygen responsive cis elements (Cowen, et al., J. Biol. Chem. 268(36):26904-26910 (1993) the entirety of which is herein incorporated by reference), light regulatory elements (Bruce and Quaill, Plant Cell 2 (11):1081-1089 (1990) the entirety of which is herein incorporated by reference; Bruce, et al., EMBO J. 10:3015-3024 (1991), the entirety of which is herein incorporated by reference; Rocholl, et al., Plant Sci. 97:189-198 (1994), the entirety of which is herein incorporated by reference; Block, et al., Proc. Natl. Acad. Sci. (U.S.A.) 87:5387-5391 (1990), the entirety of which is herein incorporated by reference; Giuliano, et al., Proc. Natl. Acad. Sci. (U.S.A.) 85:7089-7093 (1988), the entirety of which is herein incorporated by reference; Staiger, et al., Proc. Natl. Acad. Sci. (U.S.A.) 86:6930-6934 (1989), the entirety of which is herein incorporated by reference; Izawa, et al., Plant Cell 6:1277-1287 (1994), the entirety of which is herein incorporated by reference; Menkens, et al., Trends in Biochemistry 20:506-510 (1995), the entirety of which is herein incorporated by reference; Foster, et al., FASEB J. 8:192-200 (1994), the entirety of which is herein incorporated by reference; Plesse, et al., Mol Gen Gene 254:258-266 (1997), the entirety of which is herein incorporated by reference; Green, et al., EMBO J. 6:2543-2549 (1987), the entirety of which is herein incorporated by reference; Kuhlemeier et al., Ann. Rev Plant Physiol. 38:221-257 (1987), the entirety of which is herein incorporated by reference; Villain et al., J. Biol. Chem. 271:32593-32598 (1996), the entirety of which is herein incorporated by reference; Lam et al., Plant Cell 2:857-866 (1990), the entirety of which is herein incorporated by reference; Gilmartin, et al., Plant Cell 2:369-378 (1990), the entirety of which is herein incorporated by reference; Datta, et al., Plant Cell 1:1069-1077 (1989) the entirety of which is herein incorporated by reference; Gilmartin, et al., Plant Cell 2:369-378 (1990), the entirety of which is herein incorporated by reference; Castresana, et al., EMBO J. 7:1929-1936 (1988), the entirety of which is herein incorporated by reference; Ueda, et al., Plant Cell 1:217-227 (1989), the entirety of which is herein incorporated by reference; Terzaghi, et al., Annu. Rev. Plant Physiol. Plant Mol. Biol. 46:445-474 (1995), the entirety of which is herein incorporated by reference; Green et al., EMBO J. 6:2543-2549 (1987), the entirety of which is herein incorporated by reference; Villain, et al., J. Biol. Chem. 271:32593-32598 (1996), the entirety of which is herein incorporated by reference; Tjaden, et al., Plant Cell 6:107-118 (1994), the entirety of which is herein incorporated by reference; Tjaden, et al., Plant Physiol. 108:1109-1117 (1995), the entirety of which is herein incorporated by reference; Ngai, et al., Plant J. 12:1021-1234 (1997), the entirety of which is herein incorporated by reference; Bruce, et al., EMBO J. 10:3015-3024 (1991), the entirety of which is herein incorporated by reference; Ngai, et al., Plant J. 12:1021-1034 (1997), the entirety of which is herein incorporated by reference), elements responsive to gibberellin, (Muller, et al., J. Plant Physiol. 145:606-613 (1995), the entirety of which is herein incorporated by reference; Croissant, et al., Plant Science 116:27-35 (1996), the entirety of which is herein incorporated by reference; Lohmer, et al., EMBO J. 10:617-624 (1991), the entirety of which is herein incorporated by reference; Rogers, et al., Plant Cell 4:1443-1451 (1992), the entirety of which is herein incorporated by reference; Lanahan et al., Plant Cell 4:203-211 (1992) the entirety of which is herein incorporated by reference; Skriver et al., Proc. Natl. Acad. Sci. (U.S.A.) 88:7266-7270 (1991) the entirety of which is herein incorporated by reference; Gilmartin, et al., Plant Cell 2:369-378 (1990), the entirety of which is herein incorporated by reference; Huang, et al., Plant Mol. Biol. 14:655-668 (1990), the entirety of which is herein incorporated by reference, Gubler, et al., Plant Cell 7:1879-1891 (1995), the entirety of which is herein incorporated by reference), elements responsive to abscisic acid, (Busk, et al., Plant Cell 9:2261-2270 (1997), the entirety of which is herein incorporated by reference; Guiltinan, et al., Science 250:267-270 (1990), the entirety of which is herein incorporated by reference; Shen, et al., Plant Cell 7:295-307 (1995) the entirety of which is herein incorporated by reference; Shen et al., Plant Cell 8:1107-1119 (1996), the entirety of which is herein incorporated by reference; Seo et al., Plant Mol. Biol. 27:1119-1131 (1995), the entirety of which is herein incorporated by reference; Marcotte et al., Plant Cell 1:969-976 (1989) the entirety of which is herein incorporated by reference; Shen et al., Plant Cell 7:295-307 (1995), the entirety of which is herein incorporated by reference; Iwasaki et al., Mol Gen Genet. 247:391-398 (1995), the entirety of which is herein incorporated by reference; Hattori et al., Genes Dev. 6:609-618 (1992), the entirety of which is herein incorporated by reference; Thomas et al., Plant Cell 5:1401-1410 (1993), the entirety of which is herein incorporated by reference), elements similar to abscisic acid responsive elements, (Ellerstrom et al., Plant Mol. Biol. 32:1019-1027 (1996), the entirety of which is herein incorporated by reference), auxin responsive elements (Liu et al., Plant Cell 6:645-657 (1994) the entirety of which is herein incorporated by reference; Liu et al., Plant Physiol. 115:397-407 (1997), the entirety of which is herein incorporated by reference; Kosugi et al., Plant J. 7:877-886 (1995), the entirety of which is herein incorporated by reference; Kosugi et al., Plant Cell 9:1607-1619 (1997), the entirety of which is herein incorporated by reference; Ballas et al., J. Mol. Biol. 233:580-596 (1993), the entirety of which is herein incorporated by reference), a cis element responsive to methyl jasmonate treatment (Beaudoin and Rothstein, Plant Mol. Biol. 33:835-846 (1997), the entirety of which is herein incorporated by reference), a cis element responsive to abscisic acid and stress response (Straub et al., Plant Mol. Biol. 26:617-630 (1994), the entirety of which is herein incorporated by reference), ethylene responsive cis elements (Itzhaki et al., Proc. Natl. Acad. Sci. (U.S.A.) 91:8925-8929 (1994), the entirety of which is herein incorporated by reference; Montgomery et al., Proc. Acad. Sci. (U.S.A.) 90:5939-5943 (1993), the entirety of which is herein incorporated by reference; Sessa et al., Plant Mol. Biol. 28:145-153 (1995), the entirety of which is herein incorporated by reference; Shinshi et al., Plant Mol. Biol. 27:923-932 (1995), the entirety of which is herein incorporated by reference), salicylic acid cis responsive elements, (Strange et al., Plant J. 11:1315-1324 (1997), the entirety of which is herein incorporated by reference; Qin et al., Plant Cell 6:863-874 (1994), the entirety of which is herein incorporated by reference), a cis element that responds to water stress and abscisic acid (Lam et al., J. Biol. Chem. 266:17131-17135 (1991), the entirety of which is herein incorporated by reference; Thomas et al., Plant Cell 5:1401-1410 (1993), the entirety of which is herein incorporated by reference; Pla et al., Plant Mol Biol 21:259-266 (1993), the entirety of which is herein incorporated by reference), a cis element essential for M phase-specific expression (Ito et al., Plant Cell 10:331-341 (1998), the entirety of which is herein incorporated by reference), sucrose responsive elements (Huang et al., Plant Mol. Biol. 14:655-668 (1990), the entirety of which is herein incorporated by reference; Hwang et al., Plant Mol Biol 36:331-341 (1998), the entirety of which is herein incorporated by reference; Grierson et al., Plant J. 5:815-826 (1994), the entirety of which is herein incorporated by reference), heat shock response elements (Pelham et al., Trends Genet. 1:31-35 (1985), the entirety of which is herein incorporated by reference), elements responsive to auxin and/or salicylic acid and also reported for light regulation (Lam et al., Proc. Natl. Acad. Sci. (U.S.A.) 86:7890-7897 (1989), the entirety of which is herein incorporated by reference; Benfey et al., Science 250:959-966 (1990), the entirety of which is herein incorporated by reference), elements responsive to ethylene and salicylic acid (Ohme-Takagi et al., Plant Mol. Biol. 15:941-946 (1990), the entirety of which is herein incorporated by reference), elements responsive to wounding and abiotic stress (Loake et al., Proc. Natl. Acad. Sci. (U.S.A.) 89:9230-9234 (1992), the entirety of which is herein incorporated by reference; Mhiri et al., Plant Mol. Biol. 33:257-266 (1997), the entirety of which is herein incorporated by reference), antioxidant response elements (Rushmore et al., J. Biol. Chem. 266:11632-11639, the entirety of which is herein incorporated by reference; Dalton et al., Nucleic Acids Res. 22:5016-5023 (1994), the entirety of which is herein incorporated by reference), Sph elements (Suzuki et al., Plant Cell 9:799-807 1997), the entirety of which is herein incorporated reference), Elicitor responsive elements, (Fukuda et al., Plant Mol. Biol. 34:81-87 (1997), the entirety of which is herein incorporated by reference; Rushton et al., EMBO J. 15:5690-5700 (1996), the entirety of which is herein incorporated by reference), metal responsive elements (Stuart et al., Nature 317:828-831 (1985), the entirety of which is herein incorporated by reference; Westin et al., EMBO J. 7:3763-3770 (1988), the entirety of which is herein incorporated by reference; Thiele et al., Nucleic Acids Res. 20:1183-1191 (1992), the entirety of which is herein incorporated by reference; Faisst et al., Nucleic Acids Res. 20:3-26 (1992), the entirety of which is herein incorporated by reference), low temperature responsive elements, (Baker et al., Plant Mol. Biol. 24:701-713 (1994), the entirety of which is herein incorporated by reference; Jiang et al., Plant Mol. Biol. 30:679-684 (1996), the entirety of which is herein incorporated by reference; Nordin et al., Plant Mol. Biol. 21:641-653 (1993), the entirety of which is herein incorporated by reference; Zhou et al., J. Biol. Chem. 267:23515-23519 (1992), the entirety of which is herein incorporated by reference), drought responsive elements, (Yamaguchi et al., Plant Cell 6:251-264 (1994), the entirety of which is herein incorporated by reference; Wang et al., Plant Mol. Biol. 28:605-617 (1995), the entirety of which is herein incorporated by reference; Bray E A, Trends in Plant Science 2:48-54 (1997), the entirety of which is herein incorporated by reference) enhancer elements for glutenin, (Colot et al., EMBO J. 6:3559-3564 (1987), the entirety of which is herein incorporated by reference; Thomas et al., Plant Cell 2:1171-1180 (1990), the entirety of which is incorporated by reference; Kreis et al., Philos. Trans. R. Soc. Lond., B314:355-365 (1986), the entirety of which is herein incorporated by reference), light-independent regulatory elements, (Lagrange et al., Plant Cell 9:1469-1479 (1997), the entirety of which is herein incorporated by reference; Villain et al., J. Biol. Chem. 271:32593-32598 (1996), the entirety of which is herein incorporated by reference), OCS enhancer elements, (Bouchez et al., EMBO J. 8:4197-4204 (1989), the entirety of which is herein incorporated by reference; Foley et al., Plant J. 3:669-679 (1993), the entirety of which is herein incorporated by reference), ACGT elements, (Foster et al., FASEB J. 8:192-200 (1994), the entirety of which is herein incorporated by reference; Izawa et al., Plant Cell 6:1277-1287 (1994), the entirety of which is herein incorporated by reference; Izawa et al., J. Mol. Biol. 230:1131-1144 (1993) the entirety of which is herein incorporated by reference), negative cis elements in plastid related genes, (Zhou et al., J. Biol. Chem. 267:23515-23519 (1992), the entirety of which is herein incorporated by reference; Lagrange et al., Mol. Cell. Biol. 13:2614-2622 (1993), the entirety of which is herein incorporated by reference; Lagrange et al., Plant Cell 9:1469-1479 (1997), the entirety of which is herein incorporated by reference; Zhou et al., J. Biol. Chem. 267:23515-23519 (1992), the entirety of which is herein incorporated by reference), prolamin box elements, (Forde et al., Nucleic Acids Res. 13:7327-7339 (1985), the entirety of which is herein incorporated by reference; Colot et al., EMBO J. 6:3559-3564 (1987), the entirety of which is herein incorporated by reference; Thomas et al., Plant Cell 2:1171-1180 (1990), the entirety of which is herein incorporated by reference; Thompson et al., Plant Mol. Biol. 15:755-764 (1990), the entirety of which is herein incorporated by reference; Vicente et al., Proc. Natl. Acad. Sci. (U.S.A.) 94:7685-7690 (1997), the entirety of which is herein incorporated by reference), elements in enhancers from the IgM heavy chain gene (Gillies et al., Cell 33:717-728 (1983), the entirety of which is herein incorporated by reference; Whittier et al., Nucleic Acids Res. 15:2515-2535 (1987), the entirety of which is herein incorporated by reference.

[0056] (iii) Nucleic Acid Molecules Comprising Genes or Fragments Thereof

[0057] Nucleic acid molecules of the present invention can comprise one or more genes or fragments thereof. Such genes or fragments thereof include homologues of known genes or protein coding regions in other organisms or genes or fragments thereof that elicit only limited or no matches with known genes or protein coding regions. Table 1 of U.S. application Ser. No. 09/552,087 sets forth a list of nucleic acid molecules that encode Glycine max proteins or fragments thereof which are homologues of known proteins.

[0058] Genomic sequences can be screened for the presence of proteins or genes utilizing one or a number of different search algorithms have that been developed, one example of which are the suite of programs referred to as BLAST programs. Other examples of suitable programs that can be utilized are known in the art, several of which are described above in the Background and under the section titled “Uses of the Agents of the Invention.” In addition, unidentified reading frames may be screened for protein coding regions by prediction software such as GenScan, which is located available on the world wide web at gnomic.standford.edu/GENSCANW.html.

[0059] In a preferred embodiment of the present invention, the Glycine max protein or fragment thereof of the present invention is a homologue of another plant protein. In another preferred embodiment of the present invention, the Glycine max protein or fragment thereof of the present invention is a homologue of a fungal protein. In another preferred embodiment of the present invention, the Glycine max protein or fragment thereof of the present invention is a homologue of a mammalian protein. In another preferred embodiment of the present invention, the Glycine max protein or fragment thereof of the present invention is a homologue of a bacterial protein.

[0060] In a preferred embodiment of the present invention, the Glycine max protein or fragments thereof or nucleic acid molecule or fragment thereof has a BLAST score of more than 200, preferably a BLAST score of more than 300, even more preferably a BLAST score of more than 400.

[0061] In another preferred embodiment of the present invention, the nucleic acid molecule encoding the Glycine max protein or fragment thereof and/or nucleic acid molecule or fragment thereof exhibits a % identity with its homologue of between about 25% and about 40%, more preferably of between about 40 and about 70%, even more preferably of between about 70% and about 90%, and even more preferably between about 90% and 99%. In another preferred embodiment, of the present invention, the Glycine max the nucleic acid molecule encoding the Glycine max protein or fragment thereof exhibits a % identity with its homologue of 100%.

[0062] In a preferred embodiment of the present invention, the Glycine max protein or fragment thereof or nucleic acid molecule or fragment thereof exhibits a % coverage of between about 0% and about 33%, more preferably of between about 34% and about 66%, and even more preferably of between about 67% and about 100%.

[0063] Genomic sequences can be screened for the presence of proteins utilizing one or a number of different search algorithms have that been developed, one example of which are the suite of programs referred to as BLAST programs. Other examples of suitable programs that can be utilized are known in the art, several of which are described above in the Background. Nucleic acid molecules of the present invention also include non-Glycine max homologues. Preferred non-Glycine max homologues are selected from the group consisting of alfalfa, Arabidopsis barley, Brassica, broccoli, cabbage, citrus, cotton, garlic, oat, oilseed rape, onion, canola, flax, an ornamental plant, maize, pea, peanut, pepper, potato, rice, rye, sorghum, strawberry, sugarcane, sugarbeet, tomato, wheat, poplar, pine, fir, eucalyptus, apple, lettuce, lentils, grape, banana, tea, turf grasses, sunflower, oil palm, and Phaseolus.

[0064] In a preferred embodiment, nucleic acid molecules having SEQ ID NO: 1 through SEQ ID NO: 20082 or complements and fragments of either can be utilized to obtain such homologues.

[0065] The degeneracy of the genetic code, which allows different nucleic acid sequences to code for the same protein or peptide, is known in the literature. (U.S. Pat. No. 4,757,006, the entirety of which is herein incorporated by reference).

[0066] In an aspect of the present invention, one or more of the nucleic acid molecules of the present invention differ in nucleic acid sequence from those encoding a soybean protein or fragment thereof in SEQ ID NO: 1 through SEQ ID NO: 20082 due to the degeneracy in the genetic code in that they encode the same protein but differ in nucleic acid sequence.

[0067] In another further aspect of the present invention, one or more of the nucleic acid molecules of the present invention differ in nucleic acid sequence from those encoding a soybean protein or fragment thereof in SEQ ID NO: 1 through SEQ ID NO:20082 due to the fact that the different nucleic acid sequences encode a protein having one or more conservative amino acid residues.

[0068] It is understood that codons capable of coding for such conservative amino acid substitutions are known in the art.

[0069] It is well known in the art that one or more amino acids in a native sequence can be substituted with another amino acid(s), the charge and polarity of which are similar to that of the native amino acid, i.e., a conservative amino acid substitution, resulting in a silent change. Conserved substitutes for an amino acid within the native polypeptide sequence can be selected from other members of the class to which the naturally occurring amino acid belongs. Amino acids can be divided into the following four groups: (1) acidic amino acids, (2) basic amino acids, (3) neutral polar amino acids, and (4) neutral nonpolar amino acids. Representative amino acids within these various groups include, but are not limited to, (1) acidic (negatively charged) amino acids such as aspartic acid and glutamic acid; (2) basic (positively charged) amino acids such as arginine, histidine, and lysine; (3) neutral polar amino acids such as glycine, serine, threonine, cysteine, cystine, tyrosine, asparagine, and glutamine; and (4) neutral nonpolar (hydrophobic) amino acids such as alanine, leucine, isoleucine, valine, proline, phenylalanine, tryptophan, and methionine.

[0070] Conservative amino acid changes within the native polypeptides sequence can be made by substituting one amino acid within one of these groups with another amino acid within the same group. Biologically functional equivalents of the proteins or fragments thereof of the present invention can have 10 or fewer conservative amino acid changes, more preferably seven or fewer conservative amino acid changes, and most preferably five or fewer conservative amino acid changes. The encoding nucleotide sequence will thus have corresponding base substitutions, permitting it to encode biologically functional equivalent forms of the proteins or fragments of the present invention.

[0071] It is understood that certain amino acids may be substituted for other amino acids in a protein structure without appreciable loss of interactive binding capacity with structures such as, for example, antigent-binding regions of antibodies or binding sites on substrate molecules. Because it is the interactive capacity and nature of a protein that defines that protein's biological functional activity, certain amino acid sequence substitutions can be made in a protein sequence and, of course, its underlying DNA coding sequence and, nevertheless, obtain a protein with like properties. It is thus contemplated by the inventors that various changes may be made in the peptide sequences of the proteins or fragments of the present invention, or corresponding DNA sequences that encode said peptides, without appreciable loss of their biological utility or activity. It is understood that codons capable of coding for such amino acid changes are known in the art.

[0072] In making such changes, the hydropathic index of amino acids may be considered. The importance of the hydropathic amino acid index in conferring interactive biological function on a protein is generally understood in the art (Kyte and Doolittle, J. Mol. Biol. 157, 105-132 (1982), herein incorporated by reference in its entirety). It is accepted that the relative hydropathic character of the amino acid contributes to the secondary structure of the resultant protein, which in turn defines the interaction of the protein with other molecules, for example, enzymes, substrates, receptors, DNA, antibodies, antigens, and the like.

[0073] Each amino acid has been assigned a hydropathic index on the basis of its hydrophobicity and charge characteristics (Kyte and Doolittle, 1982); these are isoleucine (+4.5), valine (+4.2), leucine (+3.8), phenylalanine (+2.8), cysteine/cystine (+2.5), methionine (+1.9), alanine (+1.8), glycine (−0.4), threonine (−0.7), serine (−0.8), tryptophan (−0.9), tyrosine (−1.3), proline (−1.6), histidine (−3.2), glutamate (−3.5), glutamine (−3.5), aspartate (−3.5), asparagine (−3.5), lysine (3.9), and arginine (−4.5).

[0074] In making such changes, the substitution of amino acids whose hydropathic indices are within ±2 is preferred, those which are within ±1 are particularly preferred, and those within ±0.5 are even more particularly preferred.

[0075] It is also understood in the art that the substitution of like amino acids can be made effectively on the basis of hydrophilicity. U.S. Pat. No. 4,554,101, incorporated herein by reference in its entirety, states that the greatest local average hydrophilicity of a protein, as govern by the hydrophilicity of its adjacent amino acids, correlates with a biological property of the protein

[0076] As detailed in U.S. Pat. No. 4,554,101, the following hydrophilicity values have been assigned to amino acid residues: arginine (+3.0), lysine (+3.0), aspartate (+3.0±1), glutamate (+3.0±1), serine (+0.3), asparagine (+0.2), glutamine (+0.2), glycine (0), threonine (−0.4), proline (−0.5±1), alanine (−0.5), histidine (−0.5), cysteine (−1.0), methionine (−1.3), valine (−1.5), leucine (−1.8), isoleucine (−1.8), tyrosine (−2.3), phenylalanine (−2.5), and tryptophan (−3.4). In making such changes, the substitution of amino acids whose hydrophilicity values are within ±2 is preferred, those which are within ±1 are particularly preferred, and those within ±0.5 are even more particularly preferred.

[0077] In a further aspect of the present invention, one or more of the nucleic acid molecules of the present invention differ in nucleic acid sequence from those encoding a protein or fragment thereof set forth in SEQ ID NO: 1 through SEQ ID NO: 20082 or fragment thereof due to the fact that one or more codons encoding an amino acid has been substituted for a codon that encodes a nonessential substitution of the amino acid originally encoded.

[0078] (iv) Nucleic Acid Molecules Comprising Introns and/or Intron/Exon Junctions

[0079] Nucleic acid molecules of the present invention can comprise an intron and/or one or more intron/exon junction. Sequences of the present invention can be screened for introns and intron/exon junctions utilizing one or a number of different search algorithms that have that been developed, one example of which are the suite of programs referred to as BLAST programs. Other examples of suitable programs that can be utilized are known in the art, several of which are described above in the Background and in the section entitled “Uses of the Agents of the Present Invention”.

[0080] (b) Protein and Peptide Molecules

[0081] A class of agents comprises one or more of the protein or peptide molecules encoded by SEQ ID NO: 1 through SEQ ID NO:20082, fragments thereof or complements thereof or one or more of the proteins encoded by a nucleic acid molecule or fragment thereof or peptide molecules encoded by other nucleic acid agents of the present invention. Protein and peptide molecules can be identified using known protein or peptide molecules as a target sequence or target motif in the BLAST programs of the present invention. In a preferred embodiment, the protein or peptide molecules of the present invention are derived from Glycine max (soybean) and more preferably Glycine max, genotype A3244.

[0082] As used herein, the term “protein molecule” or “peptide molecule” includes any molecule that comprises five or more amino acids. It is well known in the art that proteins or peptides may undergo modification, including post-translational modifications, such as, but not limited to, disulfide bond formation, glycosylation, phosphorylation, or oligomerization. Thus, as used herein, the term “protein molecule” or “peptide molecule” includes any protein molecule that is modified by any biological or non-biological process. The terms “amino acid” and “amino acids” refer to all naturally occurring L-amino acids. This definition is meant to include norleucine, ornithine, homocysteine, and homoserine.

[0083] One or more of the protein or fragments of peptide molecules may be produced via chemical synthesis, or more preferably, by expression in a suitable bacterial or eukaryotic host. Suitable methods for expression are described by Sambrook, et al., Molecular Cloning, A Laboratory Manual, 2nd Edition, Cold Spring Harbor Press, Cold Spring Harbor, N.Y. (1989), or similar texts.

[0084] A “protein fragment” is a peptide or polypeptide molecule whose amino acid sequence comprises a subset of the amino acid sequence of that protein. A protein or fragment thereof that comprises one or more additional peptide regions not derived from that protein is a “fusion” protein. Such molecules may be derivatized to contain carbohydrate or other moieties (such as keyhole limpet hemocyanin, etc.). Fusion protein or peptide molecules of the present invention are preferably produced via recombinant means.

[0085] Another class of agents comprises protein or peptide molecules encoded by SEQ ID NO: 1 through SEQ ID NO:20082 or complements thereof or, fragments or fusions thereof in which conservative, non-essential, or not relevant, amino acid residues have been added, replaced, or deleted. An example of such a homologue is the homologue protein of all non-Glycine max plant species, including but not limited to alfalfa, barley, Brassica, broccoli, cabbage, citrus, cotton, garlic, oat, oilseed rape, onion, canola, flax, maize, an ornamental plant, pea, peanut, pepper, potato, rice, rye, sorghum, strawberry, sugarcane, sugarbeet, tomato, wheat, poplar, pine, fir, eukalyptus, apple, lettuce, peas, lentils, grape, banana, tea, turf grasses, etc. Particularly preferred non-Glycine max plants to utilize for the isolation of homologues would include alfalfa, barley, cotton, corn, oat, oilseed rape, rice, corn, canola, ornamentals, sugarcane, sugarbeet, tomato, potato, wheat, and turf grasses. Such a homologue can be obtained by any of a variety of methods. Most preferably, as indicated above, one or more of the disclosed sequences (SEQ ID NO: 1 through SEQ ID NO:20082 or complements thereof) will be used to define a pair of primers that may be used to isolate the homologue-encoding nucleic acid molecules from any desired species. Such molecules can be expressed to yield homologues by recombinant means.

[0086] (c) Antibodies

[0087] One aspect of the present invention concerns antibodies, single-chain antigen binding molecules, or other proteins that specifically bind to one or more of the protein or peptide molecules of the present invention and their homologues, fusions or fragments. Such antibodies may be used to quantitatively or qualitatively detect the protein or peptide molecules of the present invention. As used herein, an antibody or peptide is said to “specifically bind” to a protein or peptide molecule of the present invention if such binding is not competitively inhibited by the presence of non-related molecules. In a preferred embodiment the antibodies of the present invention bind to proteins derived from Glycine max (soybean) and more preferably bind to proteins or fragments thereof of Glycine max, genotype A3244.

[0088] Nucleic acid molecules that encode all or part of the protein of the present invention can be expressed, via recombinant means, to yield protein or peptides that can in turn be used to elicit antibodies that are capable of binding the expressed protein or peptide. Such antibodies may be used in immunoassays for that protein. Such protein-encoding molecules, or their fragments may be a “fusion” molecule (i.e., a part of a larger nucleic acid molecule) such that, upon expression, a fusion protein is produced. It is understood that any of the nucleic acid molecules of the present invention may be expressed, via recombinant means, to yield proteins or peptides encoded by these nucleic acid molecules.

[0089] The antibodies that specifically bind proteins and protein fragments of the present invention may be polyclonal or monoclonal, and may comprise intact immunoglobulins, or antigen binding portions of immunoglobulins (such as (F(ab′), F(ab′)₂ fragments), or single-chain immunoglobulins producible, for example, via recombinant means). It is understood that practitioners are familiar with the standard resource materials which describe specific conditions and procedures for the construction, manipulation and isolation of antibodies (see, for example, Harlow and Lane, Antibodies: A Laboratory Manual, Cold Spring Harbor Press, Cold Spring Harbor, N.Y. (1988), the entirety of which is herein incorporated by reference).

[0090] Murine monoclonal antibodies are particularly preferred. BALB/c mice are preferred for this purpose, however, equivalent strains may also be used. The animals are preferably immunized with approximately 25 μg of purified protein (or fragment thereof) that has been emulsified in a suitable adjuvant (such as TiterMax adjuvant (Vaxcel, Norcross, Ga.)). Immunization is preferably conducted at two intramuscular sites, one intraperitoneal site, and one subcutaneous site at the base of the tail. An additional i.v. injection of approximately 25 μg of antigen is preferably given in normal saline three weeks later. After approximately 11 days following the second injection, the mice may be bled and the blood screened for the presence of anti-protein or peptide antibodies. Preferably, a direct binding Enzyme-Linked Immunoassay (ELISA) is employed for this purpose.

[0091] More preferably, the mouse having the highest antibody titer is given a third i.v. injection of approximately 25 μg of the same protein or fragment. The splenic leukocytes from this animal may be recovered 3 days later, and are then permitted to fuse, most preferably, using polyethylene glycol, with cells of a suitable myeloma cell line (such as, for example, the P3×63Ag8.653 myeloma cell line). Hybridoma cells are selected by culturing the cells under “HAT” (hypoxanthine-aminopterin-thymine) selection for about one week. The resulting clones may then be screened for their capacity to produce monoclonal antibodies (“mAbs”), preferably by direct ELISA.

[0092] In one embodiment, anti-protein or peptide monoclonal antibodies are isolated using a fusion of a protein, protein fragment, or peptide of the present invention, or conjugate of a protein, protein fragment, or peptide of the present invention, as immunogens. Thus, for example, a group of mice can be immunized using a fusion protein emulsified in Freund's complete adjuvant (e.g., approximately 50 μg of antigen per immunization). At three week intervals, an identical amount of antigen is emulsified in Freund's incomplete adjuvant and used to immunize the animals. Ten days following the third immunization, serum samples are taken and evaluated for the presence of antibody. If antibody titers are too low, a fourth booster can be employed. Polysera capable of binding the protein or peptide can also be obtained using this method.

[0093] In a preferred procedure for obtaining monoclonal antibodies, the spleens of the above-described immunized mice are removed, disrupted, and immune splenocytes are isolated over a ficoll gradient. The isolated splenocytes are fused, using polyethylene glycol with BALB/c-derived HGPRT (hypoxanthine guanine phosphoribosyl transferase) deficient P3×63×Ag8.653 plasmacytoma cells. The fused cells are plated into 96-well microtiter plates and screened for hybridoma fusion cells by their capacity to grow in culture medium supplemented with hypothanthine, aminopterin and thymidine for approximately 2-3 weeks.

[0094] Hybridoma cells that arise from such incubation are preferably screened for their capacity to produce an immunoglobulin that binds to a protein of interest. An indirect ELISA may be used for this purpose. In brief, the supernatants of hybridomas are incubated in microtiter wells that contain immobilized protein. After washing, the titer of bound immunoglobulin can be determined using, for example, a goat anti-mouse antibody conjugated to horseradish peroxidase. After additional washing, the amount of immobilized enzyme is determined (for example through the use of a chromogenic substrate). Such screening is performed as quickly as possible after the identification of the hybridoma in order to ensure that a desired clone is not overgrown by non-secreting neighbors. Desirably, the fusion plates are screened several times since the rates of hybridoma growth vary. In a preferred sub-embodiment, a different antigenic form of immunogen may be used to screen the hybridoma. Thus, for example, the splenocytes may be immunized with one immunogen, but the resulting hybridomas can be screened using a different immunogen. It is understood that any of the protein or peptide molecules of the present invention may be used to raise antibodies.

[0095] As discussed below, such antibody molecules or their fragments may be used for diagnostic purposes. Where the antibodies are intended for diagnostic purposes, it may be desirable to derivatize them, for example with a ligand group (such as biotin) or a detectable marker group (such as a fluorescent group, a radioisotope or an enzyme).

[0096] The ability to produce antibodies that bind the protein or peptide molecules of the present invention permits the identification of mimetic compounds of those molecules. A “mimetic compound” is a compound that is not that compound, or a fragment of that compound, but which nonetheless exhibits an ability to specifically bind to antibodies directed against that compound.

[0097] It is understood that any of the agents of the present invention can be substantially purified and/or be biologically active and/or recombinant.

[0098] Uses of the Agents of the Invention

[0099] Nucleic acid molecules and fragments thereof of the present invention may be employed for genetic mapping studies using linkage analysis (genetic markers). A genetic linkage map shows the relative locations of specific DNA markers along a chromosome. Maps are used for the identification of genes associated with genetic diseases or phenotypic traits, comparative genomics, and as a guide for physical mapping. Through genetic mapping, a fine scale linkage map can be developed using DNA markers, and, then, a genomic DNA library of large-sized fragments can be screened with molecular markers linked to the desired trait. In a preferred embodiment of the present invention, the genomic library screened with the nucleic acid molecules of the present invention is a genomic library of Glycine max.

[0100] Mapping marker locations is based on the observation that two markers located near each other on the same chromosome will tend to be passed together from parent to offspring. During gamete production, DNA strands occasionally break and rejoin in different places on the same chromosome or on the homologous chromosome. The closer the markers are to each other, the more tightly linked and the less likely a recombination event will fall between and separate them. Recombination frequency thus provides an estimate of the distance between two markers.

[0101] In segregating populations, target genes have been reported to have been placed within an interval of 5-10 cM with a high degree of certainty (Tanksley et al., Trends in Genetics 11(2):63-68 (1995), the entirety of which is herein incorporated by reference). The markers defining this interval are used to screen a larger segregating population to identify individuals derived from one or more gametes containing a crossover in the given interval. Such individuals are useful in orienting other markers closer to the target gene. Once identified, these individuals can be analyzed in relation to all molecular markers within the region to identify those closest to the target.

[0102] Markers of the present invention can be employed to construct linkage maps and to locate genes with qualitative and quantitative effects. The genetic linkage of additional marker molecules can be established by a genetic mapping model such as, without limitation, the flanking marker model reported by Lander and Botstein, Genetics, 121:185-199 (1989), and the interval mapping, based on maximum likelihood methods described by Lander and Botstein, Genetics, 121:185-199 (1989), the entirety of which is herein incorporated by reference and implemented in the software package MAPMAKER/QTL (Lincoln and Lander, Mapping Genes Controlling Quantitative Traits Using MAPMAKER/QTL, Whitehead Institute for Biomedical Research, Massachusetts, (1990)). Additional software includes Qgene, Version 2.23 (1996), Department of Plant Breeding and Biometry, 266 Emerson Hall, Cornell University, Ithaca, N.Y., the manual of which is herein incorporated by reference in its entirety). Use of the Qgene software is a particularly preferred approach.

[0103] A maximum likelihood estimate (MLE) for the presence of a marker is calculated, together with an MLE assuming no QTL effect, to avoid false positives. A log₁₀ of an odds ratio (LOD) is then calculated as: LOD=log₁₀ (MLE for the presence of a QTL/MLE given no linked QTL).

[0104] The LOD score essentially indicates how much more likely the data are to have arisen assuming the presence of a QTL than in its absence. The LOD threshold value for avoiding a false positive with a given confidence, say 95%, depends on the number of markers and the length of the genome. Graphs indicating LOD thresholds are set forth in Lander and Botstein, Genetics, 121:185-199 (1989), the entirety of which is herein incorporated by reference and further described by Arús and Moreno-González, Plant Breeding, Hayward, Bosemark, Romagosa (eds.) Chapman & Hall, London, pp. 314-331 (1993).

[0105] Additional models can be used. Many modifications and alternative approaches to interval mapping have been reported, including the use of non-parametric methods (Kruglyak and Lander, Genetics, 139:1421-1428 (1995), the entirety of which is herein incorporated by reference). Multiple regression methods or models can be also be used, in which the trait is regressed on a large number of markers (Jansen, Biometrics in Plant Breed, van Oijen, Jansen (eds.) Proceedings of the Ninth Meeting of the Eucarpia Section Biometrics in Plant Breeding, The Netherlands, pp. 116-124 (1994); Weber and Wricke, Advances in Plant Breeding, Blackwell, Berlin, 16 (1994). Procedures combining interval mapping with regression analysis, whereby the phenotype is regressed onto a single putative QTL at a given marker interval, and at the same time onto a number of markers that serve as ‘cofactors,’ have been reported by Jansen and Stam, Genetics, 136:1447-1455 (1994) and Zeng, Genetics, 136:1457-1468 (1994). Generally, the use of cofactors reduces the bias and sampling error of the estimated QTL positions (Utz and Melchinger, Biometrics in Plant Breeding, van Oijen, Jansen (eds.) Proceedings of the Ninth Meeting of the Eucarpia Section Biometrics in Plant Breeding, The Netherlands, pp. 195-204 (1994), thereby improving the precision and efficiency of QTL mapping (Zeng, Genetics, 136:1457-1468 (1994). These models can be extended to multi-environment experiments to analysis genotype-environment interactions (Jansen et al., Theo. Appl. Genet. 91:33-37 (1995).

[0106] Selection of an appropriate mapping population is important to map construction. The choice of appropriate mapping population depends on the type of marker systems employed (Tanksley et al., JP. Gustafson and R. Appels (eds.), Plenum Press, New York, pp. 157-173 (1988), the entirety of which is herein incorporated by reference). Consideration must be given to the source of parents (adapted vs. exotic) used in the mapping population. Chromosome pairing and recombination rates can be severely disturbed (suppressed) in wide crosses (adapted×exotic) and generally yield greatly reduced linkage distances. Wide crosses will usually provide segregating populations with a relatively large array of polymorphisms when compared to progeny in a narrow cross (adapted×adapted).

[0107] An F₂ population is the first generation of selfing after the hybrid seed is produced. Usually a single F₁ plant is selfed to generate a population segregating for all the genes in Mendelian (1:2:1) fashion. Maximum genetic information is obtained from a completely classified F₂ population using a codominant marker system (Mather, Measurement of Linkage in Heredity: Methuen and Co., (1938), the entirety of which is herein incorporated by reference). In the case of dominant markers, progeny tests (e.g., F₃, BCF₂) are required to identify the heterozygotes, thus making it equivalent to a completely classified F₂ population. However, this procedure is often prohibitive because of the cost and time involved in progeny testing. Progeny testing of F₂ individuals is often used in map construction where phenotypes do not consistently reflect genotype (e.g., disease resistance) or where trait expression is controlled by a QTL. Segregation data from progeny test populations (e.g., F₃ or BCF₂) can be used in map construction. Marker-assisted selection can then be applied to cross progeny based on marker-trait map associations (F₂, F₃), where linkage groups have not been completely disassociated by recombination events (i.e., maximum disequilibrium).

[0108] Recombinant inbred lines (RIL) (genetically related lines; usually >F₅, developed from continuously selfing F₂ lines towards homozygosity) can be used as a mapping population. Information obtained from dominant markers can be maximized by using RIL because all loci are homozygous or nearly so. Under conditions of tight linkage (i.e., about <10% recombination), dominant and co-dominant markers evaluated in RIL populations provide more information per individual than either marker type in backcross populations (Reiter, Proc. Natl. Acad. Sci. (U.S.A.) 89:1477-1481 (1992). However, as the distance between markers becomes larger (i.e., loci become more independent), the information in RIL populations decreases dramatically when compared to codominant markers.

[0109] Backcross populations (e.g., generated from a cross between a successful variety (recurrent parent) and another variety (donor parent) carrying a trait not present in the former) can be utilized as a mapping population. A series of backcrosses to the recurrent parent can be made to recover most of its desirable traits. Thus a population is created consisting of individuals nearly like the recurrent parent but each individual carries varying amounts or mosaic of genomic regions from the donor parent. Backcross populations can be useful for mapping dominant markers if all loci in the recurrent parent are homozygous and the donor and recurrent parent have contrasting polymorphic marker alleles (Reiter et al., Proc. Natl. Acad. Sci. (U.S.A.) 89:1477-1481 (1992). Information obtained from backcross populations using either codominant or dominant makers is less than that obtained from F₂ populations because one, rather than two, recombinant gametes are sampled per plant. Backcross populations, however, are more informative (at low marker saturation) when compared to RILs as the distance between linked loci increases in RIL populations (i.e., about 0.15% recombination). Increased recombination can be beneficial for resolution of tight linkages, but may be undesirable in the construction of maps with low marker saturation.

[0110] Near-isogenic lines (NIL)(created by many backcrosses to produce an array of individuals that are nearly identical in genetic composition except for the trait or genomic region under interrogation) can be used as a mapping population. In mapping with NILs, only a portion of the polymorphic loci are expected to map to a selected region.

[0111] Bulk segregant analysis (BSA) is a method developed for the rapid identification of linkage between markers and traits of interest (Michelmore, et al., Proc. Natl. Acad. Sci. (U.S.A.) 88:9828-9832 (1991). In BSA, two bulked DNA samples are drawn from a segregating population originating from a single cross. These bulks contain individuals that are identical for a particular trait (resistant or susceptible to particular disease) or genomic region but arbitrary at unlinked regions (i.e., heterozygous). Regions unlinked to the target region will not differ between the bulked samples of many individuals in BSA.

[0112] Applications for markers in plant breeding include: Quantitative Trait Loci (QTL) mapping (Edwards et al, Genetics 116:113-115 (1987), the entirety of which is herein incorporated by reference); Nienhuis et al, Crop Sci. 27:797-803 (1987); Osborn et al, Theor. Appl. Genet. 73:350-356 (1987); Romero-Severson et al, Use of RFLPs In Analysis of Quantitative Trait Loci In Maize, In Helentjaris and Burr (eds.) pp. 97-102 (1989), the entirety of which is herein-incorporated by reference; Young et al, Genetics 120:570-585 (1988), the entirety of which is herein incorporated by reference; Martin et al, Science 243:1725-1728 (1989), the entirety of which is herein incorporated by reference): Sarfatti et al., Theor. Appl Genet. 78:22-26 (1989), the entirety of which is herein incorporated by reference; Tanksley, et al., Biotech. 7:257-264 (1989); Barone et al, Mol. Gen. Genet. 224:177-182 (1990), the entirety of which is herein incorporated by reference); Jung et al, Theor, Appl. Genet. 79:663-672 (1990), the entirety of which is herein incorporated by reference; Keim et al, Genetics 126:735-742 (1990), the entirety of which is herein incorporated by reference, Theor. Appl. Genet. 79:465-369 (1990), the entirety of which is herein incorporated by reference; Paterson et al., Genetics 124:735-742 (1990), the entirety of which is herein incorporated by reference; Martin et al, Proc. Natl. Acad. Sci. (U.S.A.) 88:2336-2340 (1991), the entirety of which is herein incorporated by reference; Messeguer et al, Theor. Appl. Genet. 82:529-536 (1991), the entirety of which is herein incorporated by reference; Michelnore et al, Proc Natl. Acad. Sci. (U.S.A.) 88:9828-9832 (1991), the entirety of which is herein incorporated by reference; Ottaviano et al, Theor. Appl. Genet. 81:713-719 (1991), the entirety of which is herein incorporated by reference; Yu et al, Theor. Appl. Genet. 81:471-476 (1991), the entirety of which is herein incorporated by reference; Diers et al, Crop Sci. 32:77-383 (1992), the entirety of which is herein incorporated by reference, Theor. Appl. Genet. 83:608-612 (1992), the entirety of which is herein incorporated by reference, J. Plant Nut. 15:2127-2136 (1992), the entirety of which is herein incorporated by reference; Doebley et al, Proc. Natl. Acad. Sci. (U.S.A.) 87:9888-9892 (1990), the entirety of which is herein incorporated by reference), screening genetic resource strains for useful quantitative trait alleles and introgression of these alleles into commercial varieties (Beckmann and Soller, Theor. Appl. Genet. 67:35-43 (1983), the entirety of which is herein incorporated by reference; Tanksley et al, (1989) the entirety of which is incorporated by reference), or the mapping of mutations (Rafalski, et al., In: Nonmammalian Genomic Analysis, ed. Birren and Lai, Academic Press, San Diego, Calif., pp. 75-134 (1996). Additionally, markers can be used to characterize transformants or germplasm, as a genetic diagnostic test for plant breeding or to identify individuals or varieties (Soller and Beckmann, Theor. Appl. Genet. 67:25-33 (1983), the entirety of which is herein incorporated by reference; Tanksley et al, 1989). Markers also can be used to obtain information about: (1) the number, effect, and chromosomal location of each gene affecting a trait; (2) effects of multiple copies of individual genes (gene dosage); (3) interaction between/among genes controlling a trait (epistasis); (4) whether individual genes affect more than one trait (pleiotropy); and (5) stability of gene function across environments (G×E interactions).

[0113] It is understood that one or more of the nucleic acid molecules of the present invention may in one embodiment be used as markers in genetic mapping. In a preferred embodiment, nucleic acid molecules of the present invention may in one embodiment be used as markers with Glycine max.

[0114] The nucleic acid molecules of the present invention may be used for physical mapping. Physical mapping, in conjunction with linkage analysis, can enable the isolation of genes. Physical mapping has been reported to identify the markers closest in terms of genetic recombination to a gene target for cloning. Once a DNA marker is linked to a gene of interest, the chromosome walking technique can be used to find the genes via overlapping clones. For chromosome walking, random molecular markers or established molecular linkage maps are used to conduct a search to localize the gene adjacent to one or more markers. A chromosome walk (Bukanov and Berg, Mo. Microbiol, 11:509-523 (1994), the entirety of which is herein incorporated by reference; Birkenbihl and Vielmetter Nucleic Acids Res. 17:5057-5069 (1989), the entirety of which is herein incorporated by reference; Wenzel and Herrmann, Nucleic Acids Res. 16:8323-8336, (1988), the entirety of which is herein incorporated by reference) is then initiated from the closest linked marker. Starting from the selected clones, labeled probes specific for the ends of the insert DNA are synthesized and used as probes in hybridizations against a representative library. Clones hybridizing with one of the probes are picked and serve as templates for the synthesis of new probes; by subsequent analysis, contigs are produced.

[0115] The degree of overlap of the hybridizing clones used to produce a contig can be determined by comparative restriction analysis. Comparative restriction analysis can be carried out in different ways all of which exploit the same principle; two clones of a library are very likely to overlap if they contain a limited number of restriction sites for one or more restriction endonucleases located at the same distance from each other. The most frequently used procedures are, fingerprinting (Coulson et al, Proc. Natl. Acad. Sci. (U.S.A.) 83:7821-7821, (1986), the entirety of which is herein incorporated by reference); Knott et al., Nucleic Acids Res. 16:2601-2612 (1988), the entirety of which is herein incorporated by reference; Eiglmeier et al., Mol. Microbiol. 7(2): 197-206 (1993), the entirety of which is herein incorporated by reference, 1993), restriction fragment mapping (Smith and Birnstiel, Nucleic Acids Res. 3:2387-2398 (1976), the entirety of which is herein incorporated by reference, or the “landmarking” technique (Charlebois et al., J. Mol. Biol. 222:509-524 (1991), the entirety of which is herein incorporated by reference

[0116] To generate a physical map of a genome with BACs using the fingerprinting technique, a BAC library containing a number of clones equivalent to 4×-20× haploid genome can be used. (Zhang and Wing., Plant Mol. Bio. 35:115-127 (1997)). For example, BAC DNA can be purified with the conventional alkaline lysis procedure as used for plasmid DNA purification, digested with the restriction enzyme used for construction of the BAC libraries and end-labeled with ³²P-dATP, digested with Sau3AI and fractionated on a denaturing polyacrylamide gel. The gel is dried to chromatography paper and exposed to X-ray film. Fingerprints are scanned and then converted into database records, according to the positions of each band relative to the bands of the closest molecular-weight marker on a gel. The incoming database of fingerprints are first compared against each other to assemble contigs if overlapped, and then compared against all existing databases to place the incoming BACs and BAC contigs in established contigs if overlapped. The physical length of a contig in kb is estimated according to the number of restriction sites of the enzyme used for the first digestion prior to fragment end labeling

[0117] Restriction analysis of a certain clone can be carried out, for example, according to a method originally described by Smith and Berstiel, Nucleic Acids Res. 3:2387-2398 (1976), First, the number and size of cloned restriction fragments to be mapped are determined by complete digestion and agarose gel electrophoresis. Then, the clone is linearized at a unique restriction site outside of the cloned DNA. Aliquots of the linearized molecules are digested to different extents with the enzyme selected for mapping. These partially cut samples are separated on agarose gels, blotted, and hybridized to a labeled fragment of vector DNA. This probe is derived entirely from one side or the other of the unique site used to linearize the clone.

[0118] The results show a ladder of DNA fragments that have the same unique end. By repeating these analyses in pairs with all the neighboring intermediate DNA fragments, the correct order of restriction fragments as well as the orientation of the cloned insert can be deduced. The order of restriction fragments produced by restriction enzymes other than the cloning enzyme can be determined similarly. Fragment data from different enzymes are then combined by a computer program and compared with the alignments of other clones of the library (Kohara et al., Cell 50:495-508 (1987), the entirety of which is herein incorporated by reference).

[0119] The landmarking technique can be carried out without any labeling and relies on agarose gel analysis. Clones are first digested preferably with a 6 bp specific endonuclease A, if possible with the original clone enzyme. Clones are then digested with a second endonuclease B. Endonuclease B is chosen based on its ability to cut rarely in the genome, for example, on average only once in 30 kbp. Of the fragments generated by digestion of one clone with enzyme A, statistically only a small number (between zero and three fragments) will also be cut by enzyme B. The very specific pattern of those fragments which are produced by double digestion are easily recognized. Any of these fragments which have a restriction site for the rarely cutting endonuclease is called a “landmark” Generally one common landmark is sufficient for defining two overlapping clones.

[0120] Alternatively to chromosome walking and the associated comparative restriction analyses methods, chromosome landing also has been reported to be used to locate a gene of interest (Tanksley et al., Trends in Genetics 11(2):63-68 (1995), the entirety of which is herein incorporated by reference. For chromosome landing, a DNA marker is isolated at a physical distance from the targeted gene. High resolution linkage analysis is used to identify such a marker that cosegregates with the gene. The marker is isolated at a distance that is less than the average insert size of the genomic library used for clone isolation. The DNA marker is then used to screen the library and isolate (or “land” on) the clone containing the gene without chromosome walking. Genome coverage of a library can also be determined by cross-hybridization of individual large insert clones by screening a BAC library with single copy RFLP markers distributed randomly across the genome by hybridization. To assure accuracy of the physical map, the markers should be single-copy or of single-locus origin, if multiple-copy.

[0121] Chromosome landing of large-insert clones using chromosome-specific DNA markers such as STSs microsatellites, RFLPs, or other markers can correlate physical and genetic maps (Zwick et al., Genetics 148:1983-1992 (1998), the entirety of which is herein incorporated by reference in its entirety). These strategies include chromosome landing of BACs containing markers or BAC contigs by BAC-FISH (Fluorescent In Situ Hybridization), a technique that involves tagging the DNA marker with an observable label. BAC clones giving positive hybridization signals are individually analyzed by FISH to metaphase chromosome spreads. The location of the labeled probe can be detected after it binds to its complementary DNA strand in an intact chromosome. The FISH of a BAC selected from a BAC contig will directly place the BAC contig to a specific chromosome region and establish a linkage relationships of the BAC contig to another BAC contig.

[0122] Likewise, BACs and STCs of the present invention can be used for contig mapping (Venter, et al., Nature, 381:364-366 (1996), the entirety of which is herein incorporated by reference). A “seed” BAC insert can be sequenced and then STCs and the corresponding BAC of each STC can be placed on the sequenced insert using the BLASTN program. Marker or gene containing STCs can be determined by the BLASTN program and their corresponding BACs can be hybridized to specific chromosomes using BAC-FISH (Zwick et al., Genetics 148:1983-1992 (1998)).

[0123] STCs can be used to identify a minimum tiling path of BACs by computational procedures. Any nucleation sequence (the sequence of an entire BAC, for example) can be electronically compared to a database of STCs to identify the next clones to be sequenced to maximally extend a contig. Chosen STCs need to occupy correct positions in the tiling path. Several factors can contribute to errors in the positioning and selection of these clones. An STC that contains all or part of a repetitive element can appear to align at any part of the growing mosaic which contains that element. One method of selecting the appropriate BAC is to mask out all sections of DNA sequence which are known to be repetitive elements. The sequence symbols of these section are replaced with Ns. These sections of DNA are not used to align the STC. STCs which are completely comprised of Ns are discarded. In this way, the unmasked sections of DNA may be aligned against the growing mosaic without misplacing them due to redundant sequence. A program publicly available, PowerBLAST includes a number of options for masking repetitive elements and low complexity subsequences (Zhang and Madden, Genome Res. 7:649-56 (1997), the entirety of which is herein incorporated by reference. cDNA and genomic libraries also can be used as probe sources, thus directly combining the ordering of the genomic DNA with the localization of transcribed sequences. By a simultaneous hybridization to the genomic and back to the transcriptional libraries, results are produced on sequence homologies between transcribed sequences.

[0124] It is understood that the nucleic acid molecules of the present invention may in one embodiment be used in physical mapping. In a preferred embodiment, nucleic acid molecules of the present invention may in one embodiment be used in the physical mapping of Glycine max.

[0125] Nucleic acid molecules of the present invention can be used in comparative mapping (physical and genetic). Comparative mapping within families provides a method to the degree of sequence conservation, gene order, ploidy of species, ancestral relationships and the rates at which individual genomes are evolving. Comparative mapping has been carried out by cross-hybridizing molecular markers across species within a given family. As in genetic mapping, molecular markers are needed but instead of direct hybridization to mapping filters, the markers are used to select large insert clones from a total genomic DNA library of a related species. The selected clones, each a representative of a single marker, can then be used to physically map the region in the target species. The advantage of this method for comparative mapping is that no mapping population or linkage map of the target species is needed and the clones may also be used in other closely related species. By comparing the results obtained by genetic mapping in model plants, with those from other species, similarities of genomic structure among plants species can be established. Cross-hybridization of RFLP markers have been reported and conserved gene order has been established in many studies. Such macroscopic synteny is utilized for the estimation of correspondence of loci among these crops. These loci include not only Mendelian genes but also Quantitative Trait Loci (QTL) (Mohan et al., Molecular Breeding 3:87-103 (1997), the entirety of which is herein incorporated by reference.

[0126] It is understood that markers of the present invention may in another embodiment be used in comparative mapping. In a preferred embodiment the markers of present invention may be used in the comparative mapping of Glycine clandestina, Glycine gracilis, Glycine soja, Glycine tomentella, and Glycine tabaina

[0127] The nucleic acid molecules of the present invention can be used to identify polymorphisms. In one embodiment, one or more of the STC nucleic acid molecules or a BAC nucleic acid molecule (or a sub-fragment of either) may be employed as a marker nucleic acid molecule to identify such polymorphism(s). Alternatively, such polymorphisms can be detected through the use of a marker nucleic acid molecule or a marker protein that is genetically linked to (i.e., a polynucleotide that co-segregates with) such polymorphism(s).

[0128] In an alternative embodiment, such polymorphisms can be detected through the use of a marker nucleic acid molecule that is physically linked to such polymorphism(s). For this purpose, marker nucleic acid molecules comprising a nucleotide sequence of a polynucleotide located within 1 mb of the polymorphism(s), and more preferably within 100 kb of the polymorphism(s), and most preferably within 10 kb of the polymorphism(s) can be employed.

[0129] The genomes of animals and plants naturally undergo spontaneous mutation in the course of their continuing evolution (Gusella, Ann. Rev. Biochem. 55:831-854 (1986)). A “polymorphism” is a variation or difference in the sequence of the gene or its flanking regions that arises in some of the members of a species. The variant sequence and the “original” sequence co-exist in the species' population. In some instances, such co-existence is in stable or quasi-stable equilibrium.

[0130] A polymorphism is thus said to be “allelic,” in that, due to the existence of the polymorphism, some members of a species may have the original sequence (i.e., the original “allele”) whereas other members may have the variant sequence (i.e., the variant “allele”). In the simplest case, only one variant sequence may exist, and the polymorphism is thus said to be di-allelic. In other cases, the species' population may contain multiple alleles, and the polymorphism is termed tri-allelic, etc. A single gene may have multiple different unrelated polymorphisms. For example, it may have a di-allelic polymorphism at one site, and a multi-allelic polymorphism at another site.

[0131] The variation that defines the polymorphism may range from a single nucleotide variation to the insertion or deletion of extended regions within a gene. In some cases, the DNA sequence variations are in regions of the genome that are characterized by short tandem repeats (STRS) that include tandem di- or tri-nucleotide repeated motifs of nucleotides. Polymorphisms characterized by such tandem repeats are referred to as “variable number tandem repeat” (“VNTR”) polymorphisms. VNTRs have been used in identity analysis (Weber, U.S. Pat. No. 5,075,217; Armour, et al., FEBS Lett. 307:113-115 (1992); Jones, et al., Eur. J. Haematol. 39:144-147 (1987); Horn, et al., PCT Application WO91/14003; Jeffreys, European Patent Application 370,719; Jeffreys, U.S. Pat. No. 5,175,082; Jeffreys et al., Amer. J. Hum. Genet. 39:11-24 (1986); Jeffreys et al., Nature 316:76-79 (1985); Gray, et al., Proc. R. Acad. Soc. Lond. 243:241-253 (1991); Moore, et al., Genomics 10:654-660 (1991); Jeffreys, et al., Anim. Genet. 18:1-15 (1987); Hillel, et al., Anim. Genet. 20:145-155 (1989); Hillel, et al., Genet. 124:783-789 (1990), all of which are herein incorporated by reference in their entirety).

[0132] The detection of polymorphic sites in a sample of DNA may be facilitated through the use of nucleic acid amplification methods. Such methods specifically increase the concentration of polynucleotides that span the polymorphic site, or include that site and sequences located either distal or proximal to it. Such amplified molecules can be readily detected by gel electrophoresis or other means.

[0133] The most preferred method of achieving such amplification employs the polymerase chain reaction (“PCR”) (Mullis, et al., Cold Spring Harbor Symp. Quant. Biol. 51:263-273 (1986); Erlich, et al., European Patent Appln. 50,424; European Patent Appln. 84,796, European Patent Application 258,017, European Patent Appln. 237,362; Mullis, European Patent Appln. 201,184; Mullis, et al., U.S. Pat. No. 4,683,202; Erlich., U.S. Pat. No. 4,582,788; and Saiki, et al., U.S. Pat. No. 4,683,194, all of which are herein incorporated by reference), using primer pairs that are capable of hybridizing to the proximal sequences that define a polymorphism in its double-stranded form.

[0134] In lieu of PCR, alternative methods, such as the “Ligase Chain Reaction” (“LCR”) may be used (Barany, Proc. Natl. Acad. Sci. (U.S.A.) 88:189-193 (1991), the entirety of which is herein incorporated by reference. LCR uses two pairs of oligonucleotide probes to exponentially amplify a specific target. The sequences of each pair of oligonucleotides is selected to permit the pair to hybridize to abutting sequences of the same strand of the target. Such hybridization forms a substrate for a template-dependent ligase. As with PCR, the resulting products thus serve as a template in subsequent cycles and an exponential amplification of the desired sequence is obtained.

[0135] LCR can be performed with oligonucleotides having the proximal and distal sequences of the same strand of a polymorphic site. In one embodiment, either oligonucleotide will be designed to include the actual polymorphic site of the polymorphism. In such an embodiment, the reaction conditions are selected such that the oligonucleotides can be ligated together only if the target molecule either contains or lacks the specific nucleotide that is complementary to the polymorphic site present on the oligonucleotide. Alternatively, the oligonucleotides may be selected such that they do not include the polymorphic site (see, Segev, PCT Application WO 90/01069, the entirety of which is herein incorporated by reference).

[0136] The “Oligonucleotide Ligation Assay” (“OLA”) may alternatively be employed (Landegren, et al., Science 241:1077-1080 (1988), the entirety of which is herein incorporated by reference). The OLA protocol uses two oligonucleotides which are designed to be capable of hybridizing to abutting sequences of a single strand of a target. OLA, like LCR, is particularly suited for the detection of point mutations. Unlike LCR, however, OLA results in “linear” rather than exponential amplification of the target sequence.

[0137] Nickerson, et al. have described a nucleic acid detection assay that combines attributes of PCR and OLA (Nickerson, et al., Proc. Natl. Acad. Sci. (U.S.A.) 87:8923-8927 (1990), the entirety of which is herein incorporated by reference). In this method, PCR is used to achieve the exponential amplification of target DNA, which is then detected using OLA. In addition to requiring multiple, and separate, processing steps, one problem associated with such combinations is that they inherit all of the problems associated with PCR and OLA.

[0138] Schemes based on ligation of two (or more) oligonucleotides in the presence of nucleic acid having the sequence of the resulting “di-oligonucleotide”, thereby amplifying the di-oligonucleotide, are also known (Wu, et al., Genomics 4:560 (1989), the entirety of which is herein incorporated by reference), and may be readily adapted to the purposes of the present invention.

[0139] Other known nucleic acid amplification procedures, such as allele-specific oligomers, branched DNA technology, transcription-based amplification systems, or isothermal amplification methods may also be used to amplify and analyze such polymorphisms (Malek, et al., U.S. Pat. No. 5,130,238; Davey, et al., European Patent Application 329,822; Schuster et al., U.S. Pat. No. 5,169,766; Miller, et al., PCT Application WO 89/06700; Kwoh, et al., Proc. Natl. Acad. Sci. (U.S.A.) 86:1173-1177 (1989); Gingeras, et al., PCT Application WO 88/10315; Walker, et al., Proc. Natl. Acad. Sci. (U.S.A.) 89:392-396 (1992), all of which are herein incorporated by reference in their entirety).

[0140] The identification of a polymorphism can be determined in a variety of ways. By correlating the presence or absence of it in an plant with the presence or absence of a phenotype, it is possible to predict the phenotype of that plant. If a polymorphism creates or destroys a restriction endonuclease cleavage site, or if it results in the loss or insertion of DNA (e.g., a VNTR polymorphism), it will alter the size or profile of the DNA fragments that are generated by digestion with that restriction endonuclease. As such, individuals that possess a variant sequence can be distinguished from those having the original sequence by restriction fragment analysis. Polymorphisms that can be identified in this manner are termed “restriction fragment length polymorphisms” (“RFLPs”). RFLPs have been widely used in human and plant genetic analyses (Glassberg, UK Patent Application 2135774; Skolnick, et al., Cytogen. Cell Genet. 32:58-67 (1982); Botstein, et al., Ann. J. Hum. Genet. 32:314-331 (1980); Fischer, et al. (PCT Application WO90/13668); Uhlen, PCT Application WO90/11369).

[0141] Polymorphisms can also be identified by Single Strand Conformation Polymorphism (SSCP) analysis. The SSCP technique is a method capable of identifying most sequence variations in a single strand of DNA, typically between 150 and 250 nucleotides in length (Elles, Methods in Molecular Medicine: Molecular Diagnosis of Genetic Diseases, Humana Press (1996), the entirety of which is herein incorporated by reference); Orita et al., Genomics 5:874-879 (1989), the entirety of which is herein incorporated by reference). Under denaturing conditions a single strand of DNA will adopt a conformation that is uniquely dependent on its sequence conformation. This conformation usually will be different, even if only a single base is changed. Most conformations have been reported to alter the physical configuration or size sufficiently to be detectable by electrophoresis. A number of protocols have been described for SSCP including, but not limited to Lee et al., Anal. Biochem. 205:289-293 (1992), the entirety of which is herein incorporated by reference; Suzuki et al., Anal. Biochem. 192:82-84 (1991), the entirety of which is herein incorporated by reference; Lo et al., Nucleic Acids Research 20:1005-1009 (1992), the entirety of which is herein incorporated by reference; Sarkar et al., Genomics 13:441-443 (1992), the entirety of which is herein incorporated by reference). It is understood that one or more of the nucleic acids of the present invention, may be utilized as markers or probes to detect polymorphisms by SSCP analysis.

[0142] Polymorphisms may also be found using a DNA fingerprinting technique called amplified fragment length polymorphism (AFLP), which is based on the selective PCR amplification of restriction fragments from a total digest of genomic DNA to profile that DNA. Vos, et al., Nucleic Acids Res. 23:4407-4414 (1995), the entirety of which is herein incorporated by reference. This method allows for the specific co-amplification of high numbers of restriction fragments, which can be visualized by PCR without knowledge of the nucleic acid sequence.

[0143] AFLP employs basically three steps. Initially, a sample of genomic DNA is cut with restriction enzymes and oligonucleotide adapters are ligated to the restriction fragments of the DNA. The restriction fragments are then amplified using PCR by using the adapter and restriction sequence as target sites for primer annealing. The selective amplification is achieved by the use of primers that extend into the restriction fragments, amplifying only those fragments in which the primer extensions match the nucleotide flanking the restriction sites. These amplified fragments are then visualized on a denaturing polyacrylamide gel.

[0144] AFLP analysis has been performed on Salix (Beismann, et al., Mol. Ecol. 6:989-993 (1997), the entirety of which is herein incorporated by reference); Acinetobacter (Janssen, et al., Int. J. Syst. Bacteriol 47:1179-1187 (1997), the entirety of which is herein incorporated by reference), Aeromonas popoffi (Huys, et al., Int. J. Syst. Bacteriol. 47:1165-1171 (1997), the entirety of which is herein incorporated by reference), rice (McCouch, et al., Plant Mol. Biol. 35:89-99 (1997), the entirety of which is herein incorporated by reference); Nandi, et al., Mol. Gen. Genet. 255:1-8 (1997); Cho, et al., Genome 39:373-378 (1996), herein incorporated by reference), barley (Hordeum vulgare) (Simons, et al., Genomics 44:61-70 (1997), the entirety of which is herein incorporated by reference; Waugh, et al., Mol. Gen. Genet. 255:311-321 (1997), the entirety of which is herein incorporated by reference; Qi, et al., Mol. Gen. Genet. 254:330-336 (1997), the entirety of which is herein incorporated by reference; Becker, et al., Mol. Gen. Genet. 249:65-73 (1995), the entirety of which is herein incorporated by reference), potato (Van der Voort, et al., Mol. Gen. Genet. 255:438-447 (1997), the entirety of which is herein incorporated by reference; Meksem, et al., Mol. Gen. Genet. 249:74-81 (1995), the entirety of which is herein incorporated by reference), Phytophthora infestans (Van der Lee, et al., Fungal Genet. Biol. 21:278-291 (1997), the entirety of which is herein incorporated by reference), Bacillus anthracis (Keim, et al., J. Bacteriol. 179:818-824 (1997)), Astragalus cremnophylax (Travis, et al., Mol. Ecol. 5:735-745 (1996), the entirety of which is herein incorporated by reference), Arabidopsis (Cnops, et al., Mol. Gen. Genet. 253:32-41 (1996), the entirety of which is herein incorporated by reference), Escherichia coli (Lin, et al., Nucleic Acids Res. 24:3649-3650 (1996), the entirety of which is herein incorporated by reference), Aeromonas (Huys, et al., Int. J. Syst. Bacteriol. 46:572-580 (1996), the entirety of which is herein incorporated by reference), nematode (Folkertsma, et al., Mol. Plant. Microbe Interact. 9:47-54 (1996), the entirety of which is herein incorporated by reference), tomato (Thomas, et al., Plant J. 8:785-794 (1995), the entirety of which is herein incorporated by reference), and human (Latorra, et al., PCR Methods Appl. 3:351-358 (1994) the entirety of which is herein incorporated by reference). AFLP analysis has also been used for fingerprinting mRNA (Money, et al., Nucleic Acids Res. 24:2616-2617 (1996), the entirety of which is herein incorporated by reference; Bachem, et al., Plant J. 9:745-753 (1996), the entirety of which is herein incorporated by reference). It is understood that one or more of the nucleic acid molecules of the present invention, may be utilized as markers or probes to detect polymorphisms by AFLP analysis for fingerprinting mRNA.

[0145] Polymorphisms may also be found using random amplified polymorphic DNA (RAPD) (Williams et al., Nucl. Acids Res. 18:6531-6535 (1990), the entirety of which is herein incorporated by reference) and cleavable amplified polymorphic sequences (CAPS) (Lyamichev et al., Science 260:778-783 (1993), the entirety of which is herein incorporated by reference). It is understood that one or more of the nucleic acid molecules of the present invention, may be utilized as markers or probes to detect polymorphisms by RAPD or CAPS analysis.

[0146] Nucleic acid molecules of the present invention can be used to monitor expression. A microarray-based method for high-throughput monitoring of plant gene expression may be utilized to measure gene-specific hybridization targets. This ‘chip’-based approach involves using microarrays of nucleic acid molecules as gene-specific hybridization targets to quantitatively measure expression of the corresponding plant genes (Schena et al., Science 270:467-470 (1995), the entirety of which is herein incorporated by reference; Shalon, Ph.D. Thesis. Stanford University (1996), the entirety of which is herein incorporated by reference). Every nucleotide in a large sequence can be queried at the same time. Hybridization can be used to efficiently analyze nucleotide sequences.

[0147] Several microarray methods have been described. One method compares the sequences to be analyzed by hybridization to a set of oligonucleotides or cDNA molecules representing all possible subsequences (Bains and Smith, J. Theor. Biol. 135:303 (1989), the entirety of which is herein incorporated by reference). A second method hybridizes the sample to an array of oligonucleotide or cDNA probes. An array consisting of oligonucleotides or cDNA molecules complementary to subsequences of a target sequence can be used to determine the identity of a target sequence, measure its amount, and detect differences between the target and a reference sequence. Nucleic acid molecule microarrays may also be screened with protein molecules or fragments thereof to determine nucleic acid molecules that specifically bind protein molecules or fragments thereof.

[0148] Additionally, microarrays of BACs may be prepared to sufficiently cover 3× of an entire genome. Such microarrays can be used in a variety of genomics experiments including gene mapping, DNA fingerprinting and promoter identification. Microarrays of genomic DNA can also be used for parallel analysis of genomes at single gene resolution (Lemieux et al., Molecular Breeding 277-289 (1988), the entirety of which is herein incorporated by reference). It is understood that one or more of the molecules of the present invention, preferably one or more of the nucleic acid molecules or protein molecules or fragments thereof of the present invention may be utilized in a genomic microarray based method. In a preferred embodiment of the present invention, one or more of the Glycine max nucleic acid molecules or protein molecules or fragments thereof of the present invention may be utilized in a genomic microarray based method. For example, Genomic Mismatch Scanning (GMS), a hybridization-based method of linkage analysis that allows rapid identification of regions of identity-by-descent between two related individuals, can be carried out with microarrays. GMS is reported to have been used to identify genetically common chromosomal segments based on the ability of these DNA sequences to form extensive regions of mismatch-free heteroduplexes. A series of enzymatic steps, coupled with filter binding, is used to selectively remove heteroduplexes that contain mismatches (i.e., chromosomal regions that do not share identity-by descent). Fragments of chromosomal DNA representing inherited regions are hybridized to a microarray of ordered genomic clones and positive hybridization signals pinpoint regions of identity-by-descent at high resolution (Lemieux et al., Molecular Breeding 277-289 (1988))

[0149] It is understood that one or more of the molecules of the present invention, preferably one or more of the nucleic acid molecules or protein molecules or fragments thereof of the present invention may be utilized in a GMS microarray based method to locate regions of identity-by-descent between related individuals. In a preferred embodiment of the present invention, one or more of the Glycine max nucleic acid molecules or protein molecules or fragments thereof of the present invention may be utilized in a GMS microarray based method to locate regions of identity-by-descent between related individuals. The GMS microarray approach can also be used as a tool to map mutigenic traits. For example, in yeast, the entire genomic sequence is known and it has been reported that the genes responsible for growth at elevated temperature, a trait required for the pathogenicity of certain yeast strains, may be determined using GMS (Lemieux et al, Molecular Breeding 277-289 (1988)). By analyzing the inheritance of large numbers of tetrads derived from crosses of pathogenic and wild type strains, all the genes responsible for a yeast strain's ability to grow at 42° C., for example, could be identified.

[0150] It is understood that one or more of the molecules of the present invention, preferably one or more of the nucleic acid molecules or protein molecules or fragments thereof of the present invention may be utilized in a GMS microarray based method to map multigenic traits. In a preferred embodiment of the present invention, one or more of the Glycine max nucleic acid molecules or protein molecules or fragments thereof of the present invention may be utilized in a GMS microarray based method to map multigenic traits.

[0151] Plant repeat elements may be used with GMS microarraying to identify species specific chromosomes in another species background. For example, the maize genome contains moderately repetitive DNA sequences (ZLRS) representing about 2500 copies per haploid genome; these sequences are present in the genus Zea and absent in other graminaceous species. Ananiev et al., (Proc. Natl. Acad. Sci. (U.S.A.) 94:3526-3529 (1997), all of which are herein incorporated by reference in their entirety) have reported unusual plants with individual maize chromosomes added to a complete oat genome generated by embryo rescue from oat (Avena sativa)×Zea mays crosses. By using highly repetitive maize-specific sequences as probes, Ananiev et al. (1997) were able to selectively isolate cosmid clones containing maize genomic DNA.

[0152] It is understood that one or more of the molecules of the present invention, preferably one or more of the nucleic acid molecules or protein molecules or fragments thereof of the present invention may be utilized in a GMS microarray based method using repeat elements to selectively isolate clones containing species specific DNA. In a preferred embodiment of the present invention, one or more of the Glycine max nucleic acid molecules or protein molecules or fragments thereof of the present invention may be utilized in a GMS microarray based method to selectively isolate clones containing species specific DNA. A particular preferred microarray embodiment of the present invention is a microarray comprising nucleic acid molecules encoding genes that are homologues of known genes or nucleic acid molecules that comprise genes or fragments thereof that elicit only limited or no matches to known genes. A further preferred microarray embodiment of the present invention is a microarray comprising nucleic acid molecules encoding genes or fragments thereof that are homologues of known genes and nucleic acid molecules that comprise genes or fragments thereof that elicit only limited or no matches to known genes. A further preferred microarray embodiment of the present invention is a microarray comprising nucleic acid molecules encoding genes or fragments thereof that elicit only limited or no matches to known genes.

[0153] It is understood that one or more of the molecules of the present invention, preferably one or more of the nucleic acid molecules or protein molecules or fragments thereof of the present invention may be utilized in a microarray based method. In a preferred embodiment of the present invention, one or more of the Glycine max nucleic acid molecules or protein molecules or fragments thereof of the present invention set forth in Table 1 of U.S. application Ser. No. 09/552,087 may be utilized in a microarray based method.

[0154] Nucleic acid molecules of the present invention may be used in site directed mutagenesis. Site-directed mutagenesis may be utilized to modify nucleic acid sequences, particularly as it is a technique that allows one or more of the amino acids encoded by a nucleic acid molecule to be altered (e.g. a threonine to be replaced by a methionine). Three basic methods for site-directed mutagenesis are often employed. These are cassette mutagenesis (Wells et al., Gene 34:315-23 (1985), the entirety of which is herein incorporated by reference), primer extension (Gilliam et al., Gene 12:129-137 (1980), the entirety of which is herein incorporated by reference); Zoller and Smith, Methods Enzymol. 100:468-500 (1983), the entirety of which is herein incorporated by reference; and Dalbadie-McFarland et al., Proc. Natl. Acad. Sci. (U.S.A.) 79:6409-6413 (1982), the entirety of which is herein incorporated by reference) and methods based upon PCR (Scharf et al., Science 233:1076-1078 (1986), the entirety of which is herein incorporated by reference; Higuchi et al., Nucleic Acids Res. 16:7351-7367 (1988), the entirety of which is herein incorporated by reference). Site-directed mutagenesis approaches are also described in European Patent 0 385 962, the entirety of which is herein incorporated by reference, European Patent 0 359 472, the entirety of which is herein incorporated by reference, and PCT Patent Application WO 93/07278, the entirety of which is herein incorporated by reference.

[0155] Site-directed mutagenesis strategies have been applied to plants for both in vitro as well as in vivo site-directed mutagenesis (Lanz et al., J. Biol. Chem. 266:9971-6 (1991), the entirety of which is herein incorporated by reference; Kovgan and Zhdanov, Biotekhnologiya 5:148-154, No. 207160n, Chemical Abstracts 110:225 (1989), the entirety of which is herein incorporated by reference; Ge et al., Proc. Natl. Acad. Sci. (U.S.A.) 86:4037-4041 (1989), the entirety of which is herein incorporated by reference, Zhu et al., J. Biol. Chem. 271:18494-18498 (1996), Chu et al., Biochemistry 33:6150-6157 (1994), the entirety of which is herein incorporated by reference, Small et al., EMBO J. 11:1291-1296 (1992), the entirety of which is herein incorporated by reference, Cho et al., Mol. Biotechnol. 8:13-16 (1997), Kita et al., J. Biol. Chem. 271:26529-26535 (1996), the entirety of which is herein incorporated by reference, Jin et al, Mol. Microbiol. 7:555-562 (1993), the entirety of which is herein incorporated by reference, Hatfield and Vierstra, J. Biol. Chem. 267:14799-14803 (1992), the entirety of which is herein incorporated by reference, Zhao et al., Biochemistry 31:5093-5099 (1992), the entirety of which is herein incorporated by reference).

[0156] Any of the nucleic acid molecules of the present invention may either be modified by site-directed mutagenesis or used as, for example, nucleic acid molecules that are used to target other nucleic acid molecules for modification. It is understood that mutants with more than one altered nucleotide can be constructed using techniques that practitioners skilled in the art are familiar with such as isolating restriction fragments and ligating such fragments into an expression vector (see, for example, Sambrook et al., Molecular Cloning: A Laboratory Manual, Cold Spring Harbor Press (1989)). In a preferred embodiment of the present invention, one or more of the Glycine max nucleic acid molecules or fragments thereof of the present invention may be modified by site-directed mutagenesis.

[0157] Nucleic acid molecules of the present invention may be used in transformation. Exogenous genetic material may be transferred into a plant cell and the plant cell regenerated into a whole, fertile or sterile plant. Exogenous genetic material is any genetic material, whether naturally occurring or otherwise, from any source that is capable of being inserted into any organism. In a preferred embodiment of the present invention the exogenous genetic material can include Glycine max genetic material. In a preferred embodiment of the present invention, the exogenous genetic material comprises a nucleic acid molecule of the present invention. Such genetic material may be transferred into either monocotyledons and dicotyledons including but not limited to the plants, Zea mays and Arabidopsis thaliana and soybean (See specifically, Chistou, Particle Bombardment for Genetic Engineering of Plants, pp. 63-69 (Zea mays), pp 50-60 (soybean), Biotechnology Intelligence Unit, Academic Press, San Diego, Calif. (1996), the entirety of which is herein incorporated by reference and generally Chistou, Particle Bombardment for Genetic Engineering of Plants, Biotechnology Intelligence Unit, Academic Press, San Diego, Calif. (1996), the entirety of which is herein incorporated by reference).

[0158] Transfer of a nucleic acid that encodes for a protein can result in overexpression of that protein in a transformed cell or transgenic plant. One or more of the proteins or fragments thereof encoded by nucleic acid molecules of the present invention may be overexpressed in a transformed cell or transformed plant. Such overexpression may be the result of transient or stable transfer of the exogenous material.

[0159] Exogenous genetic material may be transferred into a plant cell by the use of a DNA vector or construct designed for such a purpose. Vectors have been engineered for transformation of large DNA inserts into plant genomes. Vectors have been designed to replicate in both E. coli and A. tumefaciens and have all of the features required for transferring large inserts of DNA into plant chromosomes (Choi and Wing, http://genome.clemson.edu/protocols2-nj.html July, 1998). ApBACwich system has been developed to achieve site-directed integration of DNA into the genome. A 150 kb cotton BAC DNA is reported to have been transferred into a specific lox site in tobacco by biolistic bombardment and Cre-lox site specific recombination.

[0160] A construct or vector may include a plant promoter to express the protein or protein fragment of choice. A number of promoters which are active in plant cells have been described in the literature. These include the nopaline synthase (NOS) promoter (Ebert et al., Proc. Natl. Acad. Sci. (U.S.A.) 84:5745-5749 (1987), the entirety of which is herein incorporated by reference), the octopine synthase (OCS) promoter (which are carried on tumor-inducing plasmids of Agrobacterium tumefaciens), the caulimovirus promoters such as the cauliflower mosaic virus (CaMV) 19S promoter (Lawton et al., Plant Mol. Biol. 9:315-324 (1987), the entirety of which is herein incorporated by reference) and the CAMV 35S promoter (Odell et al., Nature 313:810-812 (1985), the entirety of which is herein incorporated by reference), the figwort mosaic virus 35S-promoter, the light-inducible promoter from the small subunit of ribulose-1,5-bis-phosphate carboxylase (ssRUBISCO), the Adh promoter (Walker et al., Proc. Natl. Acad. Sci. (U.S.A.) 84:6624-6628 (1987), the entirety of which is herein incorporated by reference), the sucrose synthase promoter (Yang et al., Proc. Natl. Acad. Sci. (U.S.A.) 87:4144-4148 (1990), the entirety of which is herein incorporated by reference), the R gene complex promoter (Chandler et al., The Plant Cell 1:1175-1183 (1989), the entirety of which is herein incorporated by reference), and the chlorophyll a/b binding protein gene promoter, etc. These promoters have been used to create DNA constructs which have been expressed in plants; see, e.g., PCT publication WO 84/02913, herein incorporated by reference in its entirety.

[0161] Promoters which are known or are found to cause transcription of DNA in plant cells can be used in the present invention. Such promoters may be obtained from a variety of sources such as plants and plant viruses. It is preferred that the particular promoter selected should be capable of causing sufficient expression to result in the production of an effective amount of protein to cause the desired phenotype. In addition to promoters which are known to cause transcription of DNA in plant cells, other promoters may be identified for use in the current invention by screening a plant cDNA library for genes which are selectively or preferably expressed in the target tissues or cells.

[0162] For the purpose of expression in source tissues of the plant, such as the leaf, seed, root or stem, it is preferred that the promoters utilized in the present invention have relatively high expression in these specific tissues. For this purpose, one may choose from a number of promoters for genes with tissue- or cell-specific or -enhanced expression. Examples of such promoters reported in the literature include the chloroplast glutamine synthetase GS2 promoter from pea (Edwards et al., Proc. Natl. Acad. Sci. (U.S.A.) 87:3459-3463 (1990), herein incorporated by reference in its entirety), the chloroplast fructose-1,6-biphosphatase (FBPase) promoter from wheat (Lloyd et al., Mol. Gen. Genet. 225:209-216 (1991), herein incorporated by reference in its entirety), the nuclear photosynthetic ST-LS1 promoter from potato (Stockhaus et al., EMBO J. 8:2445-2451 (1989), herein incorporated by reference in its entirety), the phenylalanine ammonia-lyase (PAL) promoter and the chalcone synthase (CHS) promoter from Arabidopsis thaliana. Also reported to be active in photosynthetically active tissues are the ribulose-1,5-bisphosphate carboxylase (RbcS) promoter from eastern larch (Larix laricina), the promoter for the cab gene, cab6, from pine (Yamamoto et al., Plant Cell Physiol. 35:773-778 (1994), herein incorporated by reference in its entirety), the promoter for the Cab-1 gene from wheat (Fejes et al., Plant Mol. Biol. 15:921-932 (1990), herein incorporated by reference in its entirety), the promoter for the CAB-1 gene from spinach (Lubberstedt et al., Plant Physiol. 104:997-1006 (1994), herein incorporated by reference in its entirety), the promoter for the cab1R gene from rice (Luan et al., Plant Cell. 4:971-981 (1992), the entirety of which is herein incorporated by reference), the pyruvate, orthophosphate dikinase (PPDK) promoter from Zea mays (Matsuoka et al., Proc. Natl. Acad. Sci. (U.S.A.) 90:9586-9590 (1993), herein incorporated by reference in its entirety), the promoter for the tobacco Lhcb1*2 gene (Cerdan et al., Plant Mol. Biol. 33:245-255. (1997), herein incorporated by reference in its entirety), the Arabidopsis thaliana SUC2 sucrose-H+ symporter promoter (Truernit et al., Planta. 196:564-570 (1995), herein incorporated by reference in its entirety), and the promoter for the thylacoid membrane proteins from spinach (psaD, psaF, psaE, PC, FNR, atpC, atpD, cab, rbcS). Other promoters for the chlorophyll a/b-binding proteins may also be utilized in the present invention, such as the promoters for LhcB gene and PsbP gene from white mustard (Sinapis alba; Kretsch et al., Plant Mol. Biol. 28:219-229 (1995), the entirety of which is herein incorporated by reference).

[0163] For the purpose of expression in sink tissues of the plant, such as the tuber of the potato plant, the fruit of tomato, or the seed of Zea mays, wheat, rice, and barley, it is preferred that the promoters utilized in the present invention have relatively high expression in these specific tissues. A number of promoters for genes with tuber-specific or -enhanced expression are known, including the class I patatin promoter (Bevan et al., EMBO J. 8:1899-1906 (1986); Jefferson et al., Plant Mol. Biol. 14995-1006 (1990), both of which are herein incorporated by reference in its entirety), the promoter for the potato tuber ADPGPP genes, both the large and small subunits, the sucrose synthase promoter (Salanoubat and Belliard, Gene. 60:47-56 (1987), Salanoubat and Belliard, Gene. 84:181-185 (1989), both of which are incorporated by reference in their entirety), the promoter for the major tuber proteins including the 22 kd protein complexes and proteinase inhibitors (Hannapel, Plant Physiol. 101:703-704 (1993), herein incorporated by reference in its entirety), the promoter for the granule bound starch synthase gene (GBSS) (Visser et al., Plant Mol. Biol. 17:691-699 (1991), herein incorporated by reference in its entirety), and other class I and II patatins promoters (Koster-Topfer et al., Mol. Gen. Genet. 219:390-396 (1989); Mignery et al., Gene. 62:27-44 (1988), both of which are herein incorporated by reference in their entirety).

[0164] Other promoters can also be used to express a fructose 1,6 bisphosphate aldolase gene in specific tissues, such as seeds or fruits. The promoter for β-conglycinin (Chen et al., Dev. Genet. 10:112-122 (1989), herein incorporated by reference in its entirety) or other seed-specific promoters such as the napin and phaseolin promoters, can be used. The zeins are a group of storage proteins found in Zea mays endosperm. Genomic clones for zein genes have been isolated (Pedersen et al., Cell 29:1015-1026 (1982), herein incorporated by reference in its entirety), and the promoters from these clones, including the 15 kD, 16 kD, 19 kD, 22 kD, 27 kD, and gamma genes, could also be used. Other promoters known to function, for example, in Zea mays, include the promoters for the following genes: waxy, Brittle, Shrunken 2, Branching enzymes I and II, starch synthases, debranching enzymes, oleosins, glutelins, and sucrose synthases. A particularly preferred promoter for Zea mays endosperm expression is the promoter for the glutelin gene from rice, more particularly the Osgt-1 promoter (Zheng et al., Mol. Cell. Biol. 13:5829-5842 (1993), herein incorporated by reference in its entirety). Examples of promoters suitable for expression in wheat include those promoters for the ADPglucose pyrophosphorylase (ADPGPP) subunits, the granule bound and other starch synthases, the branching and debranching enzymes, the embryogenesis-abundant proteins, the gliadins, and the glutenins. Examples of such promoters in rice include those promoters for the ADPGPP subunits, the granule bound and other starch synthases, the branching enzymes, the debranching enzymes, sucrose synthases, and the glutelins. A particularly preferred promoter is the promoter for rice glutelin, Osgt-1. Examples of such promoters for barley include those for the ADPGPP subunits, the granule bound and other starch synthases, the branching enzymes, the debranching enzymes, sucrose synthases, the hordeins, the embryo globulins, and the aleurone specific proteins.

[0165] Root specific promoters may also be used. An example of such a promoter is the promoter for the acid chitinase gene (Samac et al., Plant Mol. Biol. 25:587-596 (1994), the entirety of which is herein incorporated by reference). Expression in root tissue could also be accomplished by utilizing the root specific subdomains of the CaMV35S promoter that have been identified (Lam et al., Proc. Natl. Acad. Sci. (U.S.A.) 86:7890-7894 (1989), herein incorporated by reference in its entirety). Other root cell specific promoters include those reported by Conkling et al. (Conkling et al., Plant Physiol. 93:1203-1211 (1990), the entirety of which is herein incorporated by reference).

[0166] Additional promoters that may be utilized are described, for example, in U.S. Pat. Nos. 5,378,619, 5,391,725, 5,428,147, 5,447,858, 5,608,144, 5,608,144, 5,614,399, 5,633,441, 5,633,435, and 4,633,436, all of which are herein incorporated in their entirety. In addition, a tissue specific enhancer may be used (Fromm et al., The Plant Cell 1:977-984 (1989), the entirety of which is herein incorporated by reference).

[0167] Constructs or vectors may also include, with the coding region of interest, a nucleic acid sequence that acts, in whole or in part, to terminate transcription of that region. For example, such sequences have been isolated including the Tr7 3′ sequence and the nos 3′ sequence (Ingelbrecht et al., The Plant Cell 1:671-680 (1989), the entirety of which is herein incorporated by reference; Bevan et al., Nucleic Acids Res. 11:369-385 (1983), the entirety of which is herein incorporated by reference), or the like.

[0168] A vector or construct may also include regulatory elements. Examples of such include the Adh intron 1 (Callis et al., Genes and Develop. 1:1183-1200 (1987), the entirety of which is herein incorporated by reference), the sucrose synthase intron (Vasil et al., Plant Physiol. 91:1575-1579 (1989), the entirety of which is herein incorporated by reference) and the TMV omega element (Gallie et al., The Plant Cell 1:301-311 (1989), the entirety of which is herein incorporated by reference). These and other regulatory elements may be included when appropriate.

[0169] A vector or construct may also include a selectable marker. Selectable markers may also be used to select for plants or plant cells that contain the exogenous genetic material. Examples of such include, but are not limited to, a neo gene (Potrykus et al., Mol. Gen. Genet. 199:183-188 (1985), the entirety of which is herein incorporated by reference) which codes for kanamycin resistance and can be selected for using kanamycin, G418, etc.; a bar gene which codes for bialaphos resistance; a mutant EPSP synthase gene (Hinchee et al., Bio/Technology 6:915-922 (1988), the entirety of which is herein incorporated by reference) which encodes glyphosate resistance; a nitrilase gene which confers resistance to bromoxynil (Stalker et al., J. Biol. Chem. 263:6310-6314 (1988), the entirety of which is herein incorporated by reference); a mutant acetolactate synthase gene (ALS) which confers imidazolinone or sulphonylurea resistance (European Patent Application 154,204 (Sep. 11, 1985), the entirety of which is herein incorporated by reference); and a methotrexate resistant DHFR gene (Thillet et al., J. Biol. Chem. 263:12500-12508 (1988), the entirety of which is herein incorporated by reference).

[0170] A vector or construct may also include a transit peptide. Incorporation of a suitable chloroplast transit peptide may also be employed (European Patent Application Publication Number 0218571, the entirety of which is herein incorporated by reference). Translational enhancers may also be incorporated as part of the vector DNA. DNA constructs could contain one or more 5′ non-translated leader sequences which may serve to enhance expression of the gene products from the resulting mRNA transcripts. Such sequences may be derived from the promoter selected to express the gene or can be specifically modified to increase translation of the mRNA. Such regions may also be obtained from viral RNAs, from suitable eukaryotic genes, or from a synthetic gene sequence. For a review of optimizing expression of transgenes, see Koziel et al., Plant Mol. Biol. 32:393-405 (1996), the entirety of which is herein incorporated by reference.

[0171] A vector or construct may also include a screenable marker. Screenable markers may be used to monitor expression. Exemplary screenable markers include a β-glucuronidase or uidA gene (GUS) which encodes an enzyme for which various chromogenic substrates are known (Jefferson, Plant Mol. Biol, Rep. 5:387-405 (1987), the entirety of which is herein incorporated by reference; Jefferson et al., EMBO J. 6:3901-3907 (1987), the entirety of which is herein incorporated by reference); an R-locus gene, which encodes a product that regulates the production of anthocyanin pigments (red color) in plant tissues ((Dellaporta et al., Stadler Symposium 11:263-282 (1988), the entirety of which is herein incorporated by reference); a β-lactamase gene (Sutcliffe et al., Proc. Natl. Acad. Sci. (U.S.A.) 75:3737-3741 (1978), the entirety of which is herein incorporated by reference), a gene which encodes an enzyme for which various chromogenic substrates are known (e.g., PADAC, a chromogenic cephalosporin); a luciferase gene (Ow et al., Science 234:856-859 (1986), the entirety of which is herein incorporated by reference) a xylE gene (Zukowsky et al., Proc. Natl. Acad. Sci. (U.S.A.) 80:1101-1105 (1983), the entirety of which is herein incorporated by reference) which encodes a catechol diozygenase that can convert chromogenic catechols; an α-amylase gene (Ikatu et al., Bio/Technol. 8:241-242 (1990), the entirety of which is herein incorporated by reference); a tyrosinase gene (Katz et al., J. Gen. Microbiol. 129:2703-2714 (1983), the entirety of which is herein incorporated by reference) which encodes an enzyme capable of oxidizing tyrosine to DOPA and dopaquinone which in turn condenses to melanin; an α-galactosidase, which will turn a chromogenic α-galactose substrate.

[0172] Included within the terms “selectable or screenable marker genes” are also genes which encode a secretable marker whose secretion can be detected as a means of identifying or selecting for transformed cells. Examples include markers which encode a secretable antigen that can be identified by antibody interaction, or even secretable enzymes which can be detected catalytically. Secretable proteins fall into a number of classes, including small, diffusible proteins detectable, e.g., by ELISA, small active enzymes detectable in extracellular solution (e.g., α-amylase, β-lactamase, phosphinothricin transferase), or proteins which are inserted or trapped in the cell wall (such as proteins which include a leader sequence such as that found in the expression unit of extension or tobacco PR-S). Other possible selectable and/or screenable marker genes will be apparent to those of skill in the art.

[0173] Methods and compositions for transforming a bacteria and other microorganisms are known in the art (see for example Sambrook et al., Molecular Cloning: A Laboratory Manual, Second Edition, Cold Spring Harbor Laboratory Press, Cold Spring Harbor, N.Y., (1989), the entirety of which is herein incorporated by reference).

[0174] There are many methods for introducing transforming nucleic acid molecules into plant cells. Suitable methods are believed to include virtually any method by which nucleic acid molecules may be introduced into a cell, such as by Agrobacterium infection or direct delivery of nucleic acid molecules such as, for example, by PEG-mediated transformation, by electroporation or by acceleration of DNA coated particles, etc. (Pottykus, Ann. Rev. Plant Physiol. Plant Mol. Biol. 42:205-225 (1991), the entirety of which is herein incorporated by reference; Vasil, Plant Mol. Biol. 25:925-937 (1994), the entirety of which is herein incorporated by reference. For example, electroporation has been used to transform Zea mays protoplasts (Fromm et al., Nature 312:791-793 (1986), the entirety of which is herein incorporated by reference).

[0175] Technology for introduction of DNA into cells is well known to those of skill in the art. Four general methods for delivering a gene into cells have been described: (1) chemical methods (Graham and van der Eb, Virology, 54:536-539 (1973), the entirety of which is herein incorporated by reference); (2) physical methods such as microinjection (Capecchi, Cell 22:479-488 (1980), electroporation (Wong and Neumann, Biochem. Biophys. Res. Commun., 107:584-587 (1982); Fromm et al., Proc. Natl. Acad. Sci. (U.S.A.), 82:5824-5828 (1985); U.S. Pat. No. 5,384,253; and the gene gun (Johnston and Tang, Methods Cell Biol. 43:353-365 (1994), all of which the entirety is herein incorporated by reference; (3) viral vectors (Clapp, Clin. Perinatol., 20:155-168 (1993); Lu et al., J. Exp. Med., 178:2089-2096 (1993); Eglitis and Anderson, Biotechniques, 6:608-614 (1988), all of which the entirety is herein incorporated by reference); and (4) receptor-mediated mechanisms (Curiel et al., Hum. Gen. Ther., 3:147-154 (1992); Wagner et al., Proc. Natl. Acad. Sci. U.S.A., 89:6099-6103 (1992), all of which the entirety is herein incorporated by reference).

[0176] Acceleration methods that may be used include, for example, microprojectile bombardment and the like. One example of a method for delivering transforming nucleic acid molecules to plant cells is microprojectile bombardment. This method has been reviewed by Yang and Christou, eds., Particle Bombardment Technology for Gene Transfer, Oxford Press, Oxford, England (1994), the entirety of which is herein incorporated by reference). Non-biological particles (microprojectiles) that may be coated with nucleic acids and delivered into cells by a propelling force. Exemplary particles include those comprised of tungsten, gold, platinum, and the like.

[0177] A particular advantage of microprojectile bombardment, in addition to it being an effective means of reproducibly, and stably transforming monocotyledons, is that neither the isolation of protoplasts (Cristou et al., Plant Physiol. 87:671-674 (1988), the entirety of which is herein incorporated by reference) nor the susceptibility of Agrobacterium infection is required. An illustrative embodiment of a method for delivering DNA into maize cells by acceleration is a biolistics-particle delivery system, which can be used to propel particles coated with DNA through a screen, such as a stainless steel or Nytex screen, onto a filter surface covered with corn cells cultured in suspension. Gordon-Kamm et al., describes the basic procedure for coating tungsten particles with DNA (Gordon-Kamm et al., Plant Cell 2:603-618 (1990), the entirety of which is herein incorporated by reference). The screen disperses the tungsten nucleic acid particles so that they are not delivered to the recipient cells in large aggregates. A particle delivery system suitable for use with the present invention is the helium acceleration PDS-1000/He gun which is available from Bio-Rad Laboratories (Bio-Rad, Hercules, Calif.)(Sanford et al., Technique 3:3-16 (1991), the entirety of which is herein incorporated by reference).

[0178] For the bombardment, cells in suspension may be concentrated on filters. Filters containing the cells to be bombarded are positioned at an appropriate distance below the microprojectile stopping plate. If desired, one or more screens are also positioned between the gun and the cells to be bombarded.

[0179] Alternatively, immature embryos or other target cells may be arranged on solid culture medium. The cells to be bombarded are positioned at an appropriate distance below the macroprojectile stopping plate. If desired, one or more screens are also positioned between the acceleration device and the cells to be bombarded. Through the use of techniques set forth herein one may obtain up to 1000 or more foci of cells transiently expressing a marker gene. The number of cells in a focus which express the exogenous gene product 48 hours post-bombardment often range from one to ten and average one to three.

[0180] In bombardment transformation, one may optimize the prebombardment culturing conditions and the bombardment parameters to yield the maximum numbers of stable transformants. Both the physical and biological parameters for bombardment are important in this technology. Physical factors are those that involve manipulating the DNA/microprojectile precipitate or those that affect the flight and velocity of either the macro- or microprojectiles. Biological factors include all steps involved in manipulation of cells before and immediately after bombardment, the osmotic adjustment of target cells to help alleviate the trauma associated with bombardment, and also the nature of the transforming DNA, such as linearized DNA or intact supercoiled plasmids. It is believed that pre-bombardment manipulations are especially important for successful transformation of immature embryos.

[0181] In another alternative embodiment, plastids can be stably transformed. Methods disclosed for plastid transformation in higher plants include particle gun delivery of DNA containing a selectable marker and targeting of the DNA to the plastid genome through homologous recombination (Svab et al. Proc. Natl. Acad. Sci. (U.S.A.) 87:8526-8530 (1990): Svab and Maliga Proc. Natl. Acad. Sci. (U.S.A.) 90:913-917 (1993)); (Staub, J. M. and Maliga, P. EMBO J. 12:601-606 (1993), U.S. Pat. Nos. 5,451,513 and 5,545,818 all of which are herein incorporated by reference in their entirety).

[0182] Accordingly, it is contemplated that one may wish to adjust various aspects of the bombardment parameters in small scale studies to fully optimize the conditions. One may particularly wish to adjust physical parameters such as gap distance, flight distance, tissue distance, and helium pressure. One may also minimize the trauma reduction factors by modifying conditions which influence the physiological state of the recipient cells and which may therefore influence transformation and integration efficiencies. For example, the osmotic state, tissue hydration and the subculture stage or cell cycle of the recipient cells may be adjusted for optimum transformation. The execution of other routine adjustments will be known to those of skill in the art in light of the present disclosure.

[0183] Agrobacterium-mediated transfer is a widely applicable system for introducing genes into plant cells because the DNA can be introduced into whole plant tissues, thereby bypassing the need for regeneration of an intact plant from a protoplast. The use of Agrobacterium-mediated plant integrating vectors to introduce DNA into plant cells is well known in the art. See, for example the methods described (Fraley et al., Biotechnology 3:629-635 (1985); Rogers et al., Meth. In Enzymol, 153:253-277 (1987), both of which are herein incorporated by reference in their entirety. Further, the integration of the Ti-DNA is a relatively precise process resulting in few rearrangements. The region of DNA to be transferred is defined by the border sequences, and intervening DNA is usually inserted into the plant genome as described (Spielmann et al., Mol. Gen. Genet., 205:34 (1986), the entirety of which is herein incorporated by reference).

[0184] Modern Agrobacterium transformation vectors are capable of replication in E. coli as well as Agrobacterium, allowing for convenient manipulations as described (Klee et al., In: Plant DNA Infectious Agents, T. Hohn and J. Schell, eds., Springer-Verlag, New York, pp. 179-203 (1985), the entirety of which is herein incorporated by reference. Moreover, recent technological advances in vectors for Agrobacterium-mediated gene transfer have improved the arrangement of genes and restriction sites in the vectors to facilitate construction of vectors capable of expressing various polypeptide coding genes. The vectors described have convenient multi-linker regions flanked by a promoter and a polyadenylation site for direct expression of inserted polypeptide coding genes and are suitable for present purposes (Rogers et al., Meth. In Enzymol., 153:253-277 (1987), the entirety of which is herein incorporated by reference). In addition, Agrobacterium containing both armed and disarmed Ti genes can be used for the transformations. In those plant strains where Agrobacterium-mediated transformation is efficient, it is the method of choice because of the facile and defined nature of the gene transfer.

[0185] A transgenic plant formed using Agrobacterium transformation methods typically contains a single gene on one chromosome. Such transgenic plants can be referred to as being heterozygous for the added gene. More preferred is a transgenic plant that is homozygous for the added structural gene; i.e., a transgenic plant that contains two added genes, one gene at the same locus on each chromosome of a chromosome pair. A homozygous transgenic plant can be obtained by sexually mating (selfing) an independent segregant transgenic plant that contains a single added gene, germinating some of the seed produced and analyzing the resulting plants produced for the gene of interest.

[0186] It is also to be understood that two different transgenic plants can also be mated to produce offspring that contain two independently segregating added, exogenous genes. Selfing of appropriate progeny can produce plants that are homozygous for both added, exogenous genes that encode a polypeptide of interest. Back-crossing to a parental plant and out-crossing with a non-transgenic plant are also contemplated, as is vegetative propagation.

[0187] Transformation of plant protoplasts can be achieved using methods based on calcium phosphate precipitation, polyethylene glycol treatment, electroporation, and combinations of these treatments. See for example (Potrykus et al., Mol. Gen. Genet., 205:193-200 (1986); Lorz et al., Mol. Gen. Genet., 199:178, (1985); Fromm et al., Nature, 319:791, (1986); Uchimiya et al., Mol. Gen. Genet. :204:204, (1986); Callis et al., Genes and Development, 1183, (1987); Marcotte et al., Nature, 335:454, (1988), all of which the entirety is herein incorporated by reference).

[0188] Application of these systems to different plant strains depends upon the ability to regenerate that particular plant strain from protoplasts. Illustrative methods for the regeneration of cereals from protoplasts are described (Fujimura et al., Plant Tissue Culture Letters, 2:74, (1985); Toriyama et al., Theor Appl. Genet. 205:34. (1986); Yamada et al., Plant Cell Rep., 4:85, (1986); Abdullah et al., Biotechnology, 4:1087, (1986), all of which the entirety is herein incorporated by reference).

[0189] To transform plant strains that cannot be successfully regenerated from protoplasts, other ways to introduce DNA into intact cells or tissues can be utilized. For example, regeneration of cereals from immature embryos or explants can be effected as described (Vasil, Biotechnology, 6:397, (1988), the entirety of which is herein incorporated by reference). In addition, “particle gun” or high-velocity microprojectile technology can be utilized (Vasil et al., Bio/Technology 10:667, (1992), the entirety of which is herein incorporated by reference).

[0190] Using the latter technology, DNA is carried through the cell wall and into the cytoplasm on the surface of small metal particles as described (Klein et al., Nature, 328:70, (1987); Klein et al., Proc. Natl. Acad. Sci. (U.S.A.), 85:8502-8505, (1988); McCabe et al., Biotechnology, 6:923, (1988), all of which the entirety is herein incorporated by reference). The metal particles penetrate through several layers of cells and thus allow the transformation of cells within tissue explants.

[0191] Other methods of cell transformation can also be used and include but are not limited to introduction of DNA into plants by direct DNA transfer into pollen (Zhou et al., Methods in Enzymology, 101:433, (1983); Hess et al., Intern Rev. Cytol., 107:367, (1987); Luo et al., Plant Mol. Biol. Reporter, 6:165, (1988), all of which the entirety is herein incorporated by reference), by direct injection of DNA into reproductive organs of a plant (Pena et al., Nature, 325:274, (1987), the entirety of which is herein incorporated by reference), or by direct injection of DNA into the cells of immature embryos followed by the rehydration of dessicated embryos (Neuhaus et al., Theor. Appl. Genet., 75:30, (1987), the entirety of which is herein incorporated by reference).

[0192] The regeneration, development, and cultivation of plants from single plant protoplast transformants or from various transformed explants is well known in the art (Weissbach and Weissbach, In: Methods for Plant Molecular Biology, (Eds.), Academic Press, Inc., San Diego, Calif., (1988), the entirety of which is herein incorporated by reference). This regeneration and growth process typically includes the steps of selection of transformed cells, culturing those individualized cells through the usual stages of embryonic development through the rooted plantlet stage. Transgenic embryos and seeds are similarly regenerated. The resulting transgenic rooted shoots are thereafter planted in an appropriate plant growth medium such as soil.

[0193] The development or regeneration of plants containing the foreign, exogenous gene that encodes a protein of interest is well known in the art. Preferably, the regenerated plants are self-pollinated to provide homozygous transgenic plants, as discussed before. Otherwise, pollen obtained from the regenerated plants is crossed to seed-grown plants of agronomically important lines. Conversely, pollen from plants of these important lines is used to pollinate regenerated plants. A transgenic plant of the present invention containing a desired polypeptide is cultivated using methods well known to one skilled in the art.

[0194] There are a variety of methods for the regeneration of plants from plant tissue. The particular method of regeneration will depend on the starting plant tissue and the particular plant species to be regenerated.

[0195] Methods for transforming dicots, primarily by use of Agrobacterium tumefaciens, and obtaining transgenic plants have been published for cotton (U.S. Pat. No. 5,004,863, U.S. Pat. No. 5,159,135, U.S. Pat. No. 5,518,908, all of which the entirety is herein incorporated by reference); soybean (U.S. Pat. No. 5,569,834, U.S. Pat. No. 5,416,011, McCabe et al., Biotechnology 6:923, (1988), Christou et al., Plant Physiol., 87:671-674 (1988), all of which the entirety is herein incorporated by reference); Brassica (U.S. Pat. No. 5,463,174, the entirety of which is herein incorporated by reference); peanut (Cheng et al., Plant Cell Rep. 15:653-657 (1996), McKently et al., Plant Cell Rep. 14:699-703 (1995), all of which the entirety is herein incorporated by reference); papaya (Yang et al., (1996), the entirety of which is herein incorporated by reference); pea (Grant et al., Plant Cell Rep. 15:254-258, (1995), the entirety of which is herein incorporated by reference).

[0196] Transformation of monocotyledons using electroporation, particle bombardment, and Agrobacterium have also been reported. Transformation and plant regeneration have been achieved in asparagus (Bytebier et al., Proc. Natl. Acad. Sci. (U.S.A.) 84:5345, (1987), the entirety of which is herein incorporated by reference); barley (Wan and Lemaux, Plant Physiol 104:37, (1994), the entirety of which is herein incorporated by reference); maize (Rhodes et al., Science 240:204, (1988), Gordon-Kamm et al., Plant Cell, 2:603, (1990), Fromm et al., Bio/Technology 8:833, (1990), Koziel et al., Bio/Technology 11:194, (1993), Armstrong et al., Crop Science 35:550-557, (1995), all of which the entirety is herein incorporated by reference); oat (Somers et al., Bio/Technology, 10:1589, (1992), the entirety of which is herein incorporated by reference); orchardgrass (Horn et al., Plant Cell Rep. 7:469, (1988), the entirety of which is herein incorporated by reference); rice (Toriyama et al., Theor Appl. Genet. 205:34, (1986); Park et al., Plant Mol. Biol., 32:1135-1148, (1996); Abedinia et al., Aust. J. Plant Physiol. 24:133-141, (1997); Zhang and Wu, Theor. Appl. Genet. 76:835, (1988); Zhang et al., Plant Cell Rep. 7:379, (1988); Battraw and Hall, Plant Sci. 86:191-202, (1992); Christou et al., Bio/Technology 9:957, (1991), all of which the entirety is herein incorporated by reference); sugarcane (Bower and Birch, Plant J. 2:409, (1992), the entirety of which is herein incorporated by reference); tall fescue (Wang et al., Bio/Technology 10:691, (1992), the entirety of which is herein incorporated by reference), and wheat (Vasil et al., Bio/Technology 10:667, (1992), the entirety of which is herein incorporated by reference; U.S. Pat. No. 5,631,152, the entirety of which is herein incorporated by reference.

[0197] Assays for gene expression based on the transient expression of cloned nucleic acid constructs have been developed by introducing the nucleic acid molecules into plant cells by polyethylene glycol treatment, electroporation, or particle bombardment (Marcotte, et al., Nature, 335:454-457 (1988), the entirety of which is herein incorporated by reference; Marcotte, et al., Plant Cell, 1:523-532 (1989), the entirety of which is herein incorporated by reference; McCarty, et al., Cell 66:895-905 (1991), the entirety of which is herein incorporated by reference; Hattori, et al., Genes Dev. 6:609-618. (1992), the entirety of which is herein incorporated by reference; Goff, et al., EMBO J. 9:2517-2522 (1990), the entirety of which is herein incorporated by reference). Transient expression systems may be used to functionally dissect gene constructs (See generally, Mailga et al., Methods in Plant Molecular Biology, Cold Spring Harbor Press (1995)).

[0198] Any of the nucleic acid molecules of the present invention may be introduced into a plant cell in a permanent or transient manner in combination with other genetic elements such as vectors, promoters enhancers etc. Further any of the nucleic acid molecules of the present invention may be introduced into a plant cell in a manner that allows for over expression of the protein or fragment thereof encoded by the nucleic acid molecule.

[0199] Nucleic acid molecules of the present invention may be used in cosuppression. Cosuppression is the reduction in expression levels, usually at the level of RNA, of a particular endogenous gene or gene family by the expression of a homologous sense construct that is capable of transcribing mRNA of the same strandedness as the transcript of the endogenous gene (Napoli et al., Plant Cell 2:279-289 (1990), the entirety of which is herein incorporated by reference; van der Krol et al., Plant Cell 2:291-299 (1990), the entirety of which is herein incorporated by reference). Cosuppression may result from stable transformation with a single copy nucleic acid molecule that is homologous to a nucleic acid sequence found with the cell (Prolls and Meyer, Plant J. 2:465-475 (1992), the entirety of which is herein incorporated by reference) or with multiple copies of a nucleic acid molecule that is homologous to a nucleic acid sequence found with the cell (Mittlesten et al., Mol. Gen. Genet. 244: 325-330 (1994), the entirety of which is herein incorporated by reference). Genes, even though different, linked to homologous promoters may result in the cosuppression of the linked genes (Vaucheret, C. R. Acad. Sci. III 316: 1471-1483 (1993), the entirety of which is herein incorporated by reference).

[0200] This technique has, for example been applied to generate white flowers from red petunia and tomatoes that do not ripen on the vine. Up to 50% of petunia transformants that contained a sense copy of the chalcone synthase (CHS) gene produced white flowers or floral sectors; this was as a result of the post-transcriptional loss of mRNA encoding CHS (Flavell, Proc. Natl. Acad. Sci. (U.S.A.) 91:3490-3496 (1994)), the entirety of which is herein incorporated by reference). Cosuppression may require the coordinate transcription of the transgene and the endogenous gene, and can be reset by a developmental control mechanism (Jorgensen, Trends Biotechnol, 8:340344 (1990), the entirety of which is herein incorporated by reference; Meins and Kunz, In: Gene Inactivation and Homologous Recombination in Plants (Paszkowski, J., ed.), pp. 335-348. Kluwer Academic, Netherlands (1994), the entirety of which is herein incorporated by reference).

[0201] It is understood that one or more of the nucleic acids of the present invention, including nucleic acid molecules having a nucleic acid sequence selected from the group consisting of SEQ ID NO:1 or complement thereof through SEQ ID NO:20082 or complement thereof or fragments thereof, may be introduced into a plant cell and transcribed using an appropriate promoter with such transcription resulting in the co-suppression of an endogenous protein.

[0202] Nucleic acid molecules of the present invention may be used to reduce gene function. Antisense approaches are a way of preventing or reducing gene function by targeting the genetic material (Mol et al., FEBS Lett. 268:427-430 (1990), the entirety of which is herein incorporated by reference). The objective of the antisense approach is to use a sequence complementary to the target gene to block its expression and create a mutant cell line or organism in which the level of a single chosen protein is selectively reduced or abolished. Antisense techniques have several advantages over other ‘reverse genetic’ approaches. The site of inactivation and its developmental effect can be manipulated by the choice of promoter for antisense genes or by the timing of external application or microinjection. Antisense can manipulate its specificity by selecting either unique regions of the target gene or regions where it shares homology to other related genes (Hiatt et al., In Genetic Engineering, Setlow (ed.), Vol. 11, New York: Plenum 49-63 (1989), the entirety of which is herein incorporated by reference).

[0203] The principle of regulation by antisense RNA is that RNA that is complementary to the target mRNA is introduced into cells, resulting in specific RNA:RNA duplexes being formed by base pairing between the antisense substrate and the target mRNA (Green et al., Annu. Rev. Biochem. 55:569-597 (1986), the entirety of which is herein incorporated by reference). Under one embodiment, the process involves the introduction and expression of an antisense gene sequence. Such a sequence is one in which part or all of the normal gene sequences are placed under a promoter in inverted orientation so that the ‘wrong’ or complementary strand is transcribed into a noncoding antisense RNA that hybridizes with the target mRNA and interferes with its expression (Takayama and Inouye, Crit. Rev. Biochem. Mol. Biol. 25:155-184 (1990), the entirety of which is herein incorporated by reference). An antisense vector is constructed by standard procedures and introduced into cells by transformation, transfection, electroporation, microinjection, or by infection, etc. The type of transformation and choice of vector will determine whether expression is transient or stable. The promoter used for the antisense gene may influence the level, timing, tissue, specificity, or inducibility of the antisense inhibition.

[0204] It is understood that protein synthesis activity in a plant cell may be reduced or depressed by growing a transformed plant cell containing a nucleic acid molecule of the present invention.

[0205] Antibodies have been expressed in plants (Hiatt et al., Nature 342:76-78 (1989), the entirety of which is herein incorporated by reference; Conrad and Fielder, Plant Mol. Biol. 26:1023-1030 (1994), the entirety of which is herein incorporated by reference). Cytoplasmic expression of a scFv (single-chain Fv antibodies) has been reported to delay infection by artichoke mottled crinkle virus. Transgenic plants that express antibodies directed against endogenous proteins may exhibit a physiological effect (Philips et al., EMBO J. 16:4489-4496 (1997), the entirety of which is herein incorporated by reference; Marion-Poll, Trends in Plant Science 2:447-448 (1997), the entirety of which is herein incorporated by reference). For example, expressed anti-abscisic antibodies reportedly result in a general perturbation of seed development (Philips et al., EMBO J. 16:4489-4496 (1997)).

[0206] Nucleic acid molecules of the present invention may be used as antibodies. Antibodies that are catalytic may also be expressed in plants (abzymes). The principle behind abzymes is that since antibodies may be raised against many molecules, this recognition ability can be directed toward generating antibodies that bind transition states to force a chemical reaction forward (Persidas, Nature Biotechnology 15:1313-1315 (1997), the entirety of which is herein incorporated by reference; Baca et al., Ann. Rev. Biophys. Biomol. Struct. 26:461-493 (1997), the entirety of which is herein incorporated by reference). The catalytic abilities of abzymes may be enhanced by site directed mutagenesis. Examples of abzymes are, for example, set forth in U.S. Pat. No. 5,658,753; U.S. Pat. No. 5,632,990; U.S. Pat. No. 5,631,137; U.S. Pat. No. 5,602,015; U.S. Pat. No. 5,559,538; U.S. Pat. No. 5,576,174; U.S. Pat. No. 5,500,358; U.S. Pat. No. 5,318,897; U.S. Pat. No. 5,298,409; U.S. Pat. No. 5,258,289 and U.S. Pat. No. 5,194,585, all of which are herein incorporated in their entirety.

[0207] It is understood that any of the antibodies of the present invention may be expressed in plants and that such expression can result in a physiological effect. It is also understood that any of the expressed antibodies may be catalytic.

[0208] In addition to the above discussed procedures, practitioners are familiar with the standard resource materials which describe specific conditions and procedures for the construction, manipulation and isolation of macromolecules (e.g., DNA molecules, plasmids, etc.), generation of recombinant organisms and the screening and isolating of clones, (see for example, Sambrook et al., Molecular Cloning: A Laboratory Manual, Cold Spring Harbor Press (1989); Mailga et al., Methods in Plant Molecular Biology, Cold Spring Harbor Press (1995), the entirety of which is herein incorporated by reference; Birren et al., Genome Analysis: Analyzing DNA, 1, Cold Spring Harbor, N.Y., the entirety of which is herein incorporated by reference).

[0209] The nucleotide sequence provided in SEQ ID NO:1, through SEQ ID NO:20082 or fragment thereof, or complement thereof, or a nucleotide sequence at least 90% identical, preferably 95%, identical even more preferably 99% or 100% identical to the sequence provided in SEQ ID NO:1 through SEQ ID NO:20082 or fragment, thereof, or complement thereof, can be “provided” in a variety of mediums to facilitate use fragment thereof. Such a medium can also provide a subset thereof in a form that allows a skilled artisan to examine the sequences.

[0210] In one application of this embodiment, a nucleotide sequence of the present invention can be recorded on computer readable media. As used herein, “computer readable media” refers to any medium that can be read and accessed directly by a computer. Such media include, but are not limited to: magnetic storage media, such as floppy discs, hard disc, storage medium, and magnetic tape: optical storage media such as CD-ROM; electrical storage media such as RAM and ROM; and hybrids of these categories such as magnetic/optical storage media. A skilled artisan can readily appreciate how any of the presently known computer readable mediums can be used to create a manufacture comprising computer readable medium having recorded thereon a nucleotide sequence of the present invention.

[0211] As used herein, “recorded” refers to a process for storing information on computer readable medium. A skilled artisan can readily adopt any of the presently known methods for recording information on computer readable medium to generate media comprising the nucleotide sequence information of the present invention. A variety of data storage structures are available to a skilled artisan for creating a computer readable medium having recorded thereon a nucleotide sequence of the present invention. The choice of the data storage structure will generally be based on the means chosen to access the stored information. In addition, a variety of data processor programs and formats can be used to store the nucleotide sequence information of the present invention on computer readable medium. The sequence information can be represented in a word processing text file, formatted in commercially-available software such as WordPerfect and Microsoft Word, or represented in the form of an ASCII file, stored in a database application, such as DB2, Sybase, Oracle, or the like. A skilled artisan can readily adapt any number of data processor structuring formats (e.g., text file or database) in order to obtain computer readable medium having recorded thereon the nucleotide sequence information of the present invention.

[0212] By providing one or more of nucleotide sequences of the present invention, a skilled artisan can routinely access the sequence information for a variety of purposes. Computer software is publicly available which allows a skilled artisan to access sequence information provided in a computer readable medium. The examples which follow demonstrate how software which implements the BLAST (Altschul et al., J. Mol. Biol. 215:403-410 (1990)) and BLAZE (Brutlag et al., Comp. Chem. 17:203-207 (1993), the entirety of which is herein incorporated by reference) search algorithms on a Sybase system can be used to identify open reading frames (ORFs) within the genome that contain homology to ORFs or proteins from other organisms. Such ORFs are protein-encoding fragments within the sequences of the present invention and are useful in producing commercially important proteins such as enzymes used in amino acid biosynthesis, metabolism, transcription, translation, RNA processing, nucleic acid and a protein degradation, protein modification, and DNA replication, restriction, modification, recombination, and repair.

[0213] The present invention further provides systems, particularly computer-based systems, which contain the sequence information described herein. Such systems are designed to identify commercially important fragments of the nucleic acid molecule of the present invention. As used herein, “a computer-based system” refers to the hardware means, software means, and data storage means used to analyze the nucleotide sequence information of the present invention. The minimum hardware means of the computer-based systems of the present invention comprises a central processing unit (CPU), input means, output means, and data storage means. A skilled artisan can readily appreciate that any one of the currently available computer-based system are suitable for use in the present invention.

[0214] As indicated above, the computer-based systems of the present invention comprise a data storage means having stored therein a nucleotide sequence of the present invention and the necessary hardware means and software means for supporting and implementing a search means. As used herein, “data storage means” refers to memory that can store nucleotide sequence information of the present invention, or a memory access means which can access manufactures having recorded thereon the nucleotide sequence information of the present invention. As used herein, “search means” refers to one or more programs which are implemented on the computer-based system to compare a target sequence or target structural motif with the sequence information stored within the data storage means. Search means are used to identify fragments or regions of the sequence of the present invention that match a particular target sequence or target motif. A variety of known algorithms are disclosed publicly and a variety of commercially available software for conducting search means are available and can be used in the computer-based systems of the present invention. Examples of such software include, but are not limited to, MacPattern (EMBL), BLASTIN and BLASTIX (NCBIA). One of the available algorithms or implementing software packages for conducting homology searches can be adapted for use in the present computer-based systems.

[0215] The most preferred sequence length of a target sequence is from about 10 to 100 amino acids or from about 30 to 300 nucleotide residues. However, it is well recognized that during searches for commercially important fragments of the nucleic acid molecules of the present invention, such as sequence fragments involved in gene expression and protein processing, may be of shorter length.

[0216] As used herein, “a target structural motif,” or “target motif,” refers to any rationally selected sequence or combination of sequences in which the sequence(s) are chosen based on a three-dimensional configuration which is formed upon the folding of the target motif. There are a variety of target motifs known in the art. Protein target motifs include, but are not limited to, enzymatic active sites and signal sequences. Nucleic acid target motifs include, but are not limited to, promoter sequences, cis elements, hairpin structures and inducible expression elements (protein binding sequences).

[0217] Thus, the present invention further provides an input means for receiving a target sequence, a data storage means for storing the target sequences of the present invention sequence identified using a search means as described above, and an output means for outputting the identified homologous sequences. A variety of structural formats for the input and output means can be used to input and output information in the computer-based systems of the present invention. A preferred format for an output means ranks fragments of the sequence of the present invention by varying degrees of homology to the target sequence or target motif. Such presentation provides a skilled artisan with a ranking of sequences which contain various amounts of the target sequence or target motif and identifies the degree of homology contained in the identified fragment.

[0218] A variety of comparing means can be used to compare a target sequence or target motif with the data storage means to identify sequence fragments sequence of the present invention. For example, implementing software which implement the BLAST and BLAZE algorithms (Altschul et al., J. Mol. Biol. 215:403-410 (1990)) can be used to identify open frames within the nucleic acid molecules of the present invention. A skilled artisan can readily recognize that any one of the publicly available homology search programs can be used as the search means for the computer-based systems of the present invention.

[0219] Having now generally described the invention, the same will be more readily understood through reference to the following examples which are provided by way of illustration, and are not intended to be limiting of the present invention, unless specified.

### Example 1

[0220] BACs are stable, non-chimeric cloning systems having genomic fragment inserts (100-300 kb) and their DNA can be prepared for most types of experiments including DNA sequencing. BAC vector, pBeloBAC11, is derived from the endogenous E. coli F-factor plasmid, which contains genes for strict copy number control and unidirectional origin of DNA replication. Additionally, pBeloBAC11 has three unique restriction enzyme sites (Hind III, Bam HI and Sph I) located within the LacZ gene which can be used as cloning sites for megabase-size plant DNA. Indigo, another BAC vector contains Hind III and Eco RI cloning sites. This vector also contains a random mutation in the LacZ gene that allows for darker blue colonies.

[0221] As an alternative, the P1-derived artificial chromosome (PAC) can be used as a large DNA fragment cloning vector (Ioannou, et al., Nature Genet. 6:84-89 (1994), the entirety of which is herein incorporated by reference; Suzuki, et al., Gene 199:133-137 (1997), the entirety of which is herein incorporated by reference). The PAC vector has most of the features of the BAC system, but also contains some of the elements of the bacteriophage P1 cloning system.

[0222] BAC libraries are generated by ligating size-selected restriction digested DNA with pBeloBAC11 followed by electroporation into E. coli. BAC library construction and characterization is extremely efficient when compared to YAC (yeast artificial chromosome) library construction and analysis, particularly because of the chimerism associated with YACs and difficulties associated with extracting YAC DNA.

[0223] There are two general methods for preparing megabase-size DNA from plants. The protoplast method yields megabase-size DNA of high quality with minimal breakage. The process involves preparing young leaves which are manually feathered with a razor-blade before being incubated for four to five hours with cell-wall-degrading enzymes. The second method developed by Zhange et al., Plant J. 7:175-184 (1995) the entirety of which is herein incorporated by reference is a universal nuclei method that works well for several divergent plant taxa. Fresh or frozen tissue is homogenized with a blender or mortar and pestle. Nuclei are then isolated and embedded. DNA is prepared by the nucleic method often more concentrated and is reported to contain lower amounts of chloroplast DNA than the protoplast method.

[0224] Once protoplasts or nuclei are produced, they are embedded in an agarose matrix as plugs or microbeads. The agarose provides a support matrix to prevent shearing of the DNA while allowing enzymes and buffers to diffuse into the DNA. The DNA is purified and manipulated in the agarose and is stable for more than one year at 4° C.

[0225] Once high molecular weight DNA has been prepared, it is fragmented to the desired size range. In general, DNA fragmentation utilizes two general approaches, 1) physical shearing and 2) partial digestion with a restriction enzyme that cuts relatively frequently within the genome. Since physical shearing is not dependent upon the frequency and distribution of particular restriction enzymes sites, this method should yield the most random distribution of DNA fragments. However, the ends of the sheared DNA fragments must be repaired and cloned directly or restriction enzyme sites added by the addition of synthetic linkers. Because of the subsequent steps required to clone DNA fragmented by shearing, most protocols fragment DNA by partial restriction enzyme digestion. The advantage of partial restriction enzyme digestion is that no further enzymatic modification of the ends of the restriction fragments are necessary. Four common techniques that can be used to achieve reproducible partial digestion of megabase-size DNA are 1) varying the concentration of the restriction enzyme, 2) varying the time of incubation with the restriction enzyme 3) varying the concentration of an enzyme cofactor (e.g., Mg²⁺) and 4) varying the ratio of endonuclease to methylase.

[0226] There are three cloning sites in pBeloBAC11, but only Hind III and Bam HI produce 5′ overhangs for easy vector dephosphorylation. These two restriction enzymes are primarily used to construct BAC libraries. The optimal partial digestion conditions for megabase-size DNA are determined by wide and narrow window digestions. To optimize the optimum amount of Hind III, 1, 2, 3, 10, and 5-units of enzyme are each added to 50 ml aliquots of microbeads and incubated at 37° C. for 20 minutes

[0227] After partial digestion of megabase-size DNA, the DNA is run on a pulsed-field gel, and DNA in a size range of 100-500 kb is excised from the gel. This DNA is ligated to the BAC vector or subjected to a second size selection on a pulsed field gel under different running conditions. Studies have previously reported that two rounds of size selection can eliminate small DNA fragments co-migrating with the selected range in the first pulse-field fractionation. Such a strategy results in an increase in insert sizes and a more uniform insert size distribution. A practical approach to performing size selections is to first test for the number of clones/microliter of ligation and insert size from the first size selected material. If the numbers are good (500 to 2000 white colony/microliter of ligation) and the size range is also good (50 to 300 kb) then a second size selection is practical. When performing a second size selection one expects a 80 to 95% decrease in the number of recombinant clones per transformation.

[0228] Twenty to two hundred nanograms of the size-selected DNA is ligated to dephosphorylated BAC vector (molar ratio of 10 to 1 in BAC vector excess). Most BAC libraries use a molar ratio of 5 to 15:1 (size selected DNA:BAC vector).

[0229] Transformation is carried out by electroporation and the transformation efficiency for BACs is about 40 to 1,500 transformants from one microliter of ligation product or 20 to 1000 transformants/ng DNA.

[0230] Several tests can be carried out to determine the quality of a BAC library. Three basic tests to evaluate the quality include: the genome coverage of a BAC library-average insert size, average number of clones hybridizing with single copy probes and chloroplast DNA content.

[0231] The determination of the average insert size of the library is assessed in two ways. First, during library construction every ligation is tested to determine the average insert size by assaying 20-50 BAC clones per ligation. DNA is isolated from recombinant clones using a standard mini preparation protocol, digested with Not I to free the insert from the BAC vector and then sized using pulsed field gel electrophoresis (Maule, Molecular Biotechnology 9:107-126 (1998), the entirety of which is herein incorporated by reference).

[0232] To determine the genome coverage of the library, it is screened with single copy RFLP markers distributed randomly across the genome by hybridization. Microtiter plates containing BAC clones are spotted onto Hybond membranes. Bacteria from 48 or 72 plates are spotted twice onto one membrane resulting in 18,000 to 27,648 unique clones on each membrane in either a 4×4 or 5×5 orientation. Since each clone is present twice, false positives are easily eliminated and true positives are easily recognized and identified.

[0233] Finally, the chloroplast DNA content in the BAC library is estimated by hybridizing three chloroplast genes spaced evenly across the chloroplast genome to the library on high density hybridization filters.

[0234] There are strategies for isolating rare sequences within the genome. For example, higher plant genomes can range in size from 100 Mb/1 C (Arabidopsis) to 15,966 Mb/C (Triticum aestivum), (Arumuganathan and Earle, Plant Mol Bio Rep. 9:208-219 (1991), the entirety of which is herein incorporated by reference). The number of clones required to achieve a given probability that any DNA sequence will be represented in a genomic library is N=(ln(1−P))/(ln(1−L/G)) where N is the number of clones required, P is the probability desired to get the target sequence, L is the length of the average clone insert in base pairs and G is the haploid genome length in base pairs (Clarke et al., Cell 9:91-100 (1976) the entirety of which is herein incorporated by reference).

[0235] The soybean BAC library of the present invention is constructed in the pBeloBAC11 or similar vector. Inserts are generated by partial Eco RI or other enzymatic digestion of DNA from the cultivar A3244. The library provides approximately twenty fold coverage of the soybean genome.

### Example 2

[0236] Nucleic acid sequences are identified using a cascade of BLASTX, followed by BLASTN if no BLASTX hit is found. Default BLAST parameters are used. BLASTX compares the six-frame conceptual translation products of a nucleotide query sequence (both strands) against a protein sequence database. BLASTN compares a nucleotide query sequence against a nucleotide sequence database. Matches found with BLAST P-values equal or less than 1E-8 (probability) are classified as hits.

### Example 3

[0237] Two basic methods can be used for DNA sequencing, the chain termination method of Sanger et al., Proc. Natl. Acad. Sci. (U.S.A.) 74:5463-5467 (1977), the entirety of which is herein incorporated by reference and the chemical degradation method of Maxam and Gilbert, Proc. Natl. Acad. Sci. (U.S.A.) 74:560-564 (1977), the entirety of which is herein incorporated by reference. Automation and advances in technology such as the replacement of radioisotopes with fluorescence-based sequencing have reduced the effort required to sequence DNA (Craxton, Methods, 2:20-26 (1991), the entirety of which is herein incorporated by reference; Ju et al., Proc. Natl. Acad. Sci. (U.S.A.) 92:4347-4351 (1995), the entirety of which is herein incorporated by reference; Tabor and Richardson, Proc. Natl. Acad. Sci. (U.S.A.) 92:6339-6343 (1995), the entirety of which is herein incorporated by reference). Automated sequencers are available from, for example, Pharmacia Biotech, Inc., Piscataway, N.J. (Pharmacia ALF), LI-COR, Inc., Lincoln, Nebr. (LI-COR 4,000) and Millipore, Bedford, Mass. (Millipore BaseStation).

[0238] In addition, advances in capillary gel electrophoresis have also reduced the effort required to sequence DNA and such advances provide a rapid high resolution approach for sequencing DNA samples (Swerdlow and Gesteland, Nucleic Acids Res. 18:1415-1419 (1990); Smith, Nature 349:812-813 (1991); Luckey et al., Methods Enzymol. 218:154-172 (1993); Lu et al., J. Chromatog. A. 680:497-501 (1994); Carson et al., Anal. Chem. 65:3219-3226 (1993); Huang et al., Anal. Chem. 64:2149-2154 (1992); Kheterpal et al., Electrophoresis 17:1852-1859 (1996); Quesada and Zhang, Electrophoresis 17:1841-1851 (1996); Baba, Yakugaku Zasshi 117:265-281 (1997), all of which are herein incorporated by reference in their entirety).

[0239] A number of sequencing techniques are known in the art, including fluorescence-based sequencing methodologies. These methods have the detection, automation and instrumentation capability necessary for the analysis of large volumes of sequence data. Currently, the 377 DNA Sequencer (Perkin-Elmer Corp., Applied Biosystems Div., Foster City, Calif.) allows the most rapid electrophoresis and data collection. With these types of automated systems, fluorescent dye-labeled sequence reaction products are detected and data entered directly into the computer, producing a chromatogram that is subsequently viewed, stored, and analyzed using the corresponding software programs. These methods are known to those of skill in the art and have been described and reviewed (Birren et al., Genome Analysis: Analyzing DNA, 1, Cold Spring Harbor, N.Y., the entirety of which is herein incorporated by reference).

### Example 4

[0240] To identify sequences containing microsatellites or simple sequence repeats (SSR), a SSR repeat pattern library is generated by using a Perl program, SSR_generator.pl, developed at Monsanto. The library contains repeat patterns of di-, tri-, tetra-, penta- and hexa- nucleotide repeats, a total of 5421 patterns. The length of di-, tri-, tetra-, penta- and hexa-nucleotide repeat units were 18, 12, 9, 5 and 4, respectively. These repeat patterns are used to search against the BAC-end sequence databases by the BLASTN program. If the search is performed on both strands, complementary and replicated patterns of an SSR library are removed from the library to avoid redundancy of SSRs. For di-nucleotide repeats, there are four unique patterns, i.e. (CA)n, (CT)n, (CG)n and (AT)n. Product scores are used as a criteria to extract potential SSRs from BAC-ends. If a product score is equal or greater than 90, the sequences are further examined.

[0241] The SSR-containing sequences identified from BAC ends are searched against each other as well as the existing SSR collections by using BLASTN, and clustering of the sequences is performed by using CLUSTER2, a tool developed at Monsanto. The minimal match-length is set to 100 base pairs. Any redundant sequences are removed and the unique ones are then passed through a visible inspection to further remove those with not enough flanking sequences for primer design and those with substantial ambiguous nucleotides.

[0242] Primers are designed from good quality unique sequences. A public available primer software program, PRIMER 3, (Cambridge, Mass.) is used. PRIMER 3 can be accessed though the internet at wi.mit.edu/cgi-bin/primer/primer3.cgi. Default parameters are used except those for product size and primer size are changed. Product Size is Min: 80, Opt: 100, Max: 120, while Primer Size is Min: 18, Opt: 22 and Max: 27. Oligos are synthesized by Genosis Biotechnologies, Inc (Houston, Tex.).

[0243] The above protocols are used to develop primers from Sequence id GM_M02_A2_B07_MR_MR containing the following nucleotide composition:

SEQ ID NO: 20083

AGGCGTTTTNCCTTGATACCTTCGNAGGTCCANCCTTTTNCTTGCTGTAT
CGACTCATTAACACCAAGCTCGGTGAGCACTCTGAAGATTATGACAACTT
TCGNTGATCTTTTTGTCATCGATATTNTAGNAGAGACCAATCTTTCTTCT
TCAAATGTCGCTCATGATATTTATTGTAATTATCTTCAATGTATGTCCAA
AAAGTTAACCTTTTTTGGACCCCCACAATAGAAATCTTTGAAATATTTAG
CCATGTGTTGGCAAGCCATTCATATTTCTTTGCGGAGAAACATGATCTAT
TGTGTCTTTCGGATGCTTCTTCTATGTCTTCTTCTTCTTCTTCTTCTTCT
TCTTCTTCTTCATTGACCACAATATTATCCAACTCAACTTAGGTGCAAAA
TGGTGGAATTTGAGACTTTGACGCANAGTCAGATGGTGCGTCATGCTCTT
TCATTACATTGGACATCATNTACTACCCTTTGAAGACCCTCGATCCATGG
AAGGGTTAATTGGTG,.

[0244] This sequence contains CTT dinucleotide repeats with a repeat unit of 11. Using the Primer 3 program, two primers are selected: SER157F GTGTCTTTCGGATGCTTCTTCT (SEQ ID NO:20084) and SER157R CACCATTTTGCACCTAAGTTGA (SEQ ID NO:20085). When these two primers are used to amplify genomic DNAs from eight different varieties, Minsoy, Noir, PIC, HS-1, A3244, H6686, A0868 and H5088, three alleles are detected. Sizes of these alleles ranged from 80 to 110 bp The size variation in the PCR products result from repeat numbers in different varieties.

### PCR Reaction Conditions

[0245] Genomic DNA is isolated from young leaves of Glycine max or Glycine soja plants. Two leaf discs are collected (approximately 40 mg) from a healthy leaf and stored on wet ice or at 4° C. Tissue samples are then freeze-dried and stored at −20° C. or −80° C. The frozen samples are kept as dry as possible and sealed from contact with the atmosphere. The freeze-dried samples from −20° C. or −80° C., are allowed to warm up to room temperature prior to unsealing or opening. One leaflet (or 2 leaf discs) is inserted into an 1.5 ml Eppendorf tube, placed on dry ice, and crushed with a wooden dowel. Approximately 200 μl of microprep buffer (25 ml extraction buffer (350 mM sorbitol, 100 mM Tris-base, 5 mM EDTA-Na₂), 25 ml nuclei lysis buffer (1M Tris/HCl, 0.5 M EDTA, 5 M NaCl, 2% CTAB), 10 ml 5% sarkosyl, 0.1 g Na bisulfite) is added to each sample. The sample is then homogenized. An additional 550 μl of microprep buffer is added, vortexed for about 30-60 seconds, and incubated at 65° C. for about 60 minutes. About 700 μl chloroform/isoamyl (24:1) is added, mixed well for about 10-30 seconds. Centrifugation of the tubes is performed at approximately 10,000 rpm for 5 minutes in a microcentrifuge. The aqueous phase is transferred into a new tube and RNA is removed from the extract by the addition of 30 μl of RNase (10 mg/ml) to the aqueous phase and incubated for 1 hour at room temperature. Approximately 500 μl ice-cold isopropanol is added to the aqueous extract, and the tubes inverted until the DNA precipitated. The precipitated solution is kept at 4° C. for about 1 hour or overnight. Centrifugation of the tubes is performed at approximately 10,000 rpm for 5 minutes in a microcentrifuge. The supernatant is discarded and the pellet washed 1-3 times with 200 μl 70% ethanol. The ethanol is removed using a micropipette and pellet dried at 37° C. for 10 minutes. The DNA is dissolved in 50 μl TE (10 mM Tris-HCl pH8.0, 0.1 mM EDTA), then kept overnight at 4° C. Centrifugation of the tubes is performed at approximately 10,000 rpm for 5 minutes and then the supernatant is transferred into new tubes. Using this method, approximately 2 μg of DNA per mg of fresh leaf tissue is extracted.

[0246] DNA concentration is measured by a Spectrometry (Molecular Devices, Sunnyvale, Calif.) and adjusted to proper concentration for use as template. The total volume for PCR reaction is 20 ul. The reaction mixture contains: Template DNA at a concentration of 15 ng, 0.15 uM of primer, 0.03 unit of Taq DNA polymerase (Perkin Elmer), 50 uM of dNTP, the Reaction buffer contains, 10 mM Tris.HCl pH8.5, 1.5 mM MgCl2, 50 mM KCl and water is added to a total volume of 20 ul.

[0247] The PCR is performed on a Perkin Elmer DNA Thermal Cycler 9700 using the following cycle profile: hold at 94° C. for 3 min, 32 cycles of 94° C. for 25 second, 47° C. for 25 second and 72° C. for 25 second, and 72° C. for 3 min of final extension.

[0248] An acrylamide gel is prepared using 56.5 ml water, 3.5 ml 10×TAE buffer, 10.5 ml 40 acrylamide stock solution, 50 μl TEMED, 0.06 g ammonium persulfate. To each PCR, sample 20 μl of formamide loading dye is added to each sample and the samples are denatured at 90° C. for 3 minutes with a 4° C. hold in a thermocycler. 1.5 μl of each sample is loaded onto the gel. Gels are run at constant wattage to give a constant heat development during electrophoresis at 40 to 50 Volt/cm of the gel length. Gels should be run at approximately 50° C. during electrophoresis. Electrophoresis is stopped when the Bromophenol blue dye is at the bottom of the gel. After electrophoresis, the gel is stained in 1×SYBR solution for 15 to 20 minutes with vigorous shaking. A Gel image is recorded using an Alpha-InnoTech imager.

### Example 5

[0249] In order to create a file containing complex repeats, the GCG (Madison, Wis.) REPEAT program is used to determine initial internal repeats. Stringency is defined as 19 matched bases out of every contiguous 20 bases in the repeated diagonals part of the REPEAT program algorithm. After the REPEAT program is run on the STCs, a REPEAT output filed is processed with the UNIX utilities grep, sort, uniq and sed to produce a GCG pattern file. The GCG pattern file is broken into size groups: <20, 20-39, 40-59, 60-79, 80-89, 100-119, 120-139, 140-159, 160-179, 180-199, 200-219, and >220. Each pattern group is compared against the entire STC library using the GCG FINDPATTERNS program. Sequences of size 1-19 are allowed no mismatches. The 20-39 group are allowed one mismatch. A pattern of size n is allowed floor (n/20) mismatches. Patterns that occurred in at least 100 STCs are selected in this step. The results of the FINDPATTERNS program is post-processed with the UNIX utilities grep, sort and uniq and with the GCG REFORMAT program to produce GCG sequence files. Each sequence file is derived from a selected pattern and placed in a subdirectory that corresponds to its size group. GELSTART, GELENTER, GELMERGE and GELASSEMBLE are used to coalesce similar sequences of each size group. Patterns are 90% similar before they are aligned and the patterns overlap by at least two thirds of the modal length in their length group. The GELSTART program creates a subdirectory which contains the individual and the coalesced consensus sequences. The consensus sequences are placed into a single directory and a FASTA style sequence library is constructed from it. The REPEAT-MASKER program is used to mask the original STCs. The unmasked sequences that remain afterward are concatenated into 100 KB pseudo-sequences. The pseudo-sequences are fed back into this algorithm and the new repeat patterns that result are added to the repeat library. The algorithm is iterated 3 times.

[0250] The repeat library is compared to the STCs using NCBI BLASTN version 2.0. HSPs are reported if they satisfied the criteria of:

[0251] “observed fractional match”>=“allowed fractional match”

[0252] where “observed fractional match” is defined as:

[0253] “fraction of HSP similarity”×“fraction of query sequence in HSP”

[0254] and “allowed fractional match” is defined as:

[0255] (“repeat length”−“floor (repeat length/20)”)/“repeat length”

The application's sequence listing, which the Patent Office published only in electronic form, follows.

SEQUENCE LISTING (20085 sequences)

SEQ ID NO: 1 - DNA, 394 bp, Glycine max
  unsure (1)..(394): unsure at all n locations
agctttccctctttgaacaaatacccctcagccaaatagaatccatcttgggcctttttcccacaactctcataaatgggagagaaatgttcatctaaagcatacaagtccctaatattatcaaatcctaaaatttgagctcctagggagcaaaacaatgtgtgtctcctagagagggcatcagctaccacatttgtttttccctttttgtatttgataacatatggaaattgctctaggtactctacccattttgcatgcctcttggttaacttgctttgccctctaatgtacttaagtgattgatgatcactatgaatgacaaattccttggaaacaaggtgtcgcaacctacccttcngcgggagggcgacgcgtgactcgcgggatgcgt

SEQ ID NO: 2 - DNA, 462 bp, Glycine max
tgaaggcaaactggacgttggtcaacttggtaacccagctggccttgaatcagaaatctgtacctgtcgcaagggtttgtggtttgtgctcctctgctgaccaccatacagacctttgcccttccatgcagcaacctggagcaattgagcagcctgaagcttatgctgcaaatatttacaatagacctcctcaacctcagcagcaaaatcaaccacagtagagcaattatgacctttccagcaacagatacaaccctggatggaggaatcaccctaacctcagatggtccagccctcagcaacaacaacagcagcctgctccttccttccaaaatgctgctggcccaagcagaccatacattcctccaccaatccaacaacagcaacaaccccagaaacagccaacagctgaggcccctccacaaccttccctcgaagaacttgtgaggcaaatgactatgc

SEQ ID NO: 3 - DNA, 284 bp, Glycine max
agctttccaagatattaagttcttcctcagaactgtcgtaagcgaagatgccaatgtgctattaacaactttcgtttgcccatctgcttgtgggagacatgtggctgaaaataacaatttagtgcccaacttgacccacacaggactacgcaaatggcttatgaacttacagtccttatcactaacaatgctgcttggtaaaccatggatgctcacaatctccttgaggaacaaattagccacatgggaagcatcatctacttctttacatggaataaaatgag

SEQ ID NO: 4 - DNA, 395 bp, Glycine max
ttggatgcctataagattattaaggctgaagtcgagaaactatgtggatagcaaattaagatcgtgagatctgattgaggtggagagtactatggtagatacacggagaatggacaagcacctagtctgtttgcgaagtttgttcaggaacatgggattattgcccagtacactatgcttggttctccggatcagaatgatgtggcagaaagaagaaaccgaactttaatggacatgataaaaagtatgagaagtaataaaaaacttcctcaattcttgtggattgaagcattaaagacggttgtatatatattaaaccgggttccaaccaaggctgtcttaaagacacctttctagttattcaaaggttggaaaccgagtttgcgacatatatg

SEQ ID NO: 5 - DNA, 423 bp, Glycine max
  unsure (1)..(423): unsure at all n locations
tcatgtttaatcatacattcaatcttattatagcaganaactcaaataaaaattctattaaaaggtagcactcgtggcatgagtccttataaatatctactacaaaagttttaaatactctgtccatgaggaaagcagtccagtatcttccaatactctatccattgatccatatttgaccttttcccataccctccatatccaatgccaatggttcatctccttcgggagcatcaaaataagtctgcgcagtttacggattgacttcatcagttntcaacctagtggtatttttttcagtctaagttaggacattactatgcaagatgaccttgtgccatgtcaatggttgagttctttgaacaactattgctgactgcaccacgcaacactatagatatcatttggagaggcaacattcat

SEQ ID NO: 6 - DNA, 464 bp, Glycine max
  unsure (1)..(464): unsure at all n locations
tagactaagttcagcctaccatcctcagactgatggccaaactgaacggaccatttagtcattggaggaccttttgaaggcgtgtgtcttagagcaaaaaggaagttgggagagttttcttccattaatagagttcacttataacaacaattttcactctacgattcatatggctccttatgaagctttgtatggtagaaggtgtaggacacccctatgttggttaaagcccggagaaggccttaccttaggaccggaagtggtacaacaaaccaccgagaaagtcaagttaatccaggaaaggatgaggactgctcagagtangcaaaaaagttatcatgataagaggaggaaagatctgaaatttgaggttggtgatcatgtattcttgagaatcactccgtggactggggttggtcgagcattgaaatcccgaaagctcacacctcactttatcgatcctt

SEQ ID NO: 7 - DNA, 460 bp, Glycine max
  unsure (1)..(460): unsure at all n locations
ntntattgattnnttttatgtcttgaccaagaattagagactaattctttgaaatattgagatttatttaaaagataatatctcccaaaaaaatgttattatattcaaactgattaatatgaacatgaaaaataaacaaaacgccttataaaatttagatttaggaaattatttttaattactttaggaaatgttattgatgtcacattcaaaaagtatgtgaaaggatgagtgataaatcataaaatttggctgctataagttatatcgataagattaaatttaatttttaactcaagaattaaggaaagctttcataaaaagagaaaaatcaaattttcatttgacatgataatggttagagcctaaaaataaaatataaattaaaaatatacatatcaaaatacatctaaattaattaaataaaaagtactaaattcattggaaactagaaaatgga

SEQ ID NO: 8 - DNA, 450 bp, Glycine max
tggatttccttttagtagggaatctatccttcctaagatagagccaaacctagtcaccctcattaagaactagctcttttcttcctctattgcctttagttgaatacacctttgtttgattctctatttggttcttaaccctctcatgcatcttctttacaaattctgacctagattccccttctttatgtataaaagaagtgtccagtgggaggggaatgaggtctaacggtgttaggggattgaacccatagacaacctcaaaaggggactgcttggtggttctatgaacccccctgttgtaggcaaattctacatgaggaagatactcatcccaagacttatggttgcctttcagaagagcccttaagagggtggataaagacctattcactacctctgtttgcccatcagtttgtggatgacatgtggtagagaacagaagtttag

SEQ ID NO: 9 - DNA, 442 bp, Glycine max
  unsure (1)..(442): unsure at all n locations
taccatcctcagactgagggccgagatgacatgaccatttagccactgcacgacctttagaacgcgcgtgtcttatagcctataggaggctgagagaggattcttccattaatagagttgacttataacaacaattctcactctacgattcatatggctccttatgaagctttgtatggtagaaggtgtaggacacccctatgttggataaagcccggagaaggccttaccttacgaccggaagtggtacaacaaaccaccgagaaagtcaagttaatccaggacaggatgatgactgctcatagtaggcaaaaaagttatcatgataagaggaggaaagatctgaaatttgagggtggtgatcatgtattcttgagaatcactccgtggactggggttggtcgagcatngaaatcccgaaagctacaccttactttatcga

SEQ ID NO: 10 - DNA, 247 bp, Glycine max
  unsure (1)..(247): unsure at all n locations
agctttgtgaatctcctgatctagcgccacccgatgatactcaaccattcgaagntgaatgtgatgctagtggaattggcattggagctgtcttgatacacaacataatgcctatagcttatttctcggagaaagtgggaagagccttgctgaattattgcacctatgacatagagatctatgccattgcgagagctcttgatcattggaatcattattttgcggctaatcactttatattggattc

SEQ ID NO: 11 - DNA, 418 bp, Glycine max
  unsure (1)..(418): unsure at all n locations
agcttatactcaataagaggatcccgctgcgcatatccccgtaaccccacggcttgctgaacaaattttagtgcctgcagatgttctttccacaggcgatcgatattgcttaagattaggaaccgctctgcttctttcatcaagcctgctgcttgttgctccacaatatcctatggggcagcattggttgtaataaaaaggtaaatttaaaaagaaataaatggtaaagaaaattatgtgaaaagacaaggccactgaaccaattcaagacgactcaatttttagacatgacacatgatggtaaaagtccaaccttatatagcacaaagttattacaagttgcactgaggtttgataaatccctctccccctttcccganaatgtataatcaattacttgatttaaatcacttatctc

SEQ ID NO: 12 - DNA, 461 bp, Glycine max
  unsure (1)..(461): unsure at all n locations
tgataaagagattntgatagaagactntgaggccaaactattccaatataaaatgagattcttttaacaatttaactaagtccttatttgtgattttcttgatcttatttgttgacttggaacaatgtgtgctttcatcaagtaaattcttttggcatcatcaaaacctgcacgattcacatttatgtcactcaacctctaggttttgagatcaaaaggaaggaattaatggtgtacaagttgaataaggccttgtatggtcttaaacaagcacctagagcctggaatagaaggattgactcatttttcatttagaatgaattcaccaagtacacaatggaatatgatgtatatgtgaaaaggaaaactaagggaatacttttgatttgcctatatgctgatgatttgcttgtgactggcagcaatagtgaagaaatagagaaattcaaagttgagatgat

SEQ ID NO: 13 - DNA, 451 bp, Glycine max
  unsure (1)..(451): unsure at all n locations
tgtaatcgattacacacatactgtaatcgattaccataggagttnttcagaanacattctcaatagtcacatctttttgtgtggttcttgaatggctatcataggcctatatatatgtgacttgagacacgaatttgaaaagagtttttcagaacaaaaaggtctgatcctcttataaagcaaaatcgcgttatcctcttacaaattccttggccaaattacttgtgattcaataaggaattatttgagtgctcaaattgttcaatctatctctttcaagagagattacttcttttcttcttctttattctgaagagggattaagagaccgagggtctcttgttgtgaaagaattctaaacacaaaggaagggtagtccttgtgtgtttagaactcgtacaagaaatttacaagatagtggaactctcaagcgggttgcttggggactgga

SEQ ID NO: 14 - DNA, 407 bp, Glycine max
  unsure (1)..(407): unsure at all n locations
agcttctatcagtgcaacaaagaccttagtttgttgatatggcaaatttcaaggctgtaggagtaattttgaaggaatgaattggcactagaagaagaaattctttaaggatgctaatcattatgtgcgggataatcctcacttgctcaagattagagcaaataaattgatataagatgtgtcattttggagcattctttggcattatcacaattcaccttatggnggccattttaatggagaaagaagtgctgccaaggttctccaagcangaattttgtggcccatgctatataaagatgcacatttgtatgtgacacaatatgacaaatgccacagaaaatgaggaatttcaagaacgaatgagatggccttgaacaacattcttgaagntgaagttttgactg

SEQ ID NO: 15 - DNA, 432 bp, Glycine max
  unsure (1)..(432): unsure at all n locations
tgtaatcgattgcacacatactgtaatcgattaccagaggagttnttcagaaaatattctcaacagtcacatctttttgtgtggttcttgaatggctatcataggcctatatatatgtgacttgagacatgaatttgataagagtttttcagaacaaaaaggtcttatcctcttataaagcaaaatcgttttatcctcttacaaattccttggccaaattacttgtgattcaataaggaattatttgagtgctcaaattgttcaatctatctctttcaagagagatttcttcttttcttcttcttcattctaaaaagggattaagagaccgagggtctcttgttgtgaaagaattctaaacacacaggaagggttgtccttgtgtgtttagaacttgtaaaaggaatttacaagatagtggaactctcaagc

SEQ ID NO: 16 - DNA, 432 bp, Glycine max
  unsure (1)..(432): unsure at all n locations
tatcaaccaaatacccacgttntcaaactcaaagtatattacaattacaaaacataaataagaaagatcttcacatctataaaaagacttaatgaacattaacagaaataaaacctaccagaacctgtaagtgaaagaaaatatacagacccatgtaaactatagaacatagatctaaccttttaagtggaaaataacataaacgtagaagtatgcaaatgaagatttaccaaatgaattcagtaatagcaactttacctgaaagtgtaaactgttaatgcagcacccaatccgccaaaacaatgggaccatgatcctctggaactctaccatgttaataacttccaaaatttcttccagttcacccagaaacatcacctctttctgactatttgttgctggccaatatttcaacaagccgcttatcacaat

SEQ ID NO: 17 - DNA, 349 bp, Glycine max
agcttctataaaggttcttatggactgcttgtctcatcattccagtaataccttcacccacaatattgaaaagcaagggagctaggggatccccttgcctcaaacccctagaaggattaaactccttagaagggctaccatttatcaaaattgatatcgatgctgagtggaggcaagctgatatccaagatctccattttggacaaaaacccattctgcacagcatgtaatccagaaaagaccaagaaactgaatcgtaggccttttcaaagtccaccttaagaatcatcacaggtttcttatttctccttgcttcctcaaccacttcattaaggatcagaataccatg

SEQ ID NO: 18 - DNA, 451 bp, Glycine max
  unsure (1)..(451): unsure at all n locations
tntaaggccctcaaatgactggatggcaacaccccacttaaatgattatgaaagagggataaatatgtgagattcttggacaaattaaaagaaggaagtggacctgtaaagttattggaagacaagtctagataaacaagttggctgagttctgagaatgaactaggaagtgttccattaaattggcagtaagctagatcaattgtagataactgcttcatattggaaattgcacctggaagctttcctgagaaatttgtatagctaagattcatgtgatgaagagaaccatgttgtgggaagtttggcaaagaacccccaagatcttggttgtctgagatgtcaaggaccttcaacgttgatatttggaatatatcttttggaaaagaaccattcaagccacaacttcttaactctagtgtgactaaattggagaaattacaaaggattc

SEQ ID NO: 19 - DNA, 406 bp, Glycine max
  unsure (1)..(406): unsure at all n locations
agcttgtcaaggccctaagcatggacaagtgttgttcagtgttgagagtggtagccttgacaagtgttgtccgggttgcttctgtcaagttgtctggggtggacaccctttttgatgcaagaggctccaagaggattgggctagagctgctgaagaaggtcctaaggttctcatgaactttaggatagatttttgagcccatgggccaaggttgggtccaattatctttgtacgtattagattacgatgtcactatatttggttcttgtaattagggctccataatgtaggtagggtaccctagaaatataggatttttcagcccttgtattttagggcacctagactagttnttgtattaagggtagttttgtaatttcacatgcactaagtgaatatttaatgt

SEQ ID NO: 20 - DNA, 460 bp, Glycine max
  unsure (1)..(460): unsure at all n locations
tgataaagaaattntgatagaagactttgaggccaaactattccaataaaaaatgagattcttttaacaatttaactaagtccttatttgtgattttcttgatcttatttgttgacttggaacaatgtgtgctttcatcaagtaaattcttttggcatcatcaaaacctgcacgattcacatttatgtcactcaacctctaggttttgagatcaaaaggaaggaattaatggtgtacaagttgaataaggccttgtatggtcttaaacaagcacctagagcctggaatagaaggattgactcatttttcatttagaatgaattcaccaagtacacaatggaatatgatgtatatgtgaaaaggaaaactaagggaatacttttgatttgcctatatgctgatgatttgcttgtgactggcagcaatagtgaagaaatagagaaattcaaagttgagatga

SEQ ID NO: 21 - DNA, 407 bp, Glycine max
  unsure (1)..(407): unsure at all n locations
atgatataagactttgaggccaaactatatccaatatcanaatgaggaatcttttaacaatttaactaagtccttatttgtgattttcttgatcttatttggtgacttggaacaatgtgtgctttcatcacgtaaattcttttggcctcatcagaacctgcacgattcacatttatgtcactcctcctctaggttgtgagatcacaaggagggatttaaaggcgtacacgtcgaataaagccttgtatggtcttagaccagcacctacagcctggaatataaggattgactcagtttacattgacaatgacttcaccaactacacagtggaatatgatgtgtatgagaaaaggataactacgggaatacttttgatctgcctatatgcttatgatttgcttgtgact

SEQ ID NO: 22 - DNA, 427 bp, Glycine max
  unsure (1)..(427): unsure at all n locations
tctctgcctcggntgaaacattggcggtgacatgtgacctcatgtggccacccaaggatcttccacaagggaagctcttgctgcagaacttgcacatgtgtttcacttcttgatcttcttccattggattgatttttcaagatcacacacacgcacggatcagcaaagaaagcaaaattaaccacactttcttgatcaccaccaacacaagagaaatcgatcacaagggaaaaacagcaacaccccagatcagcatcacatcttgaaagtggttggagagaagaataataccgagaagaagaagaagagaaaccccatgtctgaaaattgcaaggtggtgagtgcaagatctaacgcagaaaacaagaggaaaagaaaagggacaagagaacgtgtagtagtagcacaaactattatatatactata

SEQ ID NO: 23 - DNA, 427 bp, Glycine max
taaacattcaatttcgagcgtctccatatattacgcgactcaatcagacatctgagtaaaaagttattgtcgtttgaattggctcagaggttcaacattcaattttgagcatctcgatatattacgggactcaatcagacatccgagtaaaaagttattgtcgtttgaaatggctcagagcttcaacattcaatttcgagcgtctcgatatattacgggactcaatcagacatccgagtaaaaagatattgtcgtttgaattggctcagaggttcaacatataatttggagcgtctcgatatattatgggactaaatcagacatccgagtaaaaagttattgtcgtgtgaattggctcataggttgaacattcaatttcgagcgtctcgatatattatgggactcaatcagacatccgagtaaaaag

SEQ ID NO: 24 - DNA, 397 bp, Glycine max
  unsure (1)..(397): unsure at all n locations
agctttaagccaattcatacgacaataactttntactcggatgtctgattgagtcccgtaatataacgaaacgctcgaaattgaatgttgaagctctaaccctattcaaacaacaataacgttttactcggatgtctgaatgagtctcgtaatatatcgacacgctcgaaattgaatgttgaagctctaagcctattcaaacaacaataacgttttactcggatgtccgattgagtgacgtaatatatcgagacggtcgaaattgaatggtgaacctatgagccaatttaaacgacaataactttttactcggatgtctgattgagtcccgtatatatcgagacgctcaaaatgaatgttgacctctgagccattcaagacaatacttttactcgat

SEQ ID NO: 25 - DNA, 405 bp, Glycine max
agcttcttagtttcagatgatccagatgggtttgtagctacctcatgcactcctctaatgactatggcatcatttctggcgctaaactgctgggagttggaggccatcttctcaattaaatttctggcttcagcaggagtcatgtctccaagggctccaccactggcagcatctatcatacttctctccatattactgagtccttcataaaaatattggagaagaagctgttctgaaatctgatggtgggggcaactggcacatagtttcttatatctctcccagtactcatacaggctctctccactgagttgtctaatacctgagatattcttcctgatggctgtggtcctggaagcagggaaatttttttctaagaatactctcttaaggtcatcccagctc

SEQ ID NO: 26 - DNA, 312 bp, Glycine max
  unsure (1)..(312): unsure at all n locations
agcttgtatgggtgagttataaattataatacctcagcttggttcaaaagatcatgtttactccgtcgcacgttgagcaagttttgcacagcttgcccctctatggacatcctcacccgactagctcttactctggcctgaactcgaaccaatgcctgcatgcaccttaatgtccncgctgtctgcttcctcacctgtctccccccgaacaagtgcttgaatcctcaccactggcttcaatgccctcaaagcccttcttgcctgcaatcaccacacaagtgatgtcgaaatataatgttggtctaatggtaa

SEQ ID NO: 27 - DNA, 394 bp, Glycine max
  unsure (1)..(394): unsure at all n locations
agcttcttgatatactgcagcacgattatattaatgcttcatagtattttttgacatatatattaatattgtcaagctaaaggcacaatttttgttatgctaattgataacaatgatagaaatgatcttagatacaccaagctgccttggatatgatgtttgattcgatgatgattgggtagtcagagtaaatgttagtttagagaggaagaattaactaagttaattatattaaagattaataatttgaaatgagactattaaaacatatagataataaattgtcataatgaaaagtttacgatctgtttggaatatgataaaataggataagatataccattatgataaactttaggtttatttaatatttgatgcacactanataatatta

SEQ ID NO: 28 - DNA, 340 bp, Glycine max
agctttcagctatgtatctcattagtaatactttttcgtgctgttggatgggcaacaattgcctccttggtggtgatagtaatcactgtgctttgcaatactccactcgcaaagttacagcacaagtttcaaagcaaacttatggtgacacaagatgatagattgaaggcttgttctgaggctcttgtgaatatgaaggtgttgaagttgtatgcgtgggaaaccaattttagaagttctatagagagattaaggaatgaggagctcaaatggttgtctgcagtgcaattaagaaaggcatacaacacctttctcttttggcctctcctgagttggctct

SEQ ID NO: 29 - DNA, 376 bp, Glycine max
ctgaatgctctattcaatggagttgacaagaataccttcagactgatcaacacttgcacagtggccaaagatgcgtgggagatcctgaaaaccactcatgaaggaacctccaaagtgaagatgtccagattgcaactattggccacaaaattcgaaaatctgaagatgaaggaggaagaatgtattcatgacttccacatgaacattcttgaaattgccaatgcttgcactgccttgggagagagaatgacagatgaaaagctggtgagaaagatcctcacatccttgcctaagagatttgacatgaaagtcactgcaatagaggaggcccaagacatttgcaacatgagagtagatgaactcattggttcccttc

SEQ ID NO: 30 - DNA, 396 bp, Glycine max
  unsure (1)..(396): unsure at all n locations
agcttcatgcttaactatgtatggaaaaacttcattactgttgttcaagacatacaagtgagcttgtaacaaatcttctacacttggagtgatcacctgcagtcctcttgaacccttaccacccactctgtcatcatgccgacactcaggaagcccaacagctttagccttctctaagtattctgaacaaaattcaatggcttcttctgcaatgtacctctcaacaatagatgcttccggacgatatagattctttgtatacccttttaagatcttcatttatcgctcaaccgggtacatccaccgtagataaacaggaccacagcatttgatttctctgaccagatgcacaatcaagtgaatcatgatgtcaaagaaagcangggaaaatacatc

SEQ ID NO: 31 - DNA, 403 bp, Glycine max
agcttaacaatccttttgatctatttcaaaatatttctatccctatcatataacttgcctcactcatatccttcattttaaagttacaagagagaaactttttcgttgagcatttttctaaattggaaattgtgatgttgagcatttttccatcttaaatctctctagtactttattgatatatgctttttgagacaagcttaacaatcctatgatctatttcagaatatttctatccctatcacaaaacttgcctcacccatatccttcatttcaaagttattagagagaaacttcttagtctcatgaagaagatcaagatcattagttgcaagcaatatatcatcaatatacaggattagaaaaataaccttactcctactgaccttcagatatatacatt

SEQ ID NO: 32 - DNA, 387 bp, Glycine max
tcttatccaaggctcatcttggaggcgaagctacttcttccatggcttattccctaatggaaggcgcctactctcagctcttctactttgtcttccgctgcatctacatggtggaaaatcactattaaaggacctcattgaagctcacagatccaacctgcatagagaccccacaggcaagcttccatcataaccactctatttgccctaccagggatatccaacttggacactgcactcgccaagtacatacacgacatacatcattacaatgacactatcaacatccacagcatctaagtctgatgacactatgatcatctacctgatcccgtctcgatgtcattctcaacatcaacagtatctgatctcaatgacataatcaac

SEQ ID NO: 33 - DNA, 377 bp, Glycine max
tgaaggatgtaagattctgtgattcttcaatgtccaccacaatgtgatcaaactttgatgtcagtgttctgagcaccttctcaatcaccagttgttccttaatttgttctccacagcacttcatctaattggtgagtgtgagaatcttggtgaaatactcagctactgattcagtctcctccattgcaagaagctcatactgtcttctcaatgtctgaagctttaccttctttatcttttctccaaagataatccaatatttatttagatcaagatatctaaatatatattttagtaaagtaaaagatagatacaattgctttaatatattatattgttattcttattctcgaaagatgttattatcataatatatt

SEQ ID NO: 34 - DNA, 381 bp, Glycine max
  unsure (1)..(381): unsure at all n locations
ngccgccacggagttntccgactatgctcttgtgtgttggaacaagctacaaaaggagagagcaagaaatgaagagccaatggttgatacatggacggagatgaaaaagatcatgaggaagcggtatgttccggctagttactcaagggacttgaaattcaagctccaaaaactaacccaaggcaacaagggggttgaggagtatttcaaggaaatggatgtgctcatgattcaagcaaatattgaagaagatgaggaggtaactatggctcgatttcttaatggtttgactaatgatatccgcgatattgttgagctgcaggagtttgttgaaatggatgatttgcttcacaaagcaatccaagtggagcaacaattaaa

SEQ ID NO: 35 - DNA, 324 bp, Glycine max
  unsure (1)..(324): unsure at all n locations
agcttgaaattgaacaacggaagctctcgagaaaatcgagtggtcataaattttcacacagatgtccgattcggggaaataatatatcgagacgcacgaaattgaacaacggaagctctcgagaaatttgaatggtcataacatttcactcggatgttcgatccggggacataatttatcgagacgctcgaaattgaacaaccgaagctctcgacanattagaatggtcgtaacttttcacgcgaatgttcgattcgnggacataactcatctagacgctcgaaattgaacaacggaagctctcgagaaatttgaatggtcata

SEQ ID NO: 36 - DNA, 439 bp, Glycine max
gtctccactaagttgcctaatgcctgaaatgtcttttctgatggcagaggtcctagatgcagggaagaatttctccaagaacaccctcttaaggtcatcccagttgaaaatggacctgggagcaaggtagtatagccaatcttttgccactccctccagagaatgaggaaaagcctttagaaagatatgatcttcttgaacatcacggggcttcatggtgtaacaaacaatatggaactccttaagatgcttataaggatcttcacctgcaagaccatgaaacttgtgcagcaaatgtattagtccagccttgagaacataaggaacaccttcatcaggatattgaatgcacaagctttcataagtgaaatcaggtgcagccatctccctaagagtcctctcacgaagtggaggtagagccatgttctcagtatgaaaa

SEQ ID NO: 37 - DNA, 455 bp, Glycine max
  unsure (1)..(455): unsure at all n locations
tcaagcttgacaagcccaaatgtattgggttggttcaattagacctagccttatcaaatcttgtcattcttgtttagttgcttgtaaatctgaaggtgacattccaggatgcgttgcctttgttgggctgatatcttcatttaatcaaaatgacagatcaacaaagtattctttatttttgcataaaggatatagatgtttgaaatcttcatgaccatctgcacataaagaagaaatttcttgtttaaattctccaacttctggtgggacttttgctaaagaaaaaaagcctaatcatttcttaaaaaggcttgaaatttcttttaaatttgatccctgtagaatgtaattgaagtttactggcagtagtatagacatccattcctatgaggagatctctgtcgggcagtttacttccaatgaccttggtccanatgatacaatcagggaaaaac

SEQ ID NO: 38 - DNA, 318 bp, Glycine max
  unsure (1)..(318): unsure at all n locations
cacccgacgaagagactgacaaaaacttattctcttctttttggacaaagtattgcaagctgggggcaagttaattttcttaccatcaaaccttggatgcaactgtgaacgtatgcccatattagctaaatgttgacgggtattcaagccatccttcgtctctgcctgaatgttaaggagcagtccaatcacactggcacaaacattnttcttcacatgcataacatcaatacaatgtctaacgtcaggatcagaccagttcggaaaacaaagaatatagacctcttctttcatatgcaactcttacttttatacttc

SEQ ID NO: 39 - DNA, 461 bp, Glycine max
  unsure (1)..(461): unsure at all n locations
tgtggttnttagcgatactcaccaaaattgtgtaacacaagcntacatcaagtttatcatgtcctagaagatccagttgaacaacatcaaacacaaaatgttgagcaactttttgaacaacatcaaacacaagatgttgaacaacctgttgaacaacaaccaaaaggtgtggatgtaacattgagaagatcaactagaataaagaaacctgtaattcctagtgattatcatgtgtattcacaagagtctcaatatgactttggagttgaaaatgatcctgagtcatttttgcaagcaattaacagttgtgattctaagctatggtatgatgctatgaaagatgaattggaatctatggtaaataataaagtatgggatcttgtagagtttcctaatgggataaagcctattggatgtaaatgggttttcanaaccaagaaggattcattaggtaacattga

SEQ ID NO: 40 - DNA, 441 bp, Glycine max
actcagctaaccatgatggaaagtactgaccaaatagaatctttttatctttaggattagaacatatgatcaagccagcattaatgtttgggacgtgtatggtgatcaagaatcatttcatctcttaattcaatcatcttacaatatgatttatcaacaattaacaactatgataaaaactaagaccatttcaatataattaaacgtaaaatacttaattattcacagtaataattaagaataaaacttaatagattgatttatttattactccatccttgactttctttctagagaatagtagcttttatgtatctgtcattacaaagttcagaagatcatattaagtatgtttgatatcacatatacccttagatatttctctatctataatcaaatcttacatgtaaatgatgtaattaccatggagtggagagagag

SEQ ID NO: 41 - DNA, 457 bp, Glycine max
  unsure (1)..(457): unsure at all n locations
tgaagaaatngctaaggaaaatgtgaaattatgaagtgatcttttcttttatattatgagtatgnggctttaagcaatgaagagtcatcctcaaatgaaaggaatgttggtggcataaactctgtaactgtccatgtgcctaatacatctgctatgactaggtttgatcaattaatgagccttatgcatgacaaggaaataattccaccaatgaaatcagaactagatgcttatcttgagaagaaaaatacttatattcctaataatggaaactcctcttttattgccttggagtggtggaggaataacaacttcaaatataagattttatcaaagatggcaagagatacactagttgttccagtatcaatcgttgcatcacaatctacatttagggctggaggtagagtaattgatgagtatcgttctagattgaatgaagaatctattgaagctc

SEQ ID NO: 42 - DNA, 461 bp, Glycine max
  unsure (1)..(461): unsure at all n locations
gggagaaccaagatgcactggcccagatgtcaaggagttcattatttttgtgaattgagaaacgatctttgattgtaatagaattcaaggccctgtaatccacacacatgcgtcaagttccatccttctttttcacgagtaacactggagaggagaatgggcttcgactgtgttgcattaaactggaattgagtaattccataactgtcgttcaatttccgacttctggaagtatggatatttgtagggtctaacatatgttttgccttcaaaaaaaattatttgctgattaacagaaaatgagaaacgagcaactcattatataaagggaaataacgttttgaagatgatttaattatgaaaaaaggacaaattaaccggatatatttttacctctcttttcttctttgtggtttgaggatttttttggatggtggctnttgtcgccctcaccaacatta

SEQ ID NO: 43 - DNA, 156 bp, Glycine max
  unsure (1)..(156): unsure at all n locations
tcttggatggctactcggngtataattagatagcagtagatcctaaagaccaagaaaaaaatggctttacatgccctttcggtgtctttacttacagaagggatgccattgngttatgtaatggccttgccaccttccaaagatgtatgctagcta

SEQ ID NO: 44 - DNA, 442 bp, Glycine max
  unsure (1)..(442): unsure at all n locations
taataaatctatatatggtttaaaacaagcctcctgtagtgtttccttaagtttcatgggataatttcttcatttgattttgatgaanaccccatggattaatgcatataccacaaggtaagtgggaagtaaaatatgtttcttgttttatatgttgatgatattttacttgacaccaatgatcgaggtttgctacatgaagtgaaacaatttcaatctaagaattttgacatgaaagatatggatgatgcatcttatgtcatcgacattaagattaatagagataaacctcgaggtattttgggtctatcacaggaaacctatattaacaaaactctagagagatttcggatganagattgttcacgaagggttgctcccattgtgaagggtgataggtttagtttgaaccagtgcccanagaatgactttgagagggaac

SEQ ID NO: 45 - DNA, 436 bp, Glycine max
  unsure (1)..(436): unsure at all n locations
ntggaatattattttcgggcgctcgagcgaaacccattcttactccaagcttttaataatatggccgggatctgtcattacgtgcgactatctccactatagaaagaaaaaagaaaagaacaagctaatccacaaatactaatataataaatactagaaataaaggctttctacatatacatatatcgtccaaaacaacgattnttatcagctgtagcaaagaatgaaacttcatagaagtcaaaatatgaagaaatcaatatgtctagatacccccttttctatggataaaagatctaattgataaaggaagcatcgtaaggatccattaacgcggttntgaaccgatacaataaaaactgcttacttatctcatgatagaaaagtcaggaatccacttatgtaatacagtagaatccccgatattntgagcagc

SEQ ID NO: 46 - DNA, 220 bp, Glycine max
  unsure (1)..(220): unsure at all n locations
tcgtcttattcanaaccncaaccaattatganatccnctatctcccacttcacacctcggaacgcaccgttcttatagagagaggcgctntcacatcnttcttaggctgggagaggaaatgttcccatnttttatgatactccggngaacagatatccagtggagatgacggngtggngcctgtagctcagaggattagagcacgtggctacgaaccacg

SEQ ID NO: 47 - DNA, 405 bp, Glycine max
  unsure (1)..(405): unsure at all n locations
tatgctgcatacattgataatagacctcctcagctgcaaatcttatctcagtagaataattatgacctttcaagcaatagatactattctcctnggaggaataatacaaatgtgagatggacaagtaactccacaagaacaatagcctgttcttcatttttagaatgttgctggtccaagcaagccatatgttccttctccaatacagcagcagttacaataaagacaacaagcagtttcaacctttcttataagagttagtgagacaaatgaccttccagaatatgcgatttctagaagagacaagagccttcattcatagtctgacaaatcagatggcgcagatgggtactcatatgaaccaagcttagtcccaaaattttgacaaattgtttcacaagctgt

SEQ ID NO: 48 - DNA, 259 bp, Glycine max
  unsure (1)..(259): unsure at all n locations
gtaatattatagccgatgctctntctcggcgtcatgcattactttctatgcttgaaacannaatgattggtcttgaatgtttgaanaacatgtatgaaaatgatgaaactnttggagaaattttttaaaattatgatattttttcagaanatggtttctttagacatgaaggctttcttttcaaagaaaacannatgtgtgtgcctaaattntctactagaaatttgcttgttttgtgaagcacatgaaggaggttaat

SEQ ID NO: 49 - DNA, 338 bp, Glycine max
  unsure (1)..(338): unsure at all n locations
acatctaactcagactaccgattcatgccaataatatatcgagacgcttganattgaacaacggaagctctcgagagattcaaatggtcataactnttcacatggatgtccaattcaagtgcataatattctgagatgctctaaatttaacatggaagcacaagggaaattanaacggccataacctataacaaggatgtccgattcaggccaataatatattgagacgctcgatattgaacacttatgctctcaagagattcanatngtcatacattntcactcggatgtccgattcagacgcataatataccaacatgctcgatattaaacatcac

SEQ ID NO: 50 - DNA, 446 bp, Glycine max
  unsure (1)..(446): unsure at all n locations
tccnctcccnctcttttaagataaaagaaaataatttatcaatttattgataatcatcataaagaattaaatattntaaaaaattaacaactaanagattgagtgtttcgattggatatcgagttggagtttatattttcgttgctcatttgacttctgcttatttattctttgactgttgtgtgaattgaggtgttgtttatctaagattaattcttattaaatttcttctgttggaggattaagtaattaaaatcaatgaattntaccattttgaagttagtaaagtggaaatttttatacactgatgaataatgaagaaaacaaatttataatttattatacacttacgtatattcacatgtctaaccgatgaatttaaatcagagacgatattttcttaattaaaacattttanagaaatgaaacttanaactgattaatca

SEQ ID NO: 51 - DNA, 239 bp, Glycine max
  unsure (1)..(239): unsure at all n locations
atggtgtcttggagcgtgcttgtgattntntctttcgccatgctgcacaactntcaggtgttcccttgagaatggtggagagaagcagaaggcagttccctcttagaanagcccgtgatgctgcagaagacatgctctctgggctactcanagccaagggtgatggattcatgacattgatcgaaaatggtaaatggatgtgtgacgaggcacctcacagtggaaatgaatatgtaaac

SEQ ID NO: 52 - DNA, 458 bp, Glycine max
  unsure (1)..(458): unsure at all n locations
tcaagaattatggcctcatcaaactacttgtttcccgagggattttctataaatagacctcccatctttaatggagtgggttaccactactggaaaacccgcatgcaaatctttatagaggcaatagatttaaatatttgggaagccatagaacaaggaccttatgttcccactataatggccggaagtgcaacaatagaaaaacctagagcagattggattgaggaagaaagaagattagtacaatataatttaaaggccaaaaatattattacatctgccctaggaatagatgaatactttagggtttcaaattgtaaaagtgctaaggaaatgtgggatacactacaggtaacacatgaaggcactacagatgttaaaagctctaggataaacactntaactcgtgaatatgaactgttcanaatgaatgtaaatgaaagtatacaagacatgca

SEQ ID NO: 53 - DNA, 224 bp, Glycine max
  unsure (1)..(224): unsure at all n locations
catctacaacagacctccttaacctcagcagtatattcatccacaacagaataattatgacctctccagcaacaggtacaatcccgagtggagaatcatcccaaccttagatggtcgaatccttcacaacaacagcagcaacaacaacaaccttaatttcanaatgctgctggcccaagcagaccatacgttcctccaccaatccagcaacaacaacagcaaca

SEQ ID NO: 54 - DNA, 290 bp, Glycine max
  unsure (1)..(290): unsure at all n locations
gtttaagtcttctaaactgcctatctatattccatagcctataacaacttccgtgtgcccatcggcttgtgggtgacaagccggtgacaataacaatttaatgcccaacttgctccacaaagtcctccananatggcttaagaacttagagtccctatcactaacaatgctccttggcataccatggagtctcacaatctccttgaataacacatcagccacatgggaagcatcatcaactttcttacatggaatataatgagccattntagaacacctatcaacaacca

SEQ ID NO: 55 - DNA, 272 bp, Glycine max
  unsure (1)..(272): unsure at all n locations
gctcttaactgcacaaggctcttaatatgtgaagagtatccttgtgtaaccttcacncgacgaagacactgacanagacttatcttcttcttattggacacagtatggcaggctggcggcaagtaaatattcatcccatcagaccttggatgcaactgtgatcgtatgcccatatcagctagatcttaacgggtattcaagccatccttcgtcttgccttgaatggtaaggagcgtaccaatcacactgtcacaaacattgttctccacatg

SEQ ID NO: 56 - DNA, 423 bp, Glycine max
  unsure (1)..(423): unsure at all n locations
ttatgcagggaagctaagtgtgaagtatgcaatcctgcatatgtttggcgctgcaaactgggtacccaccaatcacacttccactgttgccacaggtttgggtaaatttctgtatgctgttggaaccaagtccaaatttaattttggaaactatatttttgatcaaactgttaagcattcagaatcttttgctgtcaaattacccattgccttcccaactgtattgtgtggcattatgttgagtcaacatcccaatatcttaaacaacattgactctgtgatgaagagagaatctcctctatccctgcattacaaactgtntgaggggacacatgtcccagacattgtctcgacatcagggaaagctgctgcttcaggtgctgtgtccaaggatgcttttgatgctgaactcaaggacacatg

SEQ ID NO: 57 - DNA, 449 bp, Glycine max
  unsure (1)..(449): unsure at all n locations
ntaatgtgttctcccttgtagaactactaactgcagtaacagttgcagtccatctatccggtagtgatgacaatagaatcaattccttcacctcatcctcaaatttaatttgcactgactccaactgggcaagaatagtattaagttcattaatatgattagttatagagttagcttctcccatcttgaggttgaacaaccgacgcatcaagtatactttcttggctgcagatggcttctcgtacatatctganaacgccttcattaagtctgcagtagtcttctcgtttatgatgttgaatgcgacgttcttggctaatgtgaatctaatcacgccaagagcttgtcgatctagcaagttccattcttcttgcctcatgtcatctggcttatcccctgatcagggttgatacaacttcttctgatatagataatcctctatctgcatc

SEQ ID NO: 58 - DNA, 373 bp, Glycine max
gttgtcgctgagaaactggttcccagaagattttttgagtgattattgctgaaaaccctagccctgcaacgagtcctacggaagtagacacggagatggacaagaaaatacggtgtattgtgagtagctttttgaaagacgcctctgtacctgaagctgatgaagatgtcccaacatcgtccaacccaaatgtttctgtgcctgatgtctagatagatgttctaacatcttccggcccaaatgctgaagtactctctttccccagcacagagagatcaacagaggaagatgatcaagcctcagaggagactcctgcaccaagggcaccagaacctgctccaggtaacctcattgaccttgaagaagtagaatc

SEQ ID NO: 59 - DNA, 402 bp, Glycine max
  unsure (1)..(402): unsure at all n locations
gctagagcttagctacacatacctctctaatagctaagctcacctccttgagatgagaagctagagcttagctacacacccnctataatagctaagctcacccncatgacananaaaacatganaatacaaaanaaagtccttactacaaagactactcanaatgccccgaaatacaaggctaaaaccctatactattagaatggccaaaatacaaggcccaaacgaagaanaaacctattctaatatttacaaagataagcgggtcatgcttagcccatgggctcgaaatctaccctaaggctcatgagaaccttanggccttcctttgatctctagcccaatctacttggagtcttctacccaatgcccttgcaggataggattgcatcacatgtcatga

SEQ ID NO: 60 - DNA, 219 bp, Glycine max
  unsure (1)..(219): unsure at all n locations
tattgtagccgatgctctttctcggcgtcatgcattactttctatgcttgaaacaaaattgattggtcttgaatgtttgaaaagcatgtatgaaaatgatgaaactnttggagaaatctttagaaattgtgagaaattttcagagnatggtttctttagacatgaaggctttcttttcanagaaaacaaattgtgtgtgcctaaatgttctactagaaa

SEQ ID NO: 61 - DNA, 353 bp, Glycine max
  unsure (1)..(353): unsure at all n locations
cgacacataactcccaccgcatatagaatatcgggccttgtattggttagataccttatactccccacaagactcttgaagaccgtggaatctaccttctctccttcatcaaactttgatagcttcaagccaccttccatatgtgtgttcacgggattgcaatcaagcatattatatatcttcaacacttcttttgtgtagctttcttgtgagacacagataccattctcccgttgttcacttncattcccaagtatatgacatgagtccatatttgcatatcaattcacagacatgactcttgagtctcaacaatttggtattgcgataaataggcatccctaaacaataat

SEQ ID NO: 62 - DNA, 365 bp, Glycine max
  unsure (1)..(365): unsure at all n locations
ctctacaattgcatcacctctcaatgatctggtgaagaagaatgtggcatttacctgtggtgaaaaaaaggagcaagcctttgctttgctcaaagaaaagcttactaaggctncagttctagctcttcctgactnttctaanactttngagctagaatgtgatgcctctggagtgggagttagagctgtattngtacaaggtgggcactctattgcttattttagtgaanaacttcatagtgccaccctcaactaccccacctatgataaagagctntatgccttaataagagccctccanacttgnngaatataccttngttccangggaattgcattcatagtgatcatcaatcacttaagta

SEQ ID NO: 63 - DNA, 301 bp, Glycine max
  unsure (1)..(301): unsure at all n locations
agagacatgaaagaccggatgagntttactgtgagatggaagatctaacttataagcaacaacacccaccttatntaacacctggaaaggaccataaaatcgangggagagnttttcattaatccttntagccaaggatcttctcttgtagggtgcatcttcaagaacacccaatcaccgactgtgtattctatgtcctgacgaacgtttgtggcattngctcgcatgatatcttgagacttcaacangatttctcttatagtagccaataattaatctaagcaannttgtagttattgac

SEQ ID NO: 64 - DNA, 341 bp, Glycine max
  unsure (1)..(341): unsure at all n locations
tctacacctgttgcaagagtctgtggtctatgttcttctacagatcaccatacagatctcggtccttctttgtagcaatctggagtcaatgagcaacctgaagcttatgctgcatacatttataatagacctcctcagcagcaaaaccaacaacagaaaaataattatgacctttcaagcaatagatacaatctaggttggaggaatcatccaaatctgagatggacaagtccttcacaacaacaacagcttatcgcttctttctagaatgctgctggtccaagcaagccatatgtntcttctncaatacagcaacaacagtcacaaanaagacaacaagc

SEQ ID NO: 65 - DNA, 488 bp, Glycine max
  unsure (1)..(488): unsure at all n locations
atctccttcttcactacatcaagaatcaccgngttgagtcttctctgtggctgtcttactgggttagctccatcttctanatntattcgatgcatacatgtggatgggctaataccaggaatgtccgccagggtccagcctatagccttcttatgcttcttgagaactgacaacaacttctcctcttgctcatcagcaagggaggcagatataatcactggagaactcttgctatcatccaagtaagcgtattntaaatntgatggcagaggcttcaattctggtgtggtcggctggacagtggtagaaggagatggtttctcagcctttacctcataaagaaagtcagaggtatgtgtacttcctgaaacatggttagtcctatctgactctatnaaatcaatctcaagaggtanaacaccaccaccaggcatgcantcaatatcactctcagaatcactctcagcatcanattcagacatatgatc

SEQ ID NO: 66 - DNA, 396 bp, Glycine max
  unsure (1)..(396): unsure at all n locations
cacacatgtagtgaacatctatgataacctgcttcgtgtaagcattgtgttagctataatntatgaagaaccacttctagttctataattgtacaacatattagcatatgccanactatgtgtatcatttggatcaccagaataagaatattacctcaataaaatctccttttggcattagtgctctgcatgcatctctantcctttggtatggtgatattaaactagtgatgcaaataacaccagcatctgcaaagaagttagccacctcacctgaanatntaaatcgtgatgtctaantattaataaaacaataaaatataatcggaagatatcaggganagcatttagaaagcaacataagaaaaaacagaataactcaccaatccttctaat

SEQ ID NO: 67 - DNA, 358 bp, Glycine max
  unsure (1)..(358): unsure at all n locations
gtatgtgtatgcagaagatgataggatgaagctaacttacaataattccatgtgctcctctatagtaactgcttgntatagtcctgaatcgctcctgtccagctgtatcccactaaacaaaacacaacanatgaatccaagcttggcatgcatgtggcaataatcatgaatatgatcaagtgaaatgatgatntcgctntgattctcattacccaacaccgacagaggtgaatgcagaaattatggtaaattacaccanacaaactanaaacacaataatatagaatcggggcattatanatgaagtagtcgggtaaagacattgattcgtgtcagtgaagtgtgatactcacaatct

SEQ ID NO: 68 - DNA, 431 bp, Glycine max
  unsure (1)..(431): unsure at all n locations
tatcgagacgctcganatcatcaacggaagctctcgatanattcgaatggtcataacatttcactcggatgtccgattcngngacataatatatcgagacactcgaaagtgaacaacggaagctctcatgatattcgaatgctcataacatttcacacggatgtccgattcggggacataactcatctagacgctcgaaattgaacaacggaagctctcgagagattcgaatggtcataagaattcacacgaatgttcgattcggngacataatatatcgatacgctcgannatgaacaaccgaagctctctagaaattcgaatggtcataacatttcactcggatcggtcgattcgngacataatatatcgagacgctcganattgaacaacggaagctctcgacanattcgaatggcataactttcaca

SEQ ID NO: 69 - DNA, 173 bp, Glycine max
tatattgagacacacaatttcgtgctccttctcttcctctccctccactcatgttctccttactttaagctcttatccatgagcttctatggtggtgagcttcttcttgactcatcttctgctagaagggcatctccatcatctttcttctttttattcactgccttaaacta

SEQ ID NO: 70 - DNA, 380 bp, Glycine max
  unsure (1)..(380): unsure at all n locations
gctgaatatatagctgcaggaagttgatgtgctcanagtctttggatgaagcaataactntaacactctggagtanaccttgatcacattcctctaaaatgtgacagcacaagtgcgatcaatctaacanaaaaaatcttgtcatgcattctagaactaaacacatagaaataaggcatcattntctcaaagatcatatgttaaaagttgattggtgcattgagttcatagatagtgagcatcaactaacagacgttntcactanaccacttgctagagatagattctntttcgttagaaatgaactagacatattagatgcatctagtatagaatgacattctatttgcatagtgtgtgatgcacattcttactcatat

SEQ ID NO: 71 - DNA, 393 bp, Glycine max
  unsure (1)..(393): unsure at all n locations
tcagctgaatcacttccctcttcanacactagaatagatattatatnnggtctttataacacaagtcatacctaattcngattggtctgactaaacaatgtanaagtatttatactagtgatttatgaaaaataaattcattntanatntgtgtttaattntaatttattgctggtgtaaataattttaccccatcaactaattaanaatcttaatgtaattataagaatttaattatttagcacccacaatataatatataggaaccagtacaaaaaattctttttaacattagttgnntttaacattntatatatgttttgtaatgtatgctaataagttgatatagaaacactacaagaaaaacacttaaacatgtttgatatatttttt

SEQ ID NO: 72 - DNA, 269 bp, Glycine max
  unsure (1)..(269): unsure at all n locations
accatacagaacctttgccttccatgcagcaacctggagcaattgagcaacctgaagcttatgttgcanatatttacaatagacctnctcaacctcaacagcaaaatcaaccacagcagaacaattatgacctctctagcaacagatacaaccctagatggaggaatcaccctaatctcagatggtccagccctcagcaacaacaacagggggtacggaaagtacccccttgaattgtatattcaagacatttgagaataaacaaacac

SEQ ID NO: 73 - DNA, 365 bp, Glycine max
  unsure (1)..(365): unsure at all n locations
cactcacacaccgcactctccaatccttagctcanacctatggtcctttgatgctacttcactttggaaaaatgccagttcttggtgtctcaactgctgangctgcacgtgagggtatgaaaacacatgacctcgttntctccaacagaccacatcgtaagatgtttgatatcctcttgtatggttccaaagatgtggcatcttctccatatggcaactattggaggcagataaggagtatatgtgtcttgcatcttctcagtgccaaanaggttcaatcttttggtgcagtgagagaagaagaaatctccataatgatggagaagatanngcagtgtgtcttcttgatgctgtgaattatctga

SEQ ID NO: 74 - DNA, 192 bp, Glycine max
  unsure (1)..(192): unsure at all n locations
caaccaaagatatgaagatgtgagatgtntggttctctgccatcgaataattcatatgaagtnttctntaaaatgggtcttattaaagccctatctaaaatgtagcatgcagtgttaacggcttcagcccataagtattctggaagaggagtatcattcaataaagntctagcaatctcgtccaaagatcta

SEQ ID NO: 75 - DNA, 487 bp, Glycine max
  unsure (1)..(487): unsure at all n locations
atgtataataaaataggtaatgtgatacatagaaggatgacaagcaataaaatcgaacataagaaagtattacaaaaagtacgaataatattaagataacctcacataatggagaaacagcattcttgataacaattcacttccatcacaagaaanaagatctgataccgtggactgatcaaacgcatattnganaaagatatagaatagttatatctttgattcagtgtatggccaaaaattgacggtacagaatgtatgaagagagtttagtctaattaactaaacagaatataccaatattgtaaactntagtatggtgttcagctagtacggataangaaacaatacaaaatttgatctaaataatatagctcttatgtcaaagcacaatangatgatttttaacaaatgactgaatcaacacgcatatatttatcaatctccacaaagatagagatcatataaacatctcttatatttatat

SEQ ID NO: 76 - DNA, 384 bp, Glycine max
  unsure (1)..(384): unsure at all n locations
taatcaagataagtatgaaaagggttnttcataaactaagtagcacatggattnttctcanaacatgtttaccaaagagtttttactctctggtaatcgattaccagattattgtaatcgattaccagtagcaaaatggatttgaaaaagttttcaaactgaatttacaacgttccaatttatttcaaaaagctgtaatcgattacaatgttttggtaatagattaccagtgcctttgaatgttgaaattcaaattcaaatgtgaagagtcacatcctttcacataaaagctttgagtaatcgattacattgatttggtaatcgattaccagtgattgtttctaaataaatcaaaagatgtaactcttcaaaatgggttttgac

SEQ ID NO: 77 - DNA, 401 bp, Glycine max
  unsure (1)..(401): unsure at all n locations
tggatttccttntagtagggaatctatccttcctaagatggagccaaacccagtcaccctcattaagaactagctcttttcttcctctattgcctttagttgaatacacctttgtttggttctctattttgttcttaaccctctcatgcaacttctttacaaattttgacctagattccccttctttatgtataaaagaagtgtccagtgggaggggaatgaggtctaacagtgttaggggattgaacccatagacaacctcaaaaggggactgcttggtggttctatgaacccccctgttgtaggcaaattctacatgaggaagatactcatcccaagacttatggttgcctttcagaagagcccttataatggtggattaaaacctattcactacctct

SEQ ID NO: 78 - DNA, 453 bp, Glycine max
  unsure (1)..(453): unsure at all n locations
tctttcctaaatcaaagtataaatgattntatattataagtataaacctattaaaaaattccgttcaaaataataagataattttacctgaaattttgaaccactccacttgtttttaatgagccaattccaatcttctggagatacgtattttggtctatcattttctttaagataagcttgatgtaaatgataaagcttattcttgtattgagattgaattttcttcattgcatattctctttcctcgccagataaactaaaagcatccttatatcaaacgttttcaccagcaaaagtaaaaattaaatactatcaagatacattatcaaaccaatttgaagatataactaatattcaaatatataaataaattagatataattaacctaattatatactaacattcatatgtcgccacatttcatctacaccatccttactaatttcact

SEQ ID NO: 79 - DNA, 442 bp, Glycine max
  unsure (1)..(442): unsure at all n locations
tgttcttagtaagatcgatcagacgatgcttttgttccttggagagcaacccgtcttggccccagaaagtgttgccaatgctctagtggaagtgatgaacgatcctttctcacacttaatcgcctgttgataaaattctgcaccaaatatccaaacaccattaaataaactaaaattcaaataattaattgtatggatggattagtcaaataaaaatttctattagccaagatattataggaatttgtcaagtctatcacgtgagcagtgggcttagtgttcctttcattaggagattcatgaaaattntgtcggccacanaattgtgagacttcttaatcaattaaattaaaaaaaacctagtaaaataaaagttgaccagcatanactaatagtgggaatataattagtatttgaatgccaaaatcaaccacatattttt

SEQ ID NO: 80 - DNA, 479 bp, Glycine max
  unsure (1)..(479): unsure at all n locations
ctattaggactcttgcaactcagctcgtacatatagtttcaatccgaggtccttcaagagacctagtaaaagtatcagcctattgttcattggaaccaacaaagtcagtcatgatttcccctgacaacacctttactcttgcaaagtgacaatctatctatgtgtgtttagtttgttcatggaagaccatattagatgcaatgtgaagagcggtttgattgtcacaaataagcttagtgtcctgagtgcctaagtcttgtaatttcgcatgtagctgctaccatggcacaatgttaagctttgatgctgaatctagcaactatattttgcttcttgtttctccatgagatcaaattccctcaaagcaaaacacaataaccagaggtagatctcccgtccatggntatcgaattgaaagattcgaattgtgaatcagaaaagctatattacgaatcgtgaatcgaatcatatatgaatcg

SEQ ID NO: 81 - DNA, 456 bp, Glycine max
  unsure (1)..(456): unsure at all n locations
tgtcaaataaatcactgcatattgtgcagtccctatcatccttcagaggaatgtagaagagagtaggcttgcaaacaaggttccaatttggataaaagtgtaaaactacttattaattagaattttatgaatcattgtttggaatattgaagaaaaaagacaacctgacaaccagctgccctgaaggaactaaaatcatggcatccaacaagaactctgcatgcttcctgcatggatatcatcaataacttgaatagctgcaagattgagaatctagtaagtataaggagctgttaactaacttgcatagctggaagactaagctcctcaggtacatgccatgctcgatctttctcgaaggttgacaaaggctctggcccagaaagcaaccgatagaagtatctgaatagtagttccaaataactatcaattactgcanatggtcataaacaaaac

SEQ ID NO: 82 - DNA, 454 bp, Glycine max
  unsure (1)..(454): unsure at all n locations
cttggagtttccaagtgccaattcgtcttcttctttagtccagtcttcttctggcttcaattcatcagtgggctttccttctgtgtccagcatcttgggatgttcccagcctttgatgacagctttccaggttctgctatccagtgatttgagaaaggccaccatccttgctttccagtattcatagttggtcccatccagaattggtggtctgttcactggtccgccttctttctccatgttcatcagaatttatctccctagatctcactcagtgatttcgagtgcctgctctgataccaattgaaattctgatactgnggacagatgtcgtacaggatgtcacgacatcacgcttcagaacatgcagattatatttgacagtgtgaacaaattaaacaagttaataacacaagagaattgtaacccagttcggtgaacctcactacatctg

SEQ ID NO: 83 - DNA, 453 bp, Glycine max
  unsure (1)..(453): unsure at all n locations
gttgaatgcattaaaggtaaacaaaccaaaagcaagaaattgtgtgcatatagagctacagacgtcttggaattgagacatacaaacatttgtgggccatttcatacactttcatggaatggtcaacaatattttatatcattcatagacgattactccagatatgcatacttgtttcttatacatgaaaagtcacaatctttggatgtattcaaaacatttaaagttgaagttgaaaatcaactccacaaaagaataaagtgtgtcagatctaaccatggtggtgaatactatggcagatatgacggttcaggtgaacaacatccggngccttttgccaggtacctagaggaatgtggaatcgtcccacagtacaccatgtcggngtcacctagcatgaatggtgtggctgaaagatgaaatagaactcttaacgatatggtaagaagcatg

SEQ ID NO: 84 - DNA, 432 bp, Glycine max
  unsure (1)..(432): unsure at all n locations
ntgagcaaattcaaacgaacaataacttttactcggatgtcagattgagtcccgtaatatatcgaaaagctcgaaattgaatgttgaagctctaagcaaattcaaacgacaaaaactttttactcggatgtctgattgagtcccgtaatatatcgaaaagctcgaatgtgaatgtagaagctctgagcatattcaaacgacaataactttttactcggatgtctgattgagtcccgtaatatatcgagatgctcgaaatggaataccgaagctctgagcaaattcaaacaataataactttntactcggatgtccgattgagtcccgtaatatatctgaacgctcganattgaatgtcgaagctctgagcaaattcaaacgacaataacattttactcggatgtctgattgagtcccgtatatatcttgacg

SEQ ID NO: 85 - DNA, 368 bp, Glycine max
  unsure (1)..(368): unsure at all n locations
tccaccggttgtgattgcgagataatattcgtggagggagaataaggaatcgtatgaagacagtacaagtggaggtttcaatctcttctccgtctctctgacttttgggaattctatcggagtagtcggatgaataattgaaagaatttctgggaaccgctagagatgttgttatcgctggctgaagacacgtgagcccgcttagaggtaagggatgagtttatcgcaaatgggattagaatgaacatgtgtanggatccttagagaactaaatttgggttaatttgcgatggttattgaaatataatttctctttatgattataaatataatattaatggggtctatgtaccaatgatgttctgatg

SEQ ID NO: 86 - DNA, 449 bp, Glycine max
  unsure (1)..(449): unsure at all n locations
tctataaaaggttcgttcctaatttctctacaattgcatcacctctcaatgagctggtgaagaagaatgtggcatttacctgnggtgaaaaacaagagcaagcctttgctttgctccaagaaaagcttactaaggcacctgttctagctcttcctgatttttctaaaacttttgataatattagggacttgtatgctttagatgaacatttctctcccatttacgaaagttgtgggaaaaaggcccaaaatggattctatttggctaaggggtatttgttcaaagagggaaagctttgcataccccaaggatccattaggaaattacttgttaaagatagccatgagggtgggctcatgggccactttgggatagacaagacgctcgtcttactcaaagaanagttttattggccccatatgaagaaaaatgtccttaagcattgcact

SEQ ID NO: 87 - DNA, 382 bp, Glycine max
  unsure (1)..(382): unsure at all n locations
tcattgatcaattctgaagttcacaattgtcataagttcatgaaaggagcaaaatgttggatcaagtggcctcagaataattaagaaggggggttgaattaattattaatgagcctttactaatcaaaaacttatccttcttaatgttactagattcaattaggcttttactactaagttaagaaagtaaagaacagaaatagaaacttaatcaaatgtaaaagcaataattaaagtgcacagcggaaattaaagagtatagggaagaacaagacaaacgcaagaattntatactggttcggcaaaactcatgcctacatccaatccccaagcaacctgcggttcttgagatttctttcaaccttgtaaaatcctttacaag

SEQ ID NO: 88 - DNA, 399 bp, Glycine max
  unsure (1)..(399): unsure at all n locations
nttggtcttagaattaatcatcaaaagtctcatttcattgtgtctaagaatattccgagaaggaaaactcanaaatttgctatattttgggtttccaatatatactcatgatattggtaaatatttgggtttacctataattagtggaagagttaaaaaaaaccacttctcgtttattctggataaagtaaatgatcgctgagctggttggaaatcgaagcttctcaatagacttggtcgggttacactttgcaaatatgtcctcaattttatccttacatatgtcatgcaaaacatgtggctccttcaaggcatttgtgattcccttgatattgctactagacaattcatctgcggatcaacttcatctcattgggtgagttggaagactnatcattc

SEQ ID NO: 89 - DNA, 396 bp, Glycine max
  unsure (1)..(396): unsure at all n locations
tcttggcaatcctcattccagcgatcagtttggttnttgcgtaagagtttgaacaacggctcacaaatggcggtgagctgcgatatgaatctggcaatataattcaagcgtcccaggaaacctcggacttgcctctctgtacggngttctggcatctcaaggatagccttcaccttttcggggtctacctctatccctttctggcttacaacgaaaccaagcaatttccctgatttgaccccaaaggtacacttagcggggttcaaccttaattgatatttcttaagcctttcgaacaacttccgctggttgacaaggtgttcttcctcggatttagatttagcaattatgtcgtccacgtagacctcgatctcttgatgcatcatatcatggaac

SEQ ID NO: 90 - DNA, 391 bp, Glycine max
  unsure (1)..(391): unsure at all n locations
tgaaggtaaaaggtttacacagtttcatgttaaaagttactgacatcctgctgctaatagacattagacgtagctntactcttagtaagaatattagaacaacacagcaaacaaaacactttctatgcattgagcaaatgtattcaaaaaataattatggattagaactaagttttcacaaatcttaagcaagcatcagtaacatctttacctgcagcactagaaagaacccaattgtcatcataaggaacttgccacacagcatagccaagtaacttattttcccttgcataagaaaccttcattntgacaacctcaacatcatcataacctatccaagtcgatccattggagaagtaattaactacataagtagcattgtacttgacat

SEQ ID NO: 91 - DNA, 463 bp, Glycine max
  unsure (1)..(463): unsure at all n locations
tattggccgttggatgaaactccacacagtgcagttctatgttcacttgtagaggatctgaatcccagtttaccagttggttgttgccgttaaccaacaaatcttattttatgttctctntaatatttctttntaattgaagatgcttcttttacccacagaaattgtatatttttcatgcaagtataacagttaaatgaatagtagttagtttaattgtatttcgaatttttttttataattaaattataagtgattttttagtttctatggaaaaaattaagttggttaagttttttattttaaaaattaactaaatttattcattntgtcaaattnttacttaaaaattntcaaatttttaattttatctacatatttaggagtttatgaataaattgagttagaaaataattntaaaaattatangtaactttattagaaaaattagtaaatattaatg

SEQ ID NO: 92 - DNA, 363 bp, Glycine max
  unsure (1)..(363): unsure at all n locations
tattggaatcagccaattgctcagtgactgttcttaattctgtcatcttgaaggtgtatagttgttgcttcaagcataaccgatttgcaagagactttgtcatatacaaggattccagtttcaaccacattgaggttggtgtcctttctcttgcaacttctcttatagctttatttccaaggcatagtatgattgcacttctggctctatccatcatttcttatttctcctttgaacttagagattcagacatcctttcttcttctttaagagcttctacacagccatgctgaatcaagattgcttncatcttgatcctccataacccgaagtcattttccctgagaactctcatatcatact

SEQ ID NO: 93 - DNA, 418 bp, Glycine max
  unsure (1)..(418): unsure at all n locations
tgattaccctggtgacactntacttccaggaatgaaaattggagtgaacttcaaaaccggtcaacatcgagctctaagatcatggagatcctttacggatcctactccaggtaatttttcacttggtgttgatactcgtggccttcctcaattagttattacaaatgagaatactaatagtaatgacatagcttatagaccagggtcatggaatggtcttagtatcacggngcttcctggagaaataactgaccaattaacaaaatccctttttgttatgaatcaagatgaggtcttctatgagattcagctcttgaatagttcaactaaactcatgagaagcagaatgcttccagaagggtatcaagtacgttttatatggtcagatgaaaaaaaatatgggattctcaaattccta

SEQ ID NO: 94 - DNA, 435 bp, Glycine max
  unsure (1)..(435): unsure at all n locations
tagaagcaaatgctggcatggtatcgcagattcgtgtagcaagaccacctgctgaaggacggngaaggaatcaattgcttccacgttattggcctaggattactgatcaagagttgcaacaaatatcaggagagtatccaacattgtaatctgtcctataaattattatgaatcactgacaggatacttactggttgatacacttattattattttgatagctaatctttaccttagtatttccttaaccatgattcatgatatgttcaagttcaaattctacaatcgtgccactctttgaaaagatgcttagtgcaagtgatgctggtcgaattggtcgcttggttttaccaaaagcatgtgctgaagtaatttatcttaactcatctgttgaactggcatttactgttgtcattttatattaactaacaattc

SEQ ID NO: 95 - DNA, 320 bp, Glycine max
  unsure (1)..(320): unsure at all n locations
cttgtgtgggacacccattgtgagtgtagtttccaaacccttatagaaaagttgacgatgactcctgtgttagttttgcttaacccaagagaaccctttgaggtgtattgtgatgcatcaaagatgggtttaggaggagtgttgatgcaaaatggacaagtagtggtttatgcttctagacaactcaagactcatgagaggaattatcctacccatgatctggagttagctgctgtnagttttgctcttaacgcgtggaggcattacctattcgactccagtttgaagtgtttagcgatcataaaagccttaagtatttg

SEQ ID NO: 96 - DNA, 392 bp, Glycine max
  unsure (1)..(392): unsure at all n locations
tctaaactntaaacaaaaatgaagctaaactntaaacaagaatgaagcttcgataccacttgttagacaagtggcctcagatatcttaagaaggggggttgaattaagatattacaaactattttcccaattaaaattctactttgattttaatgcaagttcaaagttcccttaaagattaatttctaaatgatgattcaaaataaccaaactgaatgtaaaagtaaagcaacaataaataaaagagtttaagggaagagagagtgcaaactcagttttatactggttcggccacacccttgtgcctacgtccagtccccaagcaacccacttgagagttccactaacttgcaaaaaccctttacaagttctgaaccacacaaggacaaccc

SEQ ID NO: 97 - DNA, 330 bp, Glycine max
  unsure (1)..(330): unsure at all n locations
tgttgcagacaaaaatctntggctagaatgccgcanaaatggtctacaaaacatccatcggttttcttggcctgaacactgccgcaactacctctcccatgttgagtatggcaggaaccgccactccacatcccgcttggaaattacaccaatgactgaagaatcaataagtgactcattgagagatgtagaagacatttcttttagattctccacagaaggagactccaagcagaatggagagatggacactgcagcaaggcagaagcaaattatggaagcaatcatgtgcagggtctcttccactggcaagtctaatgccagttactt

SEQ ID NO: 98 - DNA, 416 bp, Glycine max
  unsure (1)..(416): unsure at all n locations
aggatagacaaacagcgctagnccaatcaattgtggggctccaaactcgatggtggaggatgcatgaatgacaagcaattcatggggctccggataagatttgaaggtagaggatagatgaacagcactaggcaatcaattcgtggggctccagacttgatggtggatgatgcatgaatgacaagaaattcatggggctttggataatatttgagggtggaggatagacgaacagcgctaggcaatcaattcgtggggctccagactcgatggtggaggatgcatgaatgacaagcaattcatggngctccggataagatttgttggcaggactgaatggtccaccggtttttttcccaccctaaaggcgaacatgttttatcaaggaanaataaatcattcatgagagcactata

SEQ ID NO: 99 - DNA, 403 bp, Glycine max
tagacggcaatttcgagcgtctccatatattacgggactcaatcagacatccgagtaaaaagttattgtcgcttgaattggcctacaggttctacattcaatatcgagcgtcccgatatattacgtcactgaatcggacatccgagtaaaaagttattgtcgtttgaatttgctctgagcttcaacattcaatttcgagcgtctcgatatattacgggactcaatcagacatccgagtaaaaagttattgtcgttggaattggctcataagttcaacattcaatttcgagcgtctcgatatattacgggactcaatcagacatcgcgagaaaaagttattgtcgcttgaattggctaaaggttcaacatataatttcgagcgtctcgatatatttcgggactc

SEQ ID NO: 100 - DNA, 398 bp, Glycine max
ctgatgcaacatttggagaggttaatgaaacaacgagatgatgcacttcatgagaggttggatcaaatggagaatatagatcataatggagaagaaaggaggagaagagggaataatggtgttcatagacaaaaccgaattgatggtattaaactcaacattcctccctttaaaggaaagaatgatccggaggcctacttgtagtgggagatgaaaatagagcatgttttctcatgcaacaactatgaggaggaccaaaaggtgaagcttgtcgccgcggagttttccgactatgctcttgtgtggtgaaacaagctacaaaaggagagagcaagaaatgaagagccaatggttgatacatgggcggagatgaaaaggatcatgaggaagcggtatgt

SEQ ID NO: 101 - DNA, 405 bp, Glycine max
  unsure (1)..(405): unsure at all n locations
tcggctntcaatgtcgagcatctcgatatattacgggactcaatcaaacatccgagtaaaaatttattgttgtcagaatttgcactgagcttctgttttcaatttcgagtgtctcgatatattacgagactcaatcggacatctgagttaaaagctattgctctttgtatttgctacgagcttccgatttcaattacgagcgtctcgatacattatgggtctcaatcggacatccgactaaaaagttattgtcgttagaatttactcatagcctttattttaaattntcaacgtgtcgatatattacgggactcaatcggacatccgagtaaaaagttattatcatttgaatttgctcagagcttctgttttcaatttggagtggtgtcgataaatgtgggactc

SEQ ID NO: 102 - DNA, 452 bp, Glycine max
  unsure (1)..(452): unsure at all n locations
tgaagagcctcctcaatcaaactgaaaaacctatattcctcaatgaagttagcacccatcttttcataaaacttgatggtgagaatattccaatcaagcataacccacttgacccttttgcaccccatttttagggcttgctttgccaccacagagagcaacattctcccaagccccttcgtcttataacactccctcaagaacaagttctccatgtaaaaccctcgcttctctagaacgagagagaagttcggaaaaaacaagacaaacccaacaatggaaacacctttgagggttnttaaattgtagtttctcgagataactattacttaatgggaataataaatgaataattaataattatggactaaattataattgggttaaattggaagcagttttagagaaaactattatttgattggagtagtnggtataagggtcaatactca

SEQ ID NO: 103 - DNA, 298 bp, Glycine max
  unsure (1)..(298): unsure at all n locations
acccagtcaccctcattcagaagtagctctnttcttcctctattgcctntagttgaatacacctttgtttggttctcttattggttcttaaccctctcatgcaacttctttacaaactctgacctagattccccttctttatgtataaaagaagtgactagtgtgaggtgaatgaggtctaacggtgttaggggatngaacccatagacaacctcaaaaggggactgcttggtggttctatgaaccaccctgttgtaggcaaattctacatgaggaagatactcatcccaagacttat

SEQ ID NO: 104 - DNA, 428 bp, Glycine max
  unsure (1)..(428): unsure at all n locations
atgcaagcttgtatattagacaagtcataagtcatcatgttcatanaacaaatcatttgtctaagtcactggcatctagaagtcctaattctctcgtaatggtgtagaacgaatctttgtgtagtggttctgtgaagatatttgcgagttganttttggtatctacaaattctagaacacagtcaccttttaggacatgatctctaagaagatgatgcctaatttctatgtgctcggttctagagtggaaaactaggttcttagatatatttatggcgcttgtgttgtcacattntatggngatgtggtctaatacaatcctataatcagatagttgttatttcatccacagaatctgtgcacaacaactaccagcagagatgtattctgcttcggttgtggataatgctacaataattttgcttctt

SEQ ID NO: 105 - DNA, 273 bp, Glycine max
  unsure (1)..(273): unsure at all n locations
ctgatcaacacatgcacagtggccaaggatgcatgggagaatcctgaaaccactcatgaaggaacctccaaagtgaagatgtccagaatgcaactattggctacaaaattcgaanatctgaagatgaaggaggaagagtgtattcatgacttccacatgaacattcttgaaattgccaatgcttgcactgccttgtgagaaaggatgacagactgaaagctggtgagaaagatcctcagatctttgcctaagagaattgacatganagtcact

SEQ ID NO: 106 - DNA, 335 bp, Glycine max
  unsure (1)..(335): unsure at all n locations
tgtatggagatctgagcacttcttctctctatgtcttcacaatcatctcttaggcggaagttgcagaatcatcatgatgaagatactatattcngcacgttatcgttgatattttggacccttaccttgattgcattgcttaaatatgtattcatactattgtgtgctgatgacaacggtgaacgtatgctgctgataactttattctcttagataattgttcttatacataggttacgatctgtgtgagtgtgagctgagtatgatacttgtgtcatcaggtggaacatttgcctttattcgctgctgtggatgcatgccacgcttaaattact

SEQ ID NO: 107 - DNA, 314 bp, Glycine max
  unsure (1)..(314): unsure at all n locations
ggttgaattaagatatcacatactntntcttnaataanaaatctattttgattntaacccanatcccaagaattctttcanaatgaactcctaaataattatgcannataaacttactgaatagaagcaataagcaataaccaataaaagagtttaagggaataaagaatgcanactcagaattatactggttcgcccacatccttgtgcctaagtccagtccccaagcaacccgcttgagagtncactatcttgcnaaagcccttacagtctgaacacacaggacacccttctttggtcagattgttacacaa

SEQ ID NO: 108 - DNA, 340 bp, Glycine max
  unsure (1)..(340): unsure at all n locations
tgtgtcgtctgcatactgcaatatgctgactntgacttcatttctgcccacattgaaaccttgaaacaggttnttatccattgcttctttcnaccagcgcgttggtccttccacaagaatgttaaacaggaacggngatagagggtctccttgtcttaagcctctntggngaataaactcaggtgtaggacttccgttaaccaatatggatatggaagcagactttatgcagccttcaatccaagttacccacctgtcacanaaacccatcctcttcaacaaatatagtacaaactcccaagatactgaatcatangccattntataatctactttgata

SEQ ID NO: 109 - DNA, 240 bp, Glycine max
  unsure (1)..(240): unsure at all n locations
caattggaagtgatcatggaggtgaatntcataatgagtcttttgaacacttttgtgaagaacatggaattcaccacaattcttattccccaagaacacctcaacagaatggtgttgtggaaaggaaaaatatatccctataagaaggtgcaagaacccttctaaatgaaacaaggttaccgaagtacttttgggcagatgttgtacatactatntattacaccttgaacagagtactta

SEQ ID NO: 110 - DNA, 351 bp, Glycine max
  unsure (1)..(351): unsure at all n locations
tgcacaagactctttaatattgaagagtatccttgtggaaccttcttccgacgaagacactgacaaaaacttatcttctccttcttggacaaggtatgtgcaggctggggcaagtaaattttcttcccatcagaccttggatgcaattgtgatcgtatacccatatcagctagatcttgatgggtattcaagccatccttcgtcttgccttgaatgttaaggagcgtnccaatcacattgtcacaaacatntttcttcacatgcataacatcaatacaatgtctaacgtcaagatcacaccagtacagaagatcaaagaanatagacctcttcttcatatgcaactctgac

SEQ ID NO: 111 - DNA, 317 bp, Glycine max
  unsure (1)..(317): unsure at all n locations
atctagaggtatacctaggatctctatcagacactatgctagatggcacaccatgtaatatgacaatctcactaatatacagacaggtcaactnttccaaggaagatatgatattaatgggaataaagtgagcagacttggtcagcctgtcaacaataacccacatagaatcaaaacctcttggggttctaggtagtcctacgacaaaatccatagaaatatatgtccattgtcactgggtatcttcaaggggtgtaactatcctgaagggctctgatatcttatacttatgacagactaaacatgcatacacaaac

SEQ ID NO: 112 - DNA, 314 bp, Glycine max
  unsure (1)..(314): unsure at all n locations
gcttgaatcgatacacacatactgtaatcgattaccagagcagtatttcagattatattctcatcagtcacanntcttttattggttcttgaatggccatcanaggcttatatatatgtgacttgagacancgaattgctaagagattntcagaacannaaggtcttatcctcttanaaagcanaatcgtttcatcctcttaanaattccttggccaaaacacttgtgattcaataaggaattagttgagtgctcaaattgttcaatctatctctttcaagagagaatacttcttctcttcttctntattctga

SEQ ID NO: 113 - DNA, 451 bp, Glycine max
  unsure (1)..(451): unsure at all n locations
tattgtagccgatgctctgtctcggcgtcatgcattactttctatgcttgaaacannaatgattggtcttgaatgtttgaaaagcatgtatgataatgatgaaacttttggagaaattcttaaaaattgtgaagaattttcagacaatggtttctttagacatgaacgctttcttttcacagaaaacaaattgtgtgtgcctaaatgttctactagaaatttgcttgatcgtgaagcacatgangaggtttaatggtgcattntgtggtccaaaagactctatagacattacangaacatttnntattgcctcatatgaaaaaggatgtgcagacactctgtgaacatcgcattgtattgtaaaatgcaagtctaatggtaagcctcatggattgatactccattgcaataccgagtatcttgattgttatcatggatttgtttgggctgc

SEQ ID NO: 114 - DNA, 415 bp, Glycine max
  unsure (1)..(415): unsure at all n locations
gagggactcatggtcactatgaatgacaaattccgtgggataaaggtagtggtgccatgttcccacagcccgtactaaggcatacaactccttatnataagttgaatagttaagggtacgaccacttaacttttcactaaaataagcaattggatggccttcttgcatcaacacagccccaatcccaacatttgaagcatcacactcaatttcaaaagatttttgaaagtttggcaacgcaagtatggnggcattacgtagcttttgcttaagaacattgaaagcttcttcttgtttctctccccatttgaaaccaacattcttcttgagcacttcattgagaggtgctgccaatgtgctaaaatccttcacaaatcgtctatanaaacttgctaagccatgaaaactcctcacc

SEQ ID NO: 115 - DNA, 369 bp, Glycine max
  unsure (1)..(369): unsure at all n locations
tttctctacaatngcatcacctctcaatgagctggtgaagaagaaatgtggcattacctgnggtgaagaacaagagcaagcctttgctttgctcatagaaaagcttactaaggcacctgttctagctcttcctgactgttctaanacttttgagctagaatgtgatgcctctggagtgggagttggagctgtattgttacaaggtgggcaccctattgtcttatttagtgaanaacttcatagtgccaccctcaactaccccacctatgataaagagctttatgccttaataagagccctccaaactcgtgaacattaccgttgttcaaggaatatgcattcatagtgatcatcaatcacttaagtaca

SEQ ID NO: 116 - DNA, 273 bp, Glycine max
  unsure (1)..(273): unsure at all n locations
ctatatgatatagtgtattctctatattatgttcgtatgtggaggaggctaaattatcattctaattctcttatagttntaattgtgtaatcttgattgtataaattattaaatatataaacatttgttcttattttattatactatatagattgtctttacattattgtatatcatttaaatattatgaggatatgaaattataatttaacctttataaaaatagatgtaacgcaacatagagactgatgctactttgatattccaattgat

SEQ ID NO: 117 - DNA, 353 bp, Glycine max
  unsure (1)..(353): unsure at all n locations
gagatcatccnctcaacaacattatgggtgatatctcanatggggtaacatctagacactctcttaaagatntatgcaataatatggcttttgtatccatgattgaacactaaaatataaaagaagccataatagatgataattggatcattgccatgcaagaagaattaaaccaatttgaaagaaataatgtgtggaaattagtagaacaacctggaaattatcctatcatatgaacaaaatgtgtttttagaaataaattatatgaacatggtataattattagaaataaagccaggttagtagcacaaggggataatcaagaagaacgaatagactatgaagaaacatat

SEQ ID NO: 118 - DNA, 345 bp, Glycine max
  unsure (1)..(345): unsure at all n locations
cagtgtttatattgcggttccaatgtggccagagggttacccagaacatggaacggttcaagcaatgatggattggcagaggagaacaatggatatgatgtacaaggatgatgctggagcactaaaaggcaagggtaatgaggaagatcctctcaactattcgacattcttctgcctagntaatagggagctgaacaaagaatgagagtatgtgcccccagaaagaccagatcctcatacagattatatgagagcacaagtgtcccgacgctttatgatttatgttcatgccaagatgatgatacgcatgtctgttaattaagtttaccacatcttccaagatac

SEQ ID NO: 119 - DNA, 459 bp, Glycine max
  unsure (1)..(459): unsure at all n locations
ngcaagctntctaaatgtttctttgcccagtctcaggtagagtacttaggacatttggtttcgcatcggngagtggagcccttagcatcaaaggtcactgcaattcagcaatggccaattcctcgtacaacgaaggccgtaaggagcttcctgggccttgctggcttttatcgcaggttcattcagaattatgccattggtgtggccccattagtcaaagccacgaccaaagaacccctgcattggacatctgagacacatgaagcctttgacactttgaaacatgccttgtcaatagctccggtgttagctttaccagacttcaaccttcccttcacagtcgagacagatgcgtcaggagttggtatgggtgccattctttcacagcgaggccaccccatagcatttttcagcaaaccttttagtgccaagtactctgatcataacatacatgcgaga

SEQ ID NO: 120 - DNA, 328 bp, Glycine max
  unsure (1)..(328): unsure at all n locations
atagcccgaggactagagtacttgcataagggatgcaacactcgaantttacattntgacatanagccacaacattctttnggatgagaagttctgcctcaagatatctgattntgggctagcaaagccttgtcctagaaatgaaagtattatttccaggtctgatgccagaggaacattatggtatgtagctccagaaaatttggcagaatttcacacanatctgatgtaatcttccactttanatttaaaccacctaaaccttaatgggtaaaattaattctattatgcattanatgcatcttatctttgacttgaactctacaat

SEQ ID NO: 121 - DNA, 314 bp, Glycine max
gacgaagcgtgttgtgaatggcgtctcgcgtggctagcatggtatcgacagcatcattgcgtgatgaccacttgatgtaattggagatggccggaggaggcttaccatatgtgacctcgtatggagtgaagtcggtgccggagtgctgagacgtgttgtaagaccattcagctagggctaagaattaaaccagtatgccgggttgtggtgaacgaaggaacgaagatattgctcaatcgtaccgctcatcacttcggtttgcccatcggactggtgatgatacgccgtactcatgcgtatcgtcgtcccactga

SEQ ID NO: 122 - DNA, 393 bp, Glycine max
  unsure (1)..(393): unsure at all n locations
cagctccattgatatcatttatttaatgcaatgcacatgtttcgaataagatttcttgtatcacaggaaaagatctaatccaagttgaattacggatcatactgattgtggtgcgaaaactggcttgaagtagccatctgggtaatatccaaaccacgaagtttcctctggtattaaaacagtgtcgcgctcacactgttaatgtataaaataagactacaaatatataagctttcctcatgaaatcaattagcaatattctattcataatatcacaataatacatttagaggacttaccatgataagtaccanattctgcaagctactcaatcttttcttgtaagaagcatttctcttatctggtatttcattgccatgcactggaagaaat

SEQ ID NO: 123 - DNA, 416 bp, Glycine max
  unsure (1)..(416): unsure at all n locations
ctgcacaaggctcttaatatttgaagagtatccttgaggaaccttcacccgacgaagacactaacaaaaacttatcttctccttcttggacaaagtatggcaggctgggggcaagtaaattttcttcccatcagaccttgtatgcaactgtgatcgtatacccatatcagctagatcttgacgggtattcaagccatccttcgtcttgccttgaatgttaaggagcgtcccaatgactctatcacagacatttttctccacatgcataacatcaatacaatgtctaacgtcaagatcacaccaatacggaagatcaaagaatatggacctcttcttccatatgcaactntgactattatccttcttttgagtcttcccagatacagtattcacgtgttcaacccgataatatacct

SEQ ID NO: 124 - DNA, 234 bp, Glycine max
  unsure (1)..(234): unsure at all n locations
tttgagcgtctcgatatatgacgagactacatcatacatcttagtaanaagttatagtcgtttgaatatgctcagagcttcaacattcaattacgagcatctcgctatattacgggactcaatcagacatccgagtaaacagtttgttgtttgaattgtctgagagcactcacattcacattctagcgcctcgatatatatatggactctatcacacatccgagtataaagtta

SEQ ID NO: 125 - DNA, 375 bp, Glycine max
  unsure (1)..(375): unsure at all n locations
tttgagccgtcgacgaccngngatccttagagtcacctgaggctgctgcttacatcaacacttcaggggctgtactacttacatggattgatgggcctatgcagttgaaagcctggagaaagaggatgcctatngttgttgggatgaattctccagatttacctgggtaaactctatcagagagaatcaaaaccttgagtattcaagagctgagtctaagacttcaaagagagaaagactgtgtcatcaagagaatcaggagtgaccatggcagagaatttgaaacagcaggttcactgaatttgcacatctgaggcatactcatgagtttttgcagcattacacaaacagaatgggatagtgagaggaaaacag

SEQ ID NO: 126 - DNA, 354 bp, Glycine max
  unsure (1)..(354): unsure at all n locations
tagctacacacacccatctaanaactaagctcacctccttgagaaacttccttgagaagctagaagctagctacacanccctataatagctaagctcacccncatgacaaanaaacatganaatacanaaaanatcctactacaaagactactcanaatgccctgaaatacaaggctaanaccctatactactagaatggccaaaatacaaggcccagacgaagganatacctattctaatatntacaaagataagcgggctcatacttagcccatgggctcgaaatctaccctaaggctcatgagaacnctanggtcttcctttggatctctagcccaatctacttggagtct

SEQ ID NO: 127 - DNA, 420 bp, Glycine max
  unsure (1)..(420): unsure at all n locations
agtacaataagctntatgttctaaatctactggaagatgacatcccttgccatgcaccatctagaatggggaaagactggtaggggtcttataggctattctatacacccacaaagcatcatccaatttagcaaaccaatctttactagaattctctttatctttgtaaatgagacttcaacttgaccatttttttgagggtggtaaggcgatgcaaccttctgtctgacattatagtgctccaatgccttctgtagttgcacattgcaaaaatgggaacccccattactgatgagaactctaggagtttccaacccacgaaaaatattcctcttcacaaaccgaatgactatttttgcatcacctttctgtgtggcaatggcttacacccattttgatagaaactctttaaatgacaca

SEQ ID NO: 128 - DNA, 390 bp, Glycine max
  unsure (1)..(390): unsure at all n locations
agcttgtagggttatagtctcacgattgtcacgtgctcatgcaacaattgttagccgtggctatacgagacatcttgccaaacaaagtcaggttcacgataacttgcctgtgctttttcttacatgctatgtgtagcaaagtgattgatccagtaatgtttgatgagttggaaaacgagaccgcaattatactatgccagttggagatgtattttccccctgctttctttgacatcatgattcacttgattgtgcatctggtcagagaaatcaaatgtcgcggtcctgtttatctacggcggatgtacccggctgagcgatacatgaacatcttatnagagtatacaaagaatctatatcatccgaaagcatctattgttgagaggtaca

SEQ ID NO: 129 - DNA, 349 bp, Glycine max
aagcttctatagaatgttcgttcctaatttctctacaattgcatcacctctcaatgagctggtgaagaacgatgtggcatttacctgaggtgaaaaacaagagctagcctttggtttgatcaaagaaaagcttactaaggcacatgttctaactcttcttgacttttctaaaacttttgagctacaatgagatgcctttggagcgggagttggagctgtattgatacaaggcgggcaccttatttcttatattagtgaaagacttcatagtgccaccctcaactaccccacctatgataaagagctatatgccttaataagagccctccaaacttgggaacattacctt

SEQ ID NO: 130 - DNA, 455 bp, Glycine max
ttataccatggatgaataacagcggctcagctacatcaaaaactaccaaaagaaacttagagttgacaagtattgcagcttacaaagttcattggatactggaacaaacaaaggctcgactaaaggaaaaagagtcattttaccttcaacctttgttgggagcccatgttacatggatcaactttattttgatggtatggcaatatgtggtcatgttggtttcctaaatctttttataactctaacatgttatccaaattgtcctaaaattcgtagattactttcacctttgaatcttaaaccaacagacaggccagacattgtctcatgaattttcagattgaaatatgaacaaatgctttctgacttaccaaagcatcagctgctcagaaaagttgttgttgcgcgtaagtttagaatgatctttgctgttgaacgtagaaatcaattgatca

SEQ ID NO: 131 - DNA, 381 bp, Glycine max
  unsure (1)..(381): unsure at all n locations
catcangaaacaatntcactttaaaagtgggtcccaattggattcctaagtttcaacttacctttttggaagtgacatcatggcagttaggtcccagctttccatcgtggattcagtcacaaaacaaacttcaatatgttggactgtctaacacggngattttagattctattcccacttggttctgggaaccacactctcaggttttgtatttaaacctctctcataatcatatccatggtgagcttgtgactacaataaaaaatccaatatctatccaaactgttgatctaagcacacatcacttatgtggtaaataccctatctatcanatgatgtgtatgggttaaacctttcgaccaattcattctctgaatccat

SEQ ID NO: 132 - DNA, 420 bp, Glycine max
  unsure (1)..(420): unsure at all n locations
gcttcttcttggttctctccccattngaaaccatcatttttcttgagcacttcattgagaggtgctgccaatgtgctaaaatccttcacaaatcgtctataaaaacttgctaagccatgaaaactcctcacctcggacacagacttaggtgtaggccattcttgaatagccctaaccttctgctgatcaacttgcactccttttgaactcacaacaaaaccaagaaacacaacatggttagtacaaaagatgcatttttcaagattggcatacaattgttcttttctaagcacagtcaagacagattttaaatgatcaatatgcaaatcaagtgaagtgctatagataagaatatcatcaaagtacaccacaactacactttctatgaactctctcaagatatggttcattaatctcatg

SEQ ID NO: 133 - DNA, 381 bp, Glycine max
  unsure (1)..(381): unsure at all n locations
ttataagtgcgggtctgggagacgaangtcaagtggtcgcgatatgtgaagatgatacgtgctcatgcaacaattgttagccatggctatacgagacatcttgccaaacaaagttaggttagcgataactcgcatgtgctntttcttccatgctatatgtagcaaagtcattgatcctatcaagtttgatgagttggaaaatgacgccgcaattatactgtgccagttggagatgtattttccccctgctntatttgacatcatgattcacttgattgtgatctggacagagaaatcaaatgttgtggtcctatttatctaccgaggatgtacccggttgagcgatacatgaagatcgtaaaagggtatacgaagaatcta

SEQ ID NO: 134 - DNA, 447 bp, Glycine max
  unsure (1)..(447): unsure at all n locations
ggaaggtttgtacatgaccaaatctttagttaatcgtctttacctanaacagtctttgtatttgtttaagatgcatgaagatagatcactaggagaacaattggatttgtttaataaactgattctagatcttgaaaatatcgatgtcactatatgatgatgaggatcaagctttgttattgttgtgctctttgcctaagggttactctaatttcaaagagactntattgtttggaagagactttgtttctcttgatgaagtgcaggctgctctgaattcaaaggaattgaatgaaagaaaggaaaataagtcctttacaagtggtgaagggctgacagcaagaggcaagaccttcatgacaaatagtaaatctgataagaagaagcanaagccagaaaaccagaagaatggtgaaggaaatgtcttcanaatcagaggtcatcact

SEQ ID NO: 135 - DNA, 429 bp, Glycine max
  unsure (1)..(429): unsure at all n locations
atgatttggattatcctctanggcaatcagtattcagtattttaaattccctctcaaaaaattgcaggcttggtggcggtgccacaaagctgccatatattataagaggcttagtagaggtgcaatagttacacaatgcagatggagggggcgcatagccaggaaagaacttatgaaactgaaaatggtatgttttaccatgattcttatacattaagtagatccttcagaaatagatgacaaaagatgtaacacgtccatcctacaaaacttatggcacaaaaagcaaaagatactatttgatcaatttttaattgtaaaattgagtttcaaattatagatatatacaaacaatattcatattttttgtttcattattatcttcatgaagggaaaaacaatagaagaacttanaattctcttctgatc

SEQ ID NO: 136 - DNA, 470 bp, Glycine max
  unsure (1)..(470): unsure at all n locations
acactcttaggatttgcctagtttacatttcttgcttacattcataatagcttatttcctttaccttccattgtcaaaccgcctagatagctttccttttaccaattagttntttaccttatctttcacacctcttttagtgtttatttggctagnttcaaccatagtttcttttaccttttgttntcaaacctccaacaagaaagaaccacaacttaggaaccaatatgagtcatcattcatctagtggtaatggcaagggtactagtcataaagaccctttatctagaatcttagatgagttgagttccctcacgttatggaaagaanaacaagagagaaaagaanaaggaagaataagagtggaagaaataaatcatgatgaaagaaagacaatatgagaggaagaaagaagaacaataatgaaagaaatgaanagagaaaaacatgcctnctatagtagtcataac

SEQ ID NO: 137 - DNA, 451 bp, Glycine max
  unsure (1)..(451): unsure at all n locations
ggcttctacaatctcccnctntttgatgatgacaaccctgatatcaagaaacacatgcacatactttttcctagtcgattactcacttaattctccatattctacccctttggttttgagtttaagcttcacttgaaattaagttaattacttatgtgagttcttgatttaatccctatttctctccccctttggcatcaacaaaaaaccaaagtgcgtaacaaatataaaacatacacaaataactaatcatacacaagacattcattgaaaaatctaaaccaatcatgaagcaagaaacatgaatagatcaaatatataaaaaccacatagtcatataacataattcatatttgttcagtcatactatgcaaataaaagaaatactaaatgttcaaatgtcataataatatagccaaatacacggctagaaatcaaagtactaataata

SEQ ID NO: 138 - DNA, 315 bp, Glycine max
  unsure (1)..(315): unsure at all n locations
gcttcttatccaggcaattcttgggggngaagctccttcttccttggcttattccctagnggatggtgcctcccctatcctcttctcctttgccttccgctgcatctccatgatgaaaaatcaccattgaaggacctcattgaagatcaaagatccagcctccatagaagctccacaagcaagcttccatcaagttatgaccatttgaatttctcgagatcttccgtggntcaatttcgggcgtctccatatgtcatgtgcctgaatcggacctccgtaatataatttatgaccattcgaacttctctagagctt

SEQ ID NO: 139 - DNA, 432 bp, Glycine max
  unsure (1)..(432): unsure at all n locations
agctntggagtttccaagtgccaattcgtcttcttctttagtccagtcttcttctggcttcaatccatcagtgggctttccttctgtgtccagcatcttgggatgttcccagcctttgatgacagctttccaggttctgctatccagtgatttgaggaaggccaccatccttgctttccagtattcatagntggttccatccagaattggtggtctgttcactggtcctccttctttctccatgttcatcagaatttatctccctaggtctcactcagtgatttcgagtgcctgctctgataccaattgaaattctgataccaatgccagatgtcgtacaggatgtcacgacatcacgcttcagaacatgcagattatctctgagtggatgaacacgataaacaagtatataacacaagagaattgtttacc

SEQ ID NO: 140 - DNA, 442 bp, Glycine max
gagctgaacacacatacctctataatagctaagcacacctccttgagaagagaagctagagcttatctacacaccccctataatagctaagctcacccccatgacaaaaaacatgaaaataacagagaaaagtccttattacaaagacaactcaacatgccccgaagtacaaggctaaaaccctatactactagaatggccaaaatacaaggcctagacgaaggaataacctattctaatatttacaaagataagcgggctcatacttagcccatgggctcgaaatctaccctaaggctcatgagaaccctaaggcctttccttggatctctagcccaatctacttggagtcttctagccaatgcccttgcggggtaagagtgcatcattacttttcactcagatgtgcgattcaggcacatcagatatcgagacgctcgaa

SEQ ID NO: 141 - DNA, 456 bp, Glycine max
  unsure (1)..(456): unsure at all n locations
aacccatggaagctcctaatatctcccacactttgntgggtgggccattcttggatggccttgattttctcaaggtccacttggaccccatttctaccaactacaaaacctaagaagactatattatctacacaaaaggtacacttctctatatttgcatagagggtgtttttcctaaggactgaaagaacttgcctgagatgttctaagtgatcatctaggctcctactgtacactaaaatatcatcaaaataaacaactacaaatctacctatgaaatccattaagacatgatgcataagcctcataaaggtgcttggtgtgttagtgaagcccaaaagcatcactatccattcatacacaccatacttggtcttgaaagcgcgttccactcatcactctttttcatcctggattcgtgataaccacttttaagatcatattttgaagagatat

SEQ ID NO: 142 - DNA, 193 bp, Glycine max
  unsure (1)..(193): unsure at all n locations
atcagaccacttccagngtgctggaactacttcacactgatttgatggngcctattctagttgaaagccttggaggaaagaggtatgcctatgtcgatgaggatgatatcttcagaattacctgagtcaactttatcagagaaaaatcagacacctttgaagctttaattgagttgattcttatactttaaag

SEQ ID NO: 143 - DNA, 281 bp, Glycine max
tcacacttacaaaggatatatgggtccatgagggacctcgggctttctacagagggcttgttccatctcttcttggtatgattccttatgcagggattgatctcactgcatatgacaccttgaaagatctatccaagagatatattctttatgacagtggtatggtattactgcaaccacattatctcttgaacttaatggatttattttaccactctgaaatttttagtgacacataacacatgtaaactcaacctttgaacttaaatatgtaatttttt

SEQ ID NO: 144 - DNA, 115 bp, Glycine max
ctataaatctaagcttaacatcagacccctccaggtgtctgaactacttcacatttatttgatggtgcctatgcaggttgaaagccttggatgatagaggtatgcctatgttgtt

SEQ ID NO: 145 - DNA, 405 bp, Glycine max
  unsure (1)..(405): unsure at all n locations
agctncacggcacgactgttaggattaatgcaatgattgctgaactacaagctctacagtcgaatgagacctggaggctcactcttcttcctccacagaaaaccgccattggctgcaggtggatttacaagatcaagtatcgcgctgatggctcgattgaaagatataaagcacgtntagtggcatagggctacacgcagatggagggtcttgattatcttgatacgttctctcctgtagcatagttgactaccggtcgtcttcttcttgcccttgctgccgtgaatcaatggcatctgcggcaactggacgttaataatgctttcctccacagacaacttgatgaagaagtttatatgcaggttccaccgggattgaccgtttcacatcctcaactggtatgtc

SEQ ID NO: 146 - DNA, 377 bp, Glycine max
  unsure (1)..(377): unsure at all n locations
ggccgccacggagttntccgactatgctcttgtgtggtggaacaagctacaaaaggagagagcaagaaatgaagagccaatggttgatacatggacagagatgaaaaagatcatgaggaagcggtatgtgccggctagttactcaagggacttgaaattcaagctccaaaaactaacccaaggcaacaagggggttgaggagtatttcaaggaaatggatgtgctcatgattcaagcaaatattgaagaagatgaggaggtaactatggctcgatttcttaatggtttgactaatgatatccgtgatattgttgagctgcaggagtttgttgaaatggatgatttgcttcccaaagcaatccaagtggagcaacaat

SEQ ID NO: 147 - DNA, 451 bp, Glycine max
atcctcttagtcacctgccgcatgcaagcttgaaattgacaacggaagctctccagaatctcatatggtgataacttatcacacgaaagtctgattcaggcgcatagtatatctagaccctcgaaattaaacaacgaaagctatcgagaaactcatatggtcataaattgtcacacggaagtccgattcatgcgcataatatatcgagaaggttggatttgaaccaccaatgctctcgagaaattcagatggtcataacttttcaaacagaagtccgatatatgcgcataatatatcgagaacgttgaaattgaaccacgaatgctctcgagaaattcaaattgtcataactcgtcacacgaaagtccgattcaagcgcatactatatctacacgctctgaacttgacaacgaaagctctccagaaattcatatggccataacttgtcaca

SEQ ID NO: 148 - DNA, 361 bp, Glycine max
  unsure (1)..(361): unsure at all n locations
agctttgatatggaaattaagttganagtaaatgatggtatgtataagacatcaatcagtgtaatgaatgcagaaagttgtactgcgcctgagtgggtagcatagacaagatggccatttggtaatctaaccgtgatgggattaatttgatgatatgagtgaaagtttgttaaggaggaggaaacgtgatcagtggctcctgaatctaatatccaggaggtagagtttgctttttcgtaagataggattatacctgttgcatcgttattggaacaagataaaatggaagcgacctgtggtttggtggatgctgagtttccagcagatggctgttgtattaatgctagccatgccttgtact

SEQ ID NO: 149 - DNA, 501 bp, Glycine max
  unsure (1)..(501): unsure at all n locations
agtcacctgcggcatgcaagcttctggttgctgcgatgatcgaccagaactgttccctgaactcatccaagtcctcaaaggcttgagactcacagcagttaaagctgacatagccagtgttggtggcagaatcaaaagcatattggtgctttgttctaaggatagagaagacagtgtttgccttgccactctcaaacagtccctcaaatctgctgtcaccaaaattgcttcatcatccatggcttctagntgtcccgctagaagtaagaggcagagattcttcttgccttctcactgcctacagttaattatttattgcaaanaatatttttttccccactattcattgcagtatggggcaattatttgctctattntcaatatatatatatatatatatagactccccattaggaagataaaatcatgaaatattagttctgtgcaaccaattaaggcatagttaaattganaggaaaggacgcacagcatagtatgagt

SEQ ID NO: 150 - DNA, 412 bp, Glycine max
  unsure (1)..(412): unsure at all n locations
agtctcacgattgtcacgtgctcatgcaacatttgttagccgtggctatatgagacatcttgccaaacaaagtcaggttaacgataactcgcctgtgctttttcttccatgctatatgtagcaaagtcattgatccagtcatgtttgatgatttggaaaatgaggccgcaattatactgtgccagttggagatgtattttccccctgctttctttgacatcatgactcacttgattgtgcatctggtcagagaaatcaaatgttgtggtcctgtttatctacggtggatgtacccggttgagcgatacatgaagatcttaaaagggtatacaaagaatctatatcgttcagaaacatctanttgtgagaggtacattgcagaagaagccattgaattttgttcagaatactt

SEQ ID NO: 151 - DNA, 483 bp, Glycine max
  unsure (1)..(483): unsure at all n locations
gcttcacacttgataatggagacacatgaacagtgctatgtaatgacattcatggtgctccaaacaaaggtggagtatggaggattgccttgagggtccgcacttaggcaatcatgaaactcaactccaaactcgaaagtggaggacacatgaacagccctaagcaataacattcatgtggctccggaataggatgagaatggaggattgccttgagggtcctctcttaagcaatcatggaacacaactccaaactcgaaagtggaggacacatgaacagccctaagcaataacattcatgtggctccgaagcangatgagaatggaggattgcctcgagggtcctctcttatgaaatcatgaaactcaactccacactcgaaagtggagaacacatgaacagccctaagcaataacattcatgtggctctggaacaggatgagaatggaggaatgcctngagggtccctcttaagctatcat

SEQ ID NO: 152 - DNA, 479 bp, Glycine max
  unsure (1)..(479): unsure at all n locations
agctngaacacctattagtatttatatttcttaaataataaatgtatgacatcaactcgtcattggctcccaggttagtggattaagcaaaatagaccaatacaaactcacgggttaagtcacctaacccattgatccaaagtttacattgtcacctctacattagtgactntttgttgcctttgtttcctttaagctttntgtgtataaaaatatattttttcttgtgtgaaatatttgtttggaattcagttttaactatataataaaattgatggttaagtttaatatatatttaaacagtcttgatcatttgattatgaggacttggataaaatatatattcttcaaagttttgttaatataacttggtaaatataattctaattttataaactatganaaaatacaaaagttagatgaattcaagctcaacacaatagaacaagtaccaacanatactatcatacatttgacat

SEQ ID NO: 153 - DNA, 313 bp, Glycine max
tctcctaccactgccttacaatagtcatcaagcaatatgttggcagccttcacatctctatggattatctttggatcacactgctcatgaacgtatattagctcccttgctgctcctaaggcaatttgctttcttgtgccccagtccaacactggcttacctgcaaatatccatcactggtatatggatcagccactcaacttacatagcacatgcatgttcattctagttctggttacataaacttctctatatgcacctttgagaagaacataagaagttagaatcaatttatgtaccttagttattggag

SEQ ID NO: 154 - DNA, 402 bp, Glycine max
  unsure (1)..(402): unsure at all n locations
agctngcgaataattaacacagaatngtacaaaattcttatgatacatgatcaaatttatcaaaaaanataataatgacccctgaagctatcttggtgacagtgacaataagttgagccttgtgcagcaaaacttagtgttgagtgaaggatgacttgttgcttgtgaattgacttaaccagtttttgacagctttacctttggcaatgaagcagccattgttcttcctatcaaccttcaacggactccccattttgaccatcatcttctgaaccaacactctcaccggcgactctcctctgacactgctatgctttcccaacccacanaccaccgtaaattccgcaggaactccataattggaatcattcaaccttcttccatctcctcaaccaaagcaca

SEQ ID NO: 155 - DNA, 436 bp, Glycine max
  unsure (1)..(436): unsure at all n locations
tcttagatagcaacttgttntgtgctagtaatgcatcttgagaggaaagctccaggaagcttctttttgtgggaatatgagtccgatcacacaagatggcatgatcacttgcagccatgttctcaataagctccatggcttcttctggggtcttcaatttaatttttcccccagcagaagcatcaaataactgcttggactgtggccttaacccatctataaaaatgttgaactgaattggttctgaaaatccgtgagtcagtgttttccgcagcaagctatggaatcgttcaagtgcttcgcttagagactcatccagaaactggtgaaatgaaaagatggntgcttttccttctactgtcttagactcggngaaatatttcttcaaacatttctccaccaattcatcccatgtcttgagactgtntcccttaaa

SEQ ID NO: 156 - DNA, 455 bp, Glycine max
tctttgagaaaacttccttgagaagctagagcttagctacactcacccctctaataactaagctcacctccttgagaagccttcttgagaagattcctatagaagctagagcttaggtacacacacctctctaatagctaagctcacctccttgagatgaaaagctagagcttagctacacaacccctataatagctaagctcacccccatgacaaaatacatgaaaatacaaaaaattccctactacaaagactactcaaaatgtctcgaaatacaaggctaaaaccctatactactagaatggccaaaatacaaggcccaaacgaaggaaaaacctattctaatatttacaaagataagcgggctcatatttagcccatgggctcaaaatctaccctaaggctcatgagaaccctagggccttcccttggatctctggcccaatctacttgga

SEQ ID NO: 157 - DNA, 285 bp, Glycine max
gtataacccttcagtttcaatccagagtctccatatatgaggaatgggtctttagttcttcttaagtacttaagtatggtcttaactactttccaatgttcctcaccagggtttgcgtgatatcgactagttacacctagtgcataagcgacatcaggacgtgtacaagtcatggtgtacatgatagctcccactacactagcatatggtattctactcatgcgttctctttcttcaagagttgttggacaatgttccctactaagagttattgcaacgcctaca

SEQ ID NO: 158 - DNA, 460 bp, Glycine max
  unsure (1)..(460): unsure at all n locations
tactaaaaaagcccattattgtcgtatcttgctttcattgacaacctagnttntgttggtgaagctacaatggatcaagtagaaatgatgtttgaattccttaattacttgtattagatctgggcaagtaaacaacaaggacaagacgaaggtgttcttttataaaaacataggcgatatcatgagaatttagattaatggcaagttgggttttggtaggaccaatgacatcaacaagtatttaggagtcaatatcaatcatgggagggtttccaaaaaatccttgcatgggatcattgacaaagtctagaagtggctcagtgtttggaaaaagaggtcattttcctttacgaggaggttgacattaactaaggcagctctcaatgttcttccatcctacaccataagccatcgcacatcctttattcagctngtgatgagttagacanaatatgtcatg

SEQ ID NO: 159 - DNA, 408 bp, Glycine max
  unsure (1)..(408): unsure at all n locations
tcaacattcaatttcgagcgtctcgatatattacgagcctcaatcagacatgcgagtaaaaagttatggccctttgtattggatcagagcttcaacattcaatttcgagcgtctcgatatgttacaggacttcatcagacatcagagaaaaaagttatcgtccgttgagttggctcagagattcaacattcaatttcgagcgtctcgatatgttacgggactcaatcagacatccgagaaaaaagttattgtcgattgaattggctcagagcttcaacattcaatttcgagcgtctcgatatgttacgggactcaatcatacatccgagtaaaaagttattgtcgtttgaataggctcagagcttcancgttcaatttcgagcgtctcgatatgtacgggactcaatc

SEQ ID NO: 160 - DNA, 388 bp, Glycine max
aattctatcaatagaccttcaatctttaatggagagggttaccactactggaaaacccgaatgcaaattcttatcgaggcaattgatctaaatatctgggaagccattgaaatagggccttatatacccaccacagtagaaagagtttcaatagatggtagttcatcaagtgaaagcataaccatagaaaaacctagagatagatggtctgaagaggatagaaaacgagtacaatacaacctaaaagccaaaaacataataacatctgccctaggaatggatgaatatttcagagtttcaaattgcaagagtgctaaggaaatgtgggacactcttcgattaacacatgaaggaactacagatgttataagatctaggataaatgcac

SEQ ID NO: 161 - DNA, 392 bp, Glycine max
  unsure (1)..(392): unsure at all n locations
gtgttggatcgcatgcagaagagcctcgagcttgaggattggcacatggagccttctagaatgacactttacaggtttggcaacacgtcttctaactcggtctggtatgagttggcatattgtgaggccaacgggaggattaagaaaggtgatagggtttggcaaatggcgttcgggtccgggttcaagtgtaacactgctgtgtgggttgctttgaatacgatcgaaccagggtccatcaagagtccgtggagggatgagatacataattttcctgtcaaggctgatccacttccttgtgagagaacaaatgaatgaataatccaatcatgcacatttgggtttgggaatttctgangaaagtatgtggtctgaattgattattagtatta

SEQ ID NO: 162 - DNA, 324 bp, Glycine max
  unsure (1)..(324): unsure at all n locations
accacttccaggcgtgctggaactacttcacatggacttgatggngcctatgcaagttgaaagccttggaggaaagaggtatgcctatgttgttgtggatgatntctccagatttacctgtgtcaactttatcagagaaaaatcagacacctttgaagtattcaaggagttgagtctaacacttcanagagaaaaagactgtggcagagagtttgaaaacagcaggtttactgaattctgcacatctgaatgcatcactcatgagttttctgcagccattacaccacaacagaatggcctagttgagaggaaaaacaagacttt

SEQ ID NO: 163 - DNA, 393 bp, Glycine max
  unsure (1)..(393): unsure at all n locations
cagcttgtgcctttcatgtctggaatatgaatgtttatatagattcaaagaaccttatgtgctttgctgatggcttattcccgttccaaggcttcaatggtgtcttgtcttttacagacttagttggacatctgttgagtatgtaaacagcagtgtagactgcttcagcccagaatgtgttaggtagtcccttctccttgagccatcgatctaagccattntccataaattgcgcaattctttctctctgacacttcattttgttgaggagaatatgtgactataagttgtcgctcaatgcctncatcctcacaaaatctttcaaactcgcgagaggtgtactctttgccgtgatcacttcttagtacttttatctcgtttccactttgattt

SEQ ID NO: 164 - DNA, 461 bp, Glycine max
  unsure (1)..(461): unsure at all n locations
tataaggctntgagtgggaaatgatagtgagactcaacttgtataccaaccttgtgctacaacaattgtagcaagacctagtatccataatgagagaagaatttttgtttaaaaccttgcatcttgtatgaaagatgttctctctttaggtttgggttaggtcacaagattaacttgttggatcgagtggcctcagaacaattaagaagggggggttaaattaattattcttaaacctttactaattaaaaattactcttttaaggcttttactanattgttaagagaatgaggactagaagagaaacttaacagaaagtaaaagcagaaattaaatgcacaacggatagtaaaagagtagggaagaaggaaacaaacacacaagagttnttatactggttcggcaacaacccgtgcctacatccagtccccaagcgacctgcggtccttgagattctttc

SEQ ID NO: 165 - DNA, 431 bp, Glycine max
  unsure (1)..(431): unsure at all n locations
gagtttggagtgcacatttgaattacaaagatgtggagagccatgaaagaagcaaagcaactagtggaagggaatgagagggaacaatatgccaaagtatttgattatgcacatgaattgttgaggagcaatcctggatcaacagttaagatcaacacagtgccaagtccagaaggtccaccataatttcagaggctatgtatttgtcttcctggctgtaagaagtggtttgttgctggatgtagaccattcataggtctagatggatgtttcctaaagagtgcatttggaggaaacttgctctctactgttgggcttgatggcaataaccacatctttgttattgcttatgctgtggtggacattgagaacaaagacaattggaaatggtttctaacttctgtacatgaagatncttgggattatataca

SEQ ID NO: 166 - DNA, 406 bp, Glycine max
  unsure (1)..(406): unsure at all n locations
actttatacaagaatgaagctctgttaccacttgttagacaagtggcctcagatatcttaagaagggggggttgaattaagatattccaaactacttccccaattaaaaatctatttcactttttattcaagttataaattcccttaataatgaacttcttaaatattgattcaaataaaacaatttgaatatgaatataaaacaataataaacaaaggagattaagggaagagaaagtgcaaactcagatttatactggttcggccacacccttgtgcctacgtccagtccccaagcaacccgcttgagagtntcactatcttgtaaattccttttacaagttctaaacacacaaggacaatccttcctttatgtttagaattcctttacaacaagagacccacg

SEQ ID NO: 167 - DNA, 462 bp, Glycine max
  unsure (1)..(462): unsure at all n locations
ctcagcttgcagaatgtactctacttaattttgaagattgtttcaaggaagcatatatatattcatcaggaaaacatcatagtggaaggaaattgcagtgttgtgatccagaagatccttccacccaagcataaagatcctgggagtgtaacgattccttgttcaattggggaagtcaatgtgggaaaaactcttattgacctgngagccagtatcaatttgatgccactctccatgtgcaaaagattgggagagttggaaataatgcccactcgaatgactttacaattagctgaccgctccattaccaggccatatggagtaattgaagatgttttggttagagtaaaacattntatctttccggcatactttgtggtaatggatatctttgaagctactgacatccctgtaatattgggaaggccattcatgttgaccgcaagctgcatagttgatatg

SEQ ID NO: 168 - DNA, 442 bp, Glycine max
tctcacagataggacatgcatgatgccttttcacactatatccacttaaatttccatatgctggaaaatcattaatagtacaaaacaccattgcgtgtaatgtgaatgtctgctgcacatttgcatcccacacatctactccttcttcccacaatattttcaagtcttcgattaatggtgtaagatacacatcaatatcattccctggctgccttggacccgtgatcatcatacacaggataatgtatttacacaaaatgcacaactaggggggaagcttgtaaatcatcagtaaaacaggccacgaactatggttgctgcttaagttaccataaggattcattccatcagaagcaagagcaacccttaggttccttggctcgtccctaaactctggatacaaacaatcaattgtcttccattatggagaatcggtaggatg

SEQ ID NO: 169 - DNA, 262 bp, Glycine max
  unsure (1)..(262): unsure at all n locations
tactcagcttgctgattacatctncccctttctcaagcaaattcttcttgatatcatcaaaatcttcatgatcccgactcgttggtggaggatgcatgaatgacaatcaattcatggcgcttcgaataaaagtggagaatggaggatatgcgaatagcgctaggcaatcaatttgcggtctcccgactcgctggtggaggatgaatgaatgacaatctactcatggggctccgaataaaagttggaaatggaggatttgaga

SEQ ID NO: 170 - DNA, 405 bp, Glycine max
  unsure (1)..(405): unsure at all n locations
actcggatgtctgattgagtcccgtaatatatcgagacgctcgaaattgaatgttgaacctctgagccaattcaaacgacaacaactttttactcggatgtctgattgagtcccgcaatatatcgagacgctcggaattgaatgttgaagctttgagcaaattcaaacgacaataactttttactcggatgtctgattgagtcccgtaatatatcgagacgctcanaattgaatgttgaagctctgatccaattcaaacgacaataactttttactcggataattgattgagtcccgtaatataactagacgctcgaaattgaatgttgaagctctaagccaattcaaacgacaataactttttactcggatgtctgattgagttccgtcatatatcgagacgct

SEQ ID NO: 171 - DNA, 395 bp, Glycine max
cgagcgtctcgttatattataggactcagtcagacatccgagtaaaaagttattgacgtttgaatttgctcagagcttcaacattcaatttcgagcgtgttgctatattacggtactatatcagacatccgaataaaaagttattgtcgcttgaatttgctcagagcttcaacattcaatttcgagcgtctccatatattacgggactcaatcagacatccgagtaaaaagttattgtcgtttgaatttgctcaaagcttcaacattcaaattcgagcgtctcgctatattataggactcagtcagacatccgagaaaaaagttattgacgttggaatttgctcagagcttcaacattcaatttcgagcgtgtcgctatattacgggactatatc

SEQ ID NO: 172 - DNA, 447 bp, Glycine max
agatttgtgttgattatatatcccttaatatgttggcggtgccagacaaattcccaattccagtgattgagttactgggtgagttagggaaggctgttgttttttctaaacttgatttgaaatctgggtacagattttaaagatgccctcatacagaggttccaaccagcatccatggtaaactcatttgaatccttgttaacactcaaacaagatcaagctgttcacgaattcatgacacagtttgagaaatatgcaaggtctgtgaaggggttagatgagcagtatttgatgggaattttcatcaatgggctaaaagaagagatttctgctgaattatggttgtatgagcccaagaccttgtcagaagcaatgaacaaggcaggaaattaagaagaaatagaataactgatttattattgattataaagaaataagacaaacaat

SEQ ID NO: 173 - DNA, 333 bp, Glycine max
gaggcagcattatgcacaatttctaaaaactcttttattttttatctaaatggcaatcaaactgaagtgaacctttatgcctggacaccacctaaactgtttacatttgcttgatgttattatatggattgtttcactctccaggctgaggagaggcactgtgagaatctaggtcgacttttgtgcactgctaagctggttgcaaagcaagaaggtcctgatgatggcttcaggattgtaattaatgatggacgagacgggggtaagcattcttctccatgtcattgtagtaacattggccaatcagattttatttgattcataggttcttgc

SEQ ID NO: 174 - DNA, 392 bp, Glycine max
aacagaacaattatgacctctctagcaacagataaaccctggatggaggaatcaccctaatctcagatggtctagccctcaacaacaacaacagcagcctgctccttccttccaaaatgctgctggcccaagtagaccatacattcctccaccaatccaacaacaacaatagccccagaaatagccaacagttgaggctcctctgcaaccttccctcgaagaacttgtgaggaaatgaccatgcagaacatgcagtttcaacaagagaccagagcctccattcagagcttaaccaatcagatgggacaattgacaacacaattaaatcaacaacagtcccagaattctgaaaagctgcgttctcaatctgtcccaaatcccaaaaatgtcag

SEQ ID NO: 175 - DNA, 448 bp, Glycine max
cctgcacgcatgcaagctatacttcactgcttcaagtagcgcatgattgtcttccataggaaaaactttttctaaaggttactattacaccaagaagatactgtaccagatgggaatggagtatgaaaagattcatgctagcccaaatgattgtgtggaagaaatgtcttccaagattattttgatgatgccaaagaatcaagagtcaagcatgttccaaagaatcaagagtcaagccagtttcaagaatcatgatcaagatttatgattcgagaataatcatgatcaagattcaggtactgcatctagactcaagattcaagaatcaggagaagactcaatcaagataagtattacaagaattttttcacaacattgaatagtagaataatttttctaaaagaaaaatcttttaccaaagagttttactctcaggtaatcgattacc

SEQ ID NO: 176 - DNA, 467 bp, Glycine max
  unsure (1)..(467): unsure at all n locations
tgtcagcgtgtccaagaccgccacctctgtcattgtccttgctgcatgtcgaatttggaaatgcactcgtgccttagatttgaaaatacacttcacgctttagatctaaaaatgcactacacctcagattcataatgcatggccttgcacacaacagatttgtcgcgacaatctcccagagaaagtcccaatcggccttcttgttgtgcatcttgtcgtgattgatggtaatgccaacgacattggcgcaagagtgggttgtgatggtgcacatgggcctaccgacaccgtaacccacgtcgaggattctgttgtcgggcttggcctcgacactgtcaaggaggagtgtggaagacgtcggtgatggagctgctagaggtataagtaaatcggttatttcatcactttcatgacccaacccacaaaaggaaccttattntatttatnttggctctcctaattaatca

SEQ ID NO: 177 - DNA, 422 bp, Glycine max
  unsure (1)..(422): unsure at all n locations
agcttaacgaaaggcatgccaagtaggnggaattcctaaagctatttccttatgttatcaaacataaaaagggaaaaggtaatattgtagccgatactctttctcagcgtcatgcattactttctatgcttgaaacaaaattgattggtcttgaatgttcgaaaagcatgtatgatatggaagcaatgtcttccaaggttantttgatgatgccaaagaatcaagagttaagcaaagtttcaagcaaagattcaagattcaagaatcaagtttcaagtttcaagattcaagattcaagatttaagaatcaagattcaagaaaaatcaagatcaagattcaagaatcaagagaagactcaatcaagataagtactaaaaagtttttcacaacattgagtagcacatgaagttttctcataatc

SEQ ID NO: 178 - DNA, 476 bp, Glycine max
  unsure (1)..(476): unsure at all n locations
actcctcttatgtggagtggtgatggttgtttattccttttcattgngatagttgtatggattctggaacacaggataaatgatgagttcaggggtccacctaggcagcaaattataaccatgttgtggtcaattatttatttcattatcttactattgtacctagcataatagttgcacaccttttgcatattcaagctataaacgaaaactacaactagaagtagctttgctgtgggccatggaaaacaacattggcagcacctgtttgtttgttagcatcatatatacacaaggaggttatcatttgtcagtcatggtattggaaagattccaggatcatcatccataaggcattntgtagtcaagatatttgtgatgatagcttctcggttctcacaacatgaatttgctatattcaggaattctgttctgaagtatttatggaatatttgtttcagaaatttctaagatta

SEQ ID NO: 179 - DNA, 385 bp, Glycine max
tatgagcttataaattcagattaaaggagctgaatgctttggatgctggtagttctgacagaaatctgaatcaatcagaagtggagctcatgaagtctctgcaggagcaattgtggcatgctgctaatgcctatgaatctttgctgaggcaaaaggctatagtgaaatggttaaaggaaggggacaaaaattcagcttacttccacaagctgataaatcatagaagaagacataatgccattcaaggattgatcattgatggggaatgggttcacgaccctagtagggtcaaaactgaggctttcaatcatttcaaagatagaatttctgagcaagaatttaatagaccaaccctggatggtgtgcagctacctttcattggtca

SEQ ID NO: 180 - DNA, 425 bp, Glycine max
  unsure (1)..(425): unsure at all n locations
agcttgcttaagaccgtatattgatttctttaatttgcacaccatgtgttccttcccttcaactgagaatctcattggntggtccatataaacatcctcctctaaatcttcattcaaaaaggcagntttcacatccatctgatgtagctccaagtcataatgggctactaatgtcatgataattctgaaagaatcctttcatgagatgggtgaaaacttctctttataatcaatgccatctttctgagtaaatcccttatcaacaagtctagccttgtaacgttcaagggtgccatgagagtcatgtttagtcttgaagacccacttacaaccaactctcttacaaccctttggtaattctacaaggtcccaaacaccattatgttccatggaatctatcttttctttcatggcatttaaccact

SEQ ID NO: 181 - DNA, 350 bp, Glycine max
cagctgtagacactggctctccccacaagtacttgggcatactcttgcctttcaacatgcctcctaccatattcaatatggttctgtgttttctttctgcagctccattatgttgaggtgtgcttggaggagtcacttcatgaattatgccttcttgatcacaaaattcttgaaattctgcagaaacatattcaccaccaccatttgttctcaatatcttgatcaatgagccactttgcctttctgccatatttttgaactttcaaagacttcaaagacatcactcttccttcttattacggaaacccatactttcctagtccattcatcaataacggatatgaagtatc

SEQ ID NO: 182 - DNA, 221 bp, Glycine max
tctctacattgcatcaccttttaatgagctggtgaagaaaatgtggcatttacctggggtgaaaaacaagagcaagcctttgctttgctcataaaaaagcctactaaggcacctgttctagctcttcctgacttttctaaaacttttgagctagaatatgatgtctctggagtgtgagttgggagctgtatttgttacacaggtggcgccaccctatttgc

SEQ ID NO: 183 - DNA, 455 bp, Glycine max
  unsure (1)..(455): unsure at all n locations
taccctgatgaggatgtcccatatgttcttaatactggactgatccatntgcttccaaagtttcatggccttgcaggtgaagacccacacaagcatctgaaagaattccatattgtctgctccaccatgaaaccaccagatgtccaggaggatcacatatttctgaaggtctttcctcattctttagagggagtggcaaatgactggctatattaccttgctccaaggtccatcacgagctgggatgacctcaagagagtattcttagaaaaacaatttccctgcttccaggaccacagccatcagaaaagatatttcatgcattagacaactcagttgagagagcctatatgaatactgngagagaattaaaaaattatgtgttagttgccctcaccaccagatttcatagcaacttctcctccaaatattttatgaaggactcagcaacatgg

SEQ ID NO: 184 - DNA, 419 bp, Glycine max
  unsure (1)..(419): unsure at all n locations
cttgngaacattaccttgtttccaaggaatttgtcattcatagtgatcatgaatcacttaagtacattagagggcaaaacaagttaaacaaaaggcatgcaaaatgggtagagtacctagagcaattttcatatgttatcaaatacaaaaagggaaaaacaaacgtggtagttgatcccttctcttggagacacatattgttttactccctaagagctcanattntaggatttgataacattagggacttgtatgctttagatgaatatttctctcccatttatgagagttgtgggcaaaaggccccaganggattctaattggctgaggggtatttgttcanagagggaaaactttgcataccccaaggatccatcaggaaattacttgtgaaagagagccatgaatgtgggctcatg

SEQ ID NO: 185 - DNA, 261 bp, Glycine max
ctcacgctgtttcatgtaaacctcttcttcttatcaccattcacgaacgccgttttcacatccatttgatgcagctcaagatcaaaatgagctactaatgcccaaattactcgaagagagtctttcttatatacaggggaaaaggtctctctgtaatcgattccttctctttgagtgaatcctttagcaacaagtcttgccttatgtctctcaatgttggcttctgagtctttctttggtttgaagacccatctacattcg

SEQ ID NO: 186 - DNA, 354 bp, Glycine max
  unsure (1)..(354): unsure at all n locations
ctcagctcgtcttaccatccacaatcttacggtcagaccgaggtggcaaatcggatagtataacaatacttgagggccttcgtccatcgcaagccagcgttgtggggacgatttctgttgtgggcagaatggtcgtataatacttcgtgccattcgagtacgggattaactccgtttgaaatcaccttcgccgaaaaccaccagctatccctgaatacatangtggaacatcacaggtgtcataccctaatttcgtccggggaccatccgtttgttgggatgcgaccctcgtttgaccacttcgaggtacttggcacccatcgttaggcaatctgtgaagtttcgtgacatgct

SEQ ID NO: 187 - DNA, 416 bp, Glycine max
gtgtgattcctttctttttcttatcattctcctcatgttgattcagtctcattagttccatttcgtgttcctataactttccaaataaagttgcaagagacatgttagaaagatcccttgattctgtaatagttgttacctttggttgtcattccctacttaaacatcttagaactttattaataagatcctcattgggaaatatctttcctaatgatgcaagatgatttactatgtgtgtgaatctcttttgcatatcatgtatagtttcatttggattcattctaaacaattcatattcatgggttaaggtatttattctagaaccttttacatctattgttccttcatgggttacttgtaaggtatcccacatatcttttgcactcttgcaatttgatactctaaagtattca

SEQ ID NO: 188 - DNA, 471 bp, Glycine max
  unsure (1)..(471): unsure at all n locations
agctntgcatggatgccacacgtgaatcttctgtatcatccatcatttctttcattcacaaccccaacaagatgtagtacactagagttatgggcaaagcaatcagcatcccaaaaataacactgcattgggttaaagaagaagctccattggttaggattaaaagagaaagtaattgaatgaaaaggaaaaaggaatggaggggagagaaagttctaattgagccatataagaattagatttgaatactcacgctgtgctgagaatatcaggatgtacattatattccttagcaaagacaaatgggacaattccttggggaagagctgcctatatttttttgacattcagttgccaaacaaacaggacaagcaaacaaacaaacatgtcaactgcagtttcaaatccttggtgtacaatcacaaacatgatcattngaatcctcactactagtactaagatcttcaattt

SEQ ID NO: 189 - DNA, 412 bp, Glycine max
  unsure (1)..(412): unsure at all n locations
cttgacagctctatggaccatgctatcattcttcctgctagcttagtatttcttagcaccttcttgatggggtgatccttcttgacgatgatctaagggctctggaagtacggcttgaggcgttgagcagaggttatgagtgctagcgccactttctcgatcatttggtatctctttccaacatcatgaaggatgtgactgacaaagtagatgggtgtttggtactttccatcttcttggacaagggttgaactaatggctttttctgccactgaaaggtataggaatagggatgctccangcttangtcaacttataacaggtggtgttgcaatagttntctttatagctagganagcttgcttacaggcttcgtttcacaagaacgactcggttttcctgagtagcttat

SEQ ID NO: 190 - DNA, 408 bp, Glycine max
  unsure (1)..(408): unsure at all n locations
agcttgcttctacactaagaagcactctatattgagtgaatcaccaaagagagaacaaccaccaaaattgaggaccgttttgtaattntgtaatttacaatttacttaccttcatttctttcaagttttgtaacaaaaaggcctttcattggaagtgtgttgggagcctccaataagttaccaaacttccatttgtgtgtaataattctaggcaatttttccttaagatagtgagtgttttgttgggaaccttgaatgtggtcatccaaacactcttangatttgcctagtttacatttcttgcttactttcatagcttatttcctttaccttcccttttaaaaccacctagatagttttccttttaccaattagttnttttaccttatctttcacacctcttttagt

SEQ ID NO: 191 - DNA, 463 bp, Glycine max
  unsure (1)..(463): unsure at all n locations
gctttgatcaaagtgttcgagggggagcaagcaaagatagaggataactttcttcttgggaagtttgagctttttgggttcactacatcgccaagaggagttccacaaatcaatgttttatttgatgttgacgttgatggcatcgtagaattcattgctagagataaaatcatgaggatgaaaaaaaggatcatgatcgacaacaagtactggaggttgagtccctaagagatgaggagaatagtgagatatgcaaagaggtataaggcatangatgtggaggtaagggcaaacggaaggccagaacttgcttgagaattgtgcttttgaaatgatggacaaagtgaagaatcttaagaaattagtacccatagcaacaatgttattntttttagtttcattaacaattcagtaaaaaaaaataccgtgcgctaacttgaaatgcccnctgcacacatggata

SEQ ID NO: 192 - DNA, 383 bp, Glycine max
  unsure (1)..(383): unsure at all n locations
agcttagccctagaggggatggaccttttcatgttttggagaggatcaataacaatgcctataagttgggcctcctagaagagtatgcagttagcaccacttttaacatttctgatttaattacttttccaggtggagctaatattgaggaggaggaactaacaaatttgagatcaaatcctcttcaagggggaggggatgatgcaatcctccctaggaagggccagtcactagagacatgagcaagaggctccaagaggattgggctagagctggtgaagaaggccctanggttctcatgagcctcatggtagatttctgagcccatgggacaaggttgggtctaattatctttgtacatattaaactangatgtcattata

SEQ ID NO: 193 - DNA, 472 bp, Glycine max
  unsure (1)..(472): unsure at all n locations
agctatgtggcaagtacaaaggtcataaacgcgcccgttatattatcaggtcttgctttggtggccttaagcaagcttttattgctagtggaagtgaggattcacaggtatgaatcttcaatcatcattgatcaaaatgggaaaatattcgccagtgtaattttttataatttgcaaattgaaagccttgatgtttatatgtctctgttaaatgtgttttatttgctaagtttttatagctgtctcaataatttgttaaaataagttcaacatgcacttgatgcatgctatcgaggatcactaaaatattggcataaaagacccatgaaatggttctttgtggtctgatntactggacttgaatgaattgaactacacatcgctataatgttcaagagttcctggcttctgcaatattattctagtttatcttgataaaactaggaacatctcgattgataatgctggaagt

SEQ ID NO: 194 - DNA, 410 bp, Glycine max
  unsure (1)..(410): unsure at all n locations
tattccatattggggaatctaaaataacagacaattgattgtacaaaacaatgataggagtaaaatctagtaacatcataatttaaactcactgcaacggataaatgacaatcaccatactcaagagcctcatggataatgataagatcttcactaccctaatctaagaaaattagacgataaaacaatntatgtttggtgattacatagtggcactaatatgtaaatgcaaaaatgctgacctggccatgttcattgaaagtatcgagtccaacaattccaaggtcaagatctccagataacaattttcttgtgatgtatttgggcctctaaaaccaaactttgagtttggatagctgcaataatgcaagagaattggtttatggtcatgtagagatatagtacattga

SEQ ID NO: 195 - DNA, 331 bp, Glycine max
tccattgtcgaatttcgagcgtctcgatatatgatgcgcctaattctgacttccgagtgaagagttatgaccatttgaattactggcgagcttccgttgatcaatttcgagcatctccaaacattatgcgccttaatcggacatccgagtgaaaagttatgaccatttgaagttctcgagagcttccgttgttcaatttcgagagtctcgatatattatgtccgtgaatctgacattcatgagaaaagttatgaccacttgaatactcgagagctttcgttgtcgcatttcgagcgcctccgtatattattcgcattaatcggactttcta

SEQ ID NO: 196 - DNA, 300 bp, Glycine max
  unsure (1)..(300): unsure at all n locations
tttccatatgtcatcaaacataaaaaggggaaagggaatgtagtggctgatgcactgtctaggagacatgctttacttgctatgcttgaaactaagttggttggtctcgagtctttgaaagacatgtatgtgcatgatgtggactttgctgaaatttttgctgcatgtgaaaagttttctgaaaatggttactataggcataatggattcttggttaaagcaaataaattgtgtgtgcctaagtgttccattagagagttgcttgtgagtgaatcacatgaggnggggttgatgggacac

SEQ ID NO: 197 - DNA, 461 bp, Glycine max
  unsure (1)..(461): unsure at all n locations
tcaacatcagaccacttccagggtgctggaactacttcacatggacttgatggggcctatgcaagttgaaagccttggaggaaagaggtatgcctatgttgttgtggatgatttctccagatttacctgagtcaactttatcagagagaaatcagacacctttgaagtattcaaggagttgagtctaagacttcaaagagaaaaagactgtgtcatcaagagaatcatgagtgaccatggcagagagtttgataacagcaggtttactgaattctgcacatctgaaggcatcactcatgagttctctacagccattacaccacaacaaaatggcatagttgaaagggacaacaggactntgcaagaagctgctanggtcatgcttcatgccaaagaacttccctataatctctgggctgaagccatgaacacagcatgcttcatccacaacagagtcacac

SEQ ID NO: 198 - DNA, 402 bp, Glycine max
  unsure (1)..(402): unsure at all n locations
tatccncataagagtgcagaacagctggcgagtcagcattgattataggaggctaatccaggtaaccaaaanagatcattttcccctgccattcattgatcanatgcttgagcgcttggcaagtatgtctcattacaatnnttttatggttnttctggttatttacaaattcatattgctcctgaggatcaagaaaacaccacattcacctatccctttggcatttttgcctataggaggatgccctntggcctatgcaacgcctctggtaccttccaacggtgtatgcttagcattntcaatgattntttagagagttgcatagatgtgtntatggatgattntactgtttatggatcctcttntngatgcatgttggatagtctagatagagttcttaat

SEQ ID NO: 199 - DNA, 446 bp, Glycine max
agcttatgctgcaaacatctacaatagaccttctcaacctcaacaacaaaatcaggcacaacagaataactatgacctctccagcaacaggtacaatcccggatggaggaatcatcccaaccttagatggtcgaatccgtcacaacaacaaccttattttcaaaatgttgttggcccaagcagaccatatgttcctccaccattccagcaacaacaacaacaacaacatccccagaaacagcaaacagttgaggcccctccgcaaccttcccttgaagaacttgtgaggcaaatgactatgcaaaacatgcagttttaacaagagaccagagcctccattcagagcttaactaatcagatgggatagttggctacacagttaaatcaacaacagtcccagaattctgatagataccttctaatctgtcagaatcccaaaatgtgag

SEQ ID NO: 200 - DNA, 465 bp, Glycine max
  unsure (1)..(465): unsure at all n locations
cgtgcattcaatatcctgatgaggaggttccatatgtctcaagactggactaatacatttgctgtccaagtttcatggtcttgcaggtgaagatcctcataagcatcttaagaagttccatattgtctgttccaccatgaagccccctgatgtccacgaagatcatatctttctaaaggcttttcctcattctctggagggagtggcaaaagattggctgtactaccttgctcccaggtccattaccagctgggatgaccttaagagggtgttcttggggaaattcttccctacatctaggaccactgccatcaganaagacatttcaggcatcangcaacttagtggagagagcttgtatgagtattgngaaagattcaagaaattgtgtgcaagttgtccccaccaccagaattttgagcaactctttctgcaatatttctatganggacttancaacatgga

SEQ ID NO: 201 - DNA, 409 bp, Glycine max
  unsure (1)..(409): unsure at all n locations
tatgcattgtggaatttcaccagagagagcattgtttgaaacatctcaacttgttgatgctttcagcttaaccgacttcaaagggtaggctttccattgaacgagttgtgggacaagttcaataacaatgacaagtangaaagaccaatgacttgcaaaggaatagttccactaattctgttgtgtgaaaggtcaagggtattgtaaatttggcaattcccaacaccaggatgtatgcttccttccaacacattatttgacaagtcaagttgaaacaaaagactaaggttgccaatggataatggaatttctcctgacagtttgctcacatttaaattcaatgactgcatcttttggaacatgacaaaagaagcaggaatagtcccagtaatctgatggccaccaatat

SEQ ID NO: 202 - DNA, 393 bp, Glycine max
  unsure (1)..(393): unsure at all n locations
ctattacggacactatagatactcagctagaattgaacacggaagctctcaagaaattcanattgtcttatactttcacacggaacaccgattcaagctcataatatatcgagactctcgaaattgaacaacgaaagctctcgagaaattcaaatggtgaaaacttttcagacgaaagtcggattcagacgcataatatatcgagaagcttgaaattgatcaacggaagctctcgagaaattcaaatggtcataacttgtcacacggaagtccgattcaggcgcataatatatagagacgctggaaattgaacaacgaaagctctcgacaaattcaaatggtcataactattcacacggaagtctgattcaggcgcatactatatcgagactc

SEQ ID NO: 203 - DNA, 406 bp, Glycine max
ggctgcagcttctcgatatattatgcgccagaatcggacctcagtgtgataagttatgaccattttgaattttcgagagcttccattgttcaatttcaagcttctcgataaattatacgtctgaatcggactttcgtgtgataagttatgaccatttgaattcctcgagagcttccattgttcaatttcaaacttctcgatatattatacgtctgaatcggactttcgtgtgataagttatgaccatttgaatttctcgagagcatccattgtttaatttcaagcttcccgatatattatgcacatgcatcagactactgtgtgaaatgttatgaccattttaatttctcgagagcttccgttgttcaatttcgagcgtctcgatatattatgcgcctgaatcgga

SEQ ID NO: 204 - DNA, 328 bp, Glycine max
  unsure (1)..(328): unsure at all n locations
tctacttcataaccccttgaactacttcacattgatctatctggtccctctagaacaatgagtttgggtggtaattactatggcttagttatagtagatgattactcaaggctcatatggactttgttttaaccaaaaatgaagcttttggtggcttttaaaaacttgccaaggtgattcataatgaacaaggtctcaacattgtttcacttagaagtgatcatagaggtgaatntcaaaatgagtcttttgaaaactnttgtggagaaaatggaattcaccataatttntcttgcccaagaacaccccaacagaatggttttgtgga

SEQ ID NO: 205 - DNA, 455 bp, Glycine max
  unsure (1)..(455): unsure at all n locations
agcttctcacatctgactctctagttccaacgtggtgttttctcttgatgcacttcctccgatcaccttgaccaatggaatctccttccctcttaggtgctttgttcgcctatctttgatcctcaaaggcaatgttccatatgtcaagttcttcttcacttgtacgtcatccaatttgatcacacgagatggatcatggatatactcacgaagttgagacacatgaaagacaatgtgaaggttagaaagagacaggggtaatgcaatttggtatgcccacagtaccgactttttttagaatttggaaaggacagataaaatgaggtatgagttattgngatttcaatgctcgaccaactccagtccacaaagtgactctcaagaatacatgatcactaacctcgaactccaagtctttcctccttcttgtcctgatagctttctacctactctga

SEQ ID NO: 206 - DNA, 422 bp, Glycine max
  unsure (1)..(422): unsure at all n locations
tcacacttgataatggagaacacatgatcagcgctaggcaatgacattcatggtactccgaacaaaggtggagtatggaggattgccttgagggtccgcacttangcaatcatgaaactcagctccaaactcgaaagtggaggacacatgaacagccctaagcaataacattcatgtggctccagaaaaggatgagaatggaggattgccttgagggtcctctcttangcaatcatgaaacacaactccaaactcaaaagcggaggacacatgaacagccctaagcaataacattcatgtggctccgganaaggacaagaatggaggaatgccttgagggtcttctcttaagcaatcatggaacacagctccagactcgaaaatggaggacacatgaacagccctaaagcataacattcatg

SEQ ID NO: 207 - DNA, 397 bp, Glycine max
  unsure (1)..(397): unsure at all n locations
ngtanggttaaagtctcacgatagtcacgtgctcatgcaacagttgttagccatggctatacgagacatcttgccaaacaaagtcaggttagcgataactcacctgtgctttttcttccatgctatatgtagcaaagtcattgatcctgtcaagtttgatgagttggaaaatgaggccgcaattatactatgccagttggagatgtattttccccctgctttctttgacatcatgattcacttgattgtgcatctggtcagagaaatcaaatgttgtggtcctgtttatctatggtggatgtacccgattgagcgataaattgcanaagaagccattgaatttttttcagaatacttagagaatngctaaacctgtggccttctgagtctcgcatga

SEQ ID NO: 208 - DNA, 427 bp, Glycine max
  unsure (1)..(427): unsure at all n locations
ggtagagtccctntgtgtctctagcttcacacacatgtagnggaacatctatgnaaacctgcaacgtgtaagcattgcgttagctataatttatgaagaaccacttctagttctataattgtacaacatattagcatatgccaaactatgtgtatcatttggatcaccaaaataagaatattacctcaataaaatctccttttggcattagtgctctgcatgcatctctantcctttggtatggtgatattaaactagtgatgcaaataacaccagcatctgcaaagagtttagccacctcacctganaattntatatcgtgatgtctaattattaataaaacaataaaatataatcggaagatatcagggaaagcatttagaaagcaacataagaaaaaacagataaactcaccaatccttctaat

SEQ ID NO: 209 - DNA, 422 bp, Glycine max
  unsure (1)..(422): unsure at all n locations
agcttgtaacttatataatatatacattttattgtaattatattttaacacatcagaatggtgcgcccataacccacaggtcccaggatcgaaacctggttctgataaagagtggcttccgatctatcacatatatatatattttatgcgtaaaacatatatcattacgcaatgacatttgagtataataaaaaatagttctgcagggcctaacatttcagtgcttatattaatttagttaccatttaaattttattattgagtcaactttttaacgtatattcatattttctctttggtaattntattttaatttgcttaagtaaacatattttttatggataataatggcttccagtttcttagtgaaccacatctgaaaaattatacttgaacaagaagatgtgttcactatgtcatag

SEQ ID NO: 210 - DNA, 357 bp, Glycine max
  unsure (1)..(357): unsure at all n locations
tagatactcaagcccattcaaatgaaaggaattcataattaaaaagttgagaagggttcacngaagagaatntcaaaatgactctgaattgttttgtgaacaaaatggcattaatcgtaacttttccgctccaagaacaccacaacaaaatgggattgtggggaggaaaaaaaagtcccttgaggaacttgttagtgtttagctctactgagctntaaaagattggctaagatcttgttaaaacataagcacttagacaatgaatgaaagctggagttgctgcacatgatgtccaacgctatgtcaaggaataagatncggctgcacaatgcacaaggcaagataaaatgtcaaatg

SEQ ID NO: 211 - DNA, 384 bp, Glycine max
  unsure (1)..(384): unsure at all n locations
agcttgtcttctctagcctctnttgngcttttctacatttccttagtgacaagtcatctgcctagaagtttcttgtcttgacctggttgttgtgtctttctcatctgccatgcacttccatgtttaatttcgagtgtctcggtatattatgcgcctaaattggacatccgagtaaaaagttatggccatttgagtttgcctagaacttttgtgttcaattntgagcatcttgatatattattggcctgaatcggatatccaagtcaaaagtaatggccatttgaattttccttctgcttccatatataattntgagcgtctcgatatgctatgcacccgaatcggatattcgagtgaaaagttatgaccatttgaatttcttga

SEQ ID NO: 212 - DNA, 344 bp, Glycine max
  unsure (1)..(344): unsure at all n locations
tctggtgggacatcttgacttgctntccaatctgacattcaccacanattctgccttcttctattttcagaatgagaatgcctctaacaacacctttgtcaatgattttcttcatgcctcttaagtgcagatgtccaaatctttgatgccatattctgacttcatcttctttggaggatagacatgtggaggagtaactggtttcttgaggtgtccataggtagcagttgtcctttgatctgctgcccttcattagaacttcactcttctcatttgtcaccaagcattctgactttgtgaagtttacattgaatccttcatcacacagctgactgatgctgatc

SEQ ID NO: 213 - DNA, 355 bp, Glycine max
  unsure (1)..(355): unsure at all n locations
ttgaattgctttntggccttctggngtctccctgcctccaattaagactcgatccgggttgaaaagatcttggattgcagttccctcagcaaggaattcacggtttgaaaggatttggaacttgattccctttccattgtgagtcaaaatcttctctatggcctcagcagttttcacagggacagtggatttctccaccacaatcttgtcactcttgnagacatcagcaatcatgcgtgctgcactcttccagtaagtcaaatctgcaaccttgtcggcttcaagaccacgagttnttgncggcgtgtngacggagacgaacactatgtcagcctcatagacatgtttctcaaca

SEQ ID NO: 214 - DNA, 311 bp, Glycine max
  unsure (1)..(311): unsure at all n locations
tctgttgttcaatttcgagcgtctggatatattatgttccatattcanacatccgagtgaaaagttatgaccattagaatttctcgagagcttccgttgttcaatttcaagagtctagatgagttatgtacgcgaatcgaacatctgtgtgaaaagttatgaccattcaaatatcttgagtgcttccgttgtgcaatttcgagcatcttgatatattatgtcccacatttggacattcgtgtgaaaaggtatgaccattcgaatttctcgagagcttccattgtttaatttcgagagtctagatgagttat

SEQ ID NO: 215 - DNA, 415 bp, Glycine max
  unsure (1)..(415): unsure at all n locations
gtatatgacatgtcccacttgtactttntttttttatctaatttgcatcccacaaaattagaatctctggatcttgattcatccactgatttacctttctcatttaagtcaaggtaggttgatgtagccataagaatggacgcttctttgcattnttccataccaaatttttttattagttctatgcagtatttattttgaccgaggaaggttccatgtttcattttcttgacttggagtcctagaaagaaatttaattctcccatcatagatgtctcaaattcttttttgcatacaacatgaaaatcccttgcataaggtttcattagtatagccaaatataatatcatcaacatatatntgaacaattaacaaatcattgtttactttcataatntaacaaagtttgtcaact

SEQ ID NO: 216 - DNA, 305 bp, Glycine max
tatagatactcagcctcattggagcttgaggcctaggatcttcttatcaatggattctcttgcttcttggaagatgaatggaagcggaatggagaaagggagagagagaggagacgccacttcaaagagaagatgagtctagaagaagctcaccaccataggaggccatggataagagcttggaggaagaaggagatgaatgaagggagagggagagaagagcacgaacatttgtgctctacatgagctttgagatctgaagtttaatattcaaatgatcaaagttgaaaaaaatgcacacacat

SEQ ID NO: 217 - DNA, 396 bp, Glycine max
  unsure (1)..(396): unsure at all n locations
ntatcanatggatgtaaagagttcattcttatatggctntattcaagaggaagtatatgtagatcaacctcctagatttgagaattcagacaagcctaatcatgtttttaaattaaaaaaaaggctttatatggcttaaagcaagcccctagagcttggtatgagcgtctgagtaagttccttttagaaaaggatttctctagaggcaaggtagatactacccttttcataaatagaaaatcacatgacattntactggttcaaatttatgttgatgatattcattttagatctactaatgaattattatgcaaggaattctctcatgacatgcaaagtgagtttgaattgtcaatgatgggagaactctaattgtttcttggatacaaattaaac

SEQ ID NO: 218 - DNA, 325 bp, Glycine max
agtgtttcttttgcaagaagaagggacacatgaaaaagaattgccccgggttccacaaatggcttgagaagaaaggtgaatcaatctcattagtatgttatgaatctaatatgggtagtggtaatattaacacctggtggattgattctggatctactattcatattgcaaattctttacagggtatgcaaaacctaaggaaaccagtgggaagtgagcaaagcattttatcaggcaataagctaggctcacatgtggaggccattggaacttgcattttgactttaagtagtggctttattttaaaattagaaaggacttttta

SEQ ID NO: 219 - DNA, 289 bp, Glycine max
  unsure (1)..(289): unsure at all n locations
gcttatctttggttntacaaccaaagtccatgtgaaccttgagtaatcatctactataactaagccatagtaatttccacctaaactcagttctagagggaccaaataaatcaatgtgaaaaagttcaaggggttttgaagtagaaacaacatttttactttgaaaggagtttttaacttgctttcctttnttacaagcttcacacaatttatttttctcaaacttaagttntggaagaccaattactaagtctttcctaactagatgattaagatgatgcatatttat

SEQ ID NO: 220 - DNA, 460 bp, Glycine max
aagcacctgagctgcagctatgctgctatattacaatagaccttctttacctcagcagcaaaatcaaccacaacagcacaattatgacctcttcagcaacagatacaaccctggatggaggaatcaccctaatctcagatggtctagccctcagcaacaacaacagtagcctgctccttccttccaaaatgttgctagcccaagcaaaccatacattcctccaccaatccaacaacagcaacagccccagaaacagccaacagttgagacccctccacaaccttccctcagaagaacttgtgaggcaaatgactatgcagaacatgcagtgtcaacaagagaccagagccttcattcagagcttaaccaatcagatgggacaattggctacacaattgaatcaacaacagtgccaaaattctgacaagctgccttcttaagctgtccaaaatcccaaaaa

SEQ ID NO: 221 - DNA, 449 bp, Glycine max
agcttgtcatggtatatatatgtttcctaatagtctactctgtgttatataatacttagttaaatatattgtgtatactaaaagcaaatgcttaacattatacgtctttcgtactcaaggatataccaacattgaagggcggactgtcttgatgtagcgattttaacagcgatgacactatctttgttctatatattaactgtcatggagatggagctgtctttgtaaacaatctttgtcattatcagctgaaagatgaacatgttgttcgataggaaaataatgaaataccttatataaatgtattgtaaagttttaagaataaactgctcaaattgccagcagtttgtcgtagaatagtagtgcaaattcatgatgtaaatgtattagaatacagaataaacctatggtgccgttattaattgttatgagaacatcttgggtcttgc

SEQ ID NO: 222 - DNA, 447 bp, Glycine max
  unsure (1)..(447): unsure at all n locations
tgtaggccttgaatcttcttcatcaatggagtcctttgcttcttgaagataaattggaagcggaatggagaaggaggaaaggtgattagagatgccacttcaaggagaagatgagtcaagaacaagttcaccgccatatgaagatatggatataagagcttaaaggtacgagaagatgagtggagggagagggagagaaagggcacgacatttatgcctcagatgaggtatgaaatgtgaagtgtaatttctcanatgatcaaagttaaaaatatgcacacacaaggcctctatttatagtttaagtgtcatacaaaattggaggaaaatctgaatttctattcaaatttcacttgaatttgaatttgtggagccaaatttggagccaaaatttcactaattaggattgcatcatcccttccnctctgaaaatgaattgacctcaaa

SEQ ID NO: 223 - DNA, 440 bp, Glycine max
tcatcaaggatcttgttgaaatcatccaattgttcagtggttgttttttactctgtcatcttgaaggtgtacagtttttgcttcaagcatagccaatttgcaagggactttgtcatatacaatgactccagtttcaaccacattgaggttgttgtcttttctcttgcaacttctcttaaagctttatctccaaagcatagaatgattgcactgctggctctatcaatcatctctgatttctcctttgagcttagagattcagacatcctttcttctcctttaagagcttctgcacagccatgttgaatcaagattgcttccatcttgactctccataacccgaagtcattgtcccctgaaaacttctcaatatcgtattatgatgatcccatctttcttggtcttgatcttgtccccatagacggcgccacttgttgatt

SEQ ID NO: 224 - DNA, 407 bp, Glycine max
cgcatgataaatactgggacagtctcaaaccctgatgtatcagtttcagatccgtggagccaatgcgcagtgggacaagtagagtcgctaaaatcattggtcagactcctacctatgtgtgcctcgggcgtcttgatgatggcgtcccaaggctcattctctaccctgcaagcaactaccttggaccgaaagctatttggcaatttcaagatgcctgcagggtccttcaatcttatcatgatattgaccttatcaatagacattcccttgtatgaccgcataatggtacctctactagccaaatacaggggcttgccgaatggattctgtagtaaaactccaattgggattggattgctgtttgtatgcgcagctaaaggaacatcagctgtagttgaaactattag

SEQ ID NO: 225 - DNA, 410 bp, Glycine max
ctatattttcagtagatgaatatgaatccgcggccacctcatgtactcctctaaggacaatagcatcatttgttgcactgaattgttaggagttggaagccatcttctcaatcaaactcctagcctcagcacgggtcatatcaccaagagctcccccactagcagcattaatcatactcctctccatgttgctaagtccctcatagaaatattgaggaaggagttgctcagaaatctggcggtgagggcagcttgcacacaatttcttgaatctttaccagtactcatacgagctctctccactaagatgcctaatgcctgaaatgtcttttctgatggcagtggtcctacatgcaaggaataatttctgcaagaacactcttaacgtcgtccaagctgaaaatggacct

SEQ ID NO: 226 - DNA, 442 bp, Glycine max
agcatttacaatgattaagatatactctttcaagttttttggccataaattagtctgggatctcaatcaagtctcgagactcttgaaggtcaatggtctttaaactcacgaggttctgtaaaaaaaataaaaatacatcacattgaccataaatcattaaaataaaattcttagtatacattgaagctcatcatcctaggtgtggctcttgtgattgtgaatgagtttcattcgagtaagcaaaagactagttaccactttgtcttacgattctctaccctacctttgcaaatagaaagaaaaatgtagtatgtatattcacaatcatacctgaaccccatcccagagctttttgagcttgctacgaggcatggaaatctctacaagtcgttcagcgcagaagttatacggcaaagactcaagacaacattcatgccaatga

SEQ ID NO: 227 - DNA, 384 bp, Glycine max
tggatctgactgccctgctttatgtgatatacataattgggtataaagacgactagggcgcagtaactgacgtttgtttttatatccaaattgtataacctgtgataaatcatttaaagccattggtcctttattattcattatatgatcaattcttttaccacttctagattgtgagtatcaatgattattcatgatcacaaagcatatgccaaactcagatgatagtatatcaaattactatacttctgatcatgagggcgagccctggtgcatcggtaaagatgtgcctcggtgacttgttggtcatgggttcaaatccagaaacagcctctttgcatatgcatgggtaatgctgcgtacaacatccctaccccatacctt

SEQ ID NO: 228 - DNA, 436 bp, Glycine max
  unsure (1)..(436): unsure at all n locations
taagctccttcaactgcacaatgctcttaatatttgaagagtgtccttgtggaaccttcacccgacgaagacactgacaaaaacttatcttctccttcttggacaaagtatggcgggctgggggtaagtaaattatcttcccatcagaccttggatgcaaatgtgattgtatacccatatcagctaaatcttgacaggtattcaagccatccttcatcttgccttgaatgttcatgagcgttccaaccacactgatacaaacatttttctccacatgcataacatcaatacaatgtctaacgtcaagattacacctgttcggaagatcaaagataatggaccttttcttgcatatgcaactctgacttttatccttcttttgagtacttccaaatgcagtatntaagtgatgaacccgctgatatacctgctcacc

SEQ ID NO: 229 - DNA, 432 bp, Glycine max
agcttatgagcatgagggttagccttttcttgactataaaaataacgttgtttagttcccttgcttactcccataataccaggagccttgtgcatatcgctttttatacataagctaatgagtttctgttgtaacaaaagtgtttgcactacactatttgtcactacattcgcggtacgggctaaggctgattcatttatgcaggttgtcattggtcaagctgctgtgcacaggtgtaatgcaactgtcaacttccttgatgaaacaagaccttcatatcctgcaactgtaaataatggtgacttgcacaagctatctgttgatgtagctggcaatttgcttggcaccaataatgttaatattgacaagacacctatcatggccgctgaagactatgcattctatcaagaggtcatacctggctacttcatc

SEQ ID NO: 230 - DNA, 428 bp, Glycine max
  unsure (1)..(428): unsure at all n locations
ntccactcctttggaagatcattatttgcttgagtttcatagtcttgagaatcctcattgctttcatctcttttccttttagaatccctttcatgattatgtatctcttctaagaaatctgaaacatcatctaacacattctttcttggagaaataacattagactcatcaaaggaaacatgaatggattcttcaatattcatagttctcttattgtatattctatatgctttactatgcaaggaataaccaaggaagattccttcatttgccttggcatcaaactttcctaagttttcttttccattatttaatacaaaacatttgcaaccaaagacatgtaaatgtgaaatgtttggttttctaccattgaataattcgtaagggagtttctttaagatgggtcttattaaagccttatttaagat

SEQ ID NO: 231 - DNA, 422 bp, Glycine max
agcttcaacattcaatgtcaagcgtctcgatatattacgggactcaatcatacatccgagtaaatagttattgtcgtttgaattggctcagagcttcaacattcaatttcgagggtctcgatatattacgggactcaatccgacatccgagaaaaaaattattgtcgtttgaattggctcagaggttcaacattcaattatgagcgtctcgatatgttacgggactcaatcagacatccgagtaaaaagctattgtcattcgaattggctcagagattcaacattcaatttcgagggtctcgatatattacgggactcaatcagacatccgagtaaatagttattgtcgtttgaactggctcagaggttcaacattcaatttcgagcgtctcgttatattacgggactcaatcagacatccg

SEQ ID NO: 232 - DNA, 429 bp, Glycine max
  unsure (1)..(429): unsure at all n locations
tcaagaatcngatntcacagaatcaagattcaagaatgatcttttttcaagattcaatcaagcttcatgaatcaagattcaagagcaatcaagatcaagattcaggaatcaagaaaagactcaatcaagataagtactaaaagtttttcgtaacattgagtggcacaagaatttttcacaaaatctttaacgagagagttctactttctggtaatcgattaccgagagccaacattggttttcaaaactgatttacaaagcttgtaatcgattaccatgagcatgtaatcgattaccaatattgtaaaatgttagatttcaaatctcaagagtcacaactagtgataaaacattgtcaaatcattgtaaacttgtctaatcgattacacaatacttgtaatcgattaccagagtttctaaacggtttga

SEQ ID NO: 233 - DNA, 469 bp, Glycine max
  unsure (1)..(469): unsure at all n locations
ctaagctctgctgcaatattacaatagacctcctcaacctcagcagctaaatcaaccacggtagagcaattatgacctctccagcaacagatacaaccctggatggaggaatcaccctaacctcagatggtccagccctcagcaacaacagcagcagcctgctccttccttccaaaatgctactggcccaagcagaccatacattccttcaccaatctcacaacagcaacaacctcagaaacaaccaacagttgaggcccctccataaccttccctcgaagaacttgtgaggcaaatgactatgcagaacatgcagtttcagcaagagaccagagcctccattcagagcttaaccaatcagatgggacaatnggctacccaattgaatcaacaacagtcccagaattctgaatagctggccttctcaagctgtccaaaatcccaaatatgtcagtgccatatcattgag

SEQ ID NO: 234 - DNA, 414 bp, Glycine max
  unsure (1)..(414): unsure at all n locations
ttctacaatctcgagccttcanataaccctcctcaccttcttccgcatcattatcatcagtatgaggacgaatattacattcttctctatgccaaatttcagattgatctatccggttttcctcattgggctccacctcaatgctatccttttctgagctagcatggaccaccttatcttctgcacgtgcctttgtcttataaaccatttcagactcattaaaaataacatcatgacttataatgcatcttttgtgtcctggctctaaacaccacaatctgtaccccttaaaaccctgaggatatcctataaacatacacttgatagctctaggttccaatgtgtcttgccttatgtgagcataagcaacacatccaaacaccctacgtctatcattatttggaggatgccctg

SEQ ID NO: 235 - DNA, 425 bp, Glycine max
atactgcattgttgactaattgttgttgttgttatttacatctattttcagactcccaatttgcagattgagttttggggctgctttcttgctgaacaatgtttgttggactatgattgtataatatccttgtcttctatcgcggctgcgtctgttatatttcttttcaaacttattctggctctgaatgcatacttaaggaaatattatgttatggataatgatatacacatctctttaatggaacgatattacccgtgtttcaacgcatgtgttctcatgtgatgaattgatgattaactgttcgccaatataataaaattattgctctttactctaatatatataggtaacgacttaatgttgaagattagagaaggtgtatcccttctactccatcaccattaactatcagctaccttctt

SEQ ID NO: 236 - DNA, 438 bp, Glycine max
  unsure (1)..(438): unsure at all n locations
agctcgtagcctattcgaacaacaataactnttcactcggaagtctgattgagtcctgtaatatatcttgacgctcgaatagtaagaccgaagctcgtagcagattcgaacgacaataacatgtcactcggaagtcctattgagtcccgtaatatatcgagacgctcgaattttaaaaccgaagctcgtagcaaattcgaacgacaataacatttcactcggaagtcctattgagtcccgtaatatatcgagacgctcgaattttaaaaccgaagctctgagcatattcgaacgacaataacatttcactcggaagtccgattgagtcccgtaatatatcgagacgctcgaaatttaaaaccgaagctcgtagctaattcgaacgacaataacatttcactcggaagtgtgagtgagtcccgtaatatatcgagacgc

SEQ ID NO: 237 - DNA, 392 bp, Glycine max
  unsure (1)..(392): unsure at all n locations
gcattacattattactcatgcttctaaccatgtctaatattgttngatttctgcgttctgccacaccattttgatctggagaaccaagcatcttgtattgtgcaacactcccatgttcttgaagaaacttcgcaaatgaacctggtgcttgtccatcctctgtgtatctaccataggactccccacctttatgtgatctcacgatcttaatatgttttccacattgtgtcacatctgcatccttaaaaactttaaaggcatctaaagcttcattcttagaatgaagtaagtaaagacacatatatcgtgaataatcgtttataaaggatatgaatactctctgactagtggcattcatgtctgggcaaagtatgtctgtatgtatgatttct

SEQ ID NO: 238 - DNA, 424 bp, Glycine max
agctttaaaagtacccatttaccaacctcatagtctacttcacgccatttagtatcatcagtgcgtttcatcgtagcttgcgcttctaatagcttctgacgaatgcaaagaaaaacttcctcacagtgcttcagagtatcatccaccgcatctagtttggaggagctagtgatatagtctggaaaagagaaaggtttccgcccaaacgttatctcatacggcgtagagcccgtgcctgcgttccatgaagtattatgcgataattcgacccagggaaggaatctgccccaagtccccgaccggcggtgcaccatagcccgcaaatattgctctattactctgttcatgacttcactctgaccatcactctgtggatggtaggctgaactcattctaagccttgtaccactcaattaaaaaagct

SEQ ID NO: 239 - DNA, 376 bp, Glycine max
  unsure (1)..(376): unsure at all n locations
taagtcacctgcggcatgcaagcttctaaactttatacaagaatgaagctctgataccacttcttggacaagttgcctcagatatcttaagaagggggggttgaattaagatatcacagactattccccaattaaaaattctacttttaatttaatccaacaacccaagattccttttaaacaagaactcctagataataatgcaaattaatcttactaaatagaaataataagcaataaacaataaaggagtctaagggaagagaaaatgcaaactcagatntatactggttcggccacacccttgtgcctacgtccagtccccaagcaacccgctagagaggttcactatcttgcaaaatccctttacaagttc

SEQ ID NO: 240 - DNA, 441 bp, Glycine max
  unsure (1)..(441): unsure at all n locations
ccaacgctctgatcaagctctcccataatctanangtaaatctacgatctctatcagatactatgctagattgcacaccatgtaacctgacaacctcacttatatacgaggaggtcaacttttccatggaaaatctgatattaatgggaatgaattgagcaaacttattcaatctatcaacaataacccatatagaatctaaacctctaagggttctatgtagtcctaccacaaaattcatggaaatgctgtcccacttccactatggtatctctaaaggttgcaacttacctgaaggtctctgatgttatatcttatccttctgacagactangcatgcatacacaaactcactaacctctctctttatgtatagccaccaaaacatcgtctttaaatcatgatacatctgtggagcaccatcatcaatgctcaaattac

SEQ ID NO: 241 - DNA, 471 bp, Glycine max
  unsure (1)..(471): unsure at all n locations
tgtaacaatattntattgaaagtgagagtattaatagaagataaaaagttatcgattataaatttatagataaaattgaaaaacaactatgtagcttctaatttataagttatatgacatattttaagttagtagcattagcatgtggttgtaggtttttaaaatatgttaaaattccattttagtctcacaaatttaaaatatcttgttctggtctattgtttctagaaataatatagctaacaaaaaaaatacttttaaataatcatattttagtttttaattaattatgaactcttataattttttaaaaaataaattttattaaaatataaataaattatgtaaataatggaataattaaaatgaacagtataatattaaaattatttctaaataaaaatagtattatattataggagacaatatattagagttcttaataagtactttagtcatataatctatcca

SEQ ID NO: 242 - DNA, 451 bp, Glycine max
  unsure (1)..(451): unsure at all n locations
agcttcacacaatnntattttttttatcaaacttgagttntggaaaaccaattactaagactttcctaactagatgatttaaatgatgcatgttaatatgtgcagccctatgatgccacaatcatgaatcatctatcttactcaccaagcaacttagctcatgaaaagatacatgttcaacattcaacatatagatattacctattctcttactgatctggacaactttaccggatatggcttcacttataagacatcaatttctattgaactctattttgaaccctttatcacaaagttgactaatgcttagaagttatgctttagtccatccacatataacacattcttaatctgagttntatgttgattccctatatcatgagaaatcatatttttccttttgtggtnngtctcaacatgaccatagtttggacttgtcacacgtcat

SEQ ID NO: 243 - DNA, 379 bp, Glycine max
agtcaactgacgctgccgcttcattgttcaatttgagcgtctagatatatcatgcgcctgaatctgacattccagcgagaaggatgaccatttctattactcgagagctcttgtggttcaatttccaccgtctccttgagggaggtgcttgacctccacgtccgagtgaaaaaggatgaccattcttatttttcgagagcttccgttgttttatttccagcggctctatatccgatgcgcctgaattggacatccgagtgaaaatttataatcattaagatttctcgagagcttccgcactttcaattcgagcgtctcgatatattatgcacctgaatcggacactcgagtgataaattatgaccattttaatttctct

SEQ ID NO: 244 - DNA, 313 bp, Glycine max
tattcaacaatgacaaatcacataacataattttaagattctgagcctcactagtagcagtatctaaagcaataatttctgcttccatggtagaatgtgaaataatagtttgttcagcagatttccatgatattacaccaccagctaaagtaaagacataatcacttgtcgattatgtttcatcagaatcaaaaatccaatttgcatcactaaacccctcaattacttcctaatctaccaactacatatgctatgacatgcctatagagagttgtcaattgcatcaaagaaccactaatttgataatattgtg

SEQ ID NO: 245 - DNA, 471 bp, Glycine max
ggaaattaaacaatggaagcactcgagatattcaaatggtcataacttatcacacggaggtctgattcatgcgcataatatatcgagacgctcgaaattgaacaacgaatgctctcgagaaattcaattggtcataacttgtcacacggaagtccaattctggcgcatcacatatcgagacgctgtaaattgaacaccggaagctctcgagaaattcatatggtcataacttatcacacagaggtttgatttaggcgcataatatatcgagacgctcgaaattgaacaacgaatgctctcgagaaattcaaatggtcataacttatcacacggaggtctgattcaggcgcataatatatcgagacgctcgaaattgaacaacgaatgctctcgagaaattcaaatggtcataacttgtcacacggatgtccaattctagcgcatcacatatcgagacgctgtaattgaaca

SEQ ID NO: 246 - DNA, 410 bp, Glycine max
  unsure (1)..(410): unsure at all n locations
agctntagcttccaactcaacaggtaggtgacaagaattgccatagaccaattggaaaggagtaagtcttgtaggagctatgtatgttgttctgcatgcccacaaagcttcatctagcttttgggaccaatccttccttgattgagcaactgttttttctaatattttcttaactttcctattagaaacttcagcttgcccatgtggtaaggcgaagctaccttgggtttgacactgtagtgttggaggactttggtgagttatacattacaaaaatgagatcctccgtcacttattagtaccctgggtgtgccaaaccttgagaagatattatttcttaggaagcaaataacaatttttgcatttgcatgntgtaccactactgattcaacccattttcttacatagtc

SEQ ID NO: 247 - DNA, 359 bp, Glycine max
tcggacatccgtgtgaaaagttacgaccgtaaggatatgtccagagctatcatagttgaatttcgagcgtctagacatagtatgcgcccgaatcggacatccgtgtgaaaagttatgacgatatgaatatctcaagagctttcgatggtgagtttcgagtgtatcgatatattataatacctgaatcggacctccgtgtgaaaagttatgactatatgcatttatcgagagtttccgatgtatagtttcgagcgtatcgatatattataagcctgaatcggacatccgtgtgaaaagttatgaccattagaatttctcaggagctttcgttgtgcagtttcgagcgtctcgatatatga

SEQ ID NO: 248 - DNA, 424 bp, Glycine max
  unsure (1)..(424): unsure at all n locations
tagatagatcaacgtanggttctttttccttcaaccttcattctacatnttttccttaaacaaagacatgcatgattttactattgtatttcttctccatctcttccattgaaaagtgcattttttgtactattttatttttctttcttccattgtatatatatatatatatatacctattgatttcttattgcagtcatgatttgagtttttagagcaaactctttgagtcgatggtgctactatcttcgaaaatccttctatgaatcttcgatagtatccaaccaatccaacaaaatgtgtaatctctatagctatcttatgggcgtttcactgcaaaattgtgtctaccttggaaggatccactacattgctacccaccaagatcacatgacctaagatccgtacctcatcaagtcaaaac

SEQ ID NO: 249 - DNA, 376 bp, Glycine max
gcaactaggatgttcggaagtatcaaagtaatctgggaatggaacattggaaagctataaagaaagttatgagatacttacaaggaacaaaagatcacatgcttacatataggaggtctaatcatcttaaggtgattgggtattcagactcatactttgttggatgtgtggttatgagaaaattcactcttggctatgtatttcttttagtcggaggagtaatatcatggaagagtgcaaagcaaccagttgttgttgttgcatctaccatggaagtagaatttgcagcatgttttgaggctacaagttaagctaattgactgcgaaactttatctcagggctctgaattgacttacgactgctaggcattgaaat

SEQ ID NO: 250 - DNA, 298 bp, Glycine max
atcctctttcgaaacttctagatgatatttaccctttactgatgctaaaaatagcggcgaggaacgtcgagaagcagatcccgtcggagccgtactgggcattcttgattctgtacacatcagtgacactagaataatatcgtctctgccgatctgtctgttcgctgctgtatatgtttgctagtcaagggatattttcattagaatcaaaatgtgctctcagcgttataacaggagagacgacaaatggatttggacaggacaacagaggcttgtgtgagagaaacgttagaacctt

SEQ ID NO: 251 - DNA, 132 bp, Glycine max
  unsure (1)..(132): unsure at all n locations
tcacanaagtttgtatggcttgaaacaagcaccgaggcagtggtacaagaagtttaatgagtttatgagcaactcaggattcaaaagatgtgacatgcaccattgctgctatgttaaaaaatatactaccac

SEQ ID NO: 252 - DNA, 470 bp, Glycine max
tgacactataaaactaagcttccataggttattccaagatcatgatgaagaccaagtcaacttgtgtctcatgacaaaatctcatgagaacaacaaagaagaatctgtaaggaagaagtggtacatcgacagtggatgttccaagcatatgacaggagatgtatccaaatttacaaccatttctcctaagaaaagtggacacgttacatatggcgacaacaacaaaggcaaaattattggagtcggtaaaataggtacgagttcttctactcctattgaaaatgttatacttgtacaaggtttgaagcatagcctattaagtgttagtcaattatgtgataaaggatataaagtatcttttgattctgaaaaatgtgttattaagaatgagcatgataaagatatcgaacatatatggttcagagaatataatgtctacatgattgatttataacaacaacctgatatga

SEQ ID NO: 253 - DNA, 433 bp, Glycine max
ctcatctatctccactatgttgcctaatgcctgaaatgttatttctgatggcagtgttcctaaatgtagggaagaatttctctaagaacacccgcttaaggtcatcccagctgaaaatatacctgcgagcaagggaatatagccaatcttttgcactccctccagagaatgaggaaaagcctttataaagatatgatcttcttggacgttatggggcttcatggtggaacatacaatatggaactccttaagatgtttatgaggatcttcacctgcaagaccgtgaaacttacgcagcaattgtattattccagtcttgagaacatatggaacaccctcattaggatattgaatgcacaagctttcataagtgaaatcaggtgcatccatctccctaagagttctttacgaggtggaggttgaccatgttctt

SEQ ID NO: 254 - DNA, 415 bp, Glycine max
agcgtctcaatatattattggcctgaatcagacatccgaatcaaaagttatggctgtttaactatgccatgtgcttccatgttcaattttgagcatctcgatatattatgcacctgaatcgggcatctgagtgaaaagttatgccatatgagttagccgagagcttcgttgttcgatttcgagcgtcatcgacatattattggcctgaatcggacatccgagtcaaaagtgatggcagtttaaactttacatgtgcttccatgtttaattttgagcatctcgatatattatgcacctgaatcggacatctgagagaaaagttatgccatatgagatagctgagagcattcgttgttcattttcgagcgactcgatatattatcggcctgaattggacatccgagtcaaaagttat

SEQ ID NO: 255 - DNA, 450 bp, Glycine max
  unsure (1)..(450): unsure at all n locations
gcttataatgtcttacgggaaataacccactaacacacacaagggccataagatcaagttaacatgcttaaaaaaacttcctttaatctttattatatatattaacataaattctttttttaatttcaagaaaacattttcacaatatataatacattttttaaaaaataaatatagaggtgttacactggtggttgggagcataggttgaggtggtagtttatgactanggtaataattctcctacaaatgagctatactattggaatatatatttctacaagacggttggaatatgttagagagattaaatgttacgttattgctataaggattggtttgatatcataaaaaattggtgtagtgaactttcatcgcatagtttaaagacatcacaactaaaactaacacgagtgttgtattaatgtcttaacatacgtcttaatcaat

SEQ ID NO: 256 - DNA, 400 bp, Glycine max
gaagaaattcatatggtcataactattcactcggatgtccgattcaggtgtatcacatatcaagacgctcgaaatttaacaacggaagctctcgataaattcaaattgtcataccttttcacacggaggtcctatttatgcgcttaatatatcgagaagctcgaaattgaacaacggaagctctcgggaaatcaacatggtcataacttatgactcagatgtccgattatgcgaatcatatatcgagaagctcgaaattgatcaatggaagctctcgagaattccaatggtcataacgtttaacatggaggtctgaccatgcgcataatataatgacacgcttgaaattgaacaacggaagctcttgagataaccaaatgagcattacttttcacacgga

SEQ ID NO: 257 - DNA, 463 bp, Glycine max
ctgtcttgacttatttatacccatacccctcaatattatactataatatctatatgtacactatgatattgttgagtctaattaataatcaaaatgttattgtgtattgcttgatttgtcacatgttattgatgtgaaatatttatcaactttagtgataagttaatgactaattgctattgacagagttggctaaccacatctatcagggtctattccgaactattatttttcatacacaagtagtggcaaagtcaaatatttttttaatggggtgaaaaaatagttataatattttcatagatgaaaaataatatgagttttattaaaatggtactaaaggaattagaaatggtaaaaattaaaaagggtaagtggataaaaatagtaccaatttatctattttcacttttaacttttataactttttatattcatcttttttttaagaaaattatcttat

SEQ ID NO: 258 - DNA, 351 bp, Glycine max
  unsure (1)..(351): unsure at all n locations
gcttnctagacgcctactntagatacaactagatcagaatgcatcctccacacgaggagaaaatggcattcatcattgaagatgccaacttttgctatagggtcatgccattcagcctaaaaaatgcaggcacaacataacaacaactaatggaccgagtcttcaaacaacagataggacaaaatgccgaggtatatatggacgacatgattgtcaagtctcaaactataccccaacatgtggtggacctggaagaagttttcggggaactacgaaaatacgacatgcgcctcaaccttgaaaaatgcactcttggggtaggcaaccacaagtccctcactacagcactgg

SEQ ID NO: 259 - DNA, 343 bp, Glycine max
  unsure (1)..(343): unsure at all n locations
aagtttgaatatgatgtataagaaaatgaatgtgaacctttctcccctttgaaagacttgtaaaaaaaatgttttaaaaatacttttaattaatatctgaattttttttccttattagtatatatgtgaggggtagagggtgtcacatcctgcagcaaataatgtgcaatatcataacccctaaactgtatatatcaactttggcaattattggtgcactttntagccattcaggtgccatgtaacctattgttccttttaaattagtggttgttctagtttggtctttgagtaatagcttggaaagccaaaaatctgcaatctttgttgtgtgattggcatc

SEQ ID NO: 260 - DNA, 473 bp, Glycine max
  unsure (1)..(473): unsure at all n locations
tattaactctatacaagagtgaagctctgataccacttgttagacaattggcctcaggtatcttaaaaaggggggtagaattaagatacacaagctgtcccccaattaaaatttaactgtctcttttattaacaatgcaatcctctattatgaattactctaagaacaattcaaaaacaaacttctttaaagcaaaatataaacaataataaataatagaaatttaagggaagagagactacgaactcagtttttatactggttcgaccacagcctgtgcctacgtccagtctgcatgcaacccgcttaagagttccactatcttgtaaaataccttttacaaagtctgaagcacacatgaacaacccttcccttgcgttcaaaaaccttacaacttaagagaacatcggtactttaatcaatctctttgagtgagaataagaagaagacttctctatntaggagaaagatat

SEQ ID NO: 261 - DNA, 413 bp, Glycine max
tatgctgcaaacatttacaatagacctcctcaacctcagcagcaaaatcaatcacagcagaacaattatgacctctccagcaacagatacaatcccggatggaggaatcaccctaatctcagatggtctagccctcaacaacaacaacaacagcctgctccttccttccaaaatgctgctggcccaagcagaccatacattcgttcaccaatccaacaacagcaacagccccagaaacaacaaacagttaaggctcctccgtaaccttccctcgaagaacttttgaggcaaatgactatgcaaaacatgcagtttcaaaaagagaccagagcctccattcagagcttaactaattagatgggacaattggctacacagttaaatcaacaacagtcccagaattctgacaagct

SEQ ID NO: 262 - DNA, 465 bp, Glycine max
  unsure (1)..(465): unsure at all n locations
ttcacctgtctntacataatcagagccatcaacagacttcataaacatggtaccagcttgagagttaatagaaaaattaatgatgcatctttgtttccgatcagtccatgcatcggacataatagtacaaccatacttgacccattgctccctatggcctttcatcaaatttttagtatattcaacttccttcttcaagagtggaactctgatgtcatgatagctaggaatgggcaaatgtggcccatattgaccaatggctgcaaccattttctcaaagcttttcaatataatgaggttgaatgacaaacttgcttggtaccaaaagcgagcaatatgttaatgcacctttcaatacttcattcttatccattgactctcttatgttcatttgcctcagcatctccatttttctccgattgattgcattttctggattcttacaaaattatgccattggtcctt

SEQ ID NO: 263 - DNA, 450 bp, Glycine max
  unsure (1)..(450): unsure at all n locations
agcttcttacatagtccgctnttgcttgttctttatgcttaanaatagaaacattaggcatagacaaaagatcaagatgagttagtaggttaaaaccataaacaacttcaaaaggagaacaattagtagtgctatgaacaactctattgtaagcaaactcaacatgtggtaaacaagcttcccaagtctttaagttcttcctcaaaactgtcctaagcaaagttcccaatgtcctattaacaacttctgtttgcctatcagtttgtgggtgacaagtgggtgaaaataacaatttagtgcccaacttgccccacaaagtcctgcaaaaatggcttaggaacttagagtccctatcactaacaatgctccttggcanaccatggagtctcacacntctcttgaaaacaaatcagccacatgggaagcatcatcaactcttttacatggaat

SEQ ID NO: 264 - DNA, 389 bp, Glycine max
gcttgagaatggagaattgcactaagcaatcactacgcatagctccaaactcgaaggtggaggacacatgaacgaaaacacaattcatggggctccgaaaaaggggttgagaatggagaattacactaagcaatcactacgcatagctccaaactcgaaggtggaggacacatgaacgataacgcaattcatggggctccgaaaagattgagaatggagaattgcactacgcaatcactacgcatagctccaaacgcgaaggtggaggacacatgaatgaacacgcaattcatggcgctccgaaaagattgagaatggagaattgcactaagcaatcactacgcatagctccaaactcgaaggtggaggacacatgaatgaaaacgcaa

SEQ ID NO: 265 - DNA, 435 bp, Glycine max
gctggcttgctggctcctgcttcaattggtgtggctcttgcttcaattgggtgcttactgactggttgcttccttcgctcaagtgtgtgcctttacccccttactcctagtaagtgtttttaaagtaaataaaatttatatatttttgttaataaatattataagtttaagttagctagtattaacacatattgtaagttagtttatatagtattgtgtagttattctaagctagtattaacaaaaatactaagtttaagttagttagtagtagtattgtgtagttattttttacgtattaatattaatagatataccaatggtaggttagttactatgaaaatattatttggttagttagaatgaaaattttatttagttattgcatgatctaactatatgtgtgatatatctatatatatctatatatatata

SEQ ID NO: 266 - DNA, 330 bp, Glycine max
ggctaacccatggaagctcctaatatctcccacactctttgtggtgggccattcttggatggccttgagtttctcacggtccacttggaccccatttctaccaactacaaaacctaagaaaactatattatctacacaaaaggtacacttctctatatttgcatagagggtgtttttcctaaggactgatagaacttgtctgagatgtcctaagtgaaaatctaggtctctactatacactaaaatatcatcttaatatacaactacaaatctacctatgagaatccttatgacatgatgcataagcctcatacaggtgcttggggcatt

SEQ ID NO: 267 - DNA, 444 bp, Glycine max
  unsure (1)..(444): unsure at all n locations
atgcaatgattatttaattcaatgtcatatttcttcataatataaaagctatataaacattgcttccttcatcaatttttcataaggtcacaaaatcacccaccactttgtctctaaatcttattagaaacttatattgtttcattcatcagcttttcataaaatcaaaaaattcctaccactctttctctcaatcttattgcaaaaagtaaattcactactataaaaattggtttttctagacatttaacatcggttatgaaccaatgttagaatgagtgccaataaaagatgaccattgttaacattggttataaaaatcaatgttgaaatctactatataagtatggttctcaccanaaccaatgtgatatactagcaaatagacaaaattatttaagaattaattctttntacttataatttatatcattctacatactt

SEQ ID NO: 268 - DNA, 422 bp, Glycine max
  unsure (1)..(422): unsure at all n locations
atctacttcaatacactgattggaaatgatgtggcctaaaactataccttgctcaaccataaaatgacattattcaaaattatgaacaacgttagtttcaatgcatctattcacaactttttccatactattcaaacaaccatcagaagaggatccatatacagtgaaatcatgcatatacacctctatgcaattttctaaaaaatcacttgaaatactaatcatgcaccactggaaggtaccaggggcattgcacaggccgaaaggcattctcctataggcaaaagtgtcgaacgggtangtgaatgtggacttttcctgatcctcacgagcaatagtaatttgcatataaccagaataaccatcaatgaaacagtagtgggatatagctgccaggcgttcaagcatctggacaatgaatg

SEQ ID NO: 269 - DNA, 400 bp, Glycine max
atgcattggttaacatggtaacccatctgtccttgaaccacaaatctgtacccgtcgcaagggtctgtgatctgtgctcctctgctgaccaccatacagacctttgcccttccatgcagcaacctggagcaattgagcatcccgaagcttatgctgcagacatttacagtagacctcctcagccttagcagctaaatcaaccacaatagaacaattatgacctctctatcaacagatacaaccctgaatggaggaatcaccctaatctcagatagtctagccctcaacaacaacaacagcagcttgctccttactttcaaaatgctgctggcccaagcagaccatacatttctccaccaatccaacaacagcaatagccccagatacagtcaacagttga

SEQ ID NO: 270 - DNA, 365 bp, Glycine max
  unsure (1)..(365): unsure at all n locations
tacttttgtcttgaaggcagttctataagcccataatgcatcatccaactngcttgaccaatcctttttagtggaggctacagttttctccaaaatcttctttggctccctgttagaaactctagcttgaccattcgtttgcgggtgatacgatgagactactctgtgcgtgacattgtaatggctcaccatcttctgaagttggttgttgcaaaaatgagagccccgatcactgattaggaccctcgacaccccaaagcaagcaaaaatattcttcttcaagaacctcactatacgttcagcatcgctctttgggcagccactgcttcaacccactggagacataatcacagcccaaggatatt

SEQ ID NO: 271 - DNA, 435 bp, Glycine max
  unsure (1)..(435): unsure at all n locations
gctggtgagggtganaatctcagctgggagctgcccagagaagaaattgtggctcatgttgagactagtgaggtttgtgaagatgatgaattgcttccctgaaaccacacctcccaatttcttcatggaaaggtctatggaagttacaattgttgagtcattgttacacttgatgccggaccaagaacatgcataggatttcccagttaattttcctccagagggcaccacccaattgtgcaagctgttgtcatcatctacaagctccgattttaggctgagaagtgcctctgagtaagggtcaattgctagaactgctgatgataccatgaagaaggtaacaagaataagatttttgatgtagaaagcattgaaaatctccattggaacttggagagcatcacaaggtagagagggacaatngtaagtacccta

SEQ ID NO: 272 - DNA, 431 bp, Glycine max
gagacaacttactcgagaagctagagcttagctacacacacccctctaataactaagctcacctccttgagaagcttccttgagaagattcctaaagaagctagagcttagctacacatacctctctaatagctaagcttacctccttgagatgagaagctagagcttagctacacaccccctataatagctaagctcaccccatgacagaaaacatgagaatacataaaaaaaagtccttactacaaagactacttaatagaatggccaaaatacaaggcccagacgaaagaataacctattctaatatttacaaagataatcgggctcatacttagcccatgggcttgaaatctaccctaaggctcatgagaaccctcgggccttcccttggatctctagcccaatctacttggagtcttctacccaat

SEQ ID NO: 273 - DNA, 447 bp, Glycine max
agctatggagaaccaagccaatcagaatgctatacgaaatatagatgggaatagaggtaacaatggtggtaatgacggaccgaggcagaaccgggttgagggagtaaagctcaatgttcctcccttcaaaggtagaagtgatccagatgcctacctggactgggaaatgaagactgagcacgtatttgcctgcaatgactacactgatgcgcagaaagtcaagctagcaacagctgaattctccgactatgcccttgtttggtggcataaataccaaagagaaatgttgagagaggaaaggcgagaggtagatacatggactgagatgaaaagggtgatgagacaaaggtatgtgcccactagctataacagaaccatgcgacagaaactccaagggctgtcccaaggggaattaaccgtggaagatattataaagagatggaaatg

SEQ ID NO: 274 - DNA, 476 bp, Glycine max
  unsure (1)..(476): unsure at all n locations
nggaacatataaaattcaatacaaggccctctcaaggatttattcaaaacatatgcaagttgattgtttgaactaacaaactcggtagaaatctaattggacagtagctttccctcataaaatgacaatcaatttttatgtgcttagttttatcatgaaacacttgattagaagcaatatgaaagtttgtctggttatcacaatacaatttcattggctaaatttcatagaattgtagttcttgaaggagatgtttgatccacaccgactcacatgtggttgtggccatggtcctatattcggcttttgcactacattgagcaacattaaactgtttcttactcttcctagagataagatttccaccaatggagacactatcttgtgttaaagagtctatctataggagaacctgtgcaatcaaaatcacaatacccaaagaattgcgcatctcatttatcttcatgatataacta

SEQ ID NO: 275 - DNA, 398 bp, Glycine max
agctctcttaagacgaatcctatttatgctagagcttagctacacatacctctttaatagctaagctcacctcctttagatgagaagctagagcttagctacacaccccctataatatctaagctgacccccatgacagataacatgataataaaacacaagtccttattacaaagacaactcaggatgccccgaaatacagggctgataccctatactactagaatggccaaaataccatgccttgacgaacgaaaaacctattctaatatttacaaagataagcgggctcatacttagcccatgggctcgaaagctaccctaaggctcatgagaaccctagggcctttccatggatctctaccccaatctacttggagtcttttaaccaatgccct

SEQ ID NO: 276 - DNA, 448 bp, Glycine max
  unsure (1)..(448): unsure at all n locations
agctngacgatgttganaagaaaatatgttgtcataattgaagaatgaacatgtagcttctaatgactctgaaatgtcctacattaatatataattgttatgctacaaattcacataattcttagtatgttacgttaaatttaattggcaaacgtgtataacttatggatatactattatgtcattaatacgaatacctagtacatttaacggttacctaatttaaaataatttgttaacattaaccctaatatttagaggaataaacagagaataaaaattataatccaaaataacttatcatttacaaaatgtgtgggaaaaccaatatgtttgcaaatacatgaaaattatatacatactcgacatatgaaaatataacatggatgatgtctatggctgatccgtgcgctgccttcttcgcgacttgacataaacattgccatct

SEQ ID NO: 277 - DNA, 441 bp, Glycine max
  unsure (1)..(441): unsure at all n locations
ttacggacctatgaaactcagctatgctgcnacattacaatagacctcctcaacctcagcagcaaaatcaaccacagcagaacaattatgacctctccagcaacagatacaaccctggatggaggaatcaccctaatcttagatggtctagccctcaacaacaacaacagcagcctgctccttccttccaaaatgctgctggcccaagcagaccatacattcctccaccaatccaacaacaacaacagccccagaaacagccaacagttgaggctcctccacaaccttccctctaagaactcgtgaggcaaatgacgatgcagaacatgcagtttcaacaagagaccagagcctccattcatagcttaaccaatcagatgggacaattagctacacaattgaatcaacaacagtcccagaattctgacatgctaccttctc

SEQ ID NO: 278 - DNA, 374 bp, Glycine max
agcttgtgctcgaggccttgacctcataattgtctcatcactgtgtttgatccattctgagagtttccagggcttctgccacttccatttaaactgtagcagccattgatgatgacttctcttccacttccaaagttttccggcttgtcctatagctgctagcctcttcgttgacaactctccaatgggtatcatctggatataaacccattaaaacttattgagaaataaacactatcatcatcatcatcagggaaatagaatctagcaaacatacctttcgtgcttcatctaaaaatgtagctgactccctgcctgaccaattaacaactccaggagtgaatttgagttgctctggtgcaggaagcgacatt

SEQ ID NO: 279 - DNA, 408 bp, Glycine max
agcccatgtgtcgttcctgtcatattggtgccaaagaatgatggaagctggaggatgtgctcacattgcagagctttcaacaacatcaccattaagtacaggcatctcattcccaagctagatgatcttcttgatgaattgtatggatcatgttacttctctaagatagatttgaaaagtggatataatcagattacgattagagaaggtgatgaatggaaaacaacttttataaccaagtatggcttatatgagtggaaggtaatgccatttggtttaacaaatgaccttagtactttcatgaggttaatgaatcatgttttgagagagttcttacgacaatatgtggttgtctactttgatgacattcttgtgtataccacaaatgtggatgagcatttgcaacat

SEQ ID NO: 280 - DNA, 479 bp, Glycine max
  unsure (1)..(479): unsure at all n locations
tagttggatganattccatgatcacaccttatagtaagtagataaacatcctanatcaggaagaacaagttgatctagctacctagaaatcaaatgtgtaatcctaacctatgaagtatgccagggatgtcctaccttctctcttacatattgcggcagagcaattgatgccaagttgcacacagccgtttctgttggacttgtatactcaattatctcagtgcacaagtttcatgacttgattgtgcccaaattctgttggttgcttttcctattgcaagtgtcctaggatatagaaaaatgaagaggtttcaatgaaaataaatacaaaatgcactgacagaaacttagcaaaagtcaaacaagcatttgtaaaccaccttataaaatatgtaaggagttccagtttctatctgtgacttcaaaatttcaaaccagagagattctgtgcctgaacaaccttctttgcttttccccat

SEQ ID NO: 281 - DNA, 436 bp, Glycine max
  unsure (1)..(436): unsure at all n locations
agctntgatgatgtcgagaagaaatcacatgtttgtcatcatcaaaaaggggagaatgtgattgtatgtatacatgattttgatggtgaagaatcaaaacaaggcttatttgcttcaagattaatacaagattgtttcaacaaacaaagccttgattcaagatttcttcaagatcaagccttacctcaaaacgaaaggtttcaagtcaaccaaggcacatgtaattgattaccaatacatgtaattgattaccaatggtttgaaagtgtgtaatcgattaccagagactttgaacgttgggaattcaaattttaaatgaagagttacaactattcaagaaaaataactatgtaatcgattacactaatgctgtaatcgattaccagagaggattntcaacgaatatcgccaacaatcacatcttatcatttggatt

SEQ ID NO: 282 - DNA, 455 bp, Glycine max
  unsure (1)..(455): unsure at all n locations
taacanaaggcatgcgaagtgggtggaattcctagagcaattcccttatgttatcaaacataaaaagggaaaaggtaatattgtagccgatgctctttctcggcgtcatgcattactttctatgcttgaaacaaaattgattggtcttgaatgtttgaaaagcatgtatgaaaatgatgaaacttttggagaaattcttaaaaattgtgaaaaattttcagaaaatggtttctttagacatgaaggctttcttttcaaagaaaacaaattgtgtgtgcctaaatgttctactagaaatttgcttgtttgtgaagcacatgaaggaggtttaatggggcattttggggtccaaaagactctagaaacattacaagaacatttttattggcctcatatgaaaaaggatgtgcagaaattttgtgaacattgcattgtatgtaaaaaggcanagtcta

SEQ ID NO: 283 - DNA, 458 bp, Glycine max
  unsure (1)..(458): unsure at all n locations
agcttganattgaacaacggaagctctccagatactcttatggtcataacttatcacacggaggtccaattgaggcgcataatatatcgagacgctcgaaattaaacaacgaatactctcgagaaattcaaatggtcgtaacttatcacacggaagtccgattcaggtgcataatacaccgagacgctcaaaattgaaccacgaatgttctcgagaaattcaaatggtcataaattttcaaacggcagtccgatttaggcgcataatacatcgagaatcttgaaattgaacaacggaagctatccagaaattcaaatggtcgttacttgtcacacggaagtccgattcaggcgcataatatatcgagacgctcgaaattgaanatcggaagctctcgaganattcaaatggtcgtaacttttcaaacggaaagtccgattaagcgcataatatatcga

SEQ ID NO: 284 - DNA, 431 bp, Glycine max
  unsure (1)..(431): unsure at all n locations
atatagagtttttgggtcatgctggattctattgatgattcattaaagacttttccaaaattgctaaaccactgagtaatctgatgaacaaggatgctgtgtttatgtttaatgatgaatgcttagaagcctttaatacccttaaagccaagttggtctctgctcctgtgattacagcactagactggggactagagtttgaattaatgtgtgatgcaagtgattatgcagtangtgctgtgctgggacagggaaagggcagaatttttcataccatctactatgccaggaaagtgttgaatgatgctcagatcaattatgccaccactgagaaagaattgttggcaatcgtttatgcacttgagaaattccgatcttatttggtggngtcaaagatagtaatttacactaatcatgcaacaattaaacat

SEQ ID NO: 285 - DNA, 465 bp, Glycine max
  unsure (1)..(465): unsure at all n locations
tagaaaggtctactcanatggatgtatgttaagttgataagtaaaaaaaaatgcaaaaagtagaanatgcaggatcatcacgtgcccattgattcttggtttctaatatcaaataattaataacaagaagaaattcaattaaataattttttgaaatcaccaaatttaatttcctaatttgataaatcaaaggcattaattatataactaaaccttaccatgaaaaattggcatcattatgtatccttctactcctattttaaattttattatattgaacttatatttttttagtcaacattgccaagatgtggatcaggtttggccttccaaagacaatatcaatgatttataataatttatcaaatcatttgatattttgatttataataatttaagacaatatcaatgatttatattaatttatacactctgatgaactanatcccttgacaaatagttaat

SEQ ID NO: 286 - DNA, 464 bp, Glycine max
atgttctgcaggaaacttgtgtcccttttaagtttatgactttcggtctagatttattttaaaaaattgcaatagttgtagtatggtaatatatgcttctcaccgaaccctctctggaatttgagactactctctctgtagtctttaagctatagttcttttgcctcttcaatttttgttataccctttttagctgttttttgatgcattatttgtagctgattattagatttgactgcttgtggacaataatttctagtccatattctttataaaaattgagaatgactctgatatgctttagctttttaaacaaacctttggccggcaccaaatactgttactttatatacttataactcaattgcaggtatagattggcatattcatcaaactatagccatatcttggatccgttaattgagaacaattaccaattattcatgatcgagaggcttataatg

SEQ ID NO: 287 - DNA, 397 bp, Glycine max
  unsure (1)..(397): unsure at all n locations
agcttgtgccttttcacgtctggaatatgaatgtagcatatagatccaaagacccttaggtgctttgctgatggcttcttcccgttccaagcttcaattggagtcttgtcttttacagacttagttggacatctgttgagtatgtaaacagcagtgtagactgcttcaacctagaatgtgttaggtagtcccttctccttgagcatcgatctagccatttccataactgtgcgattctttctctcggacactccattttgttgaggagaatatgcgattgtaagttttcgctcaatgctttcatcctcacaaaatctttcaaactcgcgagatgtgtactttntgttgcgatcacttcttagtacttttatccgttttccacttttgatttcagcaa

SEQ ID NO: 288 - DNA, 315 bp, Glycine max
tcattccttgtttcactcatgtgtccaagtctttgatggcatatggttgaattgttgacagccttagtaactgctaccatatactcatctgcaatcatgtaaagagatcctcgcttctttccacgagccacaatgagattgccttttgttaccttccaagctctatatccaaaagtggtgtaatgcccctcattatccaactaccctatagatgttagatttccctttaaggcaagaatatgtcaaacattgtacagtgtccatagggatccactagaggtcgtgatgtcaatatcacctcttccgacaatgtca

SEQ ID NO: 289 - DNA, 377 bp, Glycine max
  unsure (1)..(377): unsure at all n locations
ggactcatgttatctacaatcacttgttacgttgattcttaagaaagtcctctaagacaacaccccatatgccatgtctctcattnggtcccatgactcctatctgatgtccctgcatcaccaataatttaagtgcccaactaatggttccatgcatatccttatgtctatataaatattcaaggccgcaagcattgaggaccaacacaaatcattcacatcataaagtgtttgaaattaaaattctcaacacttctcttcaaccattctcttctcagatcaatacaacaatgggatttcgttacctggcatatataggcattcaaagcggtgacgcacctaaggctatcttgcagtctatgtcggagagaaattga

SEQ ID NO: 290 - DNA, 260 bp, Glycine max
aagatctttggatgccgtcagaaattttatgactatgagtgtgagtatttggtacttgtgaattcattactcttctatgtagaaatttattgatttacaccccttgcaaactcagcatttgttacacaaagcttaaaattcagagagaacgcaccttgtcctatgtattattaaattcgcttcacaaccccttgctaactcagcacgctgcaagccataatgcattcatgtgatatattgccgtgcgacaacaacaacat

SEQ ID NO: 291 - DNA, 374 bp, Glycine max
tggccccacatagagaatggccaaggtgtatccatgacgttcaaaggtatggtggagcattaacattatcagtgaaggcctgacacttatggcatttcctcacatggatgcaacaattgctctccatagtgagctagtaatacccagttctcagaattttctaggccatggcatgtccattggtatgcgttccaaaggatcctttatgcacctctactagaatttgctcagcccctttagcatccatacaccgaagtagtaccatgtcatggttattcttgtataggatattcccactcaggaagaagtcggtcgccaaccttcacaacattcttttatcgttgtcagaggcctcccgtgggcattccttgtct

SEQ ID NO: 292 - DNA, 380 bp, Glycine max
ttaactcggaggtccgattcaagcgcataatatatcgagacgctcgaaattaaccaacggaagctctcgagaaattcaaatggtcataacttttaactcggaggtccgattcatgcgcataatatatcgagacgctcgaaattgaacaacggaagctctcgagaaattcaaatggtcataacttttcacacggaggtctgattcaggcgcataatatatcgagaccctctaaatttaacaacggaagctctcgagaaataccaatggtcataacttttcactgggatgtccgattcaggcgcatcatacattgagacgctccagattgaacaacggaagctcttcagaaattcagatggtcataacttttcactcggatg

SEQ ID NO: 293 - DNA, 164 bp, Glycine max
  unsure (1)..(164): unsure at all n locations
gcgtctgtatatgtgatgcgcctgaatcggacatccgagtgaaaagttatgaccatttgaatttctcgagagctttcgatgtttaattntgagcgtctctatataatataagcctgaatctgacatcagtgtgaaaacttatgaccatantaacttctggagag

SEQ ID NO: 294 - DNA, 452 bp, Glycine max
tcaagaaaaagatggcctcagcaaattccttatttccagaatggaattctatcaatagacctccaatctttaatggagagggttaccactactggaaaacccgaatgcaaatttttatcgaggcaatagatctaaatatctgggaagccattgaaatagggccttatatacccaccacagtagaaagagtttcaatagatggtagttcatcaagtgaaagcataaccatagaaaaacctagagatagatggtctgaagaggatagaaaacgagtacaatacaacctataagccaaaaacataataacatctgccctaggaatggatgaatatttcagagtttcaaattgcaagagtgctaaggaaatgtgggacactcttcgattaacacatgaaggaactacagatgttaaaagatctaggataaatgcactaactcatgagtatgaatta

SEQ ID NO: 295 - DNA, 333 bp, Glycine max
  unsure (1)..(333): unsure at all n locations
ctaagcttatccaggggagacggaccatctcaagtgctngaaagaatcaatgacaatgcttacaaagttgagctgcccggtgagtataatgttagttccaccttcaatgtctctgatttatctctttttgatgcagatggagaatccgatttgaggacaaatccttctcaagagggagagaatgatgaggacatgaccaagagcaagggcaaggatccacttgaaggacttggaggacctatgacaagggctagagcaaggaaagccaatgaagctcttcaacaagtgctgtccatactatttgaatacaagcccaagtttcaaggagaaaag

SEQ ID NO: 296 - DNA, 441 bp, Glycine max
  unsure (1)..(441): unsure at all n locations
tgcttctatagatggtagggaccaagcaaggaaatattcacatccttcaagggtccactatgacaggatcaactatttcacaatatgagagccatgcgtccaatggctcatccaatgataattctctatggcatctgtgtctgggcccataagtgaaaacataataaaagttttgagcaagcgaggcttacttggaaaacataaggttgaacctcttcagttttgtgagcattatgtctaagggaagtaacataggacaaaatttctaaaggttgttcacactacaaagggcattttggactatgntccatttgactactggggggactttgagagttccatcactgagaggggaaaggtatttcctctncatcatcaatgnatactccacaatgacatgggtattcatgatgaagtagaaatctgaagcttaccaatttt

SEQ ID NO: 297 - DNA, 398 bp, Glycine max
  unsure (1)..(398): unsure at all n locations
agcagcaagaggtcttgcaaagattcatgcttagtacagtgcagccaaagtgcctcacgggaatgtgaaatcctccaacgtgcttctagacaagaacggtgttgcatgcatctccgattntgggttatcactcctattaaacccggttcacgccattgcccgattgggagggtacagggccccggagcaagaacagaacaagaggctatctcagcaggctgatgtgtatagtttcggagtattgttgttagaagttctcacaggaagagctccttcatcgcagtacccttcaccggctcgtccccgaatggaggtagagccggaacaggctgcggtggaccttcccaaatgggttcgctcggtggtgagagaagagtggactgcagaggtttttgatc

SEQ ID NO: 298 - DNA, 345 bp, Glycine max
gagtagtgtcccactggtaaaactaactttccaaatttttgccttcgcaggaaatggccccgaggaagcttgcctcaaagaggtccaggaaggacaaggcagccgaaggaactagttccgctccggagtatgacagtcaccgctttaggagcgctgtacaccagcagcgcttcgaggccatcaagggatggtcgtttctccgggagcgacgcgtccagctcagggacgacgagtatactgatttccaggaggaaatagctctacggagttttaaaagactggctaagaatttggtaaaacataagcacttagacaatgaaggaaagctggagttgctgacatgat

SEQ ID NO: 299 - DNA, 304 bp, Glycine max
atctaggtccttatatggatggagctcaaccttgtctctcacttacatattaagttcactaaggaacctagcaatacttgttctttcctccttcctaagtccagctctcaaaatgagtagttccatttgttgcctatactcttcaacactcacactcccttgtctaagcctttggagcttgtccataagctccctttcagagtaggaggggatgtgcctcttcctaagggcactattcaagacaatcctatacctactagaggatccccatgaatccttctttccctagtgatgcaatcctacc

SEQ ID NO: 300 - DNA, 166 bp, Glycine max
  unsure (1)..(166): unsure at all n locations
atgaagcaacaatgatgtaagctccattggagcttgtangcctaggatcttcttcatcaatggattcctttgcttcttggaagatgaatggcagcggaatggagaaaggaagagagagaggagacgccacttcaaggagaagatgagtctagaagaagctcaccac

SEQ ID NO: 301 - DNA, 400 bp, Glycine max
  unsure (1)..(400): unsure at all n locations
tcttagtctcacctgatgaattcatggctacttcatgcactcctctaatgacaatagcatcacttctgacactaaattgctgggagtttgaagccatcttctcaattaaatttctggcttcagcaggggtcatgtctccaagggctccaccactggcagcatctatcatacctctcttcatgttgctaagtccttcataaaaatattggagaagaagctgctctgaaatctggtggtaagggaaactagcacataatttctttaatctctcccagtattcatacaggctctctccacagagttgtctaatacctganatatcctttctgatggtcgtggtcctggaagcagggaaaaaaatatctaagaatactctcttgaggccattccagctcgtgat

SEQ ID NO: 302 - DNA, 349 bp, Glycine max
  unsure (1)..(349): unsure at all n locations
tgtgtcacgattcactgtgacagtcaaagtgccattcacttagcaaatcaccaaatgtaccatgagaggacaaagcacatagatgtaaaactacacttcatcagagatgtgattgaatctaagaaggtgaaggtggaaaaggtttcaacagaagaaaacccagctgatatgttcacaaagtccctctctagtgtcaagttcaagcactgtctgaacttgatcaatttcgaagatgcctaaagctgattggtagaagtgcagccctgaatcacaagatagacactngctaatttggagtcaaggtggagatttgtggtgtgtgactcanaatcacaattggcacaagtga

SEQ ID NO: 303 - DNA, 325 bp, Glycine max
  unsure (1)..(325): unsure at all n locations
ntactgaagaaagctaggggtgactcaccttgcattagtactatgcccatggccgtgccggaggcgtccgtttcgagtgtgaatggacgggaaaaatctggcagagctagcactggtgcctgtgtcatggcacgcttaagagagtcaaacgcaagttgagaatcctcgccccaatggaaattatccttctggaggagtgaagttaacagcgccgcaaaggcagcataatcacggatgaacttgcggtagaagtccgttaaacccaaaaaaccacgcacagattgggttgtcatgggtgtaggccaattcaccatagcttctatct

SEQ ID NO: 304 - DNA, 289 bp, Glycine max
  unsure (1)..(289): unsure at all n locations
gctacgctcttaactgacacgctcttaatattcgaagagtatccttgtggaaccttcacccgacgaagacactgacaaanacttatattattcttctttgacaaagtatggcaggatagggacaaagtaaatttcttcccatcagaccttggatgcaactgtgatcgtatacccatatcagctagatcttgacgggtattcaagccatccttcgtcttgccttgaatgttaaggagcgtcccaatcacactgtcacaaacatgtttcttcacatgcataacatcaatac

SEQ ID NO: 305 - DNA, 307 bp, Glycine max
  unsure (1)..(307): unsure at all n locations
tatcgagacgctcgtaattgaaaacagaagctctgagccaattcaaacgacaataacttttaactcgggtgtccgattgtgtcctgtagtatattgagacgctcgaaattgaaaacagaagctttgagcaaattcaaacgacaataacttttgactcggatgtccgattgtgtcccgtagtatatcgagacgctcgaaattgaaaactgaagctctgagaaaaatcaaacgacgataactttttactcggatgtccgatggagacccgtaatatatcgagacgctcgtanttgagaacagaagctct

SEQ ID NO: 306 - DNA, 273 bp, Glycine max
  unsure (1)..(273): unsure at all n locations
cacttgttgaatatgcttctttgctntccttgcgctagcccttgtcataggtcttccaagatcttcaagtggatccttgcccttgctcttggtcatgtcctcatcattctctccctcttgagaaggatttgtcctcatatcggattctccatctgcatcanaaatagataagtcagatacattgaaggtggtactaacattatacttatcgggtagctcaactntgtaagcatcattgcttctttcaagcacttgacatggtccatcttccct

SEQ ID NO: 307 - DNA, 435 bp, Glycine max
  unsure (1)..(435): unsure at all n locations
gcttanacattgagaagacagtatgagcttcttgctatggatgagactgaatcaatagctgagtatttcaccaagattctcacactcaccaataagatgaagtgttgtggagaacagattaaggaacaactggtggttgagaaggtgctcagaacactgacatcaaagtttgatcacattgtggtggccattgaagaatcaaaggatcttacatctttcaagcttgaagaactacaaagttcacttgaagcgcatgagcagagattaatagacaggaatcctgagaagcacaatgatcaagccttacaagctcaaacaggcataaagtttgacaagcaatgagacaaatccaaaaagaacaaaggatagtggtgtgatgagaagtggagaaagactgaagattccatatgtggtgattctggatcatcttcacag

SEQ ID NO: 308 - DNA, 352 bp, Glycine max
cggcgtttgtagaacctgttacatgaggtcttttaggctcttgtggtccgtgatgataatgaaggggtacccgaggaggtaatggcgccattttcgaactgccgaggtaatggcatgaagctcgtgaatgtaagtagatgcatgttgaaggcgtgggcagaacatcttactataaaaggcgattggatgtgatctctgttgaagaatggcacccatggcaatagcaaaggcatatgttttgaggacaaaaggcaatgagaaatccgacgaggccaacaccggagcctgagtcattacttccttatgacgaaggaaggagtgggtagcctcttcagaccattagaattgatct

SEQ ID NO: 309 - DNA, 431 bp, Glycine max
  unsure (1)..(431): unsure at all n locations
gcggtagagagattgagatgatattgtagtcttcattttactgtcaacatgcaagggacatttctctcgttttagacattgtttcacaaattccaacggtggagatgtgtgaaaatggattccaaagtcggtgtccaaattgcacaatgatccaacggttaacgagtccaggatcatagttttaatgagataggttttgggtctctacgagaaaagagaaagctagaatgcgaaggatatttctctcacctctgacgttntttggcaaatttcaacggtgagaatatttgaaagtgagttctaaacctggttctcaaatttcatgatgatccaacggttaacgagtctgagatcgttgttttactaagatatgtttgagtgtatgcganaaanagagaggaatttggaaagaggagaagggaaaacgaaat

SEQ ID NO: 310 - DNA, 354 bp, Glycine max
  unsure (1)..(354): unsure at all n locations
agaaccaaagaagagcaagttatattgagacatgaactttggttatgcgaaaaactttttggatgagaaaacatatatctggatatggtttataattctatacttaagacatttaaaatagaactgagggaatcaaacttaggtcaatttaattctagtttacgatatgtactcatggttaaattntattttagtgattttaatttaatctttataaattatttagatatgttatgtgatatgtcacttacatagttattaaagtaacatatatgatttgttatatattacatcatttcatgaataaatcttttttattatgcagaaaaagcaatggattntttaattattttt

SEQ ID NO: 311 - DNA, 447 bp, Glycine max
tagactaacttcagcctaccattctcatactgatggccatactgaacggaccattcagtcattgaaggaccttctaagagcgtgtgtcttatagtagaatgaaagctgggagagttttcttccatcgatagagttcacttataacaatagttttcactctaccattggcatggatccctatgaagctctgtatggtagaaggtgtatggcacccttatgttggctagagcccagagaaggccttaccttatgacctaaagtggtacaacaaaccaccgagaaagtcaagttaatccaggataggatgatgactgctcacagtaggcatacaagttatcatgataagaggaggaaagatctggaatatgaggatggtgatcatgtattcttgagagtcacttcgtggactgaggttggtcgagcattgaaatcccgaaaactcacacc

SEQ ID NO: 312 - DNA, 355 bp, Glycine max
  unsure (1)..(355): unsure at all n locations
agcttggacttcctatgttttgggaacctctccttcctcaggtgtacccaaacccaatcacctggttcaagcacgactttctttctgcttttgttggttctccttgcatagcttgcatttttgttttcaatttgagccttcacttgcttatgcaacttcttcacatacttagctttagcctctgcgtccttatgcttaaacatagcaatgttagtcataggcaacaaatcaagaggtgtcaaaggattaaatccatacactatctcaaatggtgaacaattagttgtgctatggacagcccgattataggcaaactaaacatgaggcannacatgcttccaagtttaagattttc

SEQ ID NO: 313 - DNA, 216 bp, Glycine max
  unsure (1)..(216): unsure at all n locations
tgcctatgttgctgcggatgattgcttcatatntacctgngtcaactctatcagagagaaatcacacaccttcgaagtattcaaagagttgagtctaagacttcatagagatgaagactgtgtcatcacgagaatcacgagtgaccatggcagagagtttgaaaacagcactgttactgaattctcacatctgagggcatactcatgagctctcta

SEQ ID NO: 314 - DNA, 384 bp, Glycine max
  unsure (1)..(384): unsure at all n locations
agctnggcaaggttcttttcttgacaatgtgtcaccctttaaccaatgggcaaactgaagtgataaatcaaactctttctcaaatcctatgacacttcattaaaggtaatttgaaagcttttgaagattggctgccccatgtggaaattgcatacaataagggaaccaactataccattcttcttttgaagttgtttatggttttaaccctttgtctcttcttgatttgattcctttgcctaatattgattctatgttgaataaagatggatttttcaaagcttcttttattaagaacttgcatgagcaagtgaaggctcaaattagaaggaagatggaacaatatgttaaacaagccatcaaagggaggaagaagatggtgtt

SEQ ID NO: 315 - DNA, 397 bp, Glycine max
ggctgcagctttagatttttaataaaagacctatgattattgaagaatctatccatgttgcttttgatgagactaaccctataggccaagaaaggaaacacttgatgatattaacggattcattataagatatgcacttggtgaaagggcacaagacaaggaaatggaaatgaaaaagactttcaaattgatgaaaataaaataaatatagatcttccaagagagtggagaacttcaagatatcatcctcttgataatatcatcggtgacatctcaaaaagggtaacaactcgacactctctcaaagatccatgcaataatatggcttttgttcctttaattgaatctaaaaatttaaatgaagccataattaatgaacattggattattgttatgc

SEQ ID NO: 316 - DNA, 321 bp, Glycine max
  unsure (1)..(321): unsure at all n locations
agctntagcaactctntctttttgtttagtctagacttctaatgctcttaatctctcctcgtctaaatcaactaactcatctgacatcattttccaataatggtcgatcggaatgtccatttgtttttgtactctagctgattgcaaatgtatttcgaccggaagtatagcatcgtgcccataagtcagtcgaaatggggtagtattagttgattccttaggagaatttctacatgcccatagaacttgatctaacgttttattccaatttcttggcttttgggcaatgtgttttttaatcaagttaattacaatcttatt

SEQ ID NO: 317 - DNA, 399 bp, Glycine max
  unsure (1)..(399): unsure at all n locations
agctntcttaagatcaagccttgcctacaaggaaaggtttcaagtcatccaagggacatgtaatcgattaccaatggttcgaaagtgtgtaatcgattacacatcatatgtaattgattaccagagactctgaacgttgggaattcaaattttaaatgaagagttacaattgttcaagaaaaacaactgtgtaatcgattacaccaattctgtaatcgattaccagagaggattttcaaggaatatcgccaacagtcacatcttatcatttggattttgaatggccatcaaaggcctatatatatgtgtgacttgggacaaaattagagagagttttgctggtccaaaatgtcttatcctctcanaataaaatgagagagatntccagagaacttcatt

SEQ ID NO: 318 - DNA, 408 bp, Glycine max
  unsure (1)..(408): unsure at all n locations
atccttttcattttacaagcttgaaaagttnttgaaaggctttaaaagcgttactcttagaagatacgaataaagtccaggtatatatagagcagtcatctacaataaccaaagcatagtaattccctccgttgctcatcgttctagaaggaccaaaaagatctagatgtaaaagttcaagcggtctaaaggtagaaacaacatttttagatttgaaagatgctctagttttctttccattntgacatgcattacataattcatccttcacaaatttgagctttaggagtcctctaactaactccttagacactagcttatttaaatgattcatgtggatatgagttattctcctatgccaaagccaagagagatcatcactacttattaaacaagtcatgtttgagt

SEQ ID NO: 319 - DNA, 368 bp, Glycine max
  unsure (1)..(368): unsure at all n locations
gtgccttatgaatcctcccgtgcttatgccaccagtacctggaatgcctctcattntgtacatgacaatcttagacgagtcaatggggtgtatngctgggcaacatgacgaatccgggaagagagagcgcgcctgttactacctaagtaagaagttcacgacctgtgagatgagatactccttgctcgaaagaacgtgttgtgctctagtgtgggcatcccatcgcctaaggcagtacatgctgagctatactacctcgttgatatccaagatggacccggntaagtacatctttgagaagccagctctcacgggacgaatcgcccggtggcaagtcctgctatgcaagtntgatatantctacgtca

SEQ ID NO: 320 - DNA, 236 bp, Glycine max
agcttaactacacactcttggcgcgtatgatgaatgaacagcgcttggccatgacattcatgtggctccaaatgaaagcgcgaaacggagactcgccgtatacaactcggcaacctcattcgcggagctccagactcctaggtggaagacacatgaacagtgctaggcaatgacattcatggggctccgaagaaaggggacaatggaggactgccctataagggacacacttaagc

SEQ ID NO: 321 - DNA, 367 bp, Glycine max
agcttgctaacccatggaagctcctaatatctcccacactctttggggtgggccattcttggatggccttgattttctcctagagagggaaactacaaaccctaagaaaactatattatctacacgaaaggtacacttctctatatttgcatagagggtatttttcctaaggactgaaagaacttgcctgagatgtcctaaatgatcatctaggctcctactgtacactaaaatatcatcaaaataaacaacttcaaatctgactatgaaatcccttaagacatgatgcataagcctcataaaggtgcttggtgcattagtgagcccaaaagacatcactagccattcataccaaccaaacttggtc

SEQ ID NO: 322 - DNA, 371 bp, Glycine max
  unsure (1)..(371): unsure at all n locations
agctntgaattagtgtctgggttgaggataaattttgctaaaagtaaattcagggcaattagcaagtcacatcagcggattcaaaatgcggcaaattaccttaagtgcagagtattggccattcccttcttgtatttgggtatccctattgaggcaaacccaaagcgtagtgtgatatgagaccctatagttgagagatttgagagaaaactatcaaagtggaaccaaagacatctatcttttgggggaaggatcactcttataaagtcagctttaaattcaatccctgttttttctttctttcttttttcagggtcccaaagaacgtggccatcaaattggtgaggctgcaacgatggttcttatgggat

SEQ ID NO: 323 - DNA, 192 bp, Glycine max
  unsure (1)..(192): unsure at all n locations
tgctgaccaccatagagacctttgttcttccatgcatcaacctggagcgattgagcaacctgaagcttatgctgcanatatatacaatagacctactcaacctcagcagcacaatcaaccacagcagantaattatgacctctccagcaacagatacaaccatggatggatgaatcaccctagcctcacatg

SEQ ID NO: 324 - DNA, 401 bp, Glycine max
  unsure (1)..(401): unsure at all n locations
gctccttcaactgcacaaggctcttaatatttgaagagtatccttgtggaaccttcacccgatgaagacactgacaaaaaattatcttctacttcttggacaaagtatggcaggctgggggcaagtaaattttcttcccatcagaccttggatgcaattgtgatcgtatacccatatcagctagatcttgacaggtattcaagccatccttcgtcttgccttgaatgttaaggagcgtcccaatcacactttcacaaacatttttctccacatgcataacatcaatacaatttctaacgtcaagatcacaccagtacggaagatcaaagaaaatggatctcttcttccatatgcaactctgacttttatccttctttngggtcttcccaaatacaatattc

SEQ ID NO: 325 - DNA, 252 bp, Glycine max
atgaatttcaagaaatttccaaatgtcctaagtgtggggtatcacagtacaaagtgaaggatgatgacgagtgtagtagtgacgaaaactcaaagaagggccacccaacgaaggtgttgtggtatcttcccatcattccaaggtttaagcgtctgtttgctaatggagatgacgcacaagaccttacatggcatgcaaatgagagaaactgcgatggaatgctctgtcaatggttatctaagtccattgatt

SEQ ID NO: 326 - DNA, 470 bp, Glycine max
  unsure (1)..(470): unsure at all n locations
tgctggtacatacgacatcctcacggatcagtaccaagtccttgctctcttgcaattctgtgtaaaaggacacaatatagtaaggagccgcttgtgttcccctggccttgtaatcttcaagacctgtagaaaccatgtgtggcgtctggactgcaagaaaaaaacgaatacgtattgtgagactacgatggaagtgttgaaaaagaaaacactcggaataaataaatcattctttacatgtctttttaataatatttcacgttctgtaagtagaaaatttgttaagaggaagcatgtccataactatgtgcagggagagattagaattcgatttcttgataggtaaggtatatccaaagggtgtcaacagtagtttatatgaatctagaaactgtccaggacctagtggcaaatattaacatctttntatatatgtaactaanactgcatctctttctccaggctcggga

SEQ ID NO: 327 - DNA, 437 bp, Glycine max
  unsure (1)..(437): unsure at all n locations
acgagcgtctcgatatactacgggacataatcggacatccgggtaaaaagttattgttatttgaatttgctcataggttctgttttcaattacgatcgcctcaatatattatgggattcattcggacatccgagtaaaaatttattgccatttgaatttgctacgagcttccgatntcaattacgagcgtcttgatatacaacgaaaaacaatccgacatccgagtaaaaagttattgtcgttagaatatgcttagagcttctgttttcaattacgagcgtctcgatatattacgggactcaatccgacatccgagtaaaaagttattgtcatttgaatttgctcatagcttctgtnttcaattacgatcgcctcgatatatcatgggattcattcggacatccgagttaaaatttattgcctgttgagtttgctac

SEQ ID NO: 328 - DNA, 436 bp, Glycine max
  unsure (1)..(436): unsure at all n locations
tgcagcaaattctaacgacagataactttcactcggaagttcgattgagtcccgtaatatatcgacacgctcgaaatttaaaaccgaagctcatagcaaattcgaacgacaataacttttcattcggaagtctgattgagtcccataacatatcgagacgctcaaaatagaaaacagaagctcgttgcaaattcgaacgacaataacgttttactcggatgtccgattgagccccgtaatatatagagacgctcgaaatttanaaccgaagctcgcagcanattctaacgacaataacttttcactcggaagtccgattgagtcctgtaatatatcgagacgctcgaaatttaaaaccgaggctcgtagcaaatacgaacgacaataacttttaactcggaagtacgaatgagtcccgttacatattgagacgctc

SEQ ID NO: 329 - DNA, 400 bp, Glycine max
  unsure (1)..(400): unsure at all n locations
agcttgaagganaacttaatgccttggtcaacctagtaacccagcttgccatgaataagaaatctacgcttgttgcaagagtctgtggtctatgttcttctgcagatcaccatacaaatctgggtccttctttgtagcaatctggagtcaatgagcaacctgaagcttatgctgcaaacatttataatagacctcctcagtagcaaaaccaataacaacagaataattatgacctttcaagtaatagatacaatccaggttggaggaatcatccaaatctgagatggacaagtcctccacaaaaacaacagtctgtccctcattntcagaatgctgctggtccaagcaagccatatgttcctcctcaatacagcaataggaaccacaacagtcaccacaa

SEQ ID NO: 330 - DNA, 401 bp, Glycine max
  unsure (1)..(401): unsure at all n locations
agctttgatttcctttgttccgganacctttcttttctcatgtgcacccaaacccaatctccgggttcgaagacaaccttctttctccctttgttggcttgtttagcatagcttttatttttcctctcaatttgatctttgactctctcatgaagcttcttcacatagtccgcctttgcttgaccttctttatgcttaaaaacagaaacattaggcataggcaaaagatcaagaggagttagtgggttaaaaccataaacaacttcaaaaggagaacaattagtggtgctatgaatagctctattgtaagcaaattcaacatggggtaaacaagcttcccaagtttttaagttcttcctcaaaactgtcctaagcaaagatcccaaagtcctattaacaac

SEQ ID NO: 331 - DNA, 258 bp, Glycine max
  unsure (1)..(258): unsure at all n locations
agcttgaatntgcatgatgttgttattgatactactacaaaaaacagttttaacatcggcttattaacattggttttgtccaaaaccgatgttaagttaaacgcggtgacatatttgtaaataaagtatccttcttaacatcggtttttccaaaaaaccgatgttaactaatgatgttaacatcggttattggaaaaccgatgttaacgtatgataatgtaacattgattttttggaaaaccgatgttaatgcatata

SEQ ID NO: 332 - DNA, 391 bp, Glycine max
  unsure (1)..(391): unsure at all n locations
nttcccacataactcttccaatctttgatggagagaattatgatctttgggaagtgaaaatgcaatcctacatggagtctttggatttatgggatgctgtggaagaggattatgaaatatatccgctgcatgaaaatcccaccatgtcccaaattaaaaatcacaaggaaagaaagatgaagaatgcaaaggcgaggtcatgtttgttcactggtgtttcacaaatgatattcatcagaatcatgactcttaaatcacccaaagcaatttgggattatctgaaagaggaatacgctgaagatgatagaatacgaagcatgcaagtgctgaatttaaggagggaatttgagcttcaaaggatgcaagagtcagagacaatcaaagaatactc

SEQ ID NO: 333 - DNA, 478 bp, Glycine max
gacactatcaaactgaagctcgtgtccaggaggatatccatgtttctgtaacattcatcaacaatgtgatttgtgaatccagaatgtgtacaaaccttgtttcctttcccattagaactccctctgccagagcctccttggctacttcttcctcctctagaagtatagtttggaggaaaaccacttttcctataacatctgcccactgtgtgattatctccacaaacatcaagttgaacaaattgagcttatctttcattgactccgctaccacattaggcggcaccaccgactcctttccctctagcatcaaaatgtgcagcatcttattccatgagcttctttgatagagtttacagttatgccccacctttgtcgcggtttgtcggaaccaattatcatttctttcatccacaatggatctccatttacatgcctcttgtcctatgtatcttagaatattcatcataaacacata

SEQ ID NO: 334 - DNA, 469 bp, Glycine max
  unsure (1)..(469): unsure at all n locations
cgcttctacatttatcacctttatagatggatgttcgtgatatatgaatatttatttgcttcataacaaaaataaagcattggatcccttcaaagtctttaaggctgaagttgagaaccaatgtggtaagaaaataaaaatagtgagattagatagaggtggagaatattatggcaaatatactgagaatggacaagcacctggtccttttgcaaagtttcttcaagaacataggattgttgcccggtacactatgcctggttctccaaatcaaaatggtgtggcaaaaagaaggaaccgaacattattggacacggtacggagtatgcttagcaactctgatcttcctaaatccttgtgggctgaagcactaaagacggcagtgtatatattaaactatgttccaaccaaggctgtccaaaagacaccttntgagttgtttaaaggttgaaaacaaagtttgaaacat

SEQ ID NO: 335 - DNA, 427 bp, Glycine max
  unsure (1)..(427): unsure at all n locations
ctctcanagccttgagactacacatatcataaacaactttctttatctcctcctcagtatatatttctccctaacatctcaatctcctcttgaaccaaaactgtaaatttacctcttaagcaaaaaggttaataatctgccacttcagtgaataaattcctatagaaagaagtcaccatttcttctaaatctatcgaattaagcacccaatagcccttttcattcaatagcctagcatataagttagattgctttcttaanagagtggtgcaatgaaagtaatgagaattcttatctccaaatttaagccacttgcaccaagacttttgaaaccacaaaacttcttggaacaatatctgctctaactccccacataaatcttnttgtagccttaaatggtacttattatccttaatccttcaacttc

SEQ ID NO: 336 - DNA, 455 bp, Glycine max
  unsure (1)..(455): unsure at all n locations
tgctcaccactactagaggagaagcctttaggttgtttcatataaacctcctcttctaaatcaccattaagaaaagctattttcacatccatttgttgcaactcaaggtcaaaatgagcaactaatgccaagattatacgaagataatctttcttagatactggagaaaaagtctttgtgtaatctattccttctttntgagtaaattccttagcaacaagtcttgccatgtatctctcaatgttgcctaatgaatcccttttggtcttaaaaacccatttacatccaatggcctttgccccattaggcatctctacaaggttccaaactttgttactctgcatagaattcatctcatccttcatgacatcataccatannattgactctttacaactctnggcttgatgcaaaagttcaggatcattttcagctccatattatagcatattcta

SEQ ID NO: 337 - DNA, 429 bp, Glycine max
  unsure (1)..(429): unsure at all n locations
agctntgaatgctctattcaatggagttgacaagaatatcttcagactgatcaacacatgcacagtggccaaagatgcatgggagatcctgaaaaccactcatgaaggaacctccaaagtgaagatgtccagattgcaactattggctacaaaatttgaaaatctgaagatgaaggaggaagagtgtattcatgacttccacatgaacattcttgaaattgccaatgcttgcactgccttgggagaaagaatgacagatgaaaagctggtgagaaagatcctcagatccttgcctaagagatttgacatgaaagtcactgcaatagaggaggcccaagacatttgcaacatgagagtggatgaactcattggttcccttcaaacctttgagctangactctcggatagggctgaaaaggaggcacatga

SEQ ID NO: 338 - DNA, 455 bp, Glycine max
  unsure (1)..(455): unsure at all n locations
tgcttgaagggttgtacatgaccaaatctttagttaatcgtctttacgtttagcagtctntgtattcgtttaaaatgcatgaagataaatcagtacgagaacaattggatttgtttaataaactgattcttgatcttgaaaatatcgatgtcactattgatgatgaggatcaagccttgttattgttgtgctctttgcttaagagttactctcatttcaaagagactttattgtttggaagagactctgtttctcttgatgaagtgcaagttgctctgaattcaaaggaattgaatgaaagaaaggaaaagaagtcttctataagtggtgaagggctgacagcaagagacaagaccttcaagaaagatagtaaatctgataagaagaagcataagccagataatcatatgaatggtgaatgaaacatgttcaaaatcaattgtatcactgtaaaa

SEQ ID NO: 339 - DNA, 417 bp, Glycine max
  unsure (1)..(417): unsure at all n locations
agcttgtaatcgattacaacatttgtgtaatcgattaccagacataaaaattcaaatttcaagtctcaagagtcacaactcttcagaaactaattgtgtaatcgattaccacatttatgtaatcgattaccaataaggaattttcgaaaagtacacccaagagtcacaattgttcaagaagtttttgaatggccatcaaaggcctataaataggtgacttgngatacgaaattctttagagttttttctgaacaacattgtcttatcctctcaaaaccaaattgtcttatcactctcaaaatattccttggccaaaacacttgcaaattcaataaggaatcttgatcgatcttcaattggaatatccttctcttaaagagagaaaatgcttcttcttcttattcaaagagatctgtt

SEQ ID NO: 340 - DNA, 457 bp, Glycine max
  unsure (1)..(457): unsure at all n locations
tgtgagagctgaagacttcttcagacatgtagaactggggaagactgacaacccaataggttcaaacgtgactcaagtgtttgttgatcaactatcacgactaaacacgttgggtttgaacgctccccacactcaccctcgaggcactgagatccttatagtccttgagggtactctctatgttggatttgtgacttccaatcaagatggaaatcacctcttcaacaaagtgctgaacaagggtgatgtgtttgtgttcccaattggtctcattgatttctgcatcaatgtgggatatggcaatgttgccgccattgttggtcttagcagttaaaatgcaggaggcattactattgcaaatgctttgtttaaagctaatccacctatntcttctaaggttctcaccaaagcttgccaggtggacaagagcataattgattatcttgaanagcaatct

SEQ ID NO: 341 - DNA, 403 bp, Glycine max
  unsure (1)..(403): unsure at all n locations
tctggtgggacatcttgacttgctttccaatctgacattcatcacanaatctgccttcttctatnttcagattgggaatgcctctaacagcacttttgtcaaggaatttcttcatgcctcttaagtgcagatgtccaaacctttgatgccatattctgacttcatcttctttggaggatagacatgtggaggagtagctggtttcttggggtgtccataggtaacaaatgtcctttgatctgctgcccttcattagaacttcactcttctcatttgtcaccaagcattctgactttgtgaagtttacattgaatacttcatcaaacagctgactgatgctgatcaagtttgcagtcagtcccttcaccagcagtactttgttcagactaggaagtccatcatg

SEQ ID NO: 342 - DNA, 374 bp, Glycine max
  unsure (1)..(374): unsure at all n locations
agcttgtagggttaaagtctcacgattgtcacgtgctcatgcaacaattgttagccgtggctatacgagacatcttgccaaacaaagtcaagttcacgataactcgcctgtgctttttcttccatgctatatgtagcaaagtgattgatccagtaatgtttgatgagttggaaaatgaggccacaattatactatgccagttggagatgtattttccccctactttctttgacatcatgattcacttgattgtgcatctggttagagaaatcaaatgctgtggtcctgtttatctacggtggatgtacccggttgagcgatacatgaagatcttaanagggtatacaaagaatctatatcgtccagaagcatct

SEQ ID NO: 343 - DNA, 451 bp, Glycine max
agctatgaattcctccactaccacacatagtttacccttgtttggattatcttcaacctttcatatagaaatcaaaagacaaccaaccattcttcaacacccaaaagaaagaaggaaggaaaatagacttcagatgtaatgtaaaaagaaatctctattgtagatctaagcttacacttttactctttttttgtagatttttcaatccaaaatatgcctttctgcaaatgcctgaatatatgatcacatataagatagattatataaaaacaaattattcaaatgccatatgaatttaacatcatttccacaagaaaaaccttgtggcaatatcatgatcagctaaatagtaatatgcacagccacataacaacaatgcctctaaattattttcatcttccttgagaagaaacccagactcagcaatagcactctcatactctttatcagc

SEQ ID NO: 344 - DNA, 393 bp, Glycine max
  unsure (1)..(393): unsure at all n locations
tgccgccacggagttntccgactatgctcttgtgtggtggaacaagctacataaggagagagcaagaaatgaagagccaatggttgatacatggacggagatgaataagatcatgaggaagcggtatgttccggctagttactcaagggacttgaaattcaagctccaaaaactaacccaaggcaacaaggtggttgaggagtatttcaaggaaatggatgtgctcatgattcaagcaaatattgaagaagatgaggaggtaactatggctcgatttcttaatggtttgactaatgatatccgtgatattgttgagctgcacgagtttgttgaaatggatgaattgcttcacanagcaatccaagtggagcaacaattaaaaagggaaggagt

SEQ ID NO: 345 - DNA, 450 bp, Glycine max
  unsure (1)..(450): unsure at all n locations
agcttatgaccattcgaatttctcaagagtttccgttgttcaatttcgagcgtgtagatgagttatgtccccgaatcggacatctgtgtgaaaagttatgaccattcgattttctcgagagcttccgttgttcaatttcgagcgtctcgatatattatgaccccgaatcggacatctgtgtgaaaacgtatgaccattcgattttctcgagagcttccgttgttcaatttcgagcgtctagatgagttatgtccccgaatcgaacattcgagtgaaaacttatgaccattcgaatttctcgagagcttccgttgttcaatttcgagcgtctcgatatattatgttcccgaatcggacatccgagtganatgttatgaccattcgattttctcgagagcttccgcttgttcaattcgagcgtctcgatatattatgtccccgaatcgacat

SEQ ID NO: 346 - DNA, 480 bp, Glycine max
  unsure (1)..(480): unsure at all n locations
tggagctcggngtctttntgaagttcctcagctgacttgtagtagaatgagacatattcttccacccaagacttgatatcatcccatatctctagcccatcagaagcataaggatagtcctcgatcaaaagtcaaactccatggggagcagatggatccttaacagcaactcctctgaattaaaagcacccaaataacattgattagcataagagttatatcaagcctgaagccttttttcttcttatgtcattgatgactttttatatcatgcattcatgtgccactactctgtcaaagccatgaactgtcaaagccatcatttaggatgaaacagtctttgtctttccaaaatctgaaatacgagccacttgagcatctgctaaacgatatttcgtgccaccaatagtaacctcagatgaaacagtctccacatccaacacaatataatccaccaattgtctactagtaagtaatgac

SEQ ID NO: 347 - DNA, 440 bp, Glycine max
  unsure (1)..(440): unsure at all n locations
taaacattcaatttcgagagtctcgttatattacgggactctatcagacatccgagtaaaaagttattgtcgtatgaattggcttatagcataaacattcaactttgagcctctcgatatattacgggactcaatcagacatccgagtaaaaagttattgtcgtttgaatttgctcataggttcaaaattcaatttcgagcgtctcgatatatttcgggactcaatcagacatccgagtaaaaagttattgtcttttgagttggctcagaggttcaacattcaatttcgagcgtcccgatatattacgtcactgaatcggacatccgaggaaaaagttattgtcgtttgaatntgctctgagcttcaacattatattacgagcgtctcgatatattacgggactcaatcagacatccgagatacaagttattgtcgtttg

SEQ ID NO: 348 - DNA, 431 bp, Glycine max
agctctgagccaattctaacgataataactttttactcggatgtccgattgagtctcgtaatatatcgacacgctcgaaattgaatggtgaagctctaggcctattcaaacgacaataacgttttactcggatgtccgactcagtgacgtaatatatcgggacgctcgaaattgaatgttgaacctctgagccaactcaaacgacaataactttttactcggatgtctgattgagtcccgtattatatcgagacgctcgaaattgaatgttgaacctctgagccaattcaaacgacaataactttatactcggatgtctgattgagacccataatatatggagacgctcgaaatggaatgttgaacctctgagccaattcaaactacaataactctatactcggatgtccgattgagtgacgtaatatatc

SEQ ID NO: 349 - DNA, 463 bp, Glycine max
  unsure (1)..(463): unsure at all n locations
gatgcttctagtgaagacaggaaacgcgatgaaattagaaaacacaatgaaatgttaaaggcttctgaagctgttgctgaagtcagagcagaggtggataagctcgctgagagggtgagcctgcttctcatattatctttggttattgaaacataataactggagctgagaatgaggatatgagtgattttgatttgcaagtatctgtcttggaagtggctgtggatggagggaccagggtttctgacaaagagtttttgatgtccacagagttgcttatgaggcaattgctgaaactggatagtattgaggctgaaggtgaagtaaagctgcagagaaaagctgaggtagtgtttatggtggttagaattataacttaaattctaactaattgcgtattagntattgtgtttattttggtatttacaaaatcccacctattagtaagtcatggacactgact

SEQ ID NO: 350 - DNA, 427 bp, Glycine max
tttccgactatgctctcgtgtggtggaacaagctacaaaaggagagagcaagaaatgaagagccaatggttgatacatggacggagatgaaaaagatcatgaggaagcggtatgttccggctagttactcaagggacttgaaattcaagctccaaaaactaacccaaggcaacaagggggttgaggagtatttcaaggaaatggatgtgctcatgattcaagcaaatattgaagaagatgaggaggtaactatggctcgatttcttaatggtttgactaatgatatccgtgatattgttgagctgcaggagtttgttgaaatggatgatttgcttcacaaagcaatccaagtggagcaacaattaaaaaggaagggagtggctaagaggagttttaccaactttggttcttctagttggaaagacaa

SEQ ID NO: 351 - DNA, 352 bp, Glycine max
aagcttatgaccattcgaatttctcaagagttttcgttgttcaatttcgagcgtgtagatgagttatgtccccgaatcggacatctgtgtgaaaagttatgaccattcgattttctcgagagcttccgttgttcaatttcgagcgtctagatatattatgaccccgaatcggacatctgtgtgaaaacgtatgaccattcgattttctcgagagcttccgttgttcaatctcgagcgtctagatgaattatgtatccgagtcgtacattcgagtgacaacttatgaccattcgaatttctcgagagcttacgtagttcaatttcgagcgtttagatatattatgtccccgaa

SEQ ID NO: 352 - DNA, 442 bp, Glycine max
  unsure (1)..(442): unsure at all n locations
ngtgaatgtatatctatcattcccaacttgcaagtaaggtcttgaagttgctccgtgggaagtccttggtaagggatgtattcggtggctataagaccactgtctaattnttccttaataaaatgtcgattaatctctatgtgctttgttcgatcatgttgaactggattgtgtgcaatgctgatggcaaacttattatcacaaaccagtcccataggaacttcatattttattttgaggtcatcaagtatgatattcatccataacaactcacaaacaccttgagccatagctctgcttttgcacttgatcttgcaaccacattntgcttcttactcctccacgttactaaatttccacccaagaacatgcagtatcctgtggtagatctcccatcaacaatngatcctgcatagtcagcatcagtatatactttcatgat

SEQ ID NO: 353 - DNA, 439 bp, Glycine max
agctatagcaactctttctttttgtttagtcaaaacttctaatgctcttaatctctcctcatctaaatcaactaactcatctgacatcattttccaataatggtcgattggaatgtccatttgtttttgtaccctggctgattgcaaatgtatttcgaccggaagtacagcatcatgcccataagtcagtcgaaatggggtagtattagttgattccttaggagaatttctacatgcccatagaacttgatctaacgttttattccaatttcttggctttagggcaatgtgttttttaatcaagttaattacaatcttattggctgcttcgacctgaccatttgcttgcgcgtaatatggtgttgaggttaataatcgaaagccagttttttgggcaaattcttgcatttttcgtccagtaaaaactgaaccttgatca

SEQ ID NO: 354 - DNA, 423 bp, Glycine max
  unsure (1)..(423): unsure at all n locations
tatcagaaggggaatgagtaaataccacctcatgctgatattatgaaggtggcaaagtgtttcttttgcaagaagaagggacacatgaaaaagaattgccccggattccaganatggcttgagaagaaaggtaaatcaatctcattagtatgttatgaatctaatatggttagtgttaatattaacacctggtggattgattctggatctactattcatattgcaaattctttacagggtatgcataacctaatgaaaccagtgggaagtgagcaaagcattttatcaggcaataagctaggctcacatgtggaggccattggaacttgcattctgactttaagtagtggctgtattttaaaattagaaaggactttctatgtanccaagttttcccgaaacttgatttctatttcaaggctt

SEQ ID NO: 355 - DNA, 378 bp, Glycine max
atgacaatttgaattgctctagagattccattgttcaatttcgagcgtctcgatatattatgaatatgaatcggacctccgagttaaaaggtatgaccatatgaatttctcgagagctttcgttgttcaatttcgaggcgtttgatatattatacgcctgaatcggaactccgtgtgaaaagttatgaccatatgaatttctccagagattccgttgctcaatttcgagcgtctcgatatattatgcgcccgaatcggacctccgggtgaaaagttatgaccatataaatatcttgagagcttctggtgctcaatattgagcgtcttgatatatatgctccagaaattgacttgcgagtaaaagtatgaccatttgat

SEQ ID NO: 356 - DNA, 303 bp, Glycine max
  unsure (1)..(303): unsure at all n locations
tcggatgtncgatntaggcgnatattatatttagacacttgatattgaataacagaagctctcgagaaattcgaatggtcataacttttcacacggatgtccgattcgggcgcataatatgtcgagacgctcgaaattgaacaacggaagctctcgagaaattccaatggtcataacttttcactcggaggaccgattcaggcgcataatatatcgagacgctcgaacttgaacaacggaagctcccgagaaattcaaatggtcataacttttaactcagaggtccgattccggcgcataata

SEQ ID NO: 357 - DNA, 460 bp, Glycine max
  unsure (1)..(460): unsure at all n locations
tcaaactatttgcttcccgagggaaattctataaacagacctcccatctttaatggagtgggttaccactactggaaaacccgcatgcaaatcttcatagaggcaatagatttaaatatttgggaagccatagaacaaggaccttatgttccctctataatagccggaagtgcaacaatagaaaaacctagagcagattggactgagaaagaaagaagattagtacaatataatttaaaggccaaaaatattattacatatagcttaggaatagatgaatactttagggtttcaaattgtaaaagtgctaaggatatgtgggatacactacaagtaacacatgaaggcacaacagatgttaaaagatctaggataaacactttgactcgtgaatatgaactttntaggatgaatgtaaatgagagtatacaagacatgcaaaagagggtcacacacatag

SEQ ID NO: 358 - DNA, 443 bp, Glycine max
tggatactctgagtcacctgcagctgcagcttgaattgatacatcatttgtgtaatcttttaccagacacaaaagaaattcaaatttcaagtctgaagagtcacaactctatagaaactaactgtgtaatcaattaccacatttatgtaatcgattaccatgaagatattttcgaaaataactcccaagagtcacaactgttcaagaagtttttgagtggccatcaaaggcctataaataggtgacttgggatataaaattccttagagtttttttgaacaacattgtcttatcctctcaaaaccaaattgtcttatcactctcaaaatattccttggccaaaacactcgcaaattcaataaggaatcttgatcgatcttcaattgtaatatccttctcttaaagagagaaaattcttgttcttcttattcaaagagaattga

SEQ ID NO: 359 - DNA, 382 bp, Glycine max
aaaatgaagatacaataaaatagtgagaaaatatatagatttctaaattatttaatatgaaatattcaaaatataaaataaaagtttcttgcccgtacaacaattctatttataataattctatttaattcacataagattacatttaatagaagatacacatcatttaaacaaaaattaaagtttatagatggacaactagaaactaaggaagctatagctagctaagctactacatattaataaagaacaaaacattacaagaaaaggaaataattaaaaaaggtagataaagaaaaaagtgaggtgaaagtttcaaattttgtgtggttccaggcttgcaaaccaatcctccagaaaggaattgttgagaaaaagtaat

SEQ ID NO: 360 - DNA, 447 bp, Glycine max
tataatatattattacgctcgaaattaaacatcagaagctctcgagatattcaaatggtcataacttttcacccggatgtccgattatggcgaatcacatatcgagacgctcaaaattgaacaacggaagctcttgagaaattctaatggtcataattttaactcggatgttcgattcaggcgcatcacatatagaagcgctcgaaaaggaacaacggaagctctcgacaaattcaaatggtcataactttccacactgaggtccgattacggattataatatatcaagacgctcgaaattaaacatcgaaagctctcgagaaattcaattggtcatcacttttcacacggatgtgcaattctggcgcataatatgtcgacacgctcgaaattgaacaacggaagctctcgagaaattcaaatggtcttaactcttcacacggatct

SEQ ID NO: 361 - DNA, 461 bp, Glycine max
agctttcaagaaacttgcaaaagttattcaaaatgaaaaagatttgaaaattaagaccttgagaagtgatcatagaggtgaattccaaaatgaagattttaaaactttttgtgaagaaaatgggatttcacgtgatttttctgctactagaacttcacaacaaaatggggctgcagagaggaaaaatttgtgtttgcaagaactagcaagaactatgttaaatgaaactaacttagcaaattatttttggacggatgccataagtacaacttgctatgttctcaataggattttaataatacctattttaaaatccacaccttgtgaactttacaaaggaagaaagcctaacatatcacacttaagggtctttggaagcaaatgctttgttttgaataatggaaaactataccttgggcaagtttgattccaaactcaatgaagcactctttttacgatat

SEQ ID NO: 362 - DNA, 590 bp, Glycine max
gacactatagaaactaagcttaacattgaatttcgagcgtctcgatatattacgggcctcaatcagacatccgagtaaaaagttattgttgtttgaatttgctcagagcttcaacattcaattccgagcgtctcgatatatgacgggactcaatcagacatccgagtaaaaagtcattgtcgtttgaattggctcagagcttcaacattcaatttcgagcgtctcgatatgtgacgagagtcaatcagacatccgagtaaaaagttattgtcgtttgaatgggctcagagcatcaacattcaatttcgagcgtctcgatatattacgagactcaatcagacatccgagtaaaaagttattgtcgtttgaatttgcctcagagcttcaacattcaattttgagcgtctcgatatatgacgggactcaatcagacatccgagtaaaaggtattgtcgttggattggctagaacttcacaattaatttcgagcgtcttgatatatgacggactcaatcagacatccgagtaaaagttatgcgtttgaattgtctaaagcttcacaataaatttgagcgtctcggtttatgacg

SEQ ID NO: 363 - DNA, 488 bp, Glycine max
  unsure (1)..(488): unsure at all n locations
agctttgagccaattcaaacgacaataactttttactcggatgcctgattgaggcccgtaatatatcgagacgctcgaaattgaatgtggaagctctgagccaattcaaacgacaataactttttactcggatgtctgattgacgcccgaaatatatcgacacgctcgaaattgaatgttgaagctctgagcaaattcaaacgacaataactttttactcggatgtctgattgagtcctgtcatatatcgagacgctcgaaattgaatgttgaagctctgagccaattcaaacgacaataactttttactcggatgtctgattgagtcccgtaatatatcgagacgctcaaaattgaatgttgaagctctgagccaattcaaacgacaataactttttactcggatgtctgattgagtcctgtcatataccgagacgctcganattgaatgttgaagctctgagccaattcaaacgacaataactttt

SEQ ID NO: 364 - DNA, 301 bp, Glycine max
gtaagctggttgttaaaccaaactttagcaatataaaatagtttatgttacacgggactgaagtgtcccaaattgcaaactgataaaagacaagaaattttgtttgcaggtacttactccttcgtactccctccaaggaggcttccccatgaacatttctataattgtacaacccaaacttcaaatatcaacaacgaaagcaacgtcaaagctgttatctttttgcacaaccgcttgaaaaagctacatgtatgtggaataagtgtttatagagaatgcatgagacatcatgaagtaaaat

SEQ ID NO: 365 - DNA, 600 bp, Glycine max
  unsure (1)..(600): unsure at all n locations
agcttcatgcttaagtatgtatggcaaaactttgttactgttgttcaagacatacaagtgagcttgtaacaaatgttctacacttggagtgatcacatgcagtcctcttgaacccttaccacccactctgtcttcatgccgagactcgagaaggctaacaggtttagccttctctaagtattctgaacaaaattcaatggcttcttctgcaatgtacctctcaacaatagatgcttctggacgatatagattctttgtatacccttttaagatcttcatgtaccgctcaaccggatacatccatcgtagataaacaggaccacaacatttgatttctctgaccagatgcacaatcaagtgaatcatgatgtcaaagaaagcagggggaaaatacatctccaactggcacagtataattgcggcctcattttccaactcatcaaacttgacaggactaatgactttgctacatatagcatggaagaaaaatcacaggcgagttatcactaacctgactttgtttggcaagatgtcttgtatagcccaccactaacaaatggttgcatgagcacatganaatcgtgagacttttaaccctac

SEQ ID NO: 366 - DNA, 464 bp, Glycine max
tgatgaagaatgcttggaagttttttagactttgaatgaaaaccttgtatctgccgcaataatggttgtatctgactagagtaaggagtttgagttgatgtgtgatgccaacgactatgctgtgggtgcaaatctaggacatcgacgagacaagatattccatgccatatactatgtcaacaaggtcctgaataacgcacaattgaattatgcgactactgaaaaggaaatattggtcaacgtctatgccttagagaagtttcaatgctttctggtgggctccaaggtcgtcatcttcacagatcatgcaacaatcaaatatcttcttaccaaggcagattcaaagccaaggttgataagatgggtcttgttgattcaagagtttgacatcgtcttcaaagacaagaaatgatctgagaatgtaatagctgaccatttctcccggttagtgaatgaagaagtga

SEQ ID NO: 367 - DNA, 256 bp, Glycine max
caccggcgagcctttgaattgcttcgattaagtatctatgagacacatgtttcctaccataccctttgaccagctcctgagcaagtaatatgttatcctggatattcctaccaggaataaaagctgaatgagtgtttttcaccacactatttatcacatcactcagtctgctagtcaaaatcttcgatgtgaccttataaattgtgctacaacatgatattggcctcatgtctttgatggtttttgcctccgggga

SEQ ID NO: 368 - DNA, 368 bp, Glycine max
  unsure (1)..(368): unsure at all n locations
ntgagcaaattcaaacgacaaaagctttttactaggttgtttgattgagtcccgtaatatatcgagacgctcgaaattgaatgttgaagctttgagcaaattcaaacgacaacaactttttactcggatgtctgattgagtcccgtaatatatcgagacgctcggaattgaatgttgaacctctgagccaattcaaacgacaatcactttttactcggatgtctgaatgagtcccgcaatatattgagacgctataaattgaatggtgaagctttgagcaaattcaaacaacgataaccttgtactcagatgtctgattgcgtcccgtaatatatcgagacgctcgaaattgaatggtgaagctctga

SEQ ID NO: 369 - DNA, 420 bp, Glycine max
agcttcaacattcaatttcgagcgtctccatatattacgggactcaatcagacatccgagtaaaaagttattgtcgtttgaatttgctcaaagcttcaacattcaaattcgagcgtctcgttatattataggactcagtcagacatccgagtaaaaagttattgacgtttgaatttgctcagagcttcaacattcaatttcgagcgtgtcgctatattacgggactatatcagacatccgagtaaaaagttattgtcgtttgaatttgctcagagcttcaacattcaatttcgagcgtctccatatattacgggactcaatcagacatccgagtaaaaagttattgccggttgaatttgctcaaagcttccacattcaaattcgagcgtctcgctatattacaggactcactcacacatc

SEQ ID NO: 370 - DNA, 533 bp, Glycine max
agctttagaggactacacgtcttcgccttcagaggactactagtcctcgccttcagaggactacacgtccttgccatcagagggctacacgccttcaccattagaggactacacgtcctcgccatcacaagactacatgtcctcacaatcagagggcaacacgccctaacctttagaggactacacgtcctcgccgtcagaggacttcacgtcgtcaccttcagagggctacaagccttcacctttagaggactacacgtcctcgcaatcagggggctgcacgccctcaccttcagaggacttcacctcctcgccatcagagggcagtacgccctcaccttcagaggactacacgtcctcgccatcagaggactacacgccctcacccttagaggactacacgtcctcgccattagaggactacacgccctcgccatcagaggactacaggtcctcccctttaaaggactacacgccctcccttttagacgactacccgctctcccctttaaaggcttccacgccctcccctt

SEQ ID NO: 371 - DNA, 471 bp, Glycine max
tacttttttctttcctatagatggtttcagttactatatcttttatgacagtcttgagctggtcacaaaaggtcaaacaatagactatggaatgaacctgcactttgtgagcttaattgatatgtcaagttacaatttgtctggaataatacctccccaaatgttcagcctcattggattgtactccttgaacttttcccacatcaaattaacaggacaaataccaaatgagattggcaacattgaaaacttggagtcccttgatttctcaacaaaccaacttcggggtgaaattcctcaaggcctttccaatttgtcctttcttgcttccttagacctgtcatttaacaatttcacaggcaaaataccatcaggcacacagctttaagggtttcgtgcactcagctatataggcaatcgcaatctttgggacctccactttcaaaattttgctgcagggtagtgaaccta

SEQ ID NO: 372 - DNA, 462 bp, Glycine max
agcttatccttaaataagaaaaagtatccctcccattataatccaaagtttgataaaaaaaaaaaaagaaaaaacattgctgtttcaatagcaatatccttacaatatctctgcggataagctcctgaagtttaaacataatgcgttgacgagtggtgataggagtatttttccatgaaggaaaagcttgcttggctgcactaactgcagctttaaactcttcatatatagttaaatgaacttgagatacaacttcttgcgttgcctgagtaaagataaatattcaaattactttttacataaaccatcacaatgctaagaaaatttcaagcaaatatcattgaaaaacatatcaacttacgggatttataacatcaatgattacagaaccctgagaatttacaaatttccccccaataaaatttgagacctttagctacataccaataaaaaaggccataa

SEQ ID NO: 373 - DNA, 262 bp, Glycine max
agcttttattttctgatgagtaatcgttctagtatgtcttgaatgagctcctcgaaaacttgatgtaaataaacgaatttttgtccttcgtttccgagctatatatcctcgtttaattctggtcattgaataattgagactttgatgaataactatttgatttttcagctattcttttcttcttactagtctattaataacacaaatggattcttccaatgtataaaaaaagaacttcacaggctcttgctactataacctc

SEQ ID NO: 374 - DNA, 551 bp, Glycine max
  unsure (1)..(551): unsure at all n locations
tgagttaagcaagcctaaagagggtcgaggtttagtactttctgctatagcatagaacacaaaagcatgattgattagagaaatatccttatatgcatcaacttgtttgttagaaatacccaacacttttgtagaagcaagcttcatgatgatgaaccaagtaattttgatgatgccaaaagcccaaatgattgattcaagattgattcaagacttcaagatcaagcatcaagaatccaatccaagattcaagattcaagagaagaaatcaagaagcaacaagtcaagacttcatataggataagtattaaaagaanttttcaaaaaccaaatagcacagttttgttttacaaaagaattttttcaaattttctaagttaccagagtgattactctctggtaatcgattgcctgttatcagtaatcgattaccagtgaccaatttagttttcaaatgtttgcaacgttccaaaatgattttcaaatagtgtaatcgattacactatattagtaatcgattacaagtgaatcggaacgttggaattcaaaat

SEQ ID NO: 375 - DNA, 531 bp, Glycine max
tgtaggcgttggatcttcttcatcaatggagtcatttgcttcttgaatatcatggcagcggaatagagaaggaagaaagatgattggagaccccacttcaaggagatgatgagtcaagaagaagctcaccaccacaggaagccatggataagagcttgaaggaaggcgaagatgagtggagggagagggagagaaggggcacgaaattttatgcctcaaatgaggtctgaactttgaagtgtaattctcaaatgatcaaagttcaaaataatgcacacacatggcctctatttatagcctaagtgtcacacaaaattggagagaaatttgaatttctattcaaatttcacttgaatttgaaattgaatttgtggagccaaaatttcaataattatgattaatggaatttagatatggttcagcccactaatccaagatcaagtccaagattcttcactaagtgtgcttaggtgtcatgagacatgtaaaacatgaatgacatgcacaagtgtgactatatgatgtggcaac

SEQ ID NO: 376 - DNA, 354 bp, Glycine max
agcttgttggagagagcaatgtcaatattgtcatcaacttcagccctaatagttgggcctggaaactgaccgttgattcccatcagaacgtgttccaagcaatctggttttctgatcatgtactccacatcaaacttgtagtgtctcactattcctccgattgacaattctaccaaacccaaccatattatgcacccaacaaaaagagctttgaagctcattcttaattaattttgatcagagaaagcctaattagcaatataacaggaaggtatcaagtagtagaacgaagctattgatgaacaaattgaaagaataggtatagaggatcgaggatttggattgctggtaccc

SEQ ID NO: 377 - DNA, 248 bp, Glycine max
ctcagtccctgagaaactgattcccagaagacaacagggagtgtttattgctgaaaaccctagccttgcaacaagttctagggaagtagacaaggagatggacaagaaaatccgcagtatcgtgagtagcattttaaaagacgcctctgttcctgaagctgatgaagatgttccaacatcttccaccccgaatgtttctgtgcctgatgttgagaaagatgttccaacatactttcggtccaaatgct

SEQ ID NO: 378 - DNA, 333 bp, Glycine max
  unsure (1)..(333): unsure at all n locations
agctttgagcanattcaaacgacaataactnttgactgttttttccgatgtgccccgtaggaaattgagccgctcggaattgaaaaacggaggctctgagaacaaactaacgacaataacctttaactcggatgtctgatagaaccctgtaatatatcaagacgctcgaaattgaaaacggaagctctaataaaagtcctacgacactaacttttgacttcgatgtccgattgagccccgtaatatatcgagacgctcctaaacgaaaacagaaactttgaccaaattctaacgacaataacctttgacttcgatgtccgactgcgccccctc

SEQ ID NO: 379 - DNA, 395 bp, Glycine max
tgactagtttgcaaaatggcatacttgaaatatatatgttggatcaagtggcctcggaataattaagaagggggggttgaattaattattgatgtgccttgactaattaaaaatctatccttcttaatgttactagatttaattaagtttttactacaaagttaagaaagtaaagaacagtaattgaaacttaaccaaaagtaaaaacgataattaaaagagcacaacgaaaattaaaagtgtagggaagaagaagacaaacactataattttatactggttcggcaacaacctgtgcctacatccagtccccaagcgacctgcggtccttgagatttcttttcaaccttgtaaaaacctttacaagcaaagatccacaagggatgtacccctcc

SEQ ID NO: 380 - DNA, 474 bp, Glycine max
tgttgatttaagcacagataatccatcaattgcttctgatggtttagcagcatttcagcgtgtaagcaaattgacaagaaaagtgaacctttttgaaaaggattatatcttcatccccataaactatagtcttcactggagtttgaatgtcatttgtcaccctgctgaagtcatgacatgctacagagatgaagaaactaaaggatctcccaaagaagcttgcatcttgcacatggattcccgaaaaggaattcatcaagatctacacaatgttttccaaagttatctatgtgaagaatggaaagagaggcacaacaatgtgagggatgatgatgtttcttctatatttttacatcttccattcgtgccacttgagctgcctcagcaacaaaatgcatacgattggggcatctttttgtccactatgtggaacgttttctggacatgcttcaatcaacttcaaccgtccatgat

SEQ ID NO: 381 - DNA, 647 bp, Glycine max
  unsure (1)..(647): unsure at all n locations
ccgcaagcttcctgcacaatgactatattattaagatttgttctcaagctggtataatcttatcatgcttcagcgagtcagtggcacttacactaatcaagtgtcaagtaccaacgaagcatcagtaaggaaagttagtttacaataatttatctccacaagtaatactgagttctggcaacaaagaaaaaccataccaagaataaattagaaaaggcacaaaacagtctaccttgcatcaggaattccatggcagattacttcattaactgacctgttagataaagcaaatttcattcttaacatataccatggcaataagagaaaaatatgacattacagaaggaaagtacctacgtgcagcaagatttagggaagaaaaggtaattgagaggtgatggatatcctcctgaaaaagtaaaaagtcagaaaaaaattcattaccaatgaccatttgtaatagccatatgacaatgacatcatgaaactcaatgaaccatcatttggaagaggaattataacaaagttaggaagcatcctctctgtaatgctcaaggcttttttttgactttttcaaattctggtaagcagatagcagccttgatatacattntggtatttttttggcccccccttctctgacccat

SEQ ID NO: 382 - DNA, 344 bp, Glycine max
cttttctagttagagaccaacgtcttggggctaatgtatgatctgctcaaggacctacaggtttaggtaaatatctaatgcgttccccgacaggagaagttatttttgggggagaaactatgcgtttttgggatttgcgtgctccttggttagaacctctaatgggtccgaatggtttagacttgagtagactgaaaaaagatatacagccttggcaagaacgccgatctgcggaatatatgactcatgcttctttaagttccttaaattccgtgggtggcgtatcttcagagattaatgcagtcaattatgtctctcctagaagatgggtagctacttctcat

SEQ ID NO: 383 - DNA, 187 bp, Glycine max
agcttggtctaaaattcccgaaaaattagctttttatgattatatcggaaataatccagcaaaaggggggttatttagagcaggttcaatggacaatggagatggaataaccgtcggttggatacgaccttctgtgtataaagaaaaagatgggcatgaactctttgtacgctcccccccctccttt

SEQ ID NO: 384 - DNA, 546 bp, Glycine max
ttctccactaagttgcctgatgcctgaaatgtcttttctgatggcagtggtcctagatgcagggaagaatttctccaagaacaccctcttaaggtcatcccagctgaaaatggacctgggagcaaggtagtatagccaatctttggccactccctctggagaatgaggaaaagtctttagaaagatatgatcttcttggacatcggggggcttcatggtggaacaaacaatatggaactccttaagatgcttatgaggatcttcacctgcaagaccatgaaacttgggcagcaaatgtattagtccagtcttgagaacatatggaacaccctcatcaggatattgaatgcacaagctttcataagttaaattaggtgcaaccatctccctaagagtcctctcacgaggtggagggtgagccatgttctaagtaggaaaattagtagtggaatgctcacaattagatattcagaatcacccttaacagaatgctcaaaatgcacagaatgaccaggatgcacactatgcctaactaatctatgaaag

SEQ ID NO: 385 - DNA, 435 bp, Glycine max
tgccttgccccttgatatatttgagggactcatggtcactatgaatgacaaattccttgggataaaggtagtgttgccatgttttcaaagcccgtactaaggcatacaactccttatcataagttgaatagttaagggtatgaccacttaacttttcactaaaataagcaattggatggccttcttgcatcaacacagccccaatcccaacatttgaagcatcacactcaatttcaaaagatttttgaaagtttggcaacgcaagtatcggggcattagtaagcttttgcttaagaacattgaaagcttcttcttgtttctctccccatttgaaaccaacatttttcttgagcacttcattgagaggtgctgccaatgtgcttaaatccttcacaaatcgtctattaaaacttgcttagccatgaaaacttccta

SEQ ID NO: 386 - DNA, 323 bp, Glycine max
agcttcttacaagagactaagaaatttttgacgaaatttttttagaggaaagatcttggggaagcctcgatcttgcggaagcctcttttgtattaggaatcaagatattaagagatcgctcttaaggtatcctaaggttgtcacaaaagagttatatcgataaggtcctagatagattcaacatgaaagatagtaaaccaggagatatcccgatagctcaaggagacaaatttagtctcaaacaatgccccaataatgaccttgaaagaatagagatgcacaagattctttatgaatcaacagttggaagtctactgccccct

SEQ ID NO: 387 - DNA, 504 bp, Glycine max
  unsure (1)..(504): unsure at all n locations
taagaccatttctaatgggttagataatntatttttaattgtttatcctatgctaattagtccttataatatcacattataattaaataatttatatatttcttgtttcaataagtaattcttaaataataagaaaatattttttctcataagtaattattattatatatatataattataggttaattttaaacaatttaatgtgacatataaataatctaccatagttaaaaaaattaacaattatatctaaaaataaaccaatcgttaaataatgagcattgaagatgctctaagataggaatactcccataaataataaatcatgccattatgttattcctgtatgaatatctaatcatgtttctttttttactccccaattttattacctatatatcctttgaaaaatatactataaatattttgatgtattttttaagagaacaaaggctcctggtttaacaaaaagccaagacaggggaattaaggccatttaaaaa

SEQ ID NO: 388 - DNA, 293 bp, Glycine max
atgcaagcttttaactgggaaatgctccaagaaacactatcttctttttccgattctctggctgcttgctccagtaaagcacaagaagaaatatgagcaccagcagattgccccattagataaatcctattacatagtaacaaaaaaaaggaaaagataaatctcagttgaatgtctaaatatatgatgaaaaggaatcttgtatcatagtagcacgccacctattagggtcacctccataattagctatgttgttgatgatgaacgaaattccccgcgaagtatcatttacc

SEQ ID NO: 389 - DNA, 605 bp, Glycine max
taagcttgcaaactagcttgtttaaataataataataataataagaataattattattatctataccatttttatggcattatgaatgacagtatgaagtagcataatgtgcttagagagttcacttgcattggaaaattttcaaaaagaaaaaaacttaagttaaaaggataatgcaaccagattaatacttccaaagaaaaaaatgttttgtaaaaacattttcagacaatttaaatatttttatttgactatattagtataaatcatctctaatccatatatttttaatattatgttctttttttttcattttcttttgatatactttgtgttttaataacttgaattcaatatgattttgtttatcaattatttttggatttgtgcattacttatacgaaattttataagtttcttcttttggttagtatgttagtatttcacgaggttttaaaataattaattgattaaagacgtctttaagcagactcttaaataggttcgtaggccgataagccgagtcgagcctttaaaaaaagctatgacagataatgagtcgaactcaaatcttacgtagttaacttaagtcaaactccaatcta

SEQ ID NO: 390 - DNA, 419 bp, Glycine max
tgcctgaaactatatgagatccctttgtcgttgccttccaactagggttaagcttaaggagaacccaatctcctatctggtagttcacttcacgacgtttcccatcagcttggcttttcatagcagcttgttccttagaagcttatttcgaatagcttggaaagtgttatccctatcagttaacatctcttcaacggcctcaatgttcgaagaccctgtaatatattcaggaaagttaaagggttttcggccaaaggtgacaccatactgattggctccagttcccgcattccatgaagtattatgggaccattcgacccacgggaggagctatccccccatgcttggcccacgatggatgaaggctcgcaaatattgttcaattatgcaattcaaaacccttgtctgtccatcaattt

SEQ ID NO: 391 - DNA, 573 bp, Glycine max
agcttccaagaatcaagatcaagattcaagatttaatattcatgaatcaagagaacacttaatcaagataagtatgaaaaagttttttcaaatactaagtagcacatggatttttctcaaaatctgtttaccaaagagtttttactctctggtaatcgattaccagattattgtaatcgattactagtagcgaaaatggttttaaaaaaacttttaactgaatttacaatgttccaattgatttcaaaatgttgtaatcgattacaatgttttggtaatcgattaccagtgtgcttgaacgttgaaattcaaattcaaatgtgaagagtcacattctttcacaaaaaagctttgtgtaatcgattaccagtgaaagtttttgaacaaatcaaaagatgtaactttttaaatagtttttgactctttcaaattggctttaagtttttctaaaagtcataactcttctaatggttctcttgaccagacatgaagagtctataaaaacaacgctttgttttgcattcttacagctattcaatccaatcaatcttatacaatcctttacaagccctg

SEQ ID NO: 392 - DNA, 453 bp, Glycine max
tccaccttctatgtactcataaatcagtatcttctctgaaccatttaggcaccaaccgtagagtgtgaccaggtttggatgtggccaaccaaagccatgaccactcagaacctccatttcagccttgaattccttctcaccctcaagaccttccctttgaagcttcttcactgccacttgtctgccatctgaaaacactcccttgtacactgttccaaaccctccttttcctataactctgtcctctgagaagctgctagttgctttcagaatgtcggcatgtgtgaaaactgtcttgttcagacggataaccttaactgtgtcagacatccatgatgaggatccggagctgctggaatcatgccattgttttgtatccctcaagaggtatcttggttcctctgaagggcttttcaccgatacacagactaggatcgtaagaagcccgatact

SEQ ID NO: 393 - DNA, 548 bp, Glycine max
agcttgtgcatccaataccctgatgaggatgtcccatttgttcttaaaactagacgaatccatttgcttccaaagtttcatggccttgcaggtgaagacctgcacaaacatctgaaagaattccatattgtctgctacaccatgaaacccccagatgtccaggaggatcacatatttatgaaggcctttcctcattctttagagggagtggcgaaggactggctttattaccttgctccacggtccatcacgagttgggatgacctcaagagagtattcttagaaaaaaaatttccctacttccaggaccacggtcatcagaaaggatatttcaggcattagacaactcagtggagagagcttgtatgaatactgggagagatttaagaaactatgtgccagttgccctcaccactagatttctgagcagcttctcctccaatatttttatgaaggactcaataacatggagaggagtatgatagatgcttgccgtggtggagctcttggagacatgacccctgctgaaaccagaaatttaattgaga

SEQ ID NO: 394 - DNA, 230 bp, Glycine max
tccattattcaaaagttgcctgtgcttcttcaacccgtggctgttaatggtaatttagtccccctcggacaaagaaaactgatgtgtaatgatgactgtgctaagttagagcggaaaagggttcttgcagatgcttttgagattaccgctccaaatctggattcactccattttggtgagaattcggttgcttctgaattgctggctgacatgttgagacgtgattctaa

SEQ ID NO: 395 - DNA, 466 bp, Glycine max
tcaactgtgaagctatcttcgtatcgagcatggccaaatatgcatgactttcggtttgcgctttacaagttgccattgcgggttcccaaagatgaccaagaatatgctggtttatggggaggaacttttggttggcctcctggaaagccttctgaagacaagcctggaaaggctttattctttcttctgctcttttatgaggagttccagggacaacagcttcttattgcaacaaaaattttggaaggcacacactatgtgttacatcctaacgtgtcagcaatgtttacagcaaatatcaatgatccttcatccgaaccctttccctgggacactgatgcagactcggttccagtgaatatcaagcaagctttcgtgggagagggtattgcaagtggttacgggttcagataccctggatcaaagcctggttccctctttgttttagaaaatggtatccttgcct

SEQ ID NO: 396 - DNA, 430 bp, Glycine max
taaacattcaacttcgagcgtctcgatatattacgagtctcaatcaatcatccgagaaaaaagttattgtcgtttgaatttgctcagaggttcaacattcaattttgagcgtctcgatatatgacgggactcaatcagacatccgagtagaaagttattgtcgtttgaattagctcagagcttcaacattcaatttcgagcgtctcgatatgtgacgggactgaatcagacatccgagtacaaagttattgtcgtttgaatttgctcaaaggttcaacattcaatttcgagcgtctcgatatattacgggactcaatcagacatccgagtaaaaagttattgtcgtttgaattggctcatagcttcaacattcaatttcgagcgtctcgatatatgacgggactcaatcatacatccgagtgaaaaggta

SEQ ID NO: 397 - DNA, 461 bp, Glycine max
agcttagagccaattcaaacgacaataactttttactcggatgtctgattgagtcccgtcatatatcgagacgctcgaaattgaatgttgaagctctgagccaatccaaacgaccataactttttactcggatgtctgattgagtcccggaatataacgagacgctcaaaattgaatgttgaagctttgagccaattcaaacgacaataactttttactcggatgtctgattgagactcgtaatatatcgagacgctcgaaattgaatgttgaagctctgagccaattcaaacgacaataactttttactcggatgtctgattgaggcccgtcatatatcgagacgctcgaaattgaatgttgaagctctgagccaattcaaacgaccataactttttactcggatgtctgattgagccccgcatatatcgagacgctcgaacatgaatgttgaacctctg

SEQ ID NO: 398 - DNA, 553 bp, Glycine max
tgcatccatgtgcactagttattgtattattgaagagaaagaataaatttgaggtagagactacagagtgtagcatacatgtccacttgctgtttctgacagttggcgggtccataaatttgaaagattcaatgaaccatctttcagagacattgctattcccattgttgcagctgagtgtgatgatagattgctggaatatgaagcacaagaaacattaaaaggattgctaaaacaggcaaaagagtatgttcaatttgatttactgaatacaaaattacccaccgagttgtttgcaccccgattagtgcacgcagaccagccgaggccacaacctctactgacgaaacttctgaaagttgatgcctaaacacagcagtagcagctccaccaccttcatctccattcactgctaaattacctccaatcgtaacagcattgtgctttgataactgagaactgaattcacttgtcatagccattctgatactcataaacgtaataaaatacacaaacaatcagaccaaaaacaaagaagtgcttaacacattaa

SEQ ID NO: 399 - DNA, 357 bp, Glycine max
agcttctatagaaggttcattcctaatttctctacaattgcatcacctctcaatgagctggtgaagaagaatgtggcatttaccttgggtgataaacaagatcaagcctttgctttgctcaaagaaaagcttactaaggcacctgttctagctcttcctgacttttctaaaacttttgagctagaatgtgatgcctctagagtgggagttggagttgtattgttacaaggtgggcaccctattgcttattttagtgaaaaacttcatagtgccccccttcactaccccacctatgataaagagctttatgccttaataagagcccctcaaacttaggaatattaccttgtttccaag

SEQ ID NO: 400 - DNA, 400 bp, Glycine max
tctaaactttatacaagaatgaagctctgataccacttgttggataagtggcctcagatatcttacgaaagggggttgaattaagatatcacaaactatttccccaattaaaaatttattttactttctattcaagttataaattcccttaaaaatgaacttcttaaatattgattcaaataaagcaatttgaatatgaatataaaacaataataaataaaggagtttaagggaagagagattgcaaactcagacttatactggttcggtcactcccttgtgcctacgttcagtccccaagcaacccgcttgagagttccactatcttgtaaaagcctattacaagatctgaaccacacaaggacaacccttcctttgtgtttagatttctttacaacaa

SEQ ID NO: 401 - DNA, 111 bp, Glycine max
agcttgcataactgaaaccatcttttggggtattttattggtaaaaacagcagcaccttcaacagaattcattgaataaccacatggcttaaaagtaaagtcacaaatctc

SEQ ID NO: 402 - DNA, 387 bp, Glycine max
aatactaagctcgcttctacatttatcacctttatagatgattgttcgtgatatatgaatatttattcgcttcataacaaaaataaagcattggatcccttcaaagtctttaaggctgaagttgagaaccaatgtggtaagaaaataaaaatagtgagattagatagaggtggagaatattatggcaaatatactgagaatggacaagcacctggtccttttgcaaagtttcttcaagaacatacgattgttgcccggtacactatgcctggttctccaaatcactatggtgtggctaaaagaacgaaccgaacattattggacacggtacggagtatgcttagcaactctgatcttcctaaatacttgtgggctgaagcactaaag

SEQ ID NO: 403 - DNA, 426 bp, Glycine max
tgatgaagagtgcttgacagcttttcagaccttgaataccagtctcgtgtctgctcccataatagtgacacctgactggagtaaagagtttgagctcatgtgtgatgtcggtgactatgcaatgggtgcaattcttggacaacagcaaaacaaggtattccatgccatttattatgccagcaaggtcctaaatgatgcacaactgaattatgccaccattgagaaagaaatgctcatcattgtttatgccttagagaagttcggatccctatttgttgggctccaaagtcatcatctttactgatcatgcagctattaagtatcttctaacgaagaccgatttggagccaagggtaatcacatgggttcttctgattcaagagtttgatatagcgattaaagacaaatagggctaagagtaaagtc

SEQ ID NO: 404 - DNA, 609 bp, Glycine max
catcccatgcttctttggccgtcgttgcgttggatatcttctcaaatgtatcttcatccaccgattgataaatgagaaagagagctttcttgtctctctttcttgactccttcaacgtctcctttacaccttggcttagcgaggcttcatcttgttcctcgaagccattctctatgatatcccacacatcttgagctcctagtagcgccttcatcttgatactccaattatcatagttgttctttgtgagcatcggcatttggaaaggaaaacctccattcgccatcttttgaggatcttgaagctctgataccactttgttggaaataaggctttttatgtttaggaaaagtgtttaggaatattggagactttgaataggaaggagaattctctatggaggagagaactttgtatttttgcttgatacaaatgtgtaggattacatctctatttatactactctaaggagaactctagacacactaattctagagagttctcaactctagagatccaaagaggattctagagaatattaaaaccataagaaatatctagacacttcaaacactacaaaaattctctagaacatgacccataattact

SEQ ID NO: 405 - DNA, 353 bp, Glycine max
gcttaaggagaccactttgaactttttcacgaacaatatggcaatctaagtcaatgtgtttagtacgctcgtgaaaaacttggttaaaagagatctggatagcgattgattgtcacaccaaaaattggggggtgaacctaccaaacacgtaaatcttgaaggagatatgtgagccattggagctcgcaagtagtggaagccaaggctcgatactcagcttcggaggagctgcgagacagagtgggctgtttctttgagcaccaagaaataatggaattgtcgagatagacggagaagccgatgatggaacgtcgagtgtcatgacaaccggcccaatcagaatcactgaatgc

SEQ ID NO: 406 - DNA, 577 bp, Glycine max
tcttcagaaacgtggcatttgtgtgcaatacacaatgctcggttcaccacaacaaaatggtgtatcagaaaggtgtaatagaacattaatggatatgattaggagtatgttaatcaatttgactttaatcatatctttgtggatgtatgccttgaaaactgtcatgtatttgttgaataggattcctagtaaggcagttccaaagacacctttgaactgtggacaaataggacacctaatatgaggtacctgcatgtttggggttggcaagcagaaataaggatttataatctgcaagaaagaaaattggatgcaagaacaatcagtggctatttcattagttatccagagaaatcaaaggggtatatgttttattgtcctaatcataatatgagaattgtcgaaactggaaatgcaagattcattgaaaatggtgaaatcagtgggagtacagttccacgagaagtggaaattaaagaagttagagtgcaggtcctttttgcttgggcctctaacagtaaggtgattgctcttttaattggtgttgcataattaatgaagaggagcaacacattaa

SEQ ID NO: 407 - DNA, 331 bp, Glycine max
gtacatatgttctcaacacgagaacgtttgaggtatctaataagcatgtctgcaagttggtcaccggagttgacaaagtcaatgatgatttctcctgagagcaccttttctctcacaaagtgacagtcaatttctatttggttagtctgctcatggaagatcggatttgatgcaacgtggagagcaacttgattgtcgcatagtatcttgagtgtctccaaattttagttggtggagaaattgcctagccatgtaaccttggatgcaatagctgccatagcatgacacttagcttcaacactggatatagcaattgtttctgcttcttact

SEQ ID NO: 408 - DNA, 136 bp, Glycine max
atacgcctgaatcaacatccgtgtgaaaagttatgaccatttgaatgtttcgaaagcttcctttgttcaatggcgagcatatagacataatgagagcccgaatctgaccaccgtgtgaaaagttatgaccatttga

SEQ ID NO: 409 - DNA, 448 bp, Glycine max
  unsure (1)..(448): unsure at all n locations
agcttggaacatataaactgaatcctagttcctcttaaggacttagtcaaaatgtctgctggctgatcattagaattgatgaactcagtggtaatctccttggacaataatttttctcgaatgaagtgacaatcaatctctatgtgcttggtcctctcatgaaagactggatttgatccaatgtggagggctgcctgattgtcacaaaataacttcattcgtgtaacttcacaaaacttcaattcttgaagaagttgcttaatccacataagttcacatgtgaccaaagtcatagatcggtactcagcctctgcgctggatcgagcaacaacagtttgtttcttgcttttccaagagataagatttcctccaatgaaaacacagtagcctgaagtagatntcctatcaataggacaaccagcccaatctgcatacaatatccagatac

SEQ ID NO: 410 - DNA, 445 bp, Glycine max
tcaacctagaggagacggaccattccaagtgttggataatatcaacgacaatgcctacaagattgacttgcctagtgagtataatgtaagtgccactttcaatgtgtctgatctatctctttttgatgcagatggaggggccttgtatttgaggacaaatccttttcaagaaggagggagtgatgatgacataaccaagggcaaggaccatgaagcacttgaagggcccatgaccagaggcagacttaaacaagcccaacacgtcatagagacaaggctggtcatttgtatagctaccattgatgatgattgaaggcccaagtggagaaagatgaatgcccacaggcataggcactaccaagactactaattgttgctgaacgcccaagttaaataagtttttagttataatttatttttattgtaactttggcccaaactgttt

SEQ ID NO: 411 - DNA, 375 bp, Glycine max
  unsure (1)..(375): unsure at all n locations
taatatccaagcacttttgctntacttgcttgctttgctctttaatttgntttctattttcagtttcatgctccatgtaggtgaattgttctgttttattttctgtggagtttttttctatttacttggtgcatggtttttcagttatgtcaacacttgcattgcttttcagtttcatgcaaccatggcatgatttacattgcaaaattgaaggccgtgctgcatatgatatactcactaattntgagcagcgctggagaaaagccaccaaatggtctgagatgggtcggaaactcaagagagtatctaacttgaacgatgattctttgatcaagatagaacacatttcttggattcttagtctttcgaattact

SEQ ID NO: 412 - DNA, 451 bp, Glycine max
  unsure (1)..(451): unsure at all n locations
ntcccatagaccatctaaaatggtgatattccaatgggagtcttgaaggtagtcctgtaagcccatagggcatcatccaacttcacaaccaatccttccttgaggatgcaacaatattctccagaattttcttcaattctttgttggatacctcggcctggccatttttctgaggatgataaggtgaaactaccttacgtttgacattataatgcccaataccttctacaactatctattgcagaaatgtgaaccctatcactgattatcactctggagaccccgaagcgggagaaaatgtttctcttcaggaatttgatgacaatcttggcatcattctttgaggcaaccacaacttccacccacttggacacttaatcaacaaccaccaagatgtactcattcccataagaggatggtagagggcccacaaaataaataccccaacagt

SEQ ID NO: 413 - DNA, 452 bp, Glycine max
  unsure (1)..(452): unsure at all n locations
tgatgaggtgatattgataaagcanaccgaggggtttgaagctagaggtaaagaggattatgtttgcaaattaaacaaatccttgtatggtttgaaacaatcctctaggcaatggaataagagatttggtgaatttatggctcatataaagtttcatagaagtcaccatgatagctgtgtttacttcaaattttcttctaaagctgagtttgtgatattgctactatgtgttgatgatatcttgatagcaagtaataacaagagtgaagttgaaaaattgaaatgtaggatttgggaacaactaggaggatattgggaatagaaatcaaacaggacagaaaaaggaaattgttatatttgtcttaagagttatatatcagaaaagttcttgaaaggtttggaatgtcaaattccaaacctgtaactactcctatgtcttagcagtttaagct

SEQ ID NO: 414 - DNA, 450 bp, Glycine max
  unsure (1)..(450): unsure at all n locations
tatgctgcanatatttacaatagacctcctcaacctcagcagcaaaatcaaccacagcagagcaattatgacctctccagcaacagatacaatcctggatggaggaatcaccctaacctcagatggtccagccctcagcaacaacaacagcagcctgctccttccttccaaaatgctgctggcccaagcagaccatacattcctccaccaatccagcaacagcaacaaccccagaaacagccaacagttgaggcccctccacaaccttccctcgaagaacttgtgaggcaaatgactatgcagaacatgcagtttcagcaagagaccagagcctccattcagagcttaaccaatcagatgggacaattggctacccaattgaatcaacaacagtcccagaattctgacaagctgccttctcaagctgtccaaaatcccaaaaatgtcagt

SEQ ID NO: 415 - DNA, 418 bp, Glycine max
  unsure (1)..(418): unsure at all n locations
agctnggcatggtttttaatagctntanaagcgttacttttagaagatatgaataaagtccaggtatatctagagtagtcatctacaataaccgaagcataataatttcctctaatacttatgggtctagaagaaccaaaaagatcttaacgtaaaagttcaagcactctcgaggtagaaactgcatttttagatttgaaagatactctatttgttttcccttttgacatgcattacataatccatccttttgaaattttagctttgggagacctttaactaattccttatagactagcttatttagttgatccatgaggatatgagttattctcctatgccaaagccaagagagatcatcattacttcttaaacaagccatgtngaagtgagatgcactttctacattaagcatata

SEQ ID NO: 416 - DNA, 462 bp, Glycine max
actaagcttcttatccaggcacattcttggtggtgaaactccttcttccatggcttattcccttgtggatggagcctcccctctcctcttctcctttgccttccgctgcatctccatggtggaaaatcaccattgaagctcaaagatccagcctccatagaagcttcacatgcaagcttccatcagagttagtgcaactcgatgtcaaaacaacctttctccatggaagattggaggaagacattttgatgcaacaacctgaaggttttgaaatggaagggaagaaaaattatgtatgtaggttgaaaaggtttatatatgggttgaaacaatctccaaggaagtggtaccagagattcgatgagttcattattactcatgggtacaacagaagtgcctatgattcatgtatctattatagtaaggtgggggatggttttcgcatctaggtgctactctatg

SEQ ID NO: 417 - DNA, 457 bp, Glycine max
  unsure (1)..(457): unsure at all n locations
tctgggggacatcttgacttgctttccaatctgacattctccacagattctgccttcttctattntcagattgggaatgcctctaacagcacctttgtcaatgattttcttcatgcctcttaagtgcagatgtccaaatctttgatgccatattctgacttcatcttctttggaggatagacatgtggaggagtaactggtttcttgaggtgtccataggtaacagttgtcctttgatctgctgcccttcattagaacttcactcttctcatttgtcaccaagcattctgactttgtgaagtttacattgaatccttcatcacacagctgactgatgctgatcaagtttgcagtcagtcccttcaccagcagtactttgtccagactaggaagtccatcatggactagctttcccattccagtgatctttcctttagagccatctccaaatgtcaca

SEQ ID NO: 418 - DNA, 466 bp, Glycine max
  unsure (1)..(466): unsure at all n locations
acggaccttgaaactaagcttgaatcgatacacaaggcttgtaatcaattaccagatgttttaaacattttataacaaccttctgaaatttgaatttaaattttaaagacctgtaatcgattacaacttgtgtgtaatcgattaccagacatgaaaattcaaatttcaaatctaaagagttacaactcttcagaatctaactgtgtaatcaattacaatagttatgtaatcgattaccagtaaggaatttttgaaaataactcccaagagtcacaattattcaaaacgttntttggatggtcatcaaaggcctataaataggtgacttgnggtacaaaattccttagatttttcctgaacaaattttcttatcctctcaataccaaattgtcttataagtctaaaaaaagaattctttggccaaaacacttgcaaattcagtaaggaatcttgagtgatgttcaat

SEQ ID NO: 419 - DNA, 443 bp, Glycine max
  unsure (1)..(443): unsure at all n locations
tcctcttatgagtgcatagctctttcanaaatttagcatatcttggaatttgctttattgcatccagtagaggtatgtttacctctactcttctaaatgtttccaagatctccttctccgcctcttccattttcttgttggaaattgctcttggtgggaatggaagagggatatgctactactgtaagtcagaattaccagtagaagattcacctgcatagaaattgttaggcaacttactctttaaatttttgtcatcatctttttctggagttgagtgacgttgggcaggttcatttgcagatgaggaagatgctactagttgaggtccttgatactgttttcccaacctcaatgtaattgcactcacattcttgggattctgtacagattgagaaggtaatctgtcagaattctgggactggttttgatttaactatgta

SEQ ID NO: 420 - DNA, 443 bp, Glycine max
  unsure (1)..(443): unsure at all n locations
ntgcagcagatgccactctactctaaattntttaaagatatgttaacaaggaagaacaaatacattcatcaggaaaacatcagagtggaaggaaattgcagtgctgtgatccagaagatccttccacccaagcataaagatcctaggagtgtaacgattccttgttcaattggagaagtcaatgtgggaaaagctcttattgacctgcgagccagtatcaatttgatgccattctccatgtgcggaagattgggagagttggaaataatgcccactcgaatgactntacaattagctgaccgctccattaccaggccatatagagtaattgaagatgttntggtcagagtaaaacattttaacttcccggcagactttgtggtaatggatatctctgaagatactgacacccctgtattattgggaaggctattcatgttgac

SEQ ID NO: 421 - DNA, 180 bp, Glycine max
aatgaagtgaaatccaacatctatatgcttggttctatcatgatgaacctgatccctggccatgtatataacactaaggctatcacagtagatattaacatactcttgattaataccgagatcatttatcagacctcttagccaaattccttcctttggcagcttcagtaagagtcatat

SEQ ID NO: 422 - DNA, 469 bp, Glycine max
  unsure (1)..(469): unsure at all n locations
tactcagctttgcaagctggaatcatttatcctatcttcgacagccaatgtgtgagtcccgtctaggtattcccgaagaaaatctgcctcaccgtgataaaaaatgagaaggatgagctgattcctactcgagtgcagaacagttggagagtatgcattgactataggaggctgaaccaggttaccaaaaaggaccatttttcactgccattcattgaccagatgcttgaacgcctggcaagtaaatctcactactgtttccttgatggtttttctggttatatgaaaatcactattgctcctgaggatcaggaaaagaccacattcacctaccccttggacactttagcttataggaggatgcctttcggcctgtgcaatgcccctggtaccttccagcggagcatgattagtatttttagtgattntttagaannatgcatagaggtgtttatggatgatttcactg

SEQ ID NO: 423 - DNA, 424 bp, Glycine max
  unsure (1)..(424): unsure at all n locations
agcttcaaccctttcccaaaactcggcaaggtacgcgaaatgttattcccactcagatccaacaatgtcaaagatttcaaactagtccaattactcggtatcgtaccactaatatcattacctcccaaccttatctcaacaagagaatctaacttggcaacagaaggactcaaagtcccactaagattaaacttttccaaaataatcatgtccacctttccgtccccattgcaccttatccccaaccatggcccgtgacaagggtcatttccactccaagaatcaaccaaaatccaaggataccccaaccctccaagaaactccaacaacaccatcacttcaaaagcacacataaccccggcctttgcctcacaaaattcattgttctcataactcactttactcgctgcanattccgggatcg

SEQ ID NO: 424 - DNA, 311 bp, Glycine max
tgatagcagcgtaatggagaaggagaagggtgattggagatgccacttcaaggagaagatgagtctagaagaagctcaccaccataggaagccatggataagagcttgaaggtaagaaaagatgaatggagggagagggagaaagggagcatgaaatttaatgcctctaaagaagtttgaactttgaaagttaattctcaaatgatcaaagttgaaaaaatgcacacacatagcctctatttatagcctaagtgtcacacaaaattggagggaaatttgaatttctattcaaatcttactagaaatttgaa

SEQ ID NO: 425 - DNA, 322 bp, Glycine max
gcaaaccaatagcagcagaataattatgaccttttaagaaacagatacaatccaggttggaggaatcatccaaatccgagatggacaagtccttcacaacaacaacagcctatccctcctttccagaatggtgctggtccaagcaagccatatgttcctcctccaatgcagcaacagcaacaacaacaaagacaacaagcaactgaggcccctcctcaacctttcttagaagagttagtgaggcaaatgaccatccagaatatgcaattttagcaagagacaaaagcctccattcagagtctaacaaatcagatggggctga

SEQ ID NO: 426 - DNA, 436 bp, Glycine max
  unsure (1)..(436): unsure at all n locations
tccattggtgtcttgaaacctaaggctgatgaaggacatctattaatcaaatatgttgttgtgtttgcagcttctccccaaaaagcctttggcagtcctgcacttagaagcatgcaccttactctttccaaaatggtcctgttcattctttctgccaaaccattctgttgtggagtgtgagggactgttttgtgccttttgatgcctattttcctgcaaaactcattgaactgctctgaaacaaactccaggccattgtcagttcttaaaacttttaattttgtaccaagttgatttccaacaagagtatgtcattctctgaatttttgaaaagcttccgacttatttttcanaacatacagccatactcttcttgagaaatcatctatgatggtgagaaagtatgagcttccaccatgagttttcactctagatg

SEQ ID NO: 427 - DNA, 416 bp, Glycine max
  unsure (1)..(416): unsure at all n locations
agcttcatgcttaactatgtatggcaaaacttcattactggtggtcaagacatacaagtgagcttgtaacaaatcttctacacttggagtgatcacatgcagtcctcttgaacccttaccacccactctgtcatcatgtcgagactcaagaagcccaacaggtttaaccttctctaagtattctgaacaaaaatcaatggcttcttctacaatgtacctctcaacaatagatgcttctggacgatatagattctntgtatacccttttaagatctttatgtatcgctcaaccgggtacatccaccgtagataaacaggaccacaacattngatttctctaaccagatgcacaatcaagtgaatcatgatngtcaagaaaganggggaaaatacatctncactggcacagtataatt

SEQ ID NO: 428 - DNA, 459 bp, Glycine max
actaagctatgctgctacatttatataaacctccacagcagcatatcctttatcagataaataattatgacctttcaagcaacagatacaatccatgttgaaggaatcatccaaatctgagatggacaagtcctccacaacaacaacagcctgtccctcctttctagaatgttgctggtccaagcaagccatatgttcctccttcaatgcagcaatatcaacagcatcaacaaagacaacaagcagttgaggctcctcctcaaccttccttagaagagttagtgaggcaaataaccatccagaatatgcaatttcagcaagagataagagcctccattcagagtctgacaaataagatggggcagatggctactcagatgaaccaagcccagtcccaacattctaacaaatagtcttcacaaactgtgcagaatctgaaaaatgtgagtgccatcacct

SEQ ID NO: 429 - DNA, 333 bp, Glycine max
  unsure (1)..(333): unsure at all n locations
aagatatgggcctgcctatctgatcttctatgctttaataggtggaaagaagaattgagttcaagaggaacctcactcttatgatgaggtcataagcaacaaggacaattcaaaatggattgaagctatggaagaagaaatgtcttttctaaaaaagaattgtcctaaagggcagtaaattgttggatgcagatggctattcaagaggaaagaaggttttgaaggagttcaaagtgtaaggttcaaagctaggctagtagcctgtgggtttactcaaaaggaaggagtagattntgtagaaatcttctcacctatggtaaaacatagttcaat

SEQ ID NO: 430 - DNA, 339 bp, Glycine max
gcccatagggcatcatccaacttcacaaccaatccttccttgaggatgcaacaatattctccagaattttcttcaattctttggtggatacctcggcctggccatttttctgaggatgataaggtgaaactaccttacgtttgacattataatgcccaataccttctacaactatctattgcagaaatgtgaaccctatcactgattatcactctggagaccccgaagcgggagaaaatgtttctcttcaggaatttgatgacaatcttggcatcattctttgaggcaaccacaacttccacccacttggacacttaatcaacaaccaccaagatgtac

SEQ ID NO: 431 - DNA, 412 bp, Glycine max
  unsure (1)..(412): unsure at all n locations
tcactgaattgctggtcttattgaagaacatgcttctctgatcaaaacacttttccgaanaatcactacgaggccaaaaagattttgtgtccagtgggaatggagtacaagaagatccatgcatgccctaatgattgcatattgtatagaaatgagtatgcagaactacggcaatgccccacgtgtggggtatcatgatacaaagtgcaacatgatgaattaactgatgatgcaggaaccaaaaattgtcgtcctgccaaggtgtgttggtatcttccaataataccaaggtttaagcgattgtttgctaatacacatgatgcaaaaaacctttcatggcattcggatgaccgaaaatctgatggattactgtgacatcctgccgattcgccgcagtggaagacaattgatc

SEQ ID NO: 432 - DNA, 455 bp, Glycine max
  unsure (1)..(455): unsure at all n locations
ngtctctacagaagaaagaaacaaaaataagagtagattcattgtagataattctttgcagtgatcaagaataattatgaaccaaccaatcaatcaacaagcataaattgaaaattggtcccacattctaaaaatggtcatctcagtgcttcaaaaaaatttctcaaaagaaatagaaagtacaaaatcatacataaaagcttagaagcaaagtttgagggttttatcttacttttgatatcctgtgtccacacctttgctggggatgaaccaatttcttcatctcccagagtgttattccaattggcactttctttcttcaaatgaccaagctcgctcaacaaatattcaacattgatgtaatggcattccctccgagtcttccagaaaaggagttccacaaacaagagggggtgctttttcattntctttagcatctttctgaccaaacaagt

SEQ ID NO: 433 - DNA, 378 bp, Glycine max
  unsure (1)..(378): unsure at all n locations
agctntaaaggaaatctatattngnctcttgtcctatnttccttgcaatggaattttgttggattgctgctcactcctttgagtattttgcaattggtatctctatttagatattttctgagagaagaggtcaatggaaggcagcagctcaatcccaggaatttattcgaacactacagcgttattataacaacacatatttagatggtgataagcaaaaagcaattaacttgtaagtcaaataagccaattttttatttgtatttacaactgttttcatatgtaatatggtttacagcaaacacaagttatgtatatatgtgattgcattataatgatttactaattggtgggtctgattttgtttggttcacactc

SEQ ID NO: 434 - DNA, 420 bp, Glycine max
  unsure (1)..(420): unsure at all n locations
agctntgaccaaaccccagtagcagttgttttcttagagacttgcctcagcaccttgtctctgagattaaggataattgcattgtgttccttctgcaatagtgctttcttatccccatcagccatcatcttttcgagtttggcttctccatcaagtgcttccaccaggccctgctgaacaagaaaagctctcatcttcaatcgccataacccanaatcattttgccctgtgaatttttcaacctcatacttggccgagcccatttcttgaatcgaactcaaaatcgatccacactcaccgcaccaatttgttgtgccaagatcagattttacttcacaaaagaatgagtttcttgtatgaacaagaataagcaaaatgcagaaaaatgaaccataaactgcacagaactcacaacagtca

SEQ ID NO: 435 - DNA, 397 bp, Glycine max
  unsure (1)..(397): unsure at all n locations
gaagctctaatatcttccacactttttggtgtgggccattcttggatggccttgattttctcagggtccacttggaccccatttctaccaactaccaaacctaaaaaaactatattatctacacaaaaggtacacttctctatatttgcataaaaggtgtttttcctaaggactgaaagaacttgtctgagatggtctaagtgatcatctagcctcctactatacactaaaatatcatcaaaataaacaactacaaatctacctatgaaatcccttaagacatgatgcataagcctcataaaggtgcttggtgcattagtgagcccaaaaggcatcactagccattcatacaaaccaaacttggtcttgaaagcagntttccactcatcaccctttt

SEQ ID NO: 436 - DNA, 394 bp, Glycine max
ttaattgggcaccttaaaattggaggcttaaggttggaatccaaggagaagatgatgagaggactaccctttattaacccccgtgaataactttgggaaggatggttacttggaaagcaatttaaaatgaggttttccaaggaagcaaacttatgagctaagaagccacccgagctaatacatgctgacatctgggggccaatcaagccaagctcactaggtaaaaataactatttccttcttttcattgatgatttttcaagaaaaacatgggtttatttcttaaagcaaaaattaaaagtcttttcttgcttcaagaagttcaaagctgcagtggagaaagaaaatgatcaagatatcaaagccatgaggactgatcgaggaggataattca

SEQ ID NO: 437 - DNA, 446 bp, Glycine max
  unsure (1)..(446): unsure at all n locations
tagtanagctaagcactaacaatctctctctttggcaaattntgtctaaaacatacttagacacttcctgagcaggtacgagcagttatgcaagtgggatcagcaactttcattatcagagtaatcaagcacagcggtatctgtagtggcgacagcaaaattctgcaagttgcaagtcgtttcccggatgtcaagacatctcacgtgacatcagctttctgctccccctgtctccatgctcttactgctgtgaagcagttcactgcagcatcttctatcagctactagtcttttccaggatgtcaagacatctcatgtgacatcagctttttgctccccctgtctccatgctcgtactgcatcttctatcagctactagtttcagtagcttacatcaatcatcatcagcagcagcagtctgcccctagaatcatatacatacaact

SEQ ID NO: 438 - DNA, 397 bp, Glycine max
tccttgagaagattccttgagaagattcctaaagaagctagagcttagctacatacacctctctaataggaaagctcaccttcttgagatgagaagctagagcttagctacaccccctataatagctaagctcacccctatcccaaaaatacatgaaaatacaaaaaaaaagtccctactacaaagactactcaaaatgccctgaaatacaaggctaaaactctatactactagaatggccaaaatacaaggcccgaaagaaggaaaaacctattctaatatgtacaaagataagcaggctcatacttagctcatgggctcgaaatctatcctaaggctaatgagaaccctagggccttcccttggatctctggcccaatctacttggagtcttcta

SEQ ID NO: 439 - DNA, 421 bp, Glycine max
  unsure (1)..(421): unsure at all n locations
ntgatattggtaagtaaatgcctcanaacttctattatatttcctgtttctgaagtacgttntttctcactaacatctctttttataacattaatctctttaatcctctcatttgtactaattactttatcttacatttttcttccttttcttctcatctccttttctattaaaaaagttgcccgattttgttatataaatgcaatttctcttttcattntaccaaactctatataaagatattttatttgtttcaccaggacatatttgctgctggaactgatacttcagcatcaacactagagtgggctatggcagaaatgatgagaaatccaagagtgagggagaaagcacaagctgaattgagacaagctcttcgagaaaaggaaataattcatgaaagtgatctagagcaacttac

SEQ ID NO: 440 - DNA, 437 bp, Glycine max
  unsure (1)..(437): unsure at all n locations
tcaacatcagaccacttccagggtgctggatctacttcacatggacttgatggggcctatgcaagttgaaagccttggaggaaaaaggtatgcctatgttgttgtggatgatttctccagatttacctgngtcaactttatcagagagaaatcggacacctttgaagtattcaaggagttgagtctaagacttcaaagagaaaaagactgtgtcatcaagagaatcangagtgaccatggcagagagtttgaaaactgcaagtttactgaattctgcacatctgaaggcatcactcatgagttctctgcagccattacaccacaacaaaatggcatagttgaaaggaaaaacaggactttgcaagaagctgctatggtcatgcttcatgccaaagaactttcctatgatctctgggctgaagccatgaacacagcat

SEQ ID NO: 441 - DNA, 371 bp, Glycine max
gctggaatcatttatcctatctccgaccgccgatgtgtgagtcccattctttagtcttgaagaataccggcctcgtagtgatgaacaatgagacggaggagctgattcctactctggtgcagaacagttggagagtctgcatcgactataggaagctgtaccacgttaccacaaaggaccatcttcccctatcattcattgaccacatgcttgaacgcctggcaggaaaatctcactactgtttccttgatggatgttctggtcatatgcagattactattgctactgaggatcacgataaaaccacattcacctgccccttcagtacttttgcctatatgaagatgcctttccgactgcgcaaaggccct

SEQ ID NO: 442 - DNA, 459 bp, Glycine max
  unsure (1)..(459): unsure at all n locations
ctcgtacccggtatcctcagagtcacctgctgcatgcatgcttctgcattcaatttcgagcatctcaatatattacgggacttaatcggacatccgagttaaaagttattgttgtttgcatttgctacgagcttccgttttcaattacgagcgtctcgatatattacgggactcaatccaacctccgagttaaaagttattgtcatttgaatttgctacgagcttccgttntcaatttctagtgtattgatatattacgggacttgatcgaacattcgagttaaaagttattgtcatttgcatttactcacagctttcgttttcaatgacgagtgtttcgatatattacgggactcatccgagttgaaagttagtgtcatttgaatttgccacgagcttctgttttcaattntaagtttcttgatatatttcgggactcaatcggacatccgagttaaa

SEQ ID NO: 443 - DNA, 454 bp, Glycine max
  unsure (1)..(454): unsure at all n locations
tganattgaacaacggaagctctcgagaaattcaaatgatcataacttttcaaacgaaagtccgattcaggtgcataatatatcgggaagcttgaaattgaacaacggaagctcttgagaaattcaaatggtcataacttatcacacaaaagtccgattcaggcgcataatatatctagacactcgaaattgaacaacggaagctctcgagaaattcaaatggttataacttatcacaccgaagtccgattcaggcgcataatatatcgagacgctcgaaattgaacaacggaagctctcgagaaattcaaatggtcataacttatcacacggaggtccgattccggcgcatagtatatcgagacgctcataattgaacaacgaaagctctcgagaaattcaaatgctcataacttatcccacggaaggtcgattcatgcgcatgatatatcta

SEQ ID NO: 444 - DNA, 405 bp, Glycine max
agcttggaaatgaacaacagaagctcacgagatactacaatggtcataacatgtcacacgaaagtccgattcaggtgcataatatatcgagacgctcgaaatagaacatcggaagctctcgagaaattccaatggtcataacttttcacacggaagtcctattcaggcgcataatatatcgagaagctggaaattgaacaacgaaagctctcgagagactcaaatggtcataacttgtcacacggacgtccgattcaggcgcataatatatcgagacgctcgaaattgaacaacgtatggtgtcgagatattcaaatggtcataacttgtcacacggaagttcgattcaggcgcataatatatcgagacgcttgaaatgaacaacggaagccttgagaaactcaa

SEQ ID NO: 445 - DNA, 430 bp, Glycine max
ctacaatggattaggtatcccatttcaacaaaaaagatttacttaacagattaaattctgcaaaaatattttccaagtttgacatgaaatccggatttttgcaaatccaaatacaagaatcggataggtacaaattgcttttacaataccttttgggcaatatgagtggaatgttatgccattcagtctgaagaacgccccttcaacttttcagaaaattatgaatgatattttcaatccttattataatttatcattgtctacatgtggaagcaatgccttccaagattattttgatgatgccaaagaatcaagagtcatacaagtttcaagaatcaagatcaagattcaagattcaagattcaagaataatcatgatcaagattcaagattcaaataaagaatcaaaactcaagattcaagaatcaag

SEQ ID NO: 446 - DNA, 410 bp, Glycine max
  unsure (1)..(410): unsure at all n locations
gtctcacgattgaacatgctcatgcaacaattgttagtcgtggctatacgagacatcttgccaaacaaagttaggttagcgataactcgcctgtgattnttcttccatgctatatgtagcaaagtcattgatccagtcaagtttgatgagttggaaaatgaggccgcaattatactgtgccagttggagatgtattttccccccgctttctttaacatcatgattcacttgattgtgcatctggtcagagaaatcaaatactgtggtcctgtttatctacggtggatgtacccggttgagcgatacatgaagatcttaaaagggtatacaaagaatctatatcatccagaagcatttattgttgagaggtacattgttgaagaagccattgaattttgttcagaatactt

SEQ ID NO: 447 - DNA, 435 bp, Glycine max
  unsure (1)..(435): unsure at all n locations
ntgatggtgttgagaagaaatcacatgtttgtcatcatcattaaggggaagaatgtgaatgtatgtatacatgattttgatgatgtcaaaagaagaatcaaacaaggctcgcttcaagattaatacaagattgtttcaacaaacaaagccttgattcaagatttcttcaagatcaagccttgcctcacaatgaaaggtttcaagtcattcaaggcacatgtaatcgattaccaatggcttgaaagtgtgtaatcgattacacatcatatgtaatcgattaccagagactctgaacgttgggaattcaaattttaaatgaagggtcacaactgttcaagagaaacaactgtgtaatcgattacactaattctgtaatcgattactagagaggattttcaagagatatcgccaacagtcacatcttatcatttggat

SEQ ID NO: 448 - DNA, 347 bp, Glycine max
  unsure (1)..(347): unsure at all n locations
agcttacccctcattgtaccaacaagtgtccttatgaggttctctttggctccaaacccgattgccataatctntgtgtttttgggagtctatgttatccatggctacgcccttactcaaataaaagcatgccatgtgtgtttctaggtccctctccccaacaccatgcatacgaatgctatcatattctaactcaaaaaatatacctctctagacatgttgtctttcatgaatcaatcttcccctcactacgcctcatttggtccctaccttcccaacctcaaaccatgatatgaccttacttatctcttgccatcctctcatactacaacaactccatacaaaca

SEQ ID NO: 449 - DNA, 412 bp, Glycine max
tctattctgaatttcaagcgtctcgatatactatgggactttatcgaacatccgagtaaaaagttattatcgttggaatttgctaagaacatccgttttcaattacgagcgtctcgatatactacgggacataatcggatatctgagtaaaaagttattgtcgtttcaattttctaagagcatctatttcaattttgagtgtctcgatatattacgggaatcaatcggcatctgagttaaaagttattgtcatttgaatttgctacgagcatatgttctcagttacgagcgtctcgatataccacgggacacaatcaaagatccgagtaaaaagttattgtcgtttgaatttgcacagagcttctgttttcagtttcgagcatctcgatatattacaggactcaatcggaca

SEQ ID NO: 450 - DNA, 403 bp, Glycine max
  unsure (1)..(403): unsure at all n locations
ncaagcttgagcaaattcaaacgacaataacntttcactcggatgtctgattgagtcccgtaatatatcgagactctcaaaatggaatttcgaagctctgagcaaattcaaacgacaataactttttactcgtatgtctgattgagtcctgcattatatcgagaccctcgaaattgaataccgaagctctgatccaattcaaacgacaataactttttactcggatgtctgattgagtcccgtaatatatcgagaacgctcgaattgaatattgaagctctgaacaaattcaaattacaataactttttcctcggatgtctgattcagtctcgtaatatatcgagacgcttggactagattgccgaagctttgagcaaattcaaacgacaatatacttttact

SEQ ID NO: 451 - DNA, 447 bp, Glycine max
  unsure (1)..(447): unsure at all n locations
ntgaatgcactattcaatggagttgacaagaacatcttctgtctgatcaacacttgcacagtggctttagatgcatgggagatcctgaaaatcactcatgaaggaacctgcaaagtgaagatgtccagattgcaactcttggctacaaaattcgaatatctgaagatgaaggatgaagagtgtattcatgacttccacatgaacattcttgaaattgccaatgcttgcactgccttgggagagaggataacagatgaaaagctggtgagaaagatcctcagatccttgcctaagagatttgacatgacagtcactgcaatagaggaggcccaagacatttgcaacatgagagttgatgaactcattggttctcttcaaacctttgagctaagactctcngatagggctgaaaagaagagcaagaatctagctttcgtgtccaatgat

SEQ ID NO: 452 - DNA, 377 bp, Glycine max
tgcttgaatgcactattcaatggagttgacaagaacatcttcttattgatcaacacttgtttagtggccattgatgcatgggagatcctgaaaatcactcatgaaggaacctccaaagcgatgatgttcacattgcaactcttggctacaaaattcgaatatctgaacatgaaggaggaagagtgtattcatgacttccacatgaacattctatgaaattgccaatgcttgcactgccttgggagagaggataacagatgaaaagctggtgagaaagatcctcagatacttgcctaagagatctgacatgaaagacactgctatatatgaggcccaagacatttgcaacatgagagttatgaactcattggttctct

SEQ ID NO: 453 - DNA, 410 bp, Glycine max
  unsure (1)..(410): unsure at all n locations
catcacatgccattgcttcgttgatgaggttgctgtgatcgagatttgcggcattatagcgccacacgtcttcaccgtgagcctttgcaaatgaggggttgccattggccatgacgcgagcactcagactgtgccaaggtgccagcattacaggactactctccagcaagagaaaactagccatgctgtgttcgccgtttctcatcaatcgacgagacagagctgattgagaatagcccctgctgcacccgtcgcctttgaatatctttctttgcaccaagaacctcatgatgcgcttcagatgtgaagtatcacaccctaaacttgatgatatctccgatagtgtcatgggacttccatgcttctctatggcttcagctatgccaagctcaatcgcacattntatcact

SEQ ID NO: 454 - DNA, 397 bp, Glycine max
agcttcaagattaagatggcctcagcaaattccttatttccggaagggaattctatcaatagacctccaatctttaatggagagggttaccactactggaaaacccgaatgcaaatttttatcgaggcaatagatctaaatatctgggaagccatagaaatagggccttatatacccaccacagtagaaagagtttcaatagatgatagttcatcaagtgaaagcataaccatagaaaaacctaaagatagatggtctgaagaggatagaaaaagagtacaatacaacttaaaagccaaaaacataataacatctgccctaggaatggatgaatatttcacggtttcaaattgtaagagtgctaaggaaatgtgggacactcttcgattaacacatg

SEQ ID NO: 455 - DNA, 340 bp, Glycine max
agcttcttagtttcagatgatactgctgagtttgtagctacctcatgcactcctctaatgactatagcatcatttatggcgctaaactgctgggagttggaagccatcttctcaattaaatttctggcttcagcaggagtcatgtctccaagggctccaccactggcagcatctatcatacttctctccatattactgagtccttcataaaaatattgaagaagaagctgctccgaaatctgatggtgggggcaactggcacatagttttttaaatcgctcccagtactcatacaggctctctccactgagttgtctaatacctgagatatctttcctga

SEQ ID NO: 456 - DNA, 386 bp, Glycine max
gcttgagaaatatactaccccatgaagtttatcaattagttcatcaacagcgggaataggaaagttatctttgattgtgatggcattcaaggccctgtaatctgtgccaaatctccaagggccatccttctttttgacaagaatgattggaggtgaaaaatggcttctgctaggggcaataatcccttccttgagcatgtcagctatcattaattacttcaatctgatccttccggctgtgaggatacctatatggcttgacttttactggtccagcaccttcaaccaatgggattgaatgaatgtgagttcttctagggggtaatcctgatggcaccatcaagactgttctataagtgtaaagtaaacagttccgcaatggcatg

SEQ ID NO: 457 - DNA, 247 bp, Glycine max
  unsure (1)..(247): unsure at all n locations
tatcacctttaccagcgattgaaaaaaactnttagcgaatgtcaagaacatgaaagtgcaccgatactattaattggtcagcagattcttaagcgggttgaggacattaatacgatatttcgaaagacccaaaagaaaaaagtaaaacttgcatatggaataagaggtcgatattctatgatcttccatattggtctaatctagatgtcacacactgtattgatgttatgcatgtggagaaaaatgt

SEQ ID NO: 458 - DNA, 420 bp, Glycine max
  unsure (1)..(420): unsure at all n locations
agcttgaaggactacgttacacggatgaaggatggtcagaaggacatttactacatcacaggagagagcangaaggcagtggagaactctcccttcttggagagactcaagaagaagggctatgaagttcttttcatggtggatgcaattgatgagtatgctgttggacaactcaaggagtacgatggcaagaaattggtttcagctacaaaggaagggttgaagctagatgatgagactgaggaagagaaaaagaagagagaggagaagaagaagtcatttgatgaactctgcaaggtcatcaaggacattctgggagacaaagtggagaaggttgttgtctctgacagaattggtgattccccttgctgtttggcgactggtgaatatggatggagcgcacacatggagaggatcatg

SEQ ID NO: 459 - DNA, 407 bp, Glycine max
  unsure (1)..(407): unsure at all n locations
gaaatgacaataactntatacacggatgttctgttgagtcccgtttatatcgagacgctcaaaatttagatccgaagctctgaaaaaattgaattgacaataactttatacatggatgtccggctgagtcctgtaatatatcgagacgctgcaaattgaaaacggaagctcgtaggaaattcaaacgacaataactttttactcggatgttcgattgaatcgggtaatatatcgagacgctcaaaattgagactagaagctctgagcaaatttaaataacaataactttgtacacggatgtccggctgagtcccgtaatatatcgagaggctccacattgagaacggagactcttagaaaattcaaacgacactatacttttactcggatgcccgacagagtgtcgt

SEQ ID NO: 460 - DNA, 386 bp, Glycine max
tgaaggtttgtacatgaccaaatctttagttaatcttctttacctaaagcagtctttgtattcatttaaaatgcatgaagatagatcagtaggagaacaattggatttgtttaataagttgattctagatcttgaaaatatcaatgtcaccattgatgatgaggatcaagctttgctattgttgtgctctttgcctaagagttactctcatttcaaagagactctactgtttggaagagacttcatttctcttgatgaagtgcaagctactctgaattcaaagcaattgaatgaaagaaaggaaaagaagtcctctacaagtggtgaagggctgacagcaagaggcaagaccttcaagaaagatattatatctgataagaagaagc

SEQ ID NO: 461 - DNA, 401 bp, Glycine max
cttgagcaaattgaaatgacaataactttatacacggatgttcggttgagtcccgtaatacatcgagacgctccaaattgaaaacggaaactcttataaaattcaaacaacaataactttttactcggatgcccgacagattgtcgtaatttatcgagagatgctccaaattgaaaacagaagctcgtatcaaattcaaacgacaataactttttactagtatgtctgattgagtcccgtaatatatcgagacgctcaaaattatgatccgaagttctgagaaaattgaattgacaataactttatacatggatgaccggttgagtccctgtatatattgagacgctcgcaactgataatggaagctcgtatgaaatgtaaacgacaataactttttactt

SEQ ID NO: 462 - DNA, 341 bp, Glycine max
  unsure (1)..(341): unsure at all n locations
agcttgtagtttattcaaacgacaataactttatacaaggatgtccgattgagtgccgtaatatatcgagacgctccanattgaaaatggaaactcgtagcaaattcgaacgacaataactttttactcggatgtccgattgagccccgtaatatatcgacatggtccaaattgaaaacggaagctcgtacaaaattcaaacgactataacttttcactcagatgtccgattgagtcccgtaatatatcgagatgctccaaattgagaacgggagctcatagcaaattcaaacgaccataactttttacttggatgtccgatggagtcccgtaatatatcg

SEQ ID NO: 463 - DNA, 426 bp, Glycine max
  unsure (1)..(426): unsure at all n locations
tcntatttaaatttcgaacgtcttgatatattacgggactctataagacatccgagttaaaagttaatgtcctttgaattttctcggagcttttgttttcaatttggagtgtctcgatatattacgggactcaatcggacatccgagtaaaatgttattgtcgtttgaatttgctcagagtttcttttttaaatttcgagcgtctcgatatattatgggactcaattggacatcggagtaaaaagttattgtcgtttgaatttgctcagagcttctgttttaaatttcgagcgtctcgatatataacgagactcaataagacatccgaggaaaaagttaatgtcatttgaatttcttcgaagcttctgttttcaattttgagcgtctcgatattttacaggactcaatcggacatccgagtaaaat

SEQ ID NO: 464 - DNA, 456 bp, Glycine max
gcttatcccctaatgcacctattccattcctcccatggtcatcatcaccataaacagcaataacctctctccagccaaagtagttaacaaagtctgctattgcagtcatttcataaatgtcactaaaagcagttctaataaagaatgggaattgaagtgaagaaagagtagggtcagtggctgtaaatgatagtagaggaacttggagctcgttcgctatatgagatatgacatgagctgttgtagacgtctggggaccgattatagccacagtttgtgttgccatgagctgcaaggctattacacacaatttatgtaaaccaagagtaataatctgccaaactttgaagtaacttgtctaatagaaaaaaagatgcttttaaagttttaacacataaaaaagatgggaatattgtgaaggacgtaccctcggcaatgctcagaaaacctctgtat

SEQ ID NO: 465 - DNA, 449 bp, Glycine max
  unsure (1)..(449): unsure at all n locations
tctgcaagctggaaccatttatcctatctccgacagccaatgggtgagtcccgtctctgtagtcccgaagaaaaccggcctcaccgtgataaaaaatgagaaggaggagttgattcctactcgggggcagaacagttggagagtctgcatcgactataggaggctgaaccaggttaccaaaaaggaccattttcccctaccattcattgaccaaatgctcgaatgcctggcaggtaaatctcactactgtttccttgatggtttttctggttatatgcaaatcactattgctcctgaggatctggaaaagaccacattcacctgccccttcggcacttttgcctataggaggatgcctttcggcctgtggaatgcccctggtaccttccagcggtgcatgatcaatatttttagtgattttttacaanattgcatagaggtgtttatgg

SEQ ID NO: 466 - DNA, 413 bp, Glycine max
  unsure (1)..(413): unsure at all n locations
tgacatgctattgaacaagcagttatatactctgcttcacttgtagagagtgcaacaacatcctgtttcttagagcaccaggagatgggagcacctccaaacaataaaacatgccccattatgctttttctgtcaagaacatctccaccacagtctgagtctgaataagccacaagttgtggctcaaccttctctttctaatgtggaaatagaacaccaaagtctagtgtgctctcaagtatctcagtatccttttagctaccatcatatgtgaatgtcttggatcactcataaacctactgataactcccacattgaaagtgatttctggtctggaatgacaaatgaatctgagactcccaacaatntgcctatacaaggtacaatccactacaggttcagctttacattta

SEQ ID NO: 467 - DNA, 330 bp, Glycine max
  unsure (1)..(330): unsure at all n locations
agccaaaaactttaacaatgaccanagcaagacatctacattcaacttcagtacttgagtgtgcaacaacaaattgcttcttagaccactaacagatgagattggggctgaagaagacacaagcgtcgaaggtggaccatctgtaatctgggtcagacgcctagtcagcatcacagaaagtcacaatagaaaaaaggtgcagaagcaagcttgaaatgcgagccccacgagatggttcccttgagataccgcggtatccccttatggtatcatagtgtaacgccctgaaatttcgctaactggaaatcgattttaatgtatttctcatct

SEQ ID NO: 468 - DNA, 357 bp, Glycine max
ctttagctatgtgtgctgatgttggctacacagatagagcatctgaaattttttatgaaatgaaaagttctgggacttgccagcctgacagttggacattttcatccatgattaccatgtattcccgcagtggtaaagtttcagaggcagaagggatgttgaatgaaatgatccaatctggatttcaacctactatttttgttatgacatcactcatctgctgctatggaaaagcaaagcgaactgatgatgttgtgaagatatttaaacagctcctggatgtgggcattgttccaaatgatcacttctgctgttctcttctaaatgttctgactcaaacaccaaaagaagagcttg

SEQ ID NO: 469 - DNA, 445 bp, Glycine max
tgaaggtaaactagatgccttggttaacctggtaacccaactggccatgaatcaaatatctgcacctgtcaccagactctgtggtttatgctcctctgccgaccaccacacagacctttgtccttctgtgcaacaatctgaagcaattgaacagcctgaagcttatgctgcaaacatctacaatagacctcctcaacctcaacaggaaaatcagtcacaacagaacaattatgacctctccagcaacaggtacaatcccgggtggaggaatgatcccaaccttagatggttgaatccttcacaacaacagcaacaacaaccttattttcagaatgctgctagcccaagcagaccatatgttcctccaccaatccagcatcaacaacaataacaacaacaaccccagaaacagcaaacaattgaggctcttccgcaatcttccctt

SEQ ID NO: 470 - DNA, 400 bp, Glycine max
  unsure (1)..(400): unsure at all n locations
catgcaagctntntcacagtcaactgtgaagaccatgcaaggattgcttctggatntagcttcagctataacctcattagcaatcaacacaccatgaagaatatgccttcctttcagaacagcagtttgcctttcatcaatgaggtgagggaaaacaagagccagcctattagccagaattttggacactattntataaacacaccctataagagagatgggtctataatcattaagagattgagggttaatgatcttggggataagggctatgaaggaagcattgcttcctttggggtataagccattgatgaagaactcatccaagaaccgaataaagtcaggttttagaatctcccanaacttcttgataaaattaaagttcaagccatccgagcca

SEQ ID NO: 471 - DNA, 443 bp, Glycine max
tcaagaaaaatggcctcagcaaacttcttatttccagaatgaaattcaatcaatagacctccaatctttaatggagagggttaccactaccggaaaacccaaatgcaaatttttattgaggcaatagacttaaatatttgggaagccatagaaatagggccttatatacccaccacagtagaaagaattgcaatagatggaagcacatcaagtgaaagcataacaatagaaaaacctagagatagatggtctgaagaggatagaagacgagtacaatacaattgaaaagccaaaaacataataacatctgccctgtgaatggatgaatatttcagggtttcaaattgtaatagtgctaaggaaatgtgggacactctacaattaacacatgaaggaactacagatgttaaaagatctatgataaacacattaactcatgaata

SEQ ID NO: 472 - DNA, 362 bp, Glycine max
cctctgagtcacctgctgcatgcatgctaggaccgtgcccaagttgagcctccaatatatccaccgttgggaaatattagactttgagaactttagctactattatatcttggttggtcatattctctagccttgcttccctaccacgacaagggtaaaagcatgcagttgtctaaaccacataccttcatgttcctttttcattatcatcttgacccacataagccaattgattccttgtctttgtggattagagtcccaccaaaaagaattcatcatctgctacaattcatcttcaagagtggaaggaaacatatacacactcatgtaataagtgggtatagatcgagcaacagatttta

SEQ ID NO: 473 - DNA, 430 bp, Glycine max
cgcttggaaaatgatttctatacaaaagttagtcgtataaagcgactaacaaatcttcagtaatatcccgccaaacccagaaaactcctaatctcacacacagacttaagactctcccacttaagtacaacttctatcttagaaggatctatatctatactgccttaggatatcacatgtcctagaaaactaactttatctaaccagaactcacacttggacaacttagcataaagttgtcggttcctaagggtgtgcaacacaatcctcaagtgctcttcatgctcctttctagtctttgagtataccaaaatatcatctatgaaaactaccacagaactatcaagatatgggtgaaagatcctattcatgtaaactataaacacaccaggggcattagtcacaccaatgggcatgacatactcatagt

SEQ ID NO: 474 - DNA, 445 bp, Glycine max
  unsure (1)..(445): unsure at all n locations
agctntntatttttagtagatgaagatgaattcgtggccacctcatggactcctctaagaacaatagcatcatttcttgaactgaattgttgggagttagaagccatcttctcaatcaaattcctagcttcagtaggggtcatatcaccaagagctccaccactggtagcatcaatcatactcctctccatgttgctaagtccctcatagaaatattgaagaaggagttgctcagaaatctggtggtgaaggcagcttgcacacaatttcttgaatctttcctagtactcatacaagctctctccactaagttgcctgatgcctgaaatgtcttttttgatggcagtggtccaagatgaagggaagaatttctccaagaacaccctcttaaggtcatcccagctgaanatggacctgagagcaaggtagtatagccaatcttttg

SEQ ID NO: 475 - DNA, 339 bp, Glycine max
  unsure (1)..(339): unsure at all n locations
agctngcatacattattctccttgcctgcatcttanaaccttctggttgggtcatatagatgtcttcctctaaatccccatgcaagaatgtagttttaacatctaactgctccaagtgaagattctctgcagctactatgctcagaataactctgatggtagtcatctttacaactggagagaagatctctgtgaaatcaattccttgtttctgctgaaaccctttcaccacaagtctcgccttgtatcttcttctaccgtcagattcttcctttagcctatagacccacctattctgtaatgccttctttccttctggcaatttaattaaagaccacg

SEQ ID NO: 476 - DNA, 417 bp, Glycine max
  unsure (1)..(417): unsure at all n locations
gatgtttatgaattaattngacattatgttatatntattgatgatcaacttgatagtaaattaaaaaaatgtgaactcaattggcataagctatacaatagaataaaattatgcactttntacacatcactgactaaataaaaaaaatgttgtaacataaactaatttatcatcactttacatttctcaagaacaaaagtgtttatttacaccttcttttatctaatgaaattcatgtcaaattcattagttaaggaataaaactcattaaataattaataagtgatactacataatttactgaattttacgtgattgtaatttaataataaaaatgttaataatatattaatatatatttatgaaccttnttcattgcccaataaaaataaaaaagttaaataattattgtaatcc

SEQ ID NO: 477 - DNA, 418 bp, Glycine max
  unsure (1)..(418): unsure at all n locations
agcttattggttntgataatatcactagagaaaatacagcattaaaagtaatttanacgtaaaataatcatcaatctttatactatgtctctttcttgtcagatctcattcctggtgattttattcatgttattggggatgctcatatttaccgcaatcacgtgaggcctttgcaggagcagctccataaccagccaaagccttttccagtatgtgtaatgtttagcacttctttaagtttatcttttgactctcttacttngttaccccctaatgtacttcattgcagactttgaagataaatccaaagaagaaagatatagattcttttgtggctgctgatttcaagctcataggctatgatcctcaccagaagaatgatatgaagctgtctgtctaanatctggggattctcact

SEQ ID NO: 478 - DNA, 489 bp, Glycine max
  unsure (1)..(489): unsure at all n locations
tcttcatgtctctcctcgtatctctaacatctaggactcatgtgtttatcatagtaaggtggaagatggttcccacatctatctactactttacacggatgacatgcttatagcatcccaaaatttgttgccaattttgaggatgaagttactactctataatgaatttgatatgaaggacatgggagttgctgaaaagattctgggcaaggagaataagatggatgaagtccagaagatgatcttctgtgtcagaaggaatacattcaaaaattgctaaattgttttgggatggcatccgcaaaaatagtatgtactcccctaataacgtccattcgtttatctatactcaatactactcagtcaaatntagagaaggaatacatgtcgtgtgttccttatgcaagtgttgtagctagtctcatgtatgctacaccanaccanacctaacacaagaagtaatggtgtgagtaagtatattggtattct

SEQ ID NO: 479 - DNA, 389 bp, Glycine max
  unsure (1)..(389): unsure at all n locations
agcttcttagtttcagatgatgcagatgggtttgtagctacctcatgcgctcctctaatgactatggcatcatttctggcgctaaactgctgggagttggaggccatcttctcaattaaatttctggcttcagcaggagtcatgtctccaagggctccaccactggcagcatctatcatacttctctccatattactgagtccttcataaaaatattggagaagaagttgttctgaaatctgatggtggnggcaactggcacatagtttcttaaatctctcccagtactcatacaggctctctccactgagttgtctaatacctgagatatccttcctgatggctgtggtcctggaagcagggaannatntttctaagaatactctctt

SEQ ID NO: 480 - DNA, 504 bp, Glycine max
cgaatcgtttcagttggaaaaaatcccttgtgcatgaagatcaaaggatatgaacacacaaagatacatcaccaaagaaataaaataatgaaagatataaatttaaagcagatatcttttatctacattcacacaaacatctaaacaatattcactatctcaaattttaatttgacaatgaattacatttatcctctatttaataatgtcaaaataacaataaattgatatcttgacagaactataattataataagagtttaaaataattgtacattatcatctactcatcaatcattgttgttatgatttttaaaataatttttatcaaagtcaacaaacttatatcatagatgatgattgaatgataatgtaatcttacattatataatactttttctcttataataacctatagcaaggataaatgcacacattgatccgatgcacagattattaggatcattatatagtatggattcattgggatgatcgatgatgctg

SEQ ID NO: 481 - DNA, 446 bp, Glycine max
  unsure (1)..(446): unsure at all n locations
ntccacttggcttctaactnttcgactcttaacttataacttataagcttttaattaagtttataagctaattgtactaaatataatcttaatagttaatttggtttgataaatttatcttaaatttacattttattttaaaagagtaataacattttaacaccctttttttctctccatctctttcttcttattaaatcatattacctatcttagatatactgtatactnttctttcttctctctcttctttactcgaagtgttccataaaacatgaatctctctntattntttattctntataaaaatgtcattattattaatattcttttctcttatgagtctcaatataacctcttttgtcatttaattaggagtattttatttaacaataattaatataattaaatatgagagacattcgccacttttaattttatcttat

SEQ ID NO: 482 - DNA, 499 bp, Glycine max
  unsure (1)..(499): unsure at all n locations
cgcatcttttactaaggcagttntataaaatcgtccttgttttagtgtcatataatctcacttttggagtagtgccaattgcaatctatgtttctattgaagatccttggccctttgaaatattttcttggcttagaaatagctaaatccaatagaggtatctcactctcccaaagaaaatacactatatctcttttagaagatacaagtttcttggcatgcaaaccttccaatcttccaatggatccaaacttgaagctcaatcttcatgatggagacttactccttgatcccttagtgtataaaacgttaattggtagattaatttatctaaccatatcacgtcccgatataacatttggtgtaaatcacttgagtcaatatatgaaagaacatagagtntgtcacctaaatgttgtccatcatcttctgcagtatctcacatctactccaggacaaggtttattttccctgctcataactctctcaaattcactgc

SEQ ID NO: 483 - DNA, 474 bp, Glycine max
  unsure (1)..(474): unsure at all n locations
gcttactccaggtttcacttgacgtcttctttctatgcaatgacgttctctaacgtgaacactnntctttttatttattttaattntttatgattttatctaatgttatggaatgtcttaatttgttaatatttattattaaatttcttattatatttaagtgaagaaattaatgatatatgtaaagtgataattatatttgatttagaattaattntacataagccaaatgagtgcaacttgtgcatagtgcatacccctaatttcttagttntaataattaattatttntgtcgacaatcgattgtcttatgtaaaaaaatcaattttataacataatcgttgattatcaaattgattgtaaaaaaattatttatcatctcctttnttctttntttcaaacgtactatatttctcacttgttgttattcattggattctatttttttttcttaatttcatctaacttgttct

SEQ ID NO: 484 - DNA, 427 bp, Glycine max
tctatccatggcgttctatggtggtgagcttattcttgactcatcttctttatgaagtggcgtctgcaatcacctttccactttctccattccgctgccattgatcttcaagaagtaaaggactccattgatgaagaagatccaaggcctaaaagctcaacatggagctacatcactagtagtacttgttctttcctcctccctaagcctaactctcaaaaggagtagttctatttgttgcctatactcttcaacactcatactcccttttctaagcctttggagcttggccataagctccctttcatagtaggaggggatgcacctcttcctaagggtagctttcaagtcattccaatactctactagaggatcccatgaatccttcttttcctaacaagtgaagtccacccatagagggcatacc

SEQ ID NO: 485 - DNA, 380 bp, Glycine max
tgtgacatttgtcagcatcagatgtatagcgctatctcacctgtaggattgctgcaacctcttgctattccggaacaggtctgggaggatgtatctattgattttatcacagggttgccttgttccagaggctatgaagctattctggttgttgcggacaggctgaccaaatatagccattctgttccattgaaacacccttatactgccaaaggaattgttgagattttctctgggaagtactgatgctacatggagttccacaatctctcgcgagtgatagagatcctttatttatgagtttgtcttggaacgaactatttaatttacacgcgacaatgctcaagatgagtacaacttaccttccgcagactgatgga

SEQ ID NO: 486 - DNA, 480 bp, Glycine max
taacataaggcatgtgaagtgggtggaattcctagagcaattcccttatgttatcaaacataaaaagggaaaaggtaatattgtagccgatgctctttctcggcgtcatgcattactttctatgcttgaaacataattgattggtcttgaatgtttgaaaagcatgtatgaaaatgatgaaacttttggagaaatctttaaaaattgtgaaaatttttcagaaaatggttactttagacatgaaggctttcttttcaaagaaaacaaattgtgtgtgcctaaatgttctacaagaaatttgtcttgttgtgaagcacatgaatgaggtttaatggggcattttggggtccaaaagactctagaaacattacaagaacattcttataggcctcatatgaaaaaggatgtgcataaattttgtgaacattgcattgtatgtaaaaaggcaaagtctaaggtaaagcctcatggactgatact

SEQ ID NO: 487 - DNA, 423 bp, Glycine max
  unsure (1)..(423): unsure at all n locations
agcttctatagaagggttcttcctaatttctcaacaattgcctcacctctcaatgagctggtgaagaagaaggtggcatttacttggggtgaaagacaagagtaagcctttgctttgctcaaagaaaagcttactaaggcacctattctagctcttcctgactnttctaaaacttttgagctagaatgtgatgcctatggagtgggagttagagctgtattgttacaaggtgggcactctattgcttattttagtgaanaacttcatggtgccaccctcaactaccccacctatgataaaaagctntatgccttaataagagccctccaaacttgggaacattaccttggtgtcaagggaatttgcattcatagtgatcatgaatcacttaagtacattagagggcaaagcaagttaaacaaa

SEQ ID NO: 488 - DNA, 404 bp, Glycine max
  unsure (1)..(404): unsure at all n locations
agcttctatgttcaatttcgagcgtttcaatatattatgtgcctgaatcggacattcgtgtgaaaagttacgaccatttgaatttcttgagaacttctattnttcaagttcaagtgcctttatatatcatgggcctcaatcgtatatccatctcaaaagttatggtcgtctgaattggacaagagctttcgtgttgaatttcgagcgtctcgatatattgtggacctgaatcggacatccgagtaaaactttatgaccatttgaatttccctataacttccagtattaaatatggagccgtttgatatatcatgggacttaatcgtacattcatgttaatagttatggccgtctgaattggactaaagcttctgcgttcaattttgagcgtcctgatatattat

SEQ ID NO: 489 - DNA, 495 bp, Glycine max
  unsure (1)..(495): unsure at all n locations
tatacatactcaagctcgcacaggagtgtgaggtgatactgagtattcttttcaacaatgactggccttcaattagtggggattctgaggaagatgaatatggctccacgactggaaatgaaagcaaagcgacgctgatgcatgttccaaaagaacttgctgaaattgacaacatggagaacacgttcaccaaactaactctatcagcactgcgtagcttggaagaaattatgggtagaagctcaactgttagcattttctcattgcctactttgcataactaggctttgcaactgcaagaggattggaaaataaaatgactgcactagcgactgcaaccaaataggtcctcaggataacatagatcttctcgtgtttatcttcacatctatcttaatgtttattagaanagaaatagacacagaatttagacatgagtngccatttatacaagaggatccatctccctgtttaatggtagatttcatatgaaac

SEQ ID NO: 490 - DNA, 357 bp, Glycine max
  unsure (1)..(357): unsure at all n locations
actcattttatatatagcttaaggtgtgtttggtttgtattttcattttttgttttcatttcctgttntcagnttctgacactactaggaaataaggtttttacatcaattatttaagactttcaacatcggttattaaccgatgttgaaagtcccgatgttgaaagtaatatcgttaacatctgtttttcaaaatcgatggtaactaataaatacaacatttggtatttaaatagccaatgttacatgataagaattttgaanaaagaaatttataaatttacatatcaacatcgcgttatttaaaaaccgatgttaactagcactaaaagtcaatgttaactgtcactaacaaca

SEQ ID NO: 491 - DNA, 364 bp, Glycine max
  unsure (1)..(364): unsure at all n locations
tgtaatcgattacacaagtcttgtaatcgattaccagagtatattttcagaanataatttccaagagtcacatctattcaaatggtttatgaatggccatcaaaggtctatttatatgtgacttggaaacacgaattatgagagagatttcattgcccaaaaagttttatcctctcataagattaagagagtttttctgaattgaaatgtcttatcctctcaaaaagataccttggtcaaacacttgcatattcgataaggaattttgattgatcttcattgtataatctatctctttcaagggagatatcttcttctcttcttcttatttctggaaaaaagggattaagagaccgacggtctc

SEQ ID NO: 492 - DNA, 442 bp, Glycine max
  unsure (1)..(442): unsure at all n locations
ntntattgtaatcttgagattcaggacagcactctgatttctgaaatatttgggataaaaatggtcattgaccagtcccttttccatgacttaaccaaattacccagtgacggtgtaccatttgaaggtacactgaatgacgactgaaaatttgatttctctgcccatgatgcccgccagttggtttgcaccaacaatgcggatatgaccggacgtcttcttgccgggtcattggcttttgaaagccgcatccttcactatttaattgtgcgtattttgcttccacggtcttccaaccttgcccaggtttctgaggaagatctaattatcatgtgggcctttcatacagggtgtcaacttgactgggcacacttagtcagatatcgcatgcataaggcattgcgaataaatgctccattaccatatccacagcttgtcactc

SEQ ID NO: 493 - DNA, 417 bp, Glycine max
taacatcatatgaagccatggataagagcttgtatgaggagatgatgaggggaaggagaacgagagaatgagcacgaaattttgtgcctcacatgaggtctgaactttgaagcgttattcccaaatgatcaaagttaaaaaaatgcacacgcatgacctctatttatagcctaagtgtcacacaaaattggagggaaatttgaaattctattcaaaatttacttgaatttgaaattgaatttgtggagcaaaattttggagccaaaatttcactaattatgattaggggaatttagctatggttcagcccactaatacaagatcaagtccaagattctccactaagtgtgtttaggtgtcatgagacatgtaaagcatgaaggacatgcgcaaagtgtgactatatgatatgacaat

SEQ ID NO: 494 - DNA, 416 bp, Glycine max
tagcttgaactatatgagatttgaatctaattttacttggatcaacaatataatatatatttaatttatagttgaaaatacggaaaaacaagaattttgatctattgataacatcatatttacctccatcgcaatgttataatacgttctagaacatgctcatattggtttcgtaatagttgatattgatttactcatagagctgaatataagaacaattgtcggttttaaagtacgtgatattctttataaaataaaacggtggttatagttaatggaaataataaaattaagaaatgtactttattaagctcgcgaatcaatagctgtatttaaaacaatatgtctattacttgttgcataacttgccacgtctgtcttctaactgtacttgaatatctaatgacggatatagt

SEQ ID NO: 495 - DNA, 318 bp, Glycine max
gtttttgcccaaatggagacactggatgtctgcctgtctcaagtcagctagcatttctattcttatcaatggcagtcctacaaaggatattgctcctactagaggtttgaggcaaggggatcctttagcccccttactctttaatatagttggagaaggcatcacaggattgatgagggaagcagttcagaagaacttatatataagctatatggctggaaagaaaaaggaacccattaatattttgcagtatgcggatgacacagtttttgtgggtgaggctgagtgggagaatgttattgttttgaggctatgctc

SEQ ID NO: 496 - DNA, 433 bp, Glycine max
  unsure (1)..(433): unsure at all n locations
agcattgcaataatttcaatagttctatcgaacatatcaatagacacgtcgttttttcaaatattttgtgtaggtaactgttacacgtcaattcttgtccccaaagattatggattagagattttaatttaggattcctataaataatattataaagttagaaacattaaaacaattgatttcagaaattaatgtgaaagagattatgccaaaattttgttctggaacctggataagattgctatattttaaagtaaattatattgtaaaataatatcatataaaggtaattttttatttggtaacatgaaaactntatatgcaagtcaaaatccaaatttaaacatcttgtttctcaaataataataaactatattccaattttattaaggggatacccttctgggatatatatatatatatatatatatat

SEQ ID NO: 497 - DNA, 362 bp, Glycine max
ctgcctttgccctgatatatcttgaggactcatggtcactatgaatgacaaagtccttgggataaaggtagtgttgccatcgtttcaaagcccgtactaacgcatacaacttcttatcataaggtgaatagttaacggtatgaccacttaacatttcactaaaataagcaatcggatggccttcttgcatcaacacaggcccaattcccacatttgaagcatcacactcaatctccaaagattcttgaaagtttggcaacgcaagtatggcggcattagttagctcttgcttaagaacattgaaagcttcttcttggttctctccccatttgaaaccaacaattttcttgaacacttcattg

SEQ ID NO: 498 - DNA, 225 bp, Glycine max
agcttttcactcggatgtccgattccggagcataatatatcgagacgctcgaaattgagcaacggaagctcttgagaaattcaaatggtcataactttccacatggatgtctgattaagacgcataatatatcaagatgttcgaaattgaacaacgaaagctctcgagaaattcaaatagtcataacttttcactcggagggtccgatcatgcgcataatatatc

SEQ ID NO: 499 - DNA, 484 bp, Glycine max
  unsure (1)..(484): unsure at all n locations
ngctataatattagttaaaaaatagtttatgaaatttatcacatattatttttataaaataatcatacaaacattcatgtcataagataaaatacttacaaataaatctcaaacatatataattttgtctttataattaataatttatgctattgatttatgaaagtttgtgtatatgtaacctaacttaatcttaaattcatcaattacaactatatttgataagacatttcagttaatttttaatttttttcactagctaaaaaatttgtttgactatttagaaaacaagttttttttaatagtttctaacattttttcaaactatttgaagtaacattntttaaaaccttagatttgaaattctaactttntatattttttttcattgttatacttaatatatttatccaattntctagttaccattttttaagagatcataattgtattattngtcaatcattttatctttttcaactac

SEQ ID NO: 500 - DNA, 471 bp, Glycine max
  unsure (1)..(471): unsure at all n locations
gtatggctcgaaacatgcaccgaggcagaggtacaagaagtttaatgagtttatgagcaactcaggattcaaaagatgtgacatggaccattgctgctatgttaaaaaatatactaatagttatgttatccttgctgtgtatgttgatgacatgttgattgcaggatctagtatggcagaaattaacaggttgaagcagcagttggcagataactttgaaatgaaggatcttggtccagctaaacaaatccttggtatgagaattcttagaaacagatcagaaggaattntgaagctgtctcaggagaaatatatacacaagttgcttgacaggttttaccttggagattctaagaccaggaatacccctttgggatctcatttgaaagtttcaaagaagcaatcttttgagacagatgaagaanaatggtacatgtcaagagtaccatatgcatcagcaagtgggagttt

SEQ ID NO: 501 - DNA, 363 bp, Glycine max
  unsure (1)..(363): unsure at all n locations
ngctaacccgtggaagctcctaatatctcccacaccttttggtgtgggccattcttggatggccttgattttcttagggtccacttggactccatttctaccaactacaaaccctaagagaactatattatctacacaaaaggtacctgaaagaacctgcctgagatgtcctaagtgatcatctagactcctactatacaccacaatatcatcaaaataaataactacaaatctaccaatgaaatcccttaagacatgatgcataagcctcatanaggtgcttggtgcattactgtgcccaanaggcatcactagtcattcatacaaaccaaacttggtcttgaaagcgggtttccactcatc

SEQ ID NO: 502 - DNA, 453 bp, Glycine max
  unsure (1)..(453): unsure at all n locations
agcttcatggaacatttatgatactgatgtaaattcaggtcttcatggttntacaaaaatcatagttgttgtttaggcggttatcgttatcaaaattctagaatgctttgtaaagatgttcatcaagtccaagtctgtgcctatgcattgtagtcgaaatgaattcaagatagtcaattgacccatttccgtcaacatcagcctgaggaaaaaatatacatgtcttgcaaattgaaacaattaggaacaaagcanaaatgcatgacaacaaaaaatagtataaagatataggaaatatcatagtttaatcacaacattaaaaaaggctntagctagagcctacataataataattataataataataataataacaacgaagcanacatgcattacaacanaacaaaattaagaaataataaatatcagtgttaactcctattgtcacaacat

SEQ ID NO: 503 - DNA, 385 bp, Glycine max
  unsure (1)..(385): unsure at all n locations
tgtcctcggtgacgaanacaatagaataagcctcttcgagcttttcacaggcgtcaacgattcgaagaatgaagggtctgtgtttggaggtggcgatgaggtggaggacaacctcggtgtcataggtggtgttgaagatggagccgttgtcttcgaggttggttcggagggtcttatagttgacgaggttgccgttgtgggccacgccgactgagccgaagcggtaaccggcgacaaagggctggacgtttttgagcatggataggacggcggtggagtatcggacgtggccgatggagatgctgccggggagctggtcgagttttgattggttgaagacttcggagacgaggccaacgccggtgatggattggaggacgttgtt

SEQ ID NO: 504 - DNA, 296 bp, Glycine max
agcttgaggagcttgctttagcccatatagagctttattgagtctaaaaacacgatgtggaagagtgttactctcaaaccctgcggggtgctctacatagactctctcttgcattagtccattgaggaattcacttttacatccatttgaagagtctcatatgtatgagcagcaatgacctatagtgtatgcctccggtgacaacaagagtgaagttatgtatatcatacctcctttataaaacctttggaacaaccttgcctgttgtacatactaacttcctataaagctatgtc

SEQ ID NO: 505 - DNA, 470 bp, Glycine max
  unsure (1)..(470): unsure at all n locations
agctatagggtagaatttagatccatggactaagtatgagtctgcttatctttgtacatattaaattgagattntattatttttttgggccttatattcagggattcacagtgtagggagggtatcctagtaatataggatttttcagcctttgtattttagggcacctagactagtttttgtattatgggtagttttataatttcacatgcattaagtgtattatttgatgtgtgtgttgngagagaaatttaattgaattgcaagaagctcaatccaattaaattttagaccagcctaagggggaagtgagcatttgtttgttacacctcattatcacatcatatagtcacactttgtgtttgtccttcatgctttacatgtctcatggcacctaagcacacttagtggagaatcttggatttgatcttagattagtgcgctgaatcatagctgaactcactaatcat

SEQ ID NO: 506 - DNA, 455 bp, Glycine max
  unsure (1)..(455): unsure at all n locations
tcattctacancctgaaaagaggatgagatagttgcacgaaagagaaagcttcctaactaaaattttcatgcaagtggaccttcttctagtaattctgacttaccgcagccttttatccctcttcaattcccacctagagcaattccaaacaaaaaaaatggaagaagcagaaaaggagatcttggagaccttcagaaaagtagaggtgaacatacctctgctagatgccatcaagcagattccaagatatgccaagtttctaaaggagctgtgcacccacaaaaggaagctcanaggcaatgaaaggattagcatgggcagaaatgtgtcagcattgataggtaaatttgttcctcacattcctgagaaatgtaaggacccaggtactttntgtataccttgcattattgngaacaataaatttgagaatgacatgctagatctaggagcatca

SEQ ID NO: 507 - DNA, 439 bp, Glycine max
  unsure (1)..(439): unsure at all n locations
tatcccctaatgcacctattccattcctcccatggtcatcatcaccataaacagctataacctctctccagccaaagtagttaacaaagtctgctattgcagtcatttcataaatgtcactaaaagcagttctaataaagaatgggaattgaagtgaagaaagagtagggtcagtggctgtaaatgatagtagaggaacttggagctcgttcgctatatgagatatgacatgagctgttgtagacgtctggngaccgattatagccacagtttgtgttgccatgagctgcaaggctattacacacaatttatgtaaaccaagagtaataatctgccaaactntgaagtaacttgtctaataganaaaaagatgcttttaaagttttaacacataaaaaagatgggaatattgtgaaggacgtaccctctgcaatgctca

SEQ ID NO: 508 - DNA, 493 bp, Glycine max
  unsure (1)..(493): unsure at all n locations
tccatgaatntcttggtaccagacctagcaattgtacccaagttgctcaccatatctgaaaaaaaaaacataacaaaaatgaattagagactaaccaggtaaacaaaaaaattggtccacaaatatctcaataaaagaacatctcaacctaccagctttggtcatgccaataccattgtcaacaatggttagcatattgttagtcttgtcaggaataatatgaatgaacaactatggctaagtatcgagcttgctcttgtccgtcaaactctcaaatctagtcttgtccaaagcctanaattttacatacaaccacataattaattaatctttcaaaacaaatcaactcaagaagaagaccaatattaacacaaccacacatcacactaaaaaaattcagtggcagggtacaacatttcaatcataattcatctcccaacgtaaccaattcactcctacaaaataaattagatgtcactaattcactattcac

SEQ ID NO: 509 - DNA, 436 bp, Glycine max
gtaacctctaagatcatatcatccacaaagaagaggtgggaaacttaggcatctcctcccttcccaaatgagaaaggtttccatcaactattgtgaatagaatccaaaatcagatgagcaagtctctgcatgtagagcacaaaaaggagaggaaataaggggtctccatgacaaaggccgctggacaatttgaaggaatcgataagagatctattccagctgatggagatgtttgtccaattgatgcaacgagagattagggagaacatccgagaaggaagaccaaggttttggagggtatcgatggtgaaatcccattcaatatgatcaaaagccttttgaaggtcgagcttcaagatcatgtagcaaggcttactagtattatgctctagagaatgaacaagctattggatgataacataattgtccataacac

SEQ ID NO: 510 - DNA, 486 bp, Glycine max
tcttagtctcagctgatgaagatgaattcttggctacttcatgcactcctctaatgacaatagcatcacttctggcactaaattgttgggagtttgaacccatcttctcaattaaatttctggcttcagcaagggtcatgtctccaagggctccaccactggtagcatctatcatacttctctccatgttactgagtccttcataaaaatattcgaggagaagctgctcataaatctggtggtaagggcaactggcacatagtttgttaaatatctcccagtattcatataagctctctccactgagttgtctaatgcctgaaatatcttttctgatggtcgtggtcctggaagcacggaaatatttttctaagaatactctcttgaggtcatcccaacacgtgatggaccttggagcaaggtaatatagccagtcctctgccactccctctaaagaatgacgaaaggccttcagaaatatgtgat

SEQ ID NO: 511 - DNA, 457 bp, Glycine max
ctacagcacatgccactattcttcaagttcttaaaggatatgttaacaaggaaacacaagtatattcatcacgaaaacattgtcgtggaatgaaattgtatcgttgtgattcaaaagatccttccacctaagcataaagaccttgggagtgtaaccattccttgttcaattggagaagtcactatgggaaaggctcttattgatttgggagccagtattaatttaatgccactctccatgtgcataaggttgggagagttggagatcatgcccactaagatgactttacaacttgctgaccgctccattaccagaccatatggagtaattgaagatgtgctggtcagagtaaaacaatttatcttcttgatagactctgtggtaatggatatctgtgaagatattgacattcctgtaatattggaaggccattcatcgtaaactgtgagttgatagt

SEQ ID NO: 512 - DNA, 200 bp, Glycine max
tcagtgctttcacacacaagggtctactaatttggttgctattccgttggagggtattacgggggttgctgatcttgatgagagaaagttagttgcatattttgacagcaagattgttcctgtgcccaaggctgagggaactgagtacgtagcttcaaagcaaaagcctccatttggaccaacgttcattggagcagctt

SEQ ID NO: 513 - DNA, 455 bp, Glycine max
agctttgagccaattcaaacgacaataactttttactcggatgtctgattgagtcccgtaatatatcgagaccgtcgaaattgaatattgaagctctaagccaagtaaaacgacaataacgttttactcggatgtctgattgagtcccgtcatataccgagacgctcgaaattgaatgttgaatctccgagccaattcaaacgacaataactttttacttggatgtctgattgagtcccgcaatatatccagaccctcgaaattgaatgttgaagctctgagccaattcaaacgacaataacctttttactcggatgtctgattgaatccccgtatataacgagacgctcgaaattgaatggtgaagctcttgaccaattcaaacgacaataactttttactcggatgtttgattgagtccccgcatatatcgagaccctcgaaattgaatggtg

SEQ ID NO: 514 - DNA, 229 bp, Glycine max
acaccatacactactcaagcttgaaattgaacaacggaagctctcgagaaattcaaatggtcataacttttcacacggatgtccggctcaggcttataatatatcgagacgctcgaaattaaacatcgaaaactctcgcgaaattcaaatggtcataaattttcatacggatgtccgattcgggcgcatcatatgtcgagaagcttgaaattgaacaaccgaaactctt

SEQ ID NO: 515 - DNA, 631 bp, Glycine max
  unsure (1)..(631): unsure at all n locations
agcttgcattgcgttggagtatacatccaccttttaagtatttgacgaagagaaatattgtgaaatagaaacaaacttatacaaataatcagttcccagatttctaaagattggacaaaaaaggattaaaaataaaaaaaataaaacaaaaaacattggttagatttttttaacgcgtacattattttatatatcatttgggtaaaaaaattatatttgtattatttgggtaattttttttgtattaaataggcactattagaaaatatgctgttcacatctgttatttatgacgttctacattggttattaaccgatgttgaaagattatagttaacaccggctttttaaaaccggtggtaatgtaaaattgacacatcggtatttaacaaccgatgtatataataagattacaccaaaaacatatgaatgtgatagttacatcggtnttatacaaaatgatgtaactttacataaaagaggttttataaaataatgtaacgatacgtaacatggtttgataaaccgaggtacttcaaagtacattatttataaaaaccgaatggataggattttttaaaaactttttttttacaaaaaaccaaataacccggatttaaaccaccccccc

SEQ ID NO: 516 - DNA, 201 bp, Glycine max
tcggtattctatttcgagcgttccgataaattatgggactcaatttgacatccgagtaagaagttattgtcgtttgaatttgctcagagctttggcattccatttcgagcttctcgatgtattacgagactcaatcggacatccgagtgaaaacttattgtcgttcgaatttgctcaaagcttctacattcaattttgagc

SEQ ID NO: 517 - DNA, 207 bp, Glycine max
taacaaaaggcatgcgaagtgggtggaattcctagagcaatttccttatgttatcaaacataaaaagggaaaaggtaatattgtagccgatgctctttctcggcttcatgcattactttctatgcttgaaacaaaattgattggtcttgaatgtttgaaaagcatgtatgaaaatgatgaaacttttagagaaatttttaaaaattg

SEQ ID NO: 518 - DNA, 477 bp, Glycine max
agcttgaaggtgtgtagcccaccatctttttatattagaatactgggaatgtgtctactatcattggcatcattttttctctggcattgaggagccacttgagctgccaagtctctccacctttgggcgtattcttttgaaagatttgtgccccctttttgcacatgttctatagttgctcctatccgaagacattatactgacactggctaacgaaagcaaccactaagtccttccaagaatggactcgggaaggttccaagttagtgtaccaagtaatagctaccccagtaagactttcttggaaggaatgtattagcaattcctcatcttttgcggatgcccccgtcttccgataatacatctttagatgggtcttggggcaaggtagccccttgtacttgtcacagtccacaccctgaacttgggaggggtgatgatattgtgtactaggaacaactcttctaagttagcaaa

SEQ ID NO: 519 - DNA, 206 bp, Glycine max
agcttgataatggaagacacatgaacagctcttgcaataacattcatggggctccgaaaaatggtgagaatggaggattgcctttgagggcctcacttatgcaatcatgaaacacaactcccaactcgaaagtggaggacacatgaccagccctaagcaataacattcatgtggctcccaaaaaaggtgaaaatggaggattgcct

SEQ ID NO: 520 - DNA, 449 bp, Glycine max
aagcttgccaaccatggaagccctaaatcttcccactttttggggggggccattcttggatggccttgattttctcagggtccacttggatcccatttctaccaactacaaaccctaagaaaactatattatttacacaaaaagtacacttctgtatatttgcatagagggtgttttttctaaggactgaaaaaacttgcctgagatgtcctaagcgatcatctaggctcctactgtacactaaaatatcatcaaaataaacaactacaaatctacctatgaaatcccttaagacatgatgcataagcctcataaaggtgcttggggcaatagtgagccccaaaagcatcactaacccttcatacaaaccagacttggtcttgaaagcgggtttccactcatcaccctttttcatctgatttggcgatcccccttttaagatcaatttt

SEQ ID NO: 521 - DNA, 240 bp, Glycine max
gggatcttaagtgaccgcggctgcagcttttaacattaaatggtataacttttactcggaggccggaattaggcgcataatatatcgagacgctcggaattgaacaatggaagctcttgagcaattcaaatgggcataactttttactcggatgtccgaatcaagcgcataatatatcgagacgctcgaaattgaacaatggaggcacccaagaaattaaatgggcaaaaacgttttact

SEQ ID NO: 522 - DNA, 205 bp, Glycine max
ctttgatgtaacatttggagaggttaatgaaacaacgtattatgatgcgctccatgagaggttggatcaaatggagaatagagaccatatgaattgctcaagagcttccattgttcaatttcgagcgtctagatatataatgcgcctcaatcggacctccgagttaaaagttatgaccatttgaaatgctcaagagcttccattg

SEQ ID NO: 523 - DNA, 485 bp, Glycine max
  unsure (1)..(485): unsure at all n locations
agctntgaaatccaaagatctaatccaaggtatatgtttcataaaggggattcccttacttgtgctattcgagtgcaacctattcttttatatcctattcgtgtgtagggaaacttaagctttttgtgtcttctttaaataaagatatggtgggagaaaccccaactagcggttttgtggtaatttctaatggggggttgaattggcctgtggaaatttctggtagaacattaatgattgatctaatttgttggcctttgagccaaattgatggtattctgggtatggactgggtatcttccaaccatgtcttgttaagctgctttgataaaactatggcggttgatggctctagagtgagtaaggatatatatggagaagccagcttcatgatgaatcaagattgattcaaagaagttctgatgatgacaaaggtgatgacaaaaagctcaacgaccagaacaattaatgatacaaagatgatg

SEQ ID NO: 524 - DNA, 424 bp, Glycine max
tatttcactcaagccagccccatagaactttggcataagagacttggccattgtcatattcaaagaatgttgaacatgaagaagaaagacatgaccagaagtctaatggggttttctcgccaaattgcaatgcttggcagtttggtaaacaaaatagaatgccatttcccaaatcaacttggagagcctctcaaaagatgcaactaattcacactaatgtggcagaacctcaaagaacaccatcactacaagggagttcatactttattcttttcatagatgattttacaagaatgtgttggatttttttcttaaaattcaggcatgaagtggctagagtatttataaaggttaaagaagatggtggaaactccaagtggctgcaagattcaagttctaagaaccgataatgggaaggaatata

SEQ ID NO: 525 - DNA, 449 bp, Glycine max
agctttttgttgcgttaaatttcttaaattttatcacaaattcaaaaccttaagccaccgggtcaacaatagaatctttttattgctttttttctaaagttggcacaaaaaaacagatgttcaattatgtgggtagataattccaccaacaaaattatttgttaaatgtaactcaatctctcacagtagcgtaagatcatattatatttatatgtggaaaaacaatttatttaataaaagaaattatatttaacttttatcgcatgtaaaactttattaaattaacgacgaatatgccattgcaacggaattaatctatgaccaaatgatttgaaagatatctatgatttctgatttaggttaattaaaaaaggaaccaattcatatttttaattatttataacttatattaactaagggaataaaaatttcaattctattctcatttg

SEQ ID NO: 526 - DNA, 204 bp, Glycine max
cttggaaaatatgctgaggagtgcgttatctgcgataattgatgaaatgtattcaactttcataaaggacagacatatccttaatggaattctgatccttaatgaagtggttgaggaaactttgaagagaaagaagccagttatggttttcaaagcggatttctaaaaggcctatgattctgtatcttggtcttttttggatta

SEQ ID NO: 527 - DNA, 212 bp, Glycine max
tcaagcttttggaatataagctgaggagagtgttatctgcgataattgatgaaaggtcttcaactttcataaaggacagacatatccttaatggaattctgatccttaatgaggtggttgaggaaactttgaagagaaagaagcctgttctggttttcaaagtggatttccaaaaggcctatgattctgtatcttggtcttttttggattac

SEQ ID NO: 528 - DNA, 201 bp, Glycine max
tgtgaccatttgaataactcaagagcttccattgttcaattttgagcgtctcgatatattatgcgccttaatcggacctccgagtgaaaagttatgaccatttgaataactcaagagcttccattgttcaatttcgagcgtctcgatatcttatgtgcctgaatctgacctccgagtgaaaagttatgaccatttgaattt

SEQ ID NO: 529 - DNA, 583 bp, Glycine max
tcacttcaattggtgcatgctaatatctggggaccatcaagtacccctagctttggtggaagaagatatttttccctcttcgttgatgactacacctgaatgatgtgggtgtacttcatccaacaaaaatctgatgcattctctagcttcaaggagtacaaggccttagtggaaaagcaaagtgggcattccctcaaaatcttgagaacaaatcgtgggggagaattcaatgggcacatattcatcaatttttgcaatgatcatggcatcaagaaggagctgactgttcgtcacactccacaacagaatggtgtcgctgaaaggaaaaatagaaccattgtggaaatggcttgattgatgctacaacacaagaacctgccaaagaatctatgggcgaaagctgttagcatagcagtatacattctcaaccgttctccaactaaagaaatcttaaatttgacgccatatgaagcatggttcaacagaaaaccaacagttgatctttttaaagttttgggatgtgttgcttattcgcacttcccaaggagaaccgattaaagctttttgaaaaaggagaaaaatg

SEQ ID NO: 530 - DNA, 375 bp, Glycine max
tcaacattcaattttgagcgtctcgttatattacgggactctatcagacattcgagtgaggagttattgacgatcggattggctcaaagactcaacattcaatgtccagcgtatcgatgtgttactggactcaatcacacatccgagtaagaagttattgtcgatcgaatttgctcataacttcaacattcaatttcgagcgcctcgctctattacgggcctcagtcagacatccgagtaaaaagttattgtcgatcgaactggctcaaagcttaaacattcaatttcgagcgtctcgatctatcacgagtgtctttcgcacatccgaggccagaggaattgtccccagaattggcgtacatgctgacattcaac

SEQ ID NO: 531 - DNA, 450 bp, Glycine max
agcttagagccaattcaaacgacaataactttttactcagatgtctgattgaggcccgtcatatatcgagacgctcgaaattgaatgttgaagctctgagccaattcaaacgaccataactttttactcggatgtctgattgagtcccgccatatatcgagacgctcaaaattgaatgttgaagctcagagccaattcaaacgacaataactttttactcggatgtctgattgagtcccgtcatatatcgagacgctcgaaattgaatgttgaagctctgagccaattcaaacgacaataactttttactcggatgtctgattgagtcctcgaatatatcgagacgctcgaaattgaatgttgaagctctgaaccaattcaaacgacaataactttttactcggatgtctgattgagccccgtcatatatcgagacgctcgaaattggaa

SEQ ID NO: 532 - DNA, 571 bp, Glycine max
agcttatggtaaaactaacagcaatggaaagtacagtttcactgttgaaggctttgactatgtgaaaaatggagcctcagactgcaagggtaaactccatgctccttctaaggattcacgctgtttcatacccaccaagcttaatgagggaaccaaactgaaggtgaagtccaaggataaaaatgaaggtgcgctcagagcttaaccatttgcttatgctcctgaaaagccatatgattgcgaaaagtccaatcccaagcctttccctacttcttatgacaaaccatattattagaactctaccccaccccctttacccttaccgcacccacaccctccttactactataagtcaccacctccaccaccatcaacatactattacaaatctcctcccccaccttcttattactacaagagcccttcttcaccatcaccatcaccttctccatattactataaatctcccccgccaccatcaccatcaccacctttaccctactactattaaatctcccctcctccccacaaagatccataccatcctccttactactacaaggcaccctcc

SEQ ID NO: 533 - DNA, 586 bp, Glycine max
tgatgatgttattaaaggctttgcactacctctggcagtaacagtgacaaagatgatcataagtacgtttacaacttgacatcaaattttacttgagattttataatttctgatacttggttcacttggacataacagtggggagcaattgatggaagatgaatctcaaattgatctaaggagaaggaagaaacttgttcttgatggtgatttggaaagacaaatcaaagatctccatgagaagtaggtttgaccagatcaaacttttgtctgaactttggagcatgatttaaattagagccttgtcaaaaagaaattcagtcttttttatttcattttgtttacatcattggtacaaacattcttaaaaggagtgagcaagatagatcaattcatagcttttcaatattttgttgaatatcattatttgtactgtatttcaattcatagcttttcttgtactaatttaacccgagtttaataaattccaaaaattaaaaaaaaaatctccatattctacatcggttcaattataaacgatgtagaacatatcctcattctacatcggttaggcaataaacgatgt

SEQ ID NO: 534 - DNA, 367 bp, Glycine max
ctaagctcttactcggatgtccgattgagtcccgtagatatatcgagatgctttttttgaaaatagtagctcctagcaaattcgaaccataataactttttactcggatgtccgattgtgccccgtagtatatcgtgacgctcgaaattgaaaacataaggtctgagcaaattcaaacgtcaataactttgtactcagatgtccaattgagtcccgtaatatatcgagatgctccaaattgaaaatagtaggttcttgcaaattcaaaccataataactttttactcggatgtctgattgagtcccgtactatatcgagacgctcgaaatggaaaaatgaggctctgagcaaattcaagcgacttta

SEQ ID NO: 535 - DNA, 644 bp, Glycine max
tatcaatgcaaggaattaacacaagacttgagactagaattgaaaaattttacactcataaaaactaaattaatattgaagtctttatgaaaatttaaaacattctcatttaaccttaatttttattaaaataaagtctatcgaatgaaatattttttatccctactatttttttctagttccttctccgtttcaaactatatattatgatagttttaattattggatttttaaattttgtaggtgtgattgttgaacttatgtgttatattgcaaattttaaatcatattgaactttagcctatgtgataatgataataataatacaattcttcctgatttttgctttcactcaaactaaattttgattggattgaattacagattttatcaaattcaacccagatacccacctatatgattgatgaatgttgacaagatgggtctaactattttaaatatgtaatgaatattagttcctcttttacttgagtgctaaagtccggatcagaggaaaatgattacatatgaccctggatgtcagtatctagatatattaacaaattatataaaacagcaggacataatttccattaaaaaatatatgttttattaaattaagcagataccatagctttaaccca

SEQ ID NO: 536 - DNA, 470 bp, Glycine max
tgacaggtttaggtgcaggtgctgctactggtggaggcacttgaatttggttgccagacctcaaggtgatggcactcacatttttcggattctgcacagtctgtgaaggaaatttgtcaaaattttgggactgagcttggttcaactgagtagccatctgcccatctgatttgtcagactctgaatggaggctcttggctcttgctgaaattgcatattctggaaggtcattttccttactaactcctctaaagaaggttgaggaggagcctcagttgcttgttgtctttgttgtgaccggtgttgttgctgctactgtattggagggggaacatatggcttgctttgacccccaccattttaaaaaagagggacacattgttgttgttgtggaagacatttccctctcaaatttggatgattccttcaacctggattggatctatttcttgaaaggccataattattct

SEQ ID NO: 537 - DNA, 555 bp, Glycine max
gggttaaagtctcacgattgtcacatgctcatgcaataattgttagtcgtggctatacgagacatcttgccaaacaaagtcaggttagccataactcgcccgtgcttttccttccatgctatatgtagcaaagtcattgatcctgtcaagtttgatgagctggaaaatgaggccgcaattatactgtgccagttggagatgtattttccccctgctttctttgacattatgattcactttattgtgcatctggtcagagaaatcaaatgttgtggtcctgttcatacacataattcaaattcattaatatgtaatgcatatattggatgaaagctttgaaaatggaacttatggcagttcatcttaaattgttgcaggtactcttacttcttcggatactgttcattcttccaagcaggtactcttccttcttcagatattgttccttcttcctagtgtctaattcttgactcattttgtatggtgtactatatgatgatgtaaatgggaatatggtttctaaacagtttttatacccgttttttgtttatgttc

SEQ ID NO: 538 - DNA, 369 bp, Glycine max
tctgttgttcagtttcgagcatctcgatacattatgcgccttaatcggacattcgagtgaaaagttatgaccatttggatttctcgagagctttcgtagtccaattttgagcatctcgatatattaactccccgaaccagacatcggggtgaaaagttatgaccacttgaattctcgagagcttccggtgcttaatttcgagcttctcgatatgttatgcgattatatcgaacatccgacggagacgctatgatagatttaaattctcgagagcttccgctgatcaaatactagcgtcaagatatgttgtgcgtctgaatcggacatctcagggaaaagttctgaccatttgactttctcgagagcttc

SEQ ID NO: 539 - DNA, 337 bp, Glycine max
agcttgagattgatcaacggaaagtctcgagaaatacaaatggtcataattttcactcacaagtctgattcaggcgccaaacatatcgagacgcttaaaattgaacaacggaagctatcgagaaattcaaatggccataacatttcactcggatgtctgattaagccacataatatatcgagacgcttgaaattgaacaacggaagctgtcaagaaattcaaatgctcataacttttcactcggatgtccgattcaggcgcataatatgtttagacgctcgaaattgatcaacggaagctctagagaagtcaaggggtcattatttttcacacggat

SEQ ID NO: 540 - DNA, 353 bp, Glycine max
gaaagacagtgaagtgtcttaagactgacaatggcttgaaattctgtaaaggtgaaggcattgcaagacagtgtgttgtacactatactctatagtagaatggagtagttgaaaaaatgaacagaacctcgttagaaagggccagatgcatactatccaatataaggttgaataggagttttggggctaaggtagttagcacaacatgttatctcatgaattgctcaccgtccactggcatagatttcaggacccctattgaggtatgatctaacaaacttacttaatattcaatgttgaagatggtttgatttcccacatactatcatgtaaataaaggtaagctagagccc

SEQ ID NO: 541 - DNA, 624 bp, Glycine max
acctacagaaactaagcttattcagctgccctgctcgaccaagcatatccaccacacaagcataatgctctaactttggctttacgccatacaaactctgcatttgaccaagatattttaatccttctgttactaagccagcatggttacaggcaattagcactcccagaaatgtaaaagaatccggtctgcatcctttattttgcattaatccaaacagctcaatagccttcagcacatgtccatggataccatatcctgcaattataacattccatactgcttcatccttctcatttaccctgtcaaaaatgttccgagattgttccaagcatccacatttagcatacatgtcttttaatgcacaagtaacaaagttatcctcagaaagacgaggtttcattgcaaaggagtgaacttctttccccagccgcaatgcatccacatttaatctcggtattatattgtattatttgaagctattgaaaggaaaaattggaaaaaagatagtacctttgtagtaagaggttgtaaaagcaaaaagcatctgaagagtccgcattgaaatggagacagactacgagcaacgacaccaaagcaggaggaaaaattgcataccaaaaa

SEQ ID NO: 542 - DNA, 380 bp, Glycine max
agcttttatcaatattaaaacatcttactcttatcaaagcacatgtaacttataagtcttgaataactctattaccaattaagcaagattgtttgcacagaagaaaatcaacagataataaccatataacagcaaacttgccatgggttgacaaattcaggaggaccagtttgactgcctccactactttgaggatcagaaggattatttggcattccgattgacgagatgcttctctgggaatgagctgcactatggtctaacttaaaggtgctgctgctccagaaatcttctgatccatccaccttagtcactgtttgaccttgagtccttagtcctttagatgcttcatccattgaaataatccctggagttttttt

SEQ ID NO: 543 - DNA, 490 bp, Glycine max
tgcccggtgctggttctcgagtgaggaaacttgacttagagcgtccatatcaactcatgcacccgatgcgatatatggtgagctatggcggctcctatactttcctatgcgtatgcttccaccagcgagatcaatcccatcagtggccttgtttatgacattctgatgcttgagtcttctaccacctttcgtgagctatccacacgccttgggagcgcgcagtgggttccttaataattctcgcgacaatgggaccatcaatgacaccggccggcaaactcgattgcctgcctgttagaatcgtacacctttgatgtgcactggtacggataaacagggatgccttatttagtatataaaatatataaacgcgcatgaaaacactcttggttgctggagaaatagcttgcctcttagagagtgccaattatctaggacattgagctcaggccccttgcttgtcttccttcgggccggctgaatagactac

SEQ ID NO: 544 - DNA, 551 bp, Glycine max
  unsure (1)..(551): unsure at all n locations
tcttctcaacaggatcatataacctgtaaccaaattcattctcatcataaccaatgaagatacattgccttgactttgcatccaacttggatctctcatcctttggaacatgcataaaagccttgcagccgaaaactcttaagtggtcatacttcacattcttgcccaaccagattttgttcggcgcctcactattcaaagcaataacaggactaagattgataacatgcaccgccgtgtatagtgccttaccccagaagtgcttgggtaactttgcttcagagagcatacatctcactctctcaattaatgtcttattcatcctctccgccaaaccatttagttgaggagttttctcatgagcaatgtcatgcttcttgcagtagacatcaaatggtccctaatactcaccgccattgtcaatacgaatgcgnttcagcttcttgcttgattgcctcttaactaagacatgaaactccttgaacttcttaagaacttggtcatttgtcttttaagcatatacccaaagtttcctggaatagtcatcaatg

SEQ ID NO: 545 - DNA, 487 bp, Glycine max
tctaaggtggaacaacaattgcatagaaacagtcatgaagatgagttcatctaattttcactcgcttggttggaaagacacaaataagaagaagggaggatcatcaacaatcaatctcaatgttacaactcaaagaactcaaaataagttcgatgaggagcttaagaaagcaaggagctatgaaattaagtgcttcaagtgtttgggaaaaagtcacatagtttctcaatgttcaactaaaaagactatgttacttaaggaggatagagaaataattagtgaatcttcttcaaaatctttcccatctagcgatgaagaagagcatcaagaggaaagaaagttagaacgagatttgttcacgattagaaggatgttgggtagccaagcagttgaattggatgatagtcaaagagaaaagatttttcatgcgaggtgccttatccaaaggaagttatgctctttgatcattgatggtgggagtttcact

SEQ ID NO: 546 - DNA, 381 bp, Glycine max
ctggtgagcaggtcactcataatgtgaacattcctgttgacttttaaaaggagaactacaaatggttcttccttgaccagtaacccccaatccaaggtacatgaattgagtttaattactatccactttcagtataattattatcttacactctccatttatactgttaatcaatcagaaatcatatatgaaaacaacttttaagtaattttatataaaagttaacaaacttattatatgtaccatacataaactgcttactcataaattactatttttattaagaaatgttttagctttgttaattatatataagttctgtgtatttttgccaacattatcttgctatactagtagaatgtttaatatgttaaccaaatt

SEQ ID NO: 547 - DNA, 363 bp, Glycine max
gacacgggcttcttctccttttgctagttgtgggttaaaaagacaattgtgcaaaatcccccaaaatttaacaaaacaatcatcctcaatgtccacatctggaagttgaaaaaagagtttcaaattaatgttacaaatcttccataactaatgagggacacaaagtgagtaaaggttgaaagaaatataattctagtccaagatgtattaattatcatgtatgtaccctagctttcttcgggcagtaagtgataaataccgcaaggtaaattgtctcaatcaccccaccgaatgcattgatggtgataaaaagcgtttctccggtcttcacataggcataaaagatccaaagcattgcactga

SEQ ID NO: 548 - DNA, 621 bp, Glycine max
tgtatgaggggaaaaagtattaaacgttacatatagatacccattctccatcttttaagcgctcaagagcttcaatcatgtgctcttgataaattccaccacctcttgtaataggtatgcatttccctgtgcaagttaccattttagaaacaacagtactctgtaaaaacaactagaaaagcttttcagcatattttgatgcatatattaataaacttcaacccaatcatatgaaatagacagcagtaaagcatcacagtaagtattaaccttccgattcaaacattgttagcctagtgaagtgaaatgggtttaattcaatgctactgaactatagacaaagacaacacacaaaaggacttcatccaaatcaccacaatgtaatacattcattgaagaaaggccttgatagttgataaacagatttgttatattcaatgacatttttgccaattctggttttcttttttctttttttgattcagaattaaattttgggagtcgaaaggatactaaagtgctttagctgcaaatttccttttcaacaacttttaagcaacagatctgttgtgttaaagtattgtcccaagatgaaaagaaacaagattgaggatctatgtc

SEQ ID NO: 549 - DNA, 627 bp, Glycine max
  unsure (1)..(627): unsure at all n locations
caatttttttgtgttgtatagcaaatattttttttagttagataccttatgtttgaatttgataatttacgagtttgatatatatagatatttattataaatattaaattttcaatattattaattaatcaaaaattattttaaaacaatgttaacaagatattataaaagttaataaatttatcttgtgtaaaaatttataaatagatggccttgtaaaaaattaaaacaaacattttacaattagtgcatatgatgtttattcataatattttgtttaattgaaaattatatttttaatatatcatattaataaaataaatgtatattagtaataataaaaaaattattatttaaatatgttatttaaatttaaaaatttacttacaattaaataccttactattttaaatagtttttattaatgtcaataacaaaaaattcaatgtaaaattattttatataaaatttatgtaaaatacattgataatgtaaaattattttatattgttatcataatcttattaattttctcaataacaactttaaaaatcatattcaagttgatgttcaacangttaacatgacaatgtaatttatttttatatttacaatgcataataatta

SEQ ID NO: 550 - DNA, 627 bp, Glycine max
tctatagaaggttcgtccctaatttctctacaattgcatcacctctcaatgagctagtgaagaagaacgtggcatttacctggggtgaaaaacaagagcaagccttttctttgctcaaagaaaagcttactaaggcacctgttctagctcttcctaacttttctaaaacttttgagctagaatgtgatgcctctggagtgggagttggagctgtattgttaccaggtgggcaccctattgcttattttagtgaaaaactttatagtgccaccctcaactaccccacctatgataaagagctttatgccttaataagagccctccaaacttgggaacattaccttgtttccaaggaatttgtcatttatagtgatcatcaatcacttaagtacattagagggcaaagcaagttaaacaagagacatgcaaaatgggtagagtacctagagcaatttccatatgttatcaaatacaaaaagggaacaacaaatgtggtagttgatgccctctctaggagacacgcattgttttgctccctaggagcccaaattttaggatttgataatattagggacttgtatgctttaaatgaacatttctcttccatttacgagagttgtgggaaaa

SEQ ID NO: 551 - DNA, 427 bp, Glycine max
tcagttttcaattacgagcgtctcgatatattacgggactcaatcatatatccgaattgaaagtttttgtcattcgacttttcatagagcttctgttttcaatttcgagcgtcacgatatattaaagggctcaatcgcacattcgagttaaaagttattgtcgtttgatttttctcagagcttccgttttcaattaccagcgtctcgatatcctacgagacacaatcgaacatccggcttaaaagctattgtcgtttgaattggctcagagcttccgtgttcaattaccatcgtctcgatttattaccgtactcaatcggacatccgaattgtgagttattgtcactagacttttcatagaaatttcgttttcaatttcgagcgaatagatatattagagggctcgatcggacatgcgacttaaagg

SEQ ID NO: 552 - DNA, 488 bp, Glycine max
agcttgccaacccatggaagctcctaatatctcccacactttttggggtgggccattcttggatggccttgattttctcaaggtccacttggaccccatttctaccaactacaaaccctaagaaaactatattatctacacaaaaagtacacttctctatatttgcatagagggtgtttttcctaaggactgaaagaacttgcctgagatgtcctaagtgatcatctaggctcctactgtacactaaaatatcatcaaaataaacaactacaaatctacctatgaaatcccttaagacatgatgcataagcctcataaaggtgcttggtgcattagtgagcccaaaaggcatcactagccattcatacaaaccaaacttggtcttgaaagcggttttccactcatcaccctttttcatcctgatttggtgatacccacttttaagatcaatttttgaaaagatattggcaccatgcaactcatcaagc

SEQ ID NO: 553 - DNA, 498 bp, Glycine max
cgtgcattcaatatcctgatgagggtgttccatatgttctcaagactggactaatacatttgctgcccaagtttcatggtcttgcaggtgaagatcctcataagcatcttaaggagttccatattgtttgttccaccatgaagccccctgatgtccaggaagatcatatctttctaaaggcttttcctcattctctggagggagtggcaaaagattggctttactaccttgctcccaagtccattttcagctgggatgaccttaagagggtgttcttggagaaattcttccctgcatccaggaccattgccatcagaaaagacatttcaggcattaggcaacttagtggagaaagcctgtataagtactgggaaagattcaagaaattatgtgcaagctgttctcaccaccagatttctgagcaactccttcttcaatatttctatgagggacttatcacctggagaggagtattattgatgctgccagtggtggagc

SEQ ID NO: 554 - DNA, 486 bp, Glycine max
agcttatcttaatgaaaaagggtatgccaaaatatgtatctccagaagattggaattggctaattaaacacaagtagagtggttcaaaattttaagtaaaattattttattattttgaacataatttttttaataggtttacacttataatataaaatcacttatactttgatgtaggaaagaagcttgacaaacaaagctaattgaagcaagcaagaaataaaataaattattgaaaaaatcaattgtgcaaaagacatttgaaatggtagcatcttttaatattttatattagttttcttacaagttatataaaataactcattttttattttgtgattatttttatatgatatatgaaaggttggtgaaatttataaagacattatgcattatattatattatttaatttgttttttactatataaattttaatagaaaaaagatttaatatctggtgaatgacaaaaaaattaaggtaaaga

SEQ ID NO: 555 - DNA, 305 bp, Glycine max
tgcagggataacttggattgaattttacgaccttatgatggccaccaacaattgttcacctcagaacttcattggaagaggtgaggttgggatggtttactagggcattctacctgatggctcaatggttgcaatgaaacggcttgaataatcaaattctcaaagagatgctgtgttctaaagcgaggaggacattgttaagcaccttgaagcaccgtaatctggtgccattaaaaggaagttgcaccattggaagaaccaatttgggaaattatatattgtgatggtttttaaagatatttaac

SEQ ID NO: 556 - DNA, 366 bp, Glycine max
tttgagaaattcaaatggtcataacttttcacacggatgtttgattatagcgcatcgcatatagagacgctcgaaaatgaacaacggaagctctcgagaaattcaaatggtcataacttttcacactgacgtacgattcatgcttataatatatggatatgctcagaaataaacatcggaagctctcgagatattcaaatggtcataacttttcacatggatgttcgattcgtgtgcataatatgtcaagaggctcaaaattgaacaacggaaggtcttgagaaattcaaatgttcataacttttcacacgaatgtccgaatcatgcttataatatatcgatacgctcgaaattaaacaacggaac

SEQ ID NO: 557 - DNA, 438 bp, Glycine max
agcttgaatcggacatctgtgtgaaaagttatgtccatttgaatttttcaagagcttccatttttaaatttcgagcctctcaacatattatgcgcccgaatcggacatccgtgtgaaaagtcatgatcatttgaatttctcgagagtttccgatgtttaatttcgagcgtattgatatattataaccctgaatcggacctcagtgtgacaagttatgaccatttgaatttgacgagagcttccgttgttcaatttcgaatatcactatatgtgatgcgcctaaattggacatccgggggaaaagctatgaccatttgaatttctcaagagcttccgttgctcaatattgagcgtctcgatacgtgatttgcctgaatcggccatccgtgtgaaaaagtataaccatttgaatttctcaagagcttccgttgttcaatt

SEQ ID NO: 558 - DNA, 456 bp, Glycine max
acccgatactatacacaaccctagcttgtattatataatatccttgaatcttcaatcaagaatttgatattctgaaggccaaaaataccgagatatatttaaaaaattattaatctatcctaataaatacttattcatattctcaaatcttgtatcatatccttccattcattatattttttaaaaataaaattatctgtcaacaatgtcataccataatggttatctaatctaaactatttaacctggcaaaacgataatttttgttattatgatgaacaagaattataaattataaaatcttagtcatataatgaaaattaaaaaaatacatataattttgtaagtgattattcaaccagtaataaaaattttaggttaattatttatataaaattaaattagtcatttttattcttatataagatgatgatttacattaagatggagtcaatg

SEQ ID NO: 559 - DNA, 473 bp, Glycine max
tgcttgggattgatcctccaaagggtgttttttgttatggccccccaggaactgggaaaacacttttagccagggctgtggctaataggactgatgcttgttttataaaggttattggaagtgagctacttcagaaatatgttggtgagggggctatgatgggtcgtgaactattttaggtaaaatgcacaagactccgtcctctagcttttttttatcattgtttcgatgaaaataaatcattcgactaaaattttctgatttttagatggctcggtcaaagaaggcatgcattgtgttttttgatgaaattgatgcaattggaggagctcgatttgatgatggttgtggaggtgacaatgaggttcaccgcaccatgcttgaaattgagaatcaccttgatgggtttgatgctaggggaaacaataaatttttgatggcaactaacagggtggttgaatttattgtgagag

SEQ ID NO: 560 - DNA, 533 bp, Glycine max
tgcttctacaataaggtgatgtccttcggactcaagaacaccggggcaacctatcagcaagcgatggtagctttgttccacgatatgatgcaccaagaaatcgaagtgtatgtggacgatatgatttctaagtccaaaaccaaagaagagcatctaatcaacttacggaagttgttcgagaggttgcgaaagtaccagctaaggttgaacccagccaagtgcactttcgaggtcaaatcgggaaaactgttgggtttcatcgtaagccaaaaagggatagaggttgaccccgaaaaagttaaagccatcctcgaaatgccgaagccatgcactaaaaagaaagtctggggtttcttggggcgcttgaactacatcaccaggttcatatcacagctcacggctacctgcaagccgttattcaagcttttgcgcaaggatcagtccgttcgttggaatggtgattgtcaagaggtgtttggaaagatcaaacaatgtctcatgaaccccctggtactaatgccaccggtgggtgg

SEQ ID NO: 561 - DNA, 473 bp, Glycine max
agcttgtcagtttattcccaaaaacctgcctagtccaagaatatggctttcaattgaatgacaatagtctctaaatcaattcattggcgtatcacttcactcacttgaattacaacatgatagatacttaactgataaatcatatatatgtgatatgagtaattaattaaaactatatatatataggacaaagatatattattgattaaatttttaaaaaacaaaatattgttagtgattatttttttaaatgaatatatgtaacataattagaattgacagtaaactgtatggtaaaaaacacagttataatattaagaaaaaaatttaatcaaatctcctattttaaatataactatgcttattataataaaacattaaaataccataattggatttggatgtcctaaaacaactggcactaatcctttttaaaaaaaacttataactcaaattgataaaagcttatcaat

SEQ ID NO: 562 - DNA, 568 bp, Glycine max
tatgaaaataagagaaagaaactttcaaaataaatttgtatattaaacaaattatttttggtcaccttgttaaataaatatttattttagtcaaattaatttataagttagtcgaataaacttttataatctaattaactattagagcaatttggcaatcatacccatggttaaagaagttatttaaccagtaaaaaaaacttttaggaattaaatttacttaaaatatttataaaacatatatacttttttagggtaaacgtatgtacttaaaatatatcctttattcaattttgttagacattttagtaatttatttgtttcattttaattgtgattttataatattgatgatgtattaaatatttttttcttaatatatccattatcggtcatcattaagtgagaaaacaaaaaaaagtataaataaaagatagtccaattaatataaaagaaaaaaatattataaaaattgcataataattttaataaaatctataatataattacatatctaaatttctgtaccaaaatttgtccacaaataaaatggagggattttatatta

SEQ ID NO: 563 - DNA, 497 bp, Glycine max
atttacattttcaaagattacatattggggaatctaacataacagacaatcgattgtacaaaacaatgataggagtaaaatctagtaacatcataatttaaactcactgcgacggataaatgacaatcaccatactcaagagcctcatggataatgataagatctttcctaccctaatctaaaaaaattagacgattaaacaatttatgtttggtgactacatagtggcactaatatgtaaatgcaaaaatgctgacctggccatgttcattgaaagtatcgagtccaacaattccaaggtccagatctccagataacaattttcttgtgatgtatttgggcctctaaaaccaaactatgagtttggattgctgcagtaatgcaagagaattggtttatggtcatgtagagatatagtacattgatggaagccaagggaaaaaatagaacgcacatgaggaagcaactcacttaacttatttctgctttttggatca

SEQ ID NO: 564 - DNA, 342 bp, Glycine max
agctttgtatggtagaaggtgtaggacacctctatgttggctaaagccctgagaagacctcaccttaggacttgaagtggtacaacaaaccaccgagaaagtcaagttgatccaagaaaggatgaggactgctcagagtaggtagaaaagttatcaggataagaggaggaaagacttggaattcgaggttggtgatcatgtattcttgagagtcactctgtggactggggttggtcgagcattgaaatcccaaaaactaacacctcgcctcatcggtcctttccaaattcttaaaagagtcggtcctgtggcataccaaaatgcattatccccatcacattc

SEQ ID NO: 565 - DNA, 582 bp, Glycine max
ttgttgacaacactgtggctgcagcattcaatgctgaccttgtccaacctccatcacccttgctgcccaaattactttgatctctaagtacatcatgatgtaagctccattggagcttgtaggcctaggatcttcttcatcaatggattcctttgcttcttggaagatgaatggcagtggaacggataaaggaagagagagaggagacgccacttcaaagagaagatgagtttagaaaaagcccaccaccataggaggccatggataagagctttgaggaagaaggagatgaatgaagggagagggagagaagagcacgaaattttgtgctctaaatgagctctgaaatctgaagtttaatattcaaatgatcaaagttgaaaaaaatgcacacacatgacctctatttatagcctaagtgtcacaaaattggagggaaattcaaatttcacttgaatttgaaattgaatttgtggagccaaaaattcacttaatatgattagtgaaatttaattatgtttcaaccccactaatccaagatcaattccaagattctccactaagtgtgcttaagtggcatga

SEQ ID NO: 566 - DNA, 539 bp, Glycine max
tgctatgtacccctacgccaaactagtatcatagaagaaatatgatatgggagaagagcggcgtaaaaccggtaaaaaataagtcaacaaggtattgcatgcgaactttatcatagaggtccgattctctacttggcttgccaacatcatcataatcaaaaaggccaacgcctaatggcaaatattcatcgactacactgatttgaatagggcatgccctaaagacgcataccctttgcccaacattcatagactagtcgatgggacatccgagttccaggagcttagcttcctagatgcttactatggatacaaccaattcaaaatgcatgctctaaacaaggagaaaatgacattcatcactaaagatgccaactttaactgccaggacaagccaactttagtggagttgggtatgttaaagtaagttaatgacaaaaaactcccttactgagcatcatcccatgagggaacatgtttcctcaccaacccaatgagtggtgctacaagtatatacaaatatgggacaaaacttttgt

SEQ ID NO: 567 - DNA, 314 bp, Glycine max
gcatgcaagcttgtaatcgattacacaaatcttgtactctattaccagaggagaatttcagaaaataatttccaagagtcacatctgttgccatcaaaggtctatttatatgtgacatagaacacgaatttgcgaagagtttttgagaacacaaaggtcttatcctctccaaaaaagaaaaattatcttatcctcttaaaaattccttggccaatacccttgcaattcaataaggaattattttgagtgctccattgttcaatctatctctttcaagagagaattcctcttctcttcatcctatttccaaaaag

SEQ ID NO: 568 - DNA, 446 bp, Glycine max
agctgtgagacaactcaactttcataactttggactcaaatgtctgattacggaccataatatatcaagacgctaaaaattgaacacggaagctcgggcccaattcaaactgccataacttttgacttagatgtctgattgtggaccatattcgaactgccatgattggtgattctgatgtttgactaccgcccataatatatcaagactcttgaaattgattacaaaagctcctcacaaattaaactaccataacttttgattggatgtctgattgtggccgataatatatcaagatgctaagaattgaacacggaagctcctagaaaattcaaactaccataacttttgacttgaatatctgattgcggaccataatatatcaagactcttgaaattgatttcgaaagctatgagcatattcaaaactttcataacttctgact

SEQ ID NO: 569 - DNA, 437 bp, Glycine max
  unsure (1)..(437): unsure at all n locations
agctntccttcattctctttcaagttaacattttgaataatttttatcatttacaaattatttattttgaagtaataatttttgtggttagaatgaaatttgaacctgaagtttaagtgtagtaatttttggaattagattttttattttgaaattattactaataattatttataagcctctttgttcatggtttttctgccttagaaatttttacatgtgacccttcctgtttttggagttaaagaattattcgtaaattatttaattggagtaataatttttttgttagaatgaagtttgaatgtgtagtttaagtttaatagagcaagacaatagattnttttatttttatcattcacaaattatttattttaagtaataatattttttgttacaataaaattgtaagctgaagtttaagtgtattatatttt

SEQ ID NO: 570 - DNA, 383 bp, Glycine max
tatatggcctaggatgtgggtttgtgactaaattcaatttaaacacaagtcttgcacttgccacattggtacaactccctccatcaatgatcaccatgcaaactttgccattgatcaaacatctaatgtggaaaaagttttgtctttaacttttctccatagacttcaattaatgggcaagtaaccgtctaatcatcaacaaatctccctccggtggtttctacacttcctcctcatcatcctcactctctttttccttttcaacttccgactcactaatgtactctccatctctaagaatcatggctttcttgttagggcactcatgtgcataatgtcccaagccttggcaccgaaagcacttcacataccaactttttttt

SEQ ID NO: 571 - DNA, 444 bp, Glycine max
  unsure (1)..(444): unsure at all n locations
gcttgcttctatagtacatacacaatatacatcatcacaatgacattnttaacatcaacaaaatgtcatctccaggtcattgtcaacatcaacatcatctcatctcaatgtcattctcaacatcaacattatctcatctcaatgtcattccaacatcaacatcattttatctcaatgtcattctcaacatcaacatcatctcatctcaatgacattatcaacaacaacaacatcatctatatcaacataatcattaataacaacatgatctcgtatcaatattatcataaacaccaacatcgtttgtatcaattattattaatatcatcttcaatatcaacatcattctctatcaacattatcataaacatcaacgtcacctcatatcaattaatgtcattgtcataccctaatttcgtccggcgacctttgcttgatgacatg

SEQ ID NO: 572 - DNA, 438 bp, Glycine max
tagacaattacatatcctccttctttgatacagataattcaaaatactttgtttcatggtctgcccaatgaagacccttatgctcacttagctacctatatagagatatgcaatactattaagttggcgggtgtgcctactgatgcaatccagttgagtctgttctcattttctttatatggagaagctaagagatggcttgattcttttaaaggaaacagtctgaagtcatgggatgaagtggtagaaaagttcttaaagaagtacttccctgaattgaagactgcagaaggcaaagttgccatctcttccttccaccagtttctagatgaatcgttgagtgaggcactcatggtttttcagaaccaatacagctcaacatattcatagatgggttgagaccacaatctaagcagctcttggatgcttcagctgggg

SEQ ID NO: 573 - DNA, 326 bp, Glycine max
tttagccaattcagacaacaataactttttactcggatgtcttattgagtcccggaatatatcgagacgctcgaaattgaatgttgaacctctgagctaactcaaacgacaataactttttactcggatgtctgaatgagtcccgtgatatatcgagacgctcgaaattgaatgttgaaactctgagccaattcaaacgacaataaatttttaatcggatgtgtgattgagtcccggaatatatagagacgcctcgaaatgaatgtggaacctctgagcccattcaaccgccattaccttttactttgaaggttggatggggcccc

SEQ ID NO: 574 - DNA, 430 bp, Glycine max
agcttgtagggttaaagtctcacaattgttacgtgctcatgcaaaaattgtcagtcgcggctatacgagacatcttgccaaacatcgtcaggttagccataactcgactgtgctttttcttccatgctatatgaagcaaagtcattgatcctgtcaagattgatgagctggaaaatgaggccgtaattatactatgccagttggagatgtattttccccctgctttctttgacatcatgattctcttgattgtgcatctggtcatagaaatcaaatgttgtggtcctgtttatctaccgtggatgtacccagttgagcgattcatgaagatcttaaaaggatatacaaagaatctatatcatccataaccatctattgttgagagggacattgcagaacaagccattgaattttggtcacaacacattca

SEQ ID NO: 575 - DNA, 419 bp, Glycine max
tagcttatccagaagcacttttagaaatagaaatttagacaaaaaaaagtttctccataagttagaaatgatcttatagagaagttatatgacagagttcctataaatgagcttattcataagctaattttagcttatacagaagcttatttcattcttttcttcttatattttcctctcctcctagaagcgcttatggggaagtttatccaaataggccctttatatttcattgttctttctcatttccctgagtcattgctgctgaaagcaactttgacatctctcccagcaggaatatgatcgactaacctctagactcaaccccgatggtaaatcaaagcacatctagtcgagaattttacaccccattgtgtacagtcaccaaaacttacaccttttagtgttgtaatttatga

SEQ ID NO: 576 - DNA, 408 bp, Glycine max
ttggagtttccaagtgccaaatcgtcttcttcttttgtccagtcttcttctggcttcaattcattagtgggctttccttctgtgtccagcatcttgggatgttcccagcctttgatgacagctttccaggttctgctatccagtgatttgaggaaggccaccatccttgctttccagtattcatagctggttccatccacaatgggtggtctgttcactggtccttcttctttctccatgttcatcacaatttatctccctagatctcactcagtgaattagagtgcccgctctgataccaattgaaattctgatactgaggccagatgtcgtaccggatgtcacgacatcacgcttcagaacatgcagattatatttgactgtctgacagattaaacaagttaataa

SEQ ID NO: 577 - DNA, 430 bp, Glycine max
  unsure (1)..(430): unsure at all n locations
agcttgaaccttacagaccctattctagtgatcttacaagacttgttgtttccaagtaggaatgaaccaccaacttgttcatcaagctcctcaaaccaagacttgtttggggtcatatagaatgaacacccagagtccaagatccattctgtctcagagttttcatgagacaccattaaagcctcagctgactcataaccatcttcaactagagcagcatttctaggctctttagattgatcttacttgcttcctttctatctatcaggacaaaatctcctagtatgaccttctcttttgcagtggtaacatctaatgtttggtacattagatccagatcgagtttgtgacttggatctttttccttctgtcttatcatccttcgtatactatcttacacgaactgagagttcctacncatgtacataag

SEQ ID NO: 578 - DNA, 573 bp, Glycine max
tctttgagaaaacttccttgagaagctagagcttagctacacacacccctctcataactaagctcacctccttgagaagcttccttaagaagattccttaagaagctagagcttaactacacatacctctataatagctaagctcacctccttgagatgagaagctagagcttagctacacaccccctataatagctaagctcacccccatgacaaaaaacatgaaaataacaaaaaaaagtccttattacaaagacaactcaaaatgccccgaaatacaaggctaaaaccctatactactagaatggccaaaatacaaggcctagacgaaggaataacctattctaatatttacaaagataagcgggctcatacttagcccatgggctcgaaatctaccctaaggctcatgagaaccctagggcctcttcttggatctctagcccaatctacttggagtcttttagccaatgcccttgcggggtaggattgcgtcaaccctcacgactttatctgcgtagggacattgtgtatcatgccgccaacatgatacacctttactaaggccaccaa

SEQ ID NO: 579 - DNA, 412 bp, Glycine max
ttcttttggatttgattggaatttctgacttgaaagaattccttggttgctttgacacacaacactcaacacacaattgttttggtatctcaatttggggaagaccatgagccattttcttacttttcaaattacttaaactcctgaaatttaaatgaccaaacctgtgatgctacatccagctttcatcacttatagaagcagccaagcattgaaattctgcagtctgaattccaatcttgaatgctctatttcttgacaaaggggcctctataatcaacctcctatttctatcaaatatctttatttgattggcctccatctgcattgagtagcccttttctagcaactgtctcaaactcagcaaattattcttcatattgggaacatatagcacatcattgataaatga

SEQ ID NO: 580 - DNA, 462 bp, Glycine max
tggacttcctgtgttttgggaacctctccttcctcaagtgtacccaaacctcatcacctggttcaagcatgactttctttctgcttttgttggcttgccttgcatagctcgcatttttcttttcaatttgggccttcacttgctcatgcaacttcttcacatactcagctttagcctgtgcatccttatgcttaaacatagcaatgttaggcataggcaaccaatcaagaggagtcaaaggattaaatccatacactatctcaaatggtgaacaattagttgtgctatggacagcccgattataagcaaactcaacatgaggcaaacaggcttcccaagatttaagatttttctttaaaacagtcctaagcagcgtgcctaaagtcctattgactacctcagcttgaccatcaccttgtgggtgacaagtagtagaaaacaacaatttagtactaatcttac

SEQ ID NO: 581 - DNA, 425 bp, Glycine max
  unsure (1)..(425): unsure at all n locations
tagagtcacctgaagctgcagcttcctggcctttaggtaaaaagactcgtgatcgctatggatgacaaactctntgggtaataggtcatgctgccagagttgtagagccctaaccaaagcatgcaactccttaaataagagaagaggaaaggcagaggctcctaacttttgactaaaataagctatcggatgtgcctgttgggataaaacagccccaatgcccatatttgacgcatcacactcaatttgaaatgatgttgcgagattaagcataacaagaatgggtgcattatttaacctatggttgagggcagcagaggcctcttattagttgttaccccattcgaaacccacattcttcttaacaacttcacgtagaggagcagccaatgtactaacatccttatccaatctgctatagaaac

SEQ ID NO: 582 - DNA, 217 bp, Glycine max
tatactgcaaacatctacaataaaccttctcaacctcagcagcttaatcaaccactacagaacaaatatgaccttttcagcaacaagtacaattctaggtggaggaatcattcaaaccttatatggtcgaatcccttccaacaacgacaacaacaacaaccaccttatttttataaagttgctggcccaagcaaaacatattttcctccaccaatcc

SEQ ID NO: 583 - DNA, 438 bp, Glycine max
agcttgaatcggacatctgtgtgaatagttatgaccatttgaatttatcaagagcttccgttgttctatttcgagcgtctctatatgtgatgcgccataatttaacatccgtgtgaaaagttgtgaccatttgaatttctcaagagcttccgttgttcaatttcgagcctctcgacatcttatgcgcccgaatcgaacatccgtgtgaaaagttatgaccatttgaatttctcgagagcttccgatgtttaatttcgagcgtatcgatatattatatgccttaatcggacctcaatgtgaaaagttatgaccattttaattgcccgagagcttccgttgttcattttcgagcgtctctatatgtgatgtgccttaatctaacatccgtgtgaagagttatgaccatttgaatttctcaagagctttccttgtttagtt

SEQ ID NO: 584 - DNA, 540 bp, Glycine max
  unsure (1)..(540): unsure at all n locations
acctttccaacatttggtccatgaatggcagatgaaaatgacatcattcaacttgcggtagtcaataaaaattcgccacccagtgattgtccgtgtaggaataagatcattcttatcattacagatcatcttcatatcgcctttctttggcaccacctggaccaaactcacccaagtgctatcagagttggataaattagtcttgcttcaagcaacttgaggacttttttgcacacctcctccttcatagatggntgagtctcctctatggatgtctatccagtctgaattcaccttccatcattatgctatgcatgaaataggatggactaatccccttaagatcaaatatgtgtcatcctattgttgtcttgtgcttcttaagaacctccaccaatagtgcttcctcaattgaagacaacgtattattgataaccactagtttaacatcatctgcttcctgggagacatacttaaggtgaggaggtagaacccttaactcaaccttaagtttttctgtaagagtgcctttttttagct

SEQ ID NO: 585 - DNA, 437 bp, Glycine max
agcttcggctttgtcctcaatgcttcatgtagacttgcccaaaatcgcgaagtgaacctcggatccctgtcagatacaatactggaaggaattccatgcaaccttactacttctttgatatacaacatccactagcttctccattctatacttcatattcactagaataaaatgagcagatttggtaagtcgatctactatgacccatacagcatcatgtcctcgactagacttaggtaaactagatacaaaatccatggatatgctctcccatttccattccggaattgccaagggcttcaattctccttatggtcgatgatgctccgccttagccttttgacatgtcaaacaccttgctacatattcagctacatctttcttcatgccatgccaccataaacttctcttcaaatcttggtacatcttagtcattc

SEQ ID NO: 586 - DNA, 478 bp, Glycine max
  unsure (1)..(478): unsure at all n locations
cccttcatgatgaatcaagattgattcaaagatgttttgatgataacaaaggggatgaaaaaaagctcaaaggtcaattcatgataatcaaagaatgagttcaagatgttcaaagatgtttaagatgatcaagatgatcaagattgaataaaaaacacttcaagaatcaagaatcaagattcaaggttcaagcttccaagaatcaatatcaagattcaagactcaatattcaagaatcaagagaagacttaaatgagataagtatgaaaaggttttttcaaaaacttagtagcacatggatgttttctcaaaaaatgtttaccaaagagtttttactctctggtaatcgattactagaatattgtaatcgattaccagtagcaaaaaatgattttgaaaaagttttcacatgaatttacaacgttccaattgatttcaaaaagttgtaatcgattacaatgttntggtaatcgattac

SEQ ID NO: 587 - DNA, 334 bp, Glycine max
ttgctatccaacaatgttgcttcatgctttaggatttctatacattggttctctgataaataccttgtgttgtcttcaggagctcatataaagagtgtatgcacacaagccggtatgtatgctatccgtgcccggaggaagactgtaacaaacacagacttgctttatgcaccaaataaagtcatctaaggataccagaacatcactgcaactcccaagtatatggtctacaactgaggtattttttcatctttttccgagaccatagcagctttatctttattttcccctggaaattgaagggcatgcgattctatctaattaactctctgtt

SEQ ID NO: 588 - DNA, 447 bp, Glycine max
agcttgaaggacatgcacaaagtgtgactatatgatgtggctatggcgtgtagcaagcaaatgctcacctcccccttaggctggaccaaactttaattgggttgggcttctcccaattcaattaaatttatctcccaacacacatcaaatagggcacttaatgcatgtgaaattacaaaactacccctaatccagaaactagtctaggtgccctataatacaagagctaaaaaatcctacattactagggtaccctccctacactatggagccctaaatacaagtcccaaaaataatgaaatcctaatctaatatgtacaaagataagtggtctcatacttagcccatggacccaatcttcttggagtcttctatccaatacccttgagggatagtgatgtagctccatgtggagcttgtagaccttggatcttcttcatcaatgga

SEQ ID NO: 589 - DNA, 333 bp, Glycine max
attgcacaacggaagctctcgagaaatttaaatggtcataacttttcagaatggaagtccgattcacgcgcataatatatcgagaaacttgaaattgaacaacggaagttgatgagaaattcaaacggtcataacttatcacactaaaggtctattcaggcgcataatatatcgtgacgctcgaaattgaacattggaagctctcgacaaatgctaatggtcattacttttctaatggacattcgattcatgcgcataatatatcgacacgcttgaaattgaacaacggacgcctcttataagttcaaatgcgtatagctttttacaacgaag

SEQ ID NO: 590 - DNA, 447 bp, Glycine max
agcttgtaattgaataccttaatgataaccaactatcctgtttcacagttcttaaaacataaccaagaacaatttaacatattacaacacctcataatccattataacatgttatcaaatacaattttaagcataaaaaatcaactttgttcatacaactataagtacacaaagattacaaaaatattaatgttgcttcttattctattacttttattaataaaaattaattactttaaaatcatataaataataagatctaattaattgataatataatttttagtcactaataaatgcatatgaaactcactctttttcttcttctcaaaatcacctgctaatatatatattttttgggtttctattctacattaaaacatagtaccctatttatactaatcactgactattatgctcatatagtgaacccaatttatattaatc

SEQ ID NO: 591 - DNA, 433 bp, Glycine max
agcttaccacctttcccatgatgcagtcaccagattgcgaacttccctttaaactcatgtgtgatgcctctaactatgcacttggggttgttttgtcacagagagttaataaactatcccatgtcattgcctatgcttcacgcactttagatgcaacccaagttaactacaccaacactaagaaggagcttttatctattgtttttgctttagagaaatccagatcttattttctttgctctcgtattattgtctttactgaccatgcagctttgaggtacttattgaagaagccttatgctaaacctagattgataaggtggatgcttcttcttcaggagtttgatattaagattaaagacaggagtggtgcagagaacttggttgttgatcatttgagctagattgaggaacttattgatttctttcctat

SEQ ID NO: 592 - DNA, 430 bp, Glycine max
tgtttaccccatgttgaatttgcttacaatagagttgttcataatgccactaattgttctccttttgaagttgtttatggttttaacccactaactcctcttgatcttttgcctatgcctaatgtttctgtttttaagcataaagaaggtcaagcaaaggcggactatgtgaagaagcttcatgagagagtcaaagatcaaattgagaggaaaaataaaagctatgctaaacaagccaacaaagggagaaagaaggttgtcttctaacccggagattgggtttgggtgcacatgagaaaagaaaggtttccaggacaaataaaatctaagcttcaaccaaggggagatggaccatttcaagtgcttgaaagaatcaatgacaatgcttacaaagttgagctgcccggtgagtataatgttaattccacct

SEQ ID NO: 593 - DNA, 422 bp, Glycine max
agcttatgtctggtcgagtatacatctaagcatatataactctcccaacaacttatgcatatggaattgcttccatttttttcgttccaattcatttctaagacattgtgcgagactaaatttgtctcctttctgaattggaatgggtgatgttgagcacttttccatcctgaatctctctagtactttattgatatatgatttctgagacaaccctaacaatccttgtgatctatttctgaatatttttatccctatcacataacttgcctcacccatatcttgcattttaaagatgctagagagaaacttcttagtctcatgaagtagaccaagatcattagttgcaagcaaggtatcatcaacatgtagaattagaaaaataaccttactcccactgaccttcaaatatatacactgat

SEQ ID NO: 594 - DNA, 229 bp, Glycine max
tttcactctgatgtccgattcaggcgcagaatatatcgagaagttcgaaaatgaacaaaggaagctcttgagcactatcaatgatcataacttttaactcggatgtccgatttacgcgcataatatatccacacatatcaaattgaacaatggaagctcttgagaaattcaaacggtcataactatttactcggagggccgagtcagtctcactatatattgagaccct

SEQ ID NO: 595 - DNA, 374 bp, Glycine max
agctttcattgttcaatttctagcgactctatatcttatgcgcctgaatctgacctgcgagtgaaaagttttgaccatttgaatttctcgagagcttccgttgaccaatattgagcgcatcgatatattatacgcctgtatcggacctccgagtgaaagactatgagcatatgaaatgctctagagcgtccattgttcaatattgagcgactcgatttattatgcgcccgaatcggaccttctacgtgaaggttatgaccattggaatccctcgagagcgtcgggtgctcaatttcgagcgtctggatatattatgcgcctgaacatgacttccgtgtgaaaacttctgaccatttgtatttctcgagagcttg

SEQ ID NO: 596 - DNA, 443 bp, Glycine max
  unsure (1)..(443): unsure at all n locations
agctntactattcaaagaatagccaagaaatataccttcatatgattttgcatcaaacttgcccaagttgtctttcccattatttatcacaaagcatttacatcaacaaatatgaagatgggaaatatttggttttcttcctttgtatagttcatatggtgttttctttaagacaggtataattaatgcttattcattatatagcatgcaatattaacagcttcagcccaaaaatatttaggaagatttgtatcattaagtaaagttctagctaattcttctaatatctattttcctctcaactactccattttgttgagaggttctaggtgtagaaaaattatgttctataccattttcatcacaaaataattcataatatttattctcagattctcctccatgatcacttctaatggatgcaatgttgagattnttcttat

SEQ ID NO: 597 - DNA, 525 bp, Glycine max
ttgagcaaattgaaatgacaataactttatacacggatgtccggttgagtcccgtaagatatcgagacgctcaaaatttagatccgaagctctgagaaaattgaattgacaataactttatacacggatgtccggttgagtcctgtaatatatcgagacgctgcaaattgaaaacggaagctcgtaggaaattcaaacgacaataactttttactcggatgttcgattgaatcgggtaatatatcgagacgctcaaaattgagactagaagctctgagcaaattgaaatgacaataactttatacacggatgtccggttgagtcccgtaatatatcgagacgctccaaattgagaacggaaactcttaggaaattcaaacgacaataactctttactcggatgcccgacagagtgtcgtaatatatcgagagacgctccatattgaaaacggaagctcgtatcaaattcaaacgacaataactttttactcggatgtctgattgagtcccgtaatatatcgagac

SEQ ID NO: 598 - DNA, 491 bp, Glycine max
ctataaaactaagcttatgctgcaacatttacatagacctcctcaacctcagcagcaaaatcaaccacagcagaacaattatgacctctccagcaacagatacaaccctggatgaaggaatcaccctaacctcaaatggtccagccctcagcaacaacaacagcagcctgctccttccttccaaaatgctgctggcccaagcagaccatacattcctccaccaatccaacaacagcaacaacctcagaaacagccaacagttgaggcccctccacaaccttccctcgaagaacttgtgaggaaaatgactatgcagaacatgcagtttcagcaagagaccagagcttccattcagagcttgactaatcagatgggacaattagctacacaattgaatcaacaacagtcccagaattctgacaagctaccttctcaagctgtccaaaatcccaaaaatgtcagtgccatttcattgaggtcgggaaagcagt

SEQ ID NO: 599 - DNA, 428 bp, Glycine max
  unsure (1)..(428): unsure at all n locations
agcttgtctaaggcgcagaagcatcagcaaaatgtttacataattntgcttgacagttccagcatcagcatattcctaacatgacatgacatcatgcacatgtcaatagtggacttcaaaaatagcttaccaagaaaatatacttacatgaagtcatgaacaatactattatcaaatgctcccacttgatttgagttggaaaaataggcgcaaccacattacaaataaaatattatagaagtcacatgagattcctttgtaaagacaaaccatacctgaaactgtgcacgtgaatcagcctctagtttggaatagaaatcacgttcctccatagaaaaatcaacttttttcagctctatatacttaggcggcaaggaaataataggttccccgtcaagaagtgtacctacagagaatgatcatcacat

SEQ ID NO: 600 - DNA, 453 bp, Glycine max
  unsure (1)..(453): unsure at all n locations
tcttctgctggcaacaatggatttcaacttgcaagtagtgcagacaacagtacaccaaaatataaaagaccgcctgatgatacttcatccccctttggattatctgaaagtgaagaatctggagcgggggaaaacaaaataaaagaaaaagctgtgaatggaagtgactttgctatggccgcagataaggctggggcttctgtgtttcaaatgaggaagaataagatatcaactgatgaatctggagatagtgtgcatagacaaggaagaagtggaaggaatttatcattagtaaggccagacctcccttctgggagggagaagtcagagaatgtaccaacaatgaagccagtacaagacatgaagcctaatgataagagtaaaacgtaagctggatttattnttagatctagttcatcctttctacttctattttccaaaactgtcctcata

SEQ ID NO: 601 - DNA, 439 bp, Glycine max
gagctttgactgacccctcacacttatactcctaacacgtcccgctaactaataaatcatcatttggcaagtacccatccttcttaatttttgaatgaagatcatgacgtatatgccccaggggctcatattgagagcgtgggttatcaccaactacgaatacttgcactgtatcgacaacttctatccaactacaacctgcctgcttttttaaccccatgtccttcattctcatcctaacgatcgctgcttctttccatttccctactgaagcatacatatttgaaagtaatgaataggtgcctgcattctgtggatcaattttcaaaattatctctgctacaagcttcccaatatcagcatttccatgcacattacatgcagcaaggagcgctcaccagacagtcaatggcacctcttccccaagcccctgaatgat

SEQ ID NO: 602 - DNA, 473 bp, Glycine max
ttgagaaaattcaacaacaataaatttttactcggatgtctgattgagtcatgtaatatttcaagacgctcgaaattgaataccgaagctctgagcaaattcaaaccacaattactttttactcggatgtctgaatgagtcccgtaatatatcgacacgctcgaaaatgaatgtttatgctctgagcaaattcaaacgacaataactttttactcggatgtctgattaagtctcgtaatatatcgagacgctcgaaattgaatactaaagctctgagcaaattcaaacgacaataactttttactcggttgtctgagtgagtcccgtaatatatcgagacgctcaaaattgaatgtttatgctctgagcaaattcaaacgacaataactctttactcggacgtgtgactgagtcccctaatatatcgccacgctcgaaatagagtcttgatgctctgagcaaaatcaaacgac

SEQ ID NO: 603 - DNA, 437 bp, Glycine max
agcttgtttaccccatgttgaatttgcttacaatatagctgttcatagcaccactaattgttctccttttgaagttgtttatggttttaacccactaactcctcttgatcttttgcctatgcctaatgtttctgtttttaagcataaagaaggtcaagcaaaggcggactatgtgaagaagcttcatgagagagtcaaagatcaaattgagaggaaaaataaaagctatgctaaacaagccaacaaagggagaaagaaggttgtcttcgaacccagagattgggtttgggtgcacatgagaaaagaaaggtttccggaacaaaggaaatcaaagcttcaaccaaggggatatggaccatttcaagtgcttgaaagaatcaatgacaatgcttacaaagttgagctgcccggcgagtataatattagttccaccttca

SEQ ID NO: 604 - DNA, 322 bp, Glycine max
tctacattcaatttcgagcgtctcgatatgttacgggactcaatgatacatcccagtaaaaagttgttgtcgcttgaattggctcacagcttcaacattcaatttcgagcgtctcgttctattacgaggctcaatcagacatccgagtaaaaagttattgtcgtttgaattggctgacagcttcaacattcaatgtcgagcgtctcgatatgttactggactcgatccgacatgcgagcaaaaagttattgtcgtttgaattgtctcaaagcttcgacattcaatgacgagcctctcgatatattacgggactcaatcagac

SEQ ID NO: 605 - DNA, 378 bp, Glycine max
  unsure (1)..(378): unsure at all n locations
tcgaatgtctgattgagccccgaacatatcgagacgctcngaaatgaatggtgaacctttgagctaattcaaacgacaataacatttttctcggatgtctggatgagtcccgtagcataatcagacgctcgaaattgaatggtgaacctcttagctaattcaaacgacaataacttttttcacggatgtctgatagagtcccgtaacatatcgagacgctcgaaattgaatggtgaagctctgagccaattcaaacgacaataactttnttctcggatgtctgatagagtcccgtaatatatcgagacgctcgaaattgaatgttgaaactcttagccaattcaaacaacaataactttttactcggatgtctgattg

SEQ ID NO: 606 - DNA, 366 bp, Glycine max
ggaatgaatttgttttctagcaaaacaaattattatacctatagttcatattgctaaatggaccaatctaagttttgtgcttttatttgttttttgcttagctagtctcttcttaagtaatctcccttgtttttcttgaacaataggtggcagaacgtaacaatgatcctcaattggcagacttcattgagagcgagttcttgtatgagcaggtaaaacttgcagttgaattcatagtatggttggatttcataagatataagactccttgaccattgtatgtaatacaatactctgaactctttacgttctaaaataattggtgtcttttacacggatcaagaaaataataataaataaatgaat

SEQ ID NO: 607 - DNA, 467 bp, Glycine max
  unsure (1)..(467): unsure at all n locations
gcaagcttatgcgttagctgactcanatcttgattcagagtcttcaaagtatgtgatctgtctcttggaggaagctcttagatgccctttagatggtcttcggaaaggacaagtgagtgctaagttttggattaaacattttatgctgatatcagtgctgaagtaatgtatttatatttgttattcttttaaattgtaggcactgaataatctagggagtgtctatgtagactgtgataaactggaccttgctgctgactgctacatgaatgcactcaacatcaagcatacacgagcacatcaggggttggcacgtgtatatcatcttaaaaatctccggaaagcagcatatgatgagatgacaaagctaatagaaaaggctcggagtaatgcatcagcttatgagaaacgttcagaatattgcgaccgtgacatggcaaagagtgatcttagtatggcatcacaat

SEQ ID NO: 608 - DNA, 407 bp, Glycine max
  unsure (1)..(407): unsure at all n locations
tactttctgacagacatgattacagaatttatattttcatattggtaaatttgatctgtaaacctttatactttataaaatatgcaaatatagtcttctttttctaagaattcatcatggtttattagagttaaaaaaaaaaagagtaaatgcatatatattctaaagcttgaaaatcacattattaataaaattacaagatttcaattacaattatgttcggtgagatatttcagtaagtttctagtattttttattagctgaaaaaattatttgactattcgataaataaaccatntttaatagttcttaacattttttgaaacattatttagaataatattttttaaaacgttaatgtttaactttttatatnnttttattnttatctttgatatatttattca

SEQ ID NO: 609 - DNA, 390 bp, Glycine max
  unsure (1)..(390): unsure at all n locations
ttcatctagttctaccaaatataatcaagtgtctagctctgatggttgaataaaatacgtaagttcttattaaccctctagcatatattttttattctcatccataaaaaaataagaatagcttgatgtatatatactattaattaagaatttttattatttatactaattatatgcaattacttacaaaagttactttttgacagaatatctcatatattgaatctagttggaacgattcaaaacacaacttaaatatgttttcaaattatattgagattgacttttaaaattaaaatcatcaaattaattttatgccaaaaaaattagtgagatggaacaagtcataattactctgaaaaagagtngaactttatagttttaactttt

SEQ ID NO: 610 - DNA, 355 bp, Glycine max
tttaggggtatttgactaatgagggtttatgggtagtttattaattagggtttagtgttacttaaccaattagggtttatgggtatttgaaaaattaagctttagtgttacttcaccagttagggtttaggattatgagacaatttataattacttgattgatcactatttaggggtatttgaaatttgggattcataggttacttgataaattggagtttatgtgcgtttatctaactagggttatgaatacttgactaattagggtttagttttacttgatcgataattaagggttatcgtacttgagtaattaacgtctttgggtacttgacaaattatgatttatgattac

SEQ ID NO: 611 - DNA, 310 bp, Glycine max
  unsure (1)..(310): unsure at all n locations
aacacacttcaatcaaaatgggtttggccctaggtgcacaagatatggaatggaacaacttgatgtgaggatactttcttacatggtaagctngaaaaaaaatccatatgactcatgcagaaagttntctcccaaaaggtgaagaaaggcaggtatgcttgctaaaaatgtcactttatggccttaagcaatcacctcgctagtggtacaaaagggttgatactttcatttttaataatggctttaaaaggtgcgagtatgatggttatgtttacttganngacaatgagcatgatgctattgtctactt

SEQ ID NO: 612 - DNA, 446 bp, Glycine max
  unsure (1)..(446): unsure at all n locations
agatggaccatttcatgtgcttgaaagaatctttgaaaatgcttacaaagttgagctgcccggtgagtataatgttagttccaccttcaatgtctctgatttatctctttttgatgcagaaggagaatccgattngaggacaaatccttctcaagagggagagaatgatgaggacatgaccaagagcaagggcaaggatccacttgaaggacttggaggacctatgacaagggctagagcaaggaaagccaaggaagctcttcaacaagtgttgtccatactgtttgattacaagcccaagtttcaaggagaaaagtccaaggttgtgagttgtatcatggcccanatggaggaggactaaatgacaccactttgtttcaattttagagtgtttagtttggctaaataatggcccaatccttgtaaagttggctaaccaaaaatat

SEQ ID NO: 613 - DNA, 382 bp, Glycine max
tctttgtttcagatgaggcagatgagtttgtagctacctcatgctgtgagttttaagccatcttctcaatcaagtttctggcttcagtaggagtcatgtctccaagggctccaccaccggcagcatctatcatacttctctccatattactgagtccttcataaaaatattggagaagaagctgctccgaaatctgatggtgagggcaactggcacatagttttttaaatctctcccagtattcatatatgctctctccactgagttgtctaatacctgagatatccttcctgatggccgaggtcctggaagcatggaaattttttttctaaaaatactctcttaaggttatcccagctcgtgatgaaccttggagcaaggt

SEQ ID NO: 614 - DNA, 209 bp, Glycine max
  unsure (1)..(209): unsure at all n locations
agaagatggtgagaggactaccctctattaaccaccttgatcaactctgtgaaggatgtttattggcaagcaatttagaatgagttttccagaggagtcaaacgcaagagctaagaagccacttgagctaatacatgctgacgttngtgggccaatcaagccaagctcactaagtaaaaataactatttcgggcttttcattaatgatt

SEQ ID NO: 615 - DNA, 397 bp, Glycine max
tcatgcaactggaacatggaaagaagacagtatatactatgcattgaagatttctcaaaccttatcacccatatcggcaattaaagaaagcttttaatggaagccaagagaatgaaagtacaccaaaaagccttaggctgaaataaagtttatgattgggtaaaggacatcgtaagtatctttgggaagaacccaaagaaggaatcatttgagaagaacatatggaagaaaaggtcaatattctttgatctttcatactggtctgatctagatgtacgacaatgtatagacataatgcatgtcatgaaaaatgtttgtgatagtttaattggcaccattaacattaaagacaagacaaaggatggtttgaaatgtcatcaatatttgattgacatgg

SEQ ID NO: 616 - DNA, 355 bp, Glycine max
ttacatgtcaaattcttgttcccaccacattatgagtttttaagtttaatgggcagcatgttgatatactgaaagattcaatgttccaaatgaataataatcaagtggcctagtgcatctgaatttttgataatcaaatcaatgcataagccctttaagcatgttttgatgtcctagaaatagtagatttttaacatttgagcaagaaaatcaaaacatacagtcatcactcctgttgctgcactgacaccagcttcaccaaacatagcagttgctgcttcagtgacaagagcagttgccccaatattgaccaccctgcatacaacaaaatactagcatgagaaacattctatac

SEQ ID NO: 617 - DNA, 354 bp, Glycine max
tctgttgttcaatttcgaacgtgtcgatatattatgcgtcttgaatcgtacctccgagttaaaagttatgaccatttgaatttctcgagagcttccgttgttcaattacgaccgtctctatatattatgcgccttaatcggacctccgagtgaaaagttatgaccatttgaattggtcaagagcttccattgttcaatttcgagcgtctcgatatattatgcgcccgaatcggacatccgagtgaaaagttatgaccatttcaatttcttgagagcttccgttgttaaatttcgagcgtctcgatatattatgtgcctgaatcggaccttcgagttaaaagttatgaccatttg

SEQ ID NO: 618 - DNA, 347 bp, Glycine max
tctgcatgtttagagatttctagttagagaatgttttattcgggttgcttggggactggacgtaggcacaagggtgtggccgaacctgtataaatttgagtttgcactttcttttcccttaatctcctttatttattattgctttatattcatattcaaattgttttatttgaatcaatatttaagaagattgtcattaagggaattcataacttgaataaaaagtgaaatacatttttaattggggaagtagtttggaatatcttaattcaaccccccccccttcttaagatatctgaggccgcttgtctaacaagtggtatcacagctttattcttgtataaagt

SEQ ID NO: 619 - DNA, 395 bp, Glycine max
  unsure (1)..(395): unsure at all n locations
gcttgtgcattcaatatcctgatgagggtgttccatatgttctcaagactgttctaatacattcgctgcccaagcatcatggtcttgcaggtgaagatcctcataagcatcttaaggagttccatattgtttgttccaccatgaagccccctgatgtccaggaagatcatatctttctaaaggcttttcctcattctctggagggagtggcaaaagattggctttactaccttgctcccaagtccattttcagctgggatgaccttaagagggtgttcttggagaaattcttccctgcatccaggaccattgccatcagaaaagacatttcaggcatcangcaacttagtggagaaagcctgtataagtactgggaaagattcaagaaattatgt

SEQ ID NO: 620 - DNA, 473 bp, Glycine max
  unsure (1)..(473): unsure at all n locations
cggatccttaagcacctgcggctgcaagcttgaatatttaagcaagagtntggagtgcacattgaagttactaagatgtggagagccatgaaagaagcaaagcaactagtggaagggaatgagaggaaacaatatgccaaagtatttgattatgcacatgaattattgatgagcaatcctggatcaacagttaaaatcaacacagtgccaagtccagaaggtccaccacaattttagaggctatatatttgtcttgctggctgtaagaaggggtttggtgctggatgtaaaccattcataggtctagatggatgtttactaaagagtgcatttggaggaaacttgctttcttgctgtgggcttgatgacaataaccacatctttgttattgcttatgctgntgnggacattgagaacaaagacaattggaaatggttttaactttgntgcatgaagatcttggggattacata

SEQ ID NO: 621 - DNA, 307 bp, Glycine max
agcttccattggttgaatttgagcacctcgatatatatgcgcctgattctaatctccgagtgaaaagttacgaccatttgaattcctccagagcttccattgttgaatttcgagcgtctcgatatattatgcacaagaatcggacctctgagtgaaaagttatgaccatttcaatttctcgagagcttccgttgctcaatttctagcacctcgatatattatgcgcctgaatcggacctccaagttaaaagctatgaccatttgagattctcgagagcttccgttgttcaatctggagcgtctcgat

SEQ ID NO: 622 - DNA, 363 bp, Glycine max
tgttgaattaccgaaaggaaataaggtagttgtagcataatggatatttcataacaaattggacgaaaatggtgaggttgtgagaaacaaggcaatattagtctctaaaggtgactcacaataggaaggtataaactacatagaaacttttgcacatattgcacgtttagaagcaatacgcatcttactttcatttgcaacctatagtaatatgaagttgtattaaatggatctaaaaaacacatttttaaatggattaatccaagaagaagtttctattgaacaatctcctggatttcaaagtgaaacccttcttcaacatgtttttaaactcaacaaagcatcatatggacttaaacaagc

SEQ ID NO: 623 - DNA, 442 bp, Glycine max
  unsure (1)..(442): unsure at all n locations
gcttgctaacccatggaagctcctaatatctcccacactntntaggttgtgccattcttggatggccttgattntcttagggtccacttggaccccatttctaccaactacaaaacctaagaaaactatattatctatacaaaaggtacacttctctatattttcatagagggtgttnttcctaaggactgaaagaacttgtctgagatgtcctaagtgatcatctagcctcctactatacactaaaatatcatcaaaataaaaaactacaaatctacctatgaaatcccttaagacatgatgcataagcctcataaaggtgcttggtgcattagtgagcccaaaaggcatcactagccattcatacaaaccanacttggtcttgaaagcagntttccactcatcaccctttttcatcctgatttggtgataaccactttta

SEQ ID NO: 624 - DNA, 463 bp, Glycine max
  unsure (1)..(463): unsure at all n locations
gcttatgctgcanacacttataatagacctccttaacagcaaaaccttcttcaatagaataattatgacctttcaagcaatagatacaatccaggttggaggaatcatccaaatctgagatagacaagtcctccacaacaacatcagcctgtccctcctttccaaaatgctactggtccaagcaagccatatgttcctcctccaatgcaacaacaacagtagcagtcacaacaaagacaacaagcaactgaggctcctcctcaaccttccttagaggatttagtgaggcaaatgaccatccagaatatgcaatttcagcaagagacaagagcctccattcagagtctgacaaattagatggggcagatggctactcagttgaaccaagctcaatcccaaaattctgacaaattgccttcacaaactatgcagaatccgaaaaatatgagtgccatcaccttga

SEQ ID NO: 625 - DNA, 360 bp, Glycine max
tcagaattcaatttcgagcgtctcaatatattacgggactcaatcatatattcgtgcaaaaagttattgtcgtttgaattagctcagagcttcagaattcaatttcgatcatctcgatatattacgagactcaatcagacatctgagtaaaaaagttattgtcgtttgaattagctcagagcttcaaaattcaatttcgatcgtcttgatatattacaggactcaatcagacatctgagtaaaaaagttatggtcgtttgaatatgctgagagcttcaacattcaatttcgagcgtctcgatgtattacgggaatcaatcagacatccgagtaaaaagttattgccgttggaattagctc

SEQ ID NO: 626 - DNA, 430 bp, Glycine max
  unsure (1)..(430): unsure at all n locations
agctntgagctaattcaaacgacaataatgttttgctcggatgtctgattgagtcccgtaatacatcgagacgctcgaaattgaatgttgaagctctcagcaaattcaaacgataataactttttactcggatgtttgattgagtcccgtaatacatcgagacgctcgaaattgaatgttgaagctctcagcaaattcaaacgacaataacttttttactcagatgtctgatagagtcccgtaatatatcgagatgatcgaaattgaattctgaagctctgagctaatccaaacgacaataactttttgctcggatgtctgattgagtcccgttatctattgagacgctcgaaattgaattctgaacctcagagctaattcaaacgacgaataacttttactcggatgtgtgattgagtcccgtaataca

SEQ ID NO: 627 - DNA, 388 bp, Glycine max
tgacacttcgagacttatacaatactcaagcttcccgccaatggtatttgaggtttaatgataccattatttcctttagatttaaggaaaatactgtttatcggtgtatgtatctgaaggtcagtgggagtaaggttattttctaattttgtatattgatgatatcttgcttacaactaacgatcttggtcttcttcgtgagactaagaaatttctctctagaaactttgaagtgaaagatatgggtgaggtaagctatgtgatagggataaaaatattccataatagatcacaaggattgttaggtttatctcagacagtatatatatcgataaagtgctagagagattcaagatggaaaggtgtttaacattgcctactctaattt

SEQ ID NO: 628 - DNA, 449 bp, Glycine max
  unsure (1)..(449): unsure at all n locations
agctntaaggtgtgcaactccaccattttcatattagaacactggtaatgggtctactatcattgttatcatttatttctccatcattgaggtgccacttgagctgccaggtctctccacctttgggtgtattctttgaaacatttgtgcccctttttgcacatgttctgtagttgcatcctatctggagccatatcagaattgtactgacactgcctaacgaaagcaactattaggtccttccaagaatggactcgggaaggttccaagttagtgtaccaggtaacagctaccccagtaagactttcttgggagaaatgtatcagtagttcctcatcttttgcgtatgcccccaccttccgacaatacatctttagatggttcttggggaaagtagtccccttgtacttgtcaaagtccggcaccttgaacttgggaggggtaatgat

SEQ ID NO: 629 - DNA, 358 bp, Glycine max
tcaacattcaatttttagcgtctcgatgtatgacgggactcaatcagacatccgagtaaaaagttattgtcgtttgaattagctcagagcttcaacattcaattttgagagtctcgttatattacgggacacaatcagacatccgagtaaaaagttattgtcttttggattggctcagagatttaacattcaatttcgagcgtctcgatatatgacgggactcaatcagacatccgagtaaaaagttattgtcgtttgaatttgctcagagcttcaacattcaatttcgagcgtctcgatatatgacgggactcaatcagacatcccgagtaaaagttattgtcgtttgaattagctc

SEQ ID NO: 630 - DNA, 435 bp, Glycine max
  unsure (1)..(435): unsure at all n locations
agctntgagccaattcatacgacaataactntttactcggatgcctgattgaggcccgtaatatatcgagacgctcgaaattgaatgtggaagctctgagccaattcaaacgacaataactttttactcggatgtctgattgacgccccgaatatatcgacacgctcgaaattgaatgttgaagctctgagcaaattcaaacgacaataactttttactcggatgtctgattgagtcctgtcatatatcgagacgctcgaaatngaatgttgaagctctgagccaattcaaacgacaataactttttactcggatgtctgattgagtcccgtaatatatcgagacgctcaaaattgaatgttgaagctctgagccaantcaaacgacaataactntttactcggatgtctgattgagtcccgtcatatatcgaga

SEQ ID NO: 631 - DNA, 435 bp, Glycine max
agcttgtatttctctcccatggttgatataatatctatgatggtatcaaagctcttcctttgaagagccctgctgcgctacttatattcttcctctcgattatcatatccttcattcttacatcatgagtgaacaacaacaagatcaatcacttaatgtacacagtccttattacctttatctgggagaaaatccagcgatagctttggtttcttcggttcttgattcatccaattataattcatggagtcgatctatgcttattgcattaagtgcaaagaacaaatctgagtttgtcgatggttttattcaaagacctgcatcagatcatgcacttcatgcagcttggaagaggtgaataatatggtgatttcgtggttggttcattcaatctctctttcaattaggcaaacatactatggatggataatgcac

SEQ ID NO: 632 - DNA, 461 bp, Glycine max
  unsure (1)..(461): unsure at all n locations
agcttatgctacanacatctacaatagacctcctcatcctcagcggctatataagccacaacagaacaattatgacctctncagcaacaggtacaaatccgggtggaggaatcatccaaccttagatggtcgaatccttcacaacagtagcaacaacaataacaggcttattttagaatgttgctggcccaagcagaccatacgttcctccaccaatccagcagcaacaacagcaacagccccagaaacaacaaatagttaaggctcctccgcaaccttcctttgaagaactngggaggcaaatgactatgcaaaacatgtagtttcaacaagagaccagagcctccattcagagcttaactaatcagatggaacaattggccacacagttaaatcaacaacagtcccagaattctgacagaataccttctcaatctgtccagaatcccacaaatgtgagt

SEQ ID NO: 633 - DNA, 300 bp, Glycine max
  unsure (1)..(300): unsure at all n locations
gcaagcttgagcagantcanacgacaataactnttaatcggacggcatttgttcccctaaatatcaaactgctccaaattgaaaatggaagctcgtagcaaatttaaacgagaataactttttactcaaatgtgcgattgagtcacgtaatatatcgagacgctctaaattgaaaacggaagctcatagcaaatgtaaaccgtaataacctttaactcggatgtccgattgagtcctgtgatatattgagacgctcaaatatgaaaacagaagctctgcgcaaattctaacaacaataac

SEQ ID NO: 634 - DNA, 399 bp, Glycine max
ctaagcttaagaaaaagatggcctcagcaaattccttatttccagtaaggaattctatcaatagacctccaatctttaatggagagggttaccactactggaaaacccgaatgcaaatttttatcgaggcaatagatctaaatatctgggaagccattgaaataaggccttatatacccaccacagtagaaagagtttcaatagatggtagttcatcaagtgaaagcataaccatagaaaaacctagagatagatggtctgaagaggatagaaaacgagtacaatacaacctaaaagccaaaaacataataacatctgccctaggaatggatgaatatttcagagtttcaaattgcaagagtgctaaggaaatgtgggacactcttcgattaacacatg

SEQ ID NO: 635 - DNA, 234 bp, Glycine max
tctcatgatgaaaaatcaccattgaaggacctcattgaagatcaaagatccagcctccatagaagctccacaagcaagcttccatcaagttatgaccatttgaatttctcgagatcttccgtggttcaatttcgggcgtctccatatgtcatgtgcctgaatcggacctccgtaagaaaatatatgaccatttgaacttctctagagctttcgttgtttaatttcgagcttctc

SEQ ID NO: 636 - DNA, 389 bp, Glycine max
tttctcagtcgtctgtaaggatgattgtgtgttagaaagcgacgatccctactgtagactgtttttctgccatgtttaagttgtatgtaacttgtattttcttcacagatggggcatgcatgatgacccttaacactgtaaccgctgagattcccatatgctggaaagtcattaatggtacaaaaaagcattgcacgcatttcaaaggtctccttgtgaaacacatcaaacactacaaccccctcgtcccacaactttctcagatcttcaaccaacagacttagataaacatcaatgtcatttcctggctgtcttgggctcgatatcatcatagacaacatcatgtattttcgcttcatgcataaccaaggaggcaaattgtaaattac

SEQ ID NO: 637 - DNA, 482 bp, Glycine max
ttaagcacctgagctgcagctatgctgaaacattataatagacctctctagcagcaaaaccatctacaatagaataatcatgacctttcaagcaatagatacaatccaggttggaggaatcatccaaatctaggatggacaagtcctccacaacaacaacagtctatccctccttttcagaatgctgctggtccaagcaagccatatgttcctcctccaatgcagcaatagcagcaacaacaacaaagacaacaagcaactgaggcccctcctcaaccttccttaaaagagttagtgaggcaaatgaccatccagaatatgcaatttcagcaagagacaagagcctccattcaaagtctgacaaatcagatagggcagatggctacttagatgaatcaagctcaatcccaaaattctgacaaattgccttcacaaactgtgcagaatccaaaaaatgtgagtgccatcaccttgaggtctgg

SEQ ID NO: 638 - DNA, 372 bp, Glycine max
agcttcggttaatctcaaagctacaaaaacataacctcgttttaggattaccaagtatgtcatacaaagatgatttactttatgaggcatgtgaaaagggaaaaaaattaaaaaactcttttttcaagaaaaaacattgtttccacctcaagaccttacatattgatctgtttagtccaaccaaaagacatctatcaggggaaaaaaggtattgactcatcagagccgatgactactctaaatggacatgggttaacttcctagcctagaagaatgaatcttttagtgtcttctttaaattttgtaaaagaattcaaaatgaaaagaattatgcattaccttaatcaaaagtgatcatatgggagaatttga

SEQ ID NO: 639 - DNA, 370 bp, Glycine max
tatagcttacttattatccacaaaaagcttcactccattactttccttgatttttaattcttgtaataatgtgtccaacgagacagcttggcaagcactcattgtagctggaacatacttagcttcacatgttgataaagccactatggattgcttcttagaactccatgatattggtgttgcaccatacatgaatatgtaacctatagtactctttctgtcatctctgtctcctccccaatccgcatcagtatatcccactaattcctctgagttgttgttgtctttatttggaaatagaattccagtattgatggtcccttttatgaaccttagaatcctcttagcagttaggagatgaggaattctg

SEQ ID NO: 640 - DNA, 369 bp, Glycine max
ttcactcgcatgtccgattcaggcgcatagcgtatttatacgctagaaatctaacaaaggaagctctcgagaaattcaaatggtcataacttttcactcgcatgtccgattcaggcgcataacatatcgagacgcttgaaattgaacaactgattttctcgagaaattcaaatggtcataacttttaactcgcatgtccgattcaggcgcataacatatcgagacgctcgaaattgaacaacggatgttctcgagaaattcaaatggtcataacttttcactctcatgtgcgattcaggcgcataacttatcgagacgctcgaaattgaacaacggaagctctcgagatattcaaatagtcataacttt

SEQ ID NO: 641 - DNA, 311 bp, Glycine max
tacttcgggcgtgtattatagagcaacaaggtagcttgatggattgtttgccattgattgagtttacttacaacaatagctaccaagccagtattggtatggctccttttgaagctttatatggacgaaagtgcaaaactcctaattgttggtatgatgatggagaagcagtacttcttggacctgaaatgctacaacagattaacgaacaagtgaagttgatttgagagaagataaaggcatctcacgataggcaggagagctattatgatagaaggaggaagccactatattctcaggaaggagaacat

SEQ ID NO: 642 - DNA, 321 bp, Glycine max
tctcgatatacaatagggcttaatcggacatccgagttattagatattgtcgttagatttttctcagagcttccattttcaattacgagcgcctcgatattcaacgggactcaatcggacatccgagtcaaaagttattgtcggttgaatttacttagaagttctgttttcaatttcgagcgtctcgaaatattatagggctcaatcggacatccgaattaaaagttattgtcgtttgaatatacttagagcttttgtattcaattacgagcgtctcgatattctacaggacacaatcggacatccgagtcaaagatattg

SEQ ID NO: 643 - DNA, 433 bp, Glycine max
  unsure (1)..(433): unsure at all n locations
agcttgatcttttagttttttatctntaatctttaatccctgaacgaactattcaagtttgtaattcgaactttaattatcttttaattcgttcctaaagatagatcgccaaatctgttgctaactgcacattaatctgttaaagatataacagatttatgtgtccagtattttcgggcaagatgtcctggacatcgtatccgacatcgtggatcctgcagcttcaattcttcatttgacattntatcttgccttgtgcattgtgcagcccaatctgattccttgacataacgttggacatcatgtgcagcaactctagctttccttcattatctaagtgcttatggtttaacaaaattttagccaatcttttaaaactcagtaaagctaagcactaacaatctccccctttggcanatttgtctaaacatac

SEQ ID NO: 644 - DNA, 445 bp, Glycine max
  unsure (1)..(445): unsure at all n locations
agcttatgctgcanatatttacaacagaccttcttatcctcagcagcagaatcaaccacagcagaacaattatgacctttccagcaacagatacaaccctggatggaggaatcaccctaacctcagatggtccagccctcagcaacaacagcagcctgctccttccttccaaaatgctgctggcccaagcagaccatacattcctccaccaatccaacaacaacaacaaccccagaaacagccaacagttgaggcccctccacaaccttccctcgaagaacttgtgaggcaaatgactatgcagaacatgcagtttcagcaagagaccagagcctccattcagagcttaaccaatcagatgggacaattagctactcaattgaatcaacaacagtcccagaattctgacaagctgccttctcaagctgtccaaaaccccaaaaat

SEQ ID NO: 645 - DNA, 437 bp, Glycine max
tatttaagaggggaattatgcaaggttgtaaacttgtaatgtattgtgattataatttgtactattataagttgtaagcttttggagaagcaaagttgttgaagttatggaaggtaatggtagaaggaggaggcgccacttcagcagaatccatgcattctcttgtggaaaagcttcattcaaaggggagcattcactcataggcggtcctggattctcaaggatagtgtactgcaacgaagcggaacgcggtgaggggagtcttgtgagctatggtgacaattatgtgagtactactaagtatacagtggccactttccttcccaagtccttgtttgagcaattcaggagggttgccaatttttacttccttatctgtgcaattctgtctttattcccggtttctccttactcggctgtcagcaatgttgttcctc

SEQ ID NO: 646 - DNA, 459 bp, Glycine max
tagagcctcgggtagttcattaaatatttgtttcatttcatccaagctcatattgtccaaaacggagggtctaggggcaaccctcacaatttcaccaccttttggttcctgaactcgtgcgtcggctttaatgactagttctgaattagagtttgcaccacattttattataaatggtgaggtcgagccagtattaaattggagtacattccactgtgtaacgtcagtttcagatccagagcccagatctgttgatggcatgcgatcatgagatatatcttgaatggggtcatcttcttcaggaattgactgtatcataacaaaataaaggattcaggcatcaaagaaaatcaatccaaattaattttcatcagttgagtcctttagcatattataaaattgttaccaacttggacaacggatgaaagaagttaagcatacaatacacaatacttcgca

SEQ ID NO: 647 - DNA, 397 bp, Glycine max
actcagctgggaaattatgttctaatatgactatctttgatctaagctattataaagcttgttgcaagctcgtaatttataattgaaagttattaacttgacttattgaaatataaatgtttgaataaaatatatactggaataattgatttaaataaaataattaaatcttataaacatattcatatgatattcttatataatttttaacttttttatgtcaattagtaaaatataatacacatatcatctatcgataacaatatcttgatgtaatgctgaaataataaaataaatatcgttaatattataatggataaacattgtaatataaaaatatccgcataatattaatataataaatcacacatacattattatctatcattattaatat

SEQ ID NO: 648 - DNA, 464 bp, Glycine max
  unsure (1)..(464): unsure at all n locations
ntgaagatattcaaatgaaaataccttntaactcggatatttgagtgagtcccataatgtattgagacactcgaaatagaatacagaagctgtaagcaaattctaacgtcaataactttttactcgaatgtccgaatgagtcacgtaatatatcgagacactcgaaattcaatacagaatctctgagcaaattctaacgacaataacttttaactcagatgtctgatcgagtcccaaaatatatacagacgctcgaaattgaatacagaagctctgagcaaattcaaacgatgataagttttaacttagatgtccgatcgagtcccacaatatatcaagatgctagaaattgaatacagaagctgtgagcaaattctaatgacaataattttttacttggatgtccaattgagtcgtgtaatatttcgagacgctcganattgaatagagaagctctgaggaaa

SEQ ID NO: 649 - DNA, 267 bp, Glycine max
acttttatgctgaacaaatgatggcttgaatgtgaaaagcatgttgaaatgagaaactttgaaaattttaaaattggaaaaatttcagaaaatggtttctttagacatgaaggctttctttttaaaaaaaacaaattgtgtgtgcctaaatgttctactaaaaatttgcttgtttgtgaagcacatgaggaggtttaatggggcattttggggtccaaaagactctataaacattacaagaacagttttattggcctcatatgaaaa

SEQ ID NO: 650 - DNA, 465 bp, Glycine max
  unsure (1)..(465): unsure at all n locations
tctagactntatacaagaatgaagctctgacaccacttgttagactagtgtcctcagatatcttaagaagggggttgaattaagatactacaaactatttccccaattaaaattctatttcaatttcaatgcaagttacaagttcccttgaaaatgaactcttaaataatgattcaaatagaacaatatgaatataaatgtaaagcaataacaaataaaagagtttaagggaagagaaagtgcaaacttagatttatactggtttggtcacacccttgtgcctacgtccagtccccaagcaaccggcttgagagtttcaatatcttgtaaaattcctttacaatttctgaacacacaaggacaatacttcctttgtgttcagatttctttacaacaagagaccctcggtctctcaatcccctttgagaatttagaaagaagagaagaataaatctctcttgaaag

SEQ ID NO: 651 - DNA, 405 bp, Glycine max
agcttatgctgcaaacatttacaatagatctcctcaacctcagcagcaaaatcaaccatagcaaaaaaattatgacctctccagcaacagatacaaccctggatggaggaatcaccctaatctcagatggtctagccctcaacaacaacaacagcagcctgctccttccttccaaaatgttgctggcccaagcagaccatacattcctccaccaatccaacaacaacaacagccccagaaacaacaaacagttgacgctcctccgcaaccttccctcgaagaacttgtgaggcaaatgactatgcagaacatgcagtttcaacaagagaccagagcctccattcagagcttaactaatcagatgggacaattggctacacaattaaatcaacaacagtccctgaa

SEQ ID NO: 652 - DNA, 387 bp, Glycine max
agcttctatagaaggttcgttcctaatttctctacaatcgcatcacctctcaatgagctggtgaagaagaatgtggcatttacctggggggaaaaacaagagcaagcctttgctttgctcaagaaaagcttactaaggcacctgttctagctcttcctgacttttctaaaacttttgagctagaatgtgatgcctctggagtgggagttggagctgtattgttcaaggtgggcaccctattgcttattttagtgaaaaacttcatagtgccaccctcaactaccccacctatgataaagagctttatgccttaataagagccctccaaacttgggaacattaccttgtttccaaggaatttgtcattcatagtgatcatcaatcact

SEQ ID NO: 653 - DNA, 386 bp, Glycine max
  unsure (1)..(386): unsure at all n locations
agcttgtcaaagaatccaacctctcatggtagaagcaaacacatagaaacaagatttcactatcttagggatcaagtgaacaaagagaaactgaaagtggagtactgctacacatttgatcaacttgctgatattttaaccaaacccctcaaaggggagaggtttaaaatgttaaggggcataattggcttgatgaacttaggagatcagaattaagggaaggtgtgagagtttaattttgttttgtgtggggtagatttgtttgtgctttgaatataagagagagtaacagaattttaaaattctgttataagtactagcctaagtgtgaagggttattactctgtntttgcttgtataaaagggcatacatacatcttaataaa

SEQ ID NO: 654 - DNA, 358 bp, Glycine max
aatttctcccacacttttggggagggccattgctggatggccttgaatatactagggtacacttggaccctatttctaccacctacaaaacctaagaaaactattttatctacacataaggtactcttctctatatttgcatagagggtgtttttcctaaggactgaaagaacttgcctgagatgtcctaagtgatcatctacgctcctactatacactaaaatatcatcaaaataaacaactacaaatctacctatgatatcccttaagacatgatgcataagcctcataaagtgcttggtgcattatggagcccaaaaggcattactatccttcttacaaaccacacttggtcttg

SEQ ID NO: 655 - DNA, 403 bp, Glycine max
agcttgataacccattcttctttccttattacatgatgcataagcctcataaaggcgcttggtgcattagtgagcccaaaaggcatcactagccattcatacaaaccaaacttggtcttgaaagcggttttccactcatcaccctttttcatcctgatttggtgataaccacttttaagatcaatttttgaaaaggtattggcaccatgcaactcatcaagaaaatcatcaagtctaggaatggggtgcctatactttacagtgatgttgttgatggccctgcaatctgtacacattctccatgtaccatcctttttgggcaccaacaacactggcacaacacatgggcttaggctctcttggacccaacccttctccaacaattctttaacctgagactcta

SEQ ID NO: 656 - DNA, 469 bp, Glycine max
ttaggacacttgaaactcagcttcttatccaggctcatcttggtggtgaagctccttcttccatggcttattccttatgcgcctgaatcgaacatccgagtgaaaagttatgaccatttcaatttctcgatatcttccgttgttcaatttcgagcgtctcgatatgtgatgttcctgaatcggacctccgtgtgaaaagttatgagcatttgaatttctcgagagcttacgttgttcaatttcgagagtctcgacatgtgatgtgcctgaatcggaccaccgcgtgtatagttatgaccatttgaatttctcgagagcttctgtcgttcaattgcgagggtctcgatatgtgatgtgcctgaatcgaacatccgagtgaaatgttatgacaattctaatttctcgagagcttccactgttcaatttcgggcgtctcgatatattatccgcctgaatcggacatccgagt

SEQ ID NO: 657 - DNA, 336 bp, Glycine max
  unsure (1)..(336): unsure at all n locations
agcttgcactaagatttctgattcaggttcctaatgtatcgagacattggttattgaacaatggaaactcccgagaaattaaaatcgtcattacttttcactcggatgtccgattcaggcacttcagatatcgagacgctcgaaattgaacaacggaagctctcgagaatttaaaatggtcattactttacacatggaggtccgattcataaacatcacatgtcgagatgctcgaaattgaacaacggaagctgaagagaatttcaaatggtcataacttttcacttggatgtccgatncaggcgcatcatttatcgaggcattggttattgaaaa

SEQ ID NO: 658 - DNA, 389 bp, Glycine max
  unsure (1)..(389): unsure at all n locations
agctnttgcaagctggaatcatttatcctatctccgatagccaatgggtgagtcccgtccaggtagttccaaagaaaatcggcctcaccgtgataaaaaatgagaaggaggagttgattcctactcgagtgcagaacaattggagagtatgcatcgactataagaggctgaaccaggttaccaaaaagaaccattttccactgcctttcattgaccagatgcttgaacgcctggcaggtaaatctcactactatttccttaatggtttttttggttatatgcaaatcactattactcctgaggatcaggaaaagaccacattcacctgccccttcggcacttttgcctataggaggatgtctttcggcctgtgcaatgcccctggtacc

SEQ ID NO: 659 - DNA, 456 bp, Glycine max
tgtgcattcaatatcctgatgagggtgttccatatgttcttaatactggactaatacatttgttgcccaagtttcatggtcttgcaggtgaagatcctcataagcatcttaaggagttccatattgtttgttccaccatgaagccccctgatgtccaggaagatcatatctttctaaaggcttttcctcattctctagagggagtggcaaaagattggttatactaccttgctcccaggtccattttcagctgggatgaccttaagagggtgttcttggagaaattattccttgcatctaggaccacttccatcagaaaagacattttaggcatcaggcaacttagtggagaaagcttgtatgagtactgggaaagattcaagaaattgtgtgcaagctgtcctcaccatcagatttctgagcaactccttcttcaatatttctatgagggactta

SEQ ID NO: 660 - DNA, 377 bp, Glycine max
agcttcacataatttttttttcacaaactttagttttggaagaccaattactaaatctttcctaactagatgattgagatgatgcatgtttatgtgtgcagtcctacaatgccacaaccaagaatcatctttcttacttaccaaacaactcagttcatgaaacgatgcatgttcaatgtttaacatatagatattacctatccttttaccaatatggacaacctcactggatatggcttcactagtaaggcaacaattcttgttgaatttgattttgaagcctttgtcacatagttggctaatgctcaggaggttatgctttagtctatcaacatatagaacattctttgtttgtgttttgtactaatttccaatat

SEQ ID NO: 661 - DNA, 447 bp, Glycine max
  unsure (1)..(447): unsure at all n locations
tggcatatcttggaatctgcttgatggcatctagcagaggtatgttcacctctactttcttgaaggtctccaagatctccttttccgcttcttccattttttttgtttggaattgctttaggtgggaatggaagagggataggaggctgctgtaagtcagaattactagaagaaggtctacctgcatgaaaatttttgttaggaagctctctcttttgtgcaactatctcatcctctttttcaggtgtagaatgaagcttgacaggttcangtgcaggtgctgctacttatggaggcacttgaatttggttgccagacctcaacgtgatgacactcacattntttggattctgcacagtttgtgaaggcaatttgtcagaattttatgactgagcttgagtcatctgagtagccatttgtcccatctgatttgtcagactctgaatg

SEQ ID NO: 662 - DNA, 393 bp, Glycine max
  unsure (1)..(393): unsure at all n locations
agctntatcaaatggatgttaaaagggtttttctaaatggcttaattcatgaagaagtatatgttgaacaacctccataatttgaaataacagataagccaaatcatgtttatagattgaaaaagactttatatggtttgaaacaagccccaagggcatggtatgaacgtctaagtaaatttcttttagaaaaagatttttctagaggaaaagtggataccacactattcataaagagaaagtatgatgatattatgttagttcaaatatatgttgatgatataatatttggatccactaacgattcattgtgcaaggagttctctcttgatatgcaaagcgaacttgagatgtcaatgatgggagaactaaattacttcctgtggttacaaa

SEQ ID NO: 663 - DNA, 395 bp, Glycine max
agctttaaaatttgaattaaaacgttcataaactgctggtaatcgattactatatatgtgtaatcgattacacagtgcaaattttgaatttaaattttaatagctgttgtaaatcagttttggccaccggtaatcgattacatcctctggtaatcgattaccagagagtaaatttgttgaaaaagacttttttaacttaaaattcttggccaaaccttttgcaatttcaattggaattcccttcctatttaatatcctttctaagactctatagactgtcttgatcatccatcttgaatatctttaatttctttgtcttgaataaagctttgagacgcatgtgaaactttggcatcatcaaaacattcagctttatcctttgtctacaaatttgg

SEQ ID NO: 664 - DNA, 446 bp, Glycine max
ttctgcacatattcaaggacctatgaccttatccatgcatatggtttctttagcttgtacaagaatgtgtaagctgacttctctctcatttccttttatattcccagatgaaatgtaggttccatggctagttgtactttcctatgcacttggatataataaacgaagttcggtaaccataaagataattacaatttggtgagcctgctaaatgtttataagggaccgtgtagtggaacatctttggagacaggtgtgcgagggaaacaaactacttgctgactcaaatgatcaatgcagatgtaatgccgaagacattctattggaaatggaccgtatcttacagcctgaaggagctgtgatattccgagatcaagccaacatgttaatgcatgtgaacagaactgtgaaatgaatgagatggaataccagaatggtggatcatg

SEQ ID NO: 665 - DNA, 450 bp, Glycine max
  unsure (1)..(450): unsure at all n locations
tcaagttgcttggacatcaacttattntgggccaacaaggcatcttgtgatgaaagctctaataaactcttcttggtaggaatatgaactctatcatgcaaaattgcatggtcactggcagccacattttcaattaagtccatggcttctttaggtttcttcaacttaatttttcctcttgcataaacgtcgagtaactgctttgattgcggccgtaacccatcaatgaagatgttcagctgtataggctctgaaaaaccatgagtgggagttttccgcagcaagctacggaatctttctaatgcctcactcaaagattcatcaggaaactgatggaatgaagatgcaggtctttaaactgttgcccttgaatgaatgcaaccatctcttggcctccccagataaagaaaatgaaaataggctgagcctaatagcatatccaggtacatc

SEQ ID NO: 666 - DNA, 385 bp, Glycine max
agcttttgtcgtttgaatttgctatgagcttctggtttctattacgagtaactcgaaatactacggaacgcagtcaaacatccgagtaaaaagttattgtcatttggatttgctcaaagattctgttttcaatttgaagcgtctcgatatattacaggactcaattggacatccgagttaaatgttattgccgttttaatttgttacgagcttccattttcaattacgagcgtctcaatatattacgggactcaatcggatatcctagttaaaagttattgtcatttgaatttgctcagagcatctattttgaatttcgagtgtctcgacatactacgggactcaatcatacatccgagtaacaagttattgtcggttggatttg

SEQ ID NO: 667 - DNA, 386 bp, Glycine max
  unsure (1)..(386): unsure at all n locations
agcttatggcggcaaaggataagctactctacctgaagcatgttgatgttggtgtttaagaacactgtatccttgaaaagcaaaaaaaggtcagcttctcaagggcaggtaagactcctaaagttgaanagctagaattggtgcacacaaatgtttgggggccagccccagtgaaatctgttggaaactcacgctattatgtcacttttatcaacgagtctaccagaaaggtatgggtttattttcttaaaaataaatctgatgtgttttctgtgtttaaaaggtggaaaatagaagttgaaaatcaaacaggtctaaaggttaaaagtctgaaatctgacaatggtagggagtatgatagtcaggagtttaaagacttctgttca

SEQ ID NO: 668 - DNA, 362 bp, Glycine max
  unsure (1)..(362): unsure at all n locations
agctntgtgagcttcaaaagctcagcatgttcactaccctgaagaacattgcaagttgagttctgcaaggtaagaacagggattgcaaagattgagtgtgcagttcttccctcagacaacaataaggatgttatgccacttgatgcaactgttaaaataatatgtccctttgaacgaaatgcagaggctagtgtcttccgcatgaaagtttttcaatccccctataaccataaaggaagaaaatgccaccatattgcatattaacatcattcattactatatcaaagatactttnttgctcatctgcaccaaggaaagttgaaaatattcttaattacttaagatatataaataattgaatt

SEQ ID NO: 669 - DNA, 459 bp, Glycine max
  unsure (1)..(459): unsure at all n locations
gtngtctgtgctactactaagacagtacacactgtgactcattttatcaatcggcgcanatgtcttagcgtagttgatcccttctacttgatgattatcgagtataactaaccgggctttaaaaggttcaattgtcccatccaagtgatacttcatgcggtacacccatttgcacctgagagctttcttttcgggtggtagttgttgcatggtccacgtacgatttcattcaagagcttgaatctcagattgcattgcttctttcttgtgagcatctttcactacctcatgaaaatagagtggttctttttctgcaataataattgcaaggaaatgtctatgtggcaaagaaaatttttcacaatttacataatgcgagataggataggatgcacctganaaaatgagattaagccgatgaacgagtgataggagataacttcttaatcatgtgtatga

SEQ ID NO: 670 - DNA, 457 bp, Glycine max
  unsure (1)..(457): unsure at all n locations
tctgaatntaaaaggtaaagtatgtaatttcaattaatgatgaatataatcaatagtgaatattatgtacacatatatgataagttatgaatgtattgaaacgttatttattaatttaattctcctcaaggaccgagattatgtattttcctatgcacatttaacagaatatttgcaagtattgattatacattgagactctatgtagaaaaagatataaacacaatttttataaaataaaatttcataaaattcaactttataagatttattcttagttcctacaatgcatatatgcgtgtttcagtgctttttaactttccttatatttgcttcaaaaatatggtagattttagagatatatgaacttagtccaccaattaaattataacttgtatgtgtccttatttctcanatattatagtaatgcaacattctcaaatactcacatccttct

SEQ ID NO: 671 - DNA, 405 bp, Glycine max
agcttccatcacctcggttttctttaacttcgtgggacacccttttcagcacaaggtccccctcattcaacttgtgggggcgcaccttcttgttgaacgcgttctttatcctttgttgatacaggcgcctatggctcatgggcgtcaaacgcttaccttcaataaggttgagttggtcgtagcgtgtttgagcccactctgattcttctaggcccgattctgctagtatcctctgggaagggacctctaccttaaacgggagcactgcttccatcccataaaccaaggagtacagtgttgccccagtagaatttcgtaccaaggttcggtacccatgcagggcaaaaggcaacatttcatgccaatctttgtacgacactgtcataccctaatttcgtccaagga

SEQ ID NO: 672 - DNA, 451 bp, Glycine max
tgcttgagaagtttctatggaggttggatctttgagcttcaataagggtgcagtggaaaataaaggagaagagatgagaggaggcaccatccactagagaataagccatgaaaggagaagcttcaccaccaagagagtgccttggataagaatcttagagagcgccatccactaaatgtgcttaggtgtcatgaggcatgtaaagcatgaaggacatgcacaaagtgtgactatatgatgtggcaatggggtgtagcaagcaaatgctcacctccccctctaaaatttaattggattgagcttttcccaattcaattaaatttatttcccaacacacatatcaaatattcacttaattcctatgaaattacagaactacccctaatacaaaaactagtctaggtgccctaaaatacaagggctgaaaaatcctacatttctagggtaccct

SEQ ID NO: 673 - DNA, 272 bp, Glycine max
cccgacgaagacactgacaaaaacttatcttctcctttttggacaaagtatgacaagcagggggcaagtaaattttcttcccatcagaccttggatgcaagtgtgatcgtatccccatctcatctagatcttgacgggtattcaagtcatccttcatcttgccttgaatgttaaggagcatcccaatcacattgtcacatacatttttctccacatgcataacatcaatacaatgtctaacgtctagattagaccagtccgaaagatcaaag

SEQ ID NO: 674 - DNA, 395 bp, Glycine max
agcttttcctcccagtcttgtcaatgatgtaaatgcttcagaattgaaccaaatgcattgaggccagctgtgatgagtgacaaaaacaatgctgtcctgttagatgcaaaaccagccaactgaacaatggtgggactataatacatcacagtgttgattcccacaaactgctggaagattaagaggcccacaccagcatataaacctcttctcacagctgaagttcttaaaagtttgactatgttgatcttctctgatgattctgcttccttaatttccatgtcaactgattctttcaaggcctgaatttcgccttcaacttcatgtggtggataaatctttttcagaatcgattttgcttcctcttccttaccctgtgggaacaaaaatggaac

SEQ ID NO: 675 - DNA, 408 bp, Glycine max
  unsure (1)..(408): unsure at all n locations
agctttgatggagaacaaccttaggatgtagagggtacacgcatggagaagaagaaagcgcgagcaaaataggtggcgtctaatataatttaaattgtaagttcaacatcaattttcaataaaaaaaaccaatgttaacaaattcatgttaacgttaacatcggttttattcaataaaccgatgttaactgatcatacgttaacatcggttttcagaaaactgatgttaacgaactaaggctaacatcggttttctgaaaacccgatgttaactaattaatgttaacatcggtttttccagaaccgatgttaaagtcactttgttaacatcgattntattcaaacccgatgttaaagtatacacaatattcacaattatgccacgacgtttatcttaacattggtttt

SEQ ID NO: 676 - DNA, 435 bp, Glycine max
tagtgaaccatgaagcttgatcgagttcatctaatacttcatcaatcgtggggattggaaatcgatcgcggactgtaacaacattaagagacctgtaatcgacacatatgcgccatgttccatcctttttcttcacgagaagaactggagacgaatatgggctcgtgcttgatcttattaagcctgcagataagagttctgcgatttgcctctcaatctcggccttttgaaagtgtgggtacctataagcgcgtacgttgaccggagctgttgcagggagaagggtgatacgatggtttacttcgcgtgagggaggcaagcttctgggtggttggaaaagtttatcgtatcggagaagaaggtttgcgattggtgtgataatacgtggaggatgtgtggctgtacctgtgggggtttcagataagagacataagt

SEQ ID NO: 677 - DNA, 358 bp, Glycine max
  unsure (1)..(358): unsure at all n locations
agcttattaatgtatgattaaataacatttaagacaatttgatcagttaattcatatttaaatatttttataactgttaatttgtttattaatttcaaaaattattttaacaaataaattaattcaaacattttgtatattttaatgaggaaagtatatgattcgatattatcattttagtgatgtattcaagtttctttgaaatatatgattagataacattattttatcacgtattcacataatttaaataaaaagttacaataacgtgaggaatagtgaaattttgttacgcaagataatgaaatttgatatattcttattaaattgatatagaatgaaatataanaatttaaaa

SEQ ID NO: 678 - DNA, 434 bp, Glycine max
tatatattgatatatacttaatattatttgtaaaatattaataatttagaaaataaaagtctatttcaattgaatgattaataataaaaaatcaatattgattcgaattataataatactaacattttttttattagtaggaagtgaatttatgtactagaaagttcaataactcacgcgcattattcaataaagttagaccgacttggtattataatactaacatgaacacttatttcatctgcataacttatcttaataatttggtcatttaatttttatttttttaagtacaaaggtctaaaatagtcaatagtttgatgtatatatattattattggacatagaatatcaaaattgtaaataatgttaaaactaatttatatttgatatattaactaatttcacaatagtttgaattattttttaatatg

SEQ ID NO: 679 - DNA, 182 bp, Glycine max
  unsure (1)..(182): unsure at all n locations
tgaactcctgcaatgttgngctattccaagttcatttaccatacctttattttcgattgcttccttcactccttcagctaggcccatgtatcctacttcaaatgttgacaaaacatcaactgattgttgatttgctttccaactgattgttgtaccaaacaaagtgaacacatattctgtta

SEQ ID NO: 680 - DNA, 506 bp, Glycine max
ttgaagatctatacagtgtaatagagggggcctttgatcactcattctgattttgcttatgattaattttacttgcaaaagcttatatggaacaagctgagatgactaaagcggtcctggatttgttctgggggaaaaatgaatgtggagaaaaccaagatattcttctcagaaaacatcaactggcatataaaggaggatcttactgcaaagattggttctcaatgtactttggggaaatatcttggagtgccgatattccataaaaaggtgaagaaagaatcctttgagttccttctacataaagttaatcacatattaagtggttggaaaagtaaaatgttatccatggcgggtagattaaatcttgcaaagtatgtgaacaaagctcttccctcatatgtgatgcaaattgtgaaaattccggcctacatttgtggtgaaatttatagaaatgtagagcatttttatttgggggatgatgagaatacgacgagagtgcatat

SEQ ID NO: 681 - DNA, 169 bp, Glycine max
gcagcttaaatagaccactttcaggtgctggaactacttcacatggacttgatggggcctatgcaagttgaaagccttggaggaaagaggtatgcctatgttgttggggatgatttctccagatttacctgggtcaactttatcagagagaaatcagacacctttgaag

SEQ ID NO: 682 - DNA, 620 bp, Glycine max
tatcccatgcctccttagcgtatgtttcataagaaactatctttaactcttcatcacctaatgcttgatagatgaggaagaaagctttcttgtctctctttcttgaatcctttaaagtctccttttgtgcttgggatagtgaagtctcatcttgcggctccttataacctttttcaaccatttttcaaacatcatgtgctccaagaaggaccttcatttcgatgctctaattgtcatatgcgctcccctttagaaatgaaacttggaaggatgccgctcaattgcttgccataactatagaggaatttcttatcaaaacctaagctctaataccactttgttggaaaggagataggaagtatttgagagaaatggaggaggagagaatatttgaaaaaaggctagtttttatcacttgagatacgctttgggcttgactcctttttgtgtctttggatgctttacaaataacaacctctccccctattataggcttcaatgagggattctaaatacctcaagaaagatccacacaccttaattgagagtttacacattttttccaactacttagttctacacacctctttccatgcaaatatttttttcacttatttcta

SEQ ID NO: 683 - DNA, 392 bp, Glycine max
tgaaattgaacaacagaagctcttgagaaactcaaatgttcatatacttgtcacacggaagtccgatgcaggcgcataatatattgagatgctcgaaattgaacaacgaatgctctcccgaaattcaaatggccataacttgtcacacagaagtccgattcaagtgcataatatatcgagacactcgaaattggacaaccaaagctcttgataaattcaaatggtcataacttttcaaacggaagtctgattcagccacataatatatcgagaagcttgaaattgaacaacggaagctctcgggaaacaaaaatggtcataacttatcacacggacgttcgatttaggcgcataaaatatggagacgcttgaaattgaacagcgaatgctct

SEQ ID NO: 684 - DNA, 176 bp, Glycine max
agcttaagagcctacttttgtggcaaaacaatatagttggaacaatcccataagagcttggaagctgcatagagatcaaagtcctagacttatcagaaaaccttctcacaagtagcataccaaggagctttggcaacatttcaaatatccaggagcttcaactaagtgtcaataag

SEQ ID NO: 685 - DNA, 554 bp, Glycine max
  unsure (1)..(554): unsure at all n locations
ttataaattcttgctcacttgatacactccatggatgaacagtttggacttttgccgaataaagagtggtggaatttgcaggaggattttgcttgtagatcattgtatcaagaacggtgtcaaaattctgaggagaatctagggagacaaagaacataggaattgcaaccttctgatggatttctaggtcgcccacaaggttaacaagctcaacaaaatcactgataaggcgctgaggaacatagaacacctcagaactgcatattaggaggtttttatcgttgtcgcttggttctttgtaactgacttgaaagtgcgctggcatcgtgctaacaaccttctgtaccattcttgcttgttgtgataaccaatctgagtcctcaccatttgttaatatagaagaccaagactcggatacctgaattcccagtaatgtgtaaattgtcagagaaaagagctatacgaccttctaagagctatatgaccttttaagagttaaagctatgctgtanaatattttcagtgacattgtcctgaatgattgaatatgatct

SEQ ID NO: 686 - DNA, 609 bp, Glycine max
tgaaggacatgcacaaagtgtgactatatgatgtggcaatggtgtgtattaagcaaatgctcacctcccctctaaaatttaattggattgggcttctaccaattcaattaaatttatttcccaccatacacatcaaatattcacttagtgcgtgtgaaattacaaaactacccctaatacaaaaactagtcttggtgccctaaaatacaaggactgaaaaatcccatatttctagggtaccctacctacattatggagccctaaatacaaggaccaaaattaatgaaaccttaatctaatatgtacaaagataagtgggctcatacttagcccttgggcccgaaatctatcctaaggctcatgagaaccctagggccttctcttgcatctttggcccaatcttcttggaatcttctatccaatgcccttgcggggtaggattgcatcactaatgtacccaaccctagggtattttatgaataagagcctaagagaaacctacctttagcccaaactagaaaaactattattgcatgccttccgaaattcatgcataagctaacatggtaaacacacgaaaaaatcgagtcaacgagagacacaactttg

SEQ ID NO: 687 - DNA, 179 bp, Glycine max
gcatgcaagctttggaggcattacctttatggaactaaatttaagggggttaatgaccataagagccttagatatatgtttgatcaaagagagcttaacatgaggcagaggagatggttagaggtccttaaggattacgaattttagcttaactatcacccaggtaaagccaatgtagt

SEQ ID NO: 688 - DNA, 362 bp, Glycine max
tgagcaaattcaaacgacaataacttttgactcgaatgtcctattgtgttccgtaggatatcgagacactagtaattgaaaacggaagctctgagaaaaatcaaatgacaataacatttaactcggatgtccgattgagccctgtaatatatcgagacgctcgaaatttaaaacggaagctctaagaaaagtcaaacgacaataacttttaactcggatgtccgattgagtcccgtaagatatcgagacgctcgtaattgaaaacggaagctctgagaaaaatcaaacgacaataacttttaactcgaatgtccgattgagccttgtaatatatctagacgctcgtaatttaaaacggaagc

SEQ ID NO: 689 - DNA, 533 bp, Glycine max
  unsure (1)..(533): unsure at all n locations
attagtgtaccatacaactgcagctccagccaagctatcttgtaaaaaagtgtatgaacaactttgcatccctagagtgtgcccccatcttgcgacaatacatcttgagatggttcttaggacaagtcgtccctttatacttgtcaaaatcaagcactttgaattttggggggatgacaacatccggtaccaagcaaagatctgtcatgtccacgaatggatagtcaccaaatccttcaacagctctcaatctctcctcgaggagatcgagtttccttctttcttcggccgccgggggtggtccttctatggacaagaatattggttgtgctgtgaggttgggctgaggcaacgtgttgggcaccggcccctcgacgaggatcggagggtagaaatcgacatccncttgggcatactctcgatgatcttcatggaccgcgtttaggggaggatggtgcgcggtagctaggatagatgggtctgcttcggcaccccaactaacagcggcagcggtggccgtgttattctccatg

SEQ ID NO: 690 - DNA, 439 bp, Glycine max
tggcaagtttgtattgtacaaatggtcccagagtgccccttttattatgtactcataaaccagtatattctcgaaccttttattgcaaggtgcctgtgacgaatcttatacaaaatcatgatctctctctgaaattctggaaggccttgacctgacctgttaagaattattgattaaatttattatttattatattataaccaggtaagaactaagatcattattaatatatatatatatatatatatttagatatattgatatcttaaagattggacgaaccataactcccatatatgaaatgataagaggttggtgagataaatggagattttaagatgtgtattaaaacattgtactaaaaaagaataaccgaataacagagtactcggggactttaagattatttctcatgcgaattttttttatttctctttta

SEQ ID NO: 691 - DNA, 627 bp, Glycine max
  unsure (1)..(627): unsure at all n locations
tgcattcgatagtggagctcatccaatggagttattaatgctaagaaaattcaggttttaaagaaggagctgaatgctttggaggctggtatctctgacagaattctgaatcaatttgaagtggagctcaagaagtctcttcaggagcaattgtggcatgctgctaatgcctatgaatgtatgctgaagcaaaaggctatagtgaaatggttaaaggaaggggacagaaattcagcttacttccacaagctgataaatcatagaagaagacataatgctattcaaggattgatcattgatggggaatgggttcaggaccctagtagagtcaaaactgaggccttcaatcatttcaaagatagattttctgagcagaattttaatagaccaaccctggatggtgtgcagctaccttcccttggtcaaagtgagaatgaagcccttgtggccagattttctgatgctgatacagtttggttaccaaaagccatcaagaatgataacaaagcagtaatttaaattaaattcatcttagctnttctattttatgatcactctcgattgctggaatggtgaaggaaatgggcttctttatacgaggaccctatacagctgcaatgtgacatc

SEQ ID NO: 692 - DNA, 175 bp, Glycine max
ggcatgcaagcttcttctcaacaggatgataaaacctatatttctattcattctcaccatagccaatgaagatacactgccttgactttgcatccaacttggatctcttatcctttggaacatgcacaaaagccttgcagtcaaaaactcttaagtgactatacttcacattctt

SEQ ID NO: 693 - DNA, 632 bp, Glycine max
  unsure (1)..(632): unsure at all n locations
agcttcaagttgctcggatagcaacttgttttgggccaacaaagtgttctatgatgaaagcttcaacaggcttcttttggttgggatgtgtgctctatcacacaagattgaatggtcactagcaaccatattgtcaatcaattccatggcttcttcaggggccttcaattttatttttcccctgcagaagcatctaaaagctgcttggattgtggccttaacccgtcaatgaaaatattgagcaggattggttctaaaaatccatgagtaggcgtctttcttagtaacccacaaaatctttccaaagcctcactcaaggactcgtttggaaattgataaaaggatgagatggcagcttttccttcagcagtcttggactctaggaagtatttcttcaagaatttttcaaccacttcatcctaagtcttaagactgttacctttaaatgaatggagccatctttttgtctctccaaacatagaaaatgaaaacaagctcaatctaacagcatcctcaggcatgccaaccagtctaacagtggtgcaaatctcaatataagtggctaaatatgcatatgggtcttcatttggcagaccatgaaacaanatgttctgaatcaactgaattaatga

SEQ ID NO: 694 - DNA, 385 bp, Glycine max
taaacattcaatttcgagagtctcgttatattacgggactcattcagacatccgagtaaaaagttattggcgtatgaattggcttaaagcataaacattcaactttgagcctctcggtatattacgggactcaatcagacatccgagtaaaaagttattgtcgtttgaatttgctcagaggttcaacattcaatttcgagcgtctcgatatattacgggactcaatcagacatccgagtaaaaagttattgtcttttgagttggctcagaggctcaacattcaagttcgagcggcccgatatattacgttaatgaagcggacatcacgctaaaaagttattgccgattgaattcgctcccaagatcaacattacattttcgagcg

SEQ ID NO: 695 - DNA, 651 bp, Glycine max
ttagtgcctcctcaccaggtccataatgagcatttgcagatttattggcattccaagtactagaattcttattagctaatacgtcaaaaatatagttacttgtattaagatcaccacactgggcatacatttgaattagggagctttggacaaatgtttctaattcaaagcctgctacaactatatgtgcatggatgggcattccatgatccaaaaggtcatcaggagacaaaaaagcactgagaagattaacaatagtaatgtagtttacaggcacaccttcttctctcaacaaattgaaggcttcaatcgctgcattaggttctttgttatcagcatgtccacctattagtgcattccaagtcacttcatctctgtcaggcataattttgcacaccctttgtgcagcagccatggaaccaaatttcccatacatggtaaccaatgcattacctatgatcaaattgtgatggagaccaagaagaatcacaaaggcatgaacaatctttaatgtttctaaatatacatgcagataatgcagtagtgaaggtacatagtttgtcggctttcttgtttgaagcatctcaatcaaaagttctaagcacgtggataatttccattgtcacattgcttgccatatggaattcatga

SEQ ID NO: 696 - DNA, 330 bp, Glycine max
gcctaagatcctcttcatcaatggattccttatcttttttgaagatgaatggcagcggtatggagaatgaatatagagaagatactccacttctatgagaaaatgaatttagaaaaagcttaccaccataggaggtcttggataagagcctgtaggaagaacatgactgaacggagagggagagaatagcacgaaattttgtgctctaaaagagctctaaaatctgaagtcttattttcaaatgatcaaagttggaaaaaatgaacacaccttacctttatttattagcctgactgtttcacacaactggagggaaattttaattttaat

SEQ ID NO: 697 - DNA, 490 bp, Glycine max
tgcttagtccttatgaaaaggaagaagcttgaaacctatcctatcattgaaatacaactccaccatatgaaagtttgtaggtagcacttcctccccatgcacatggacatttcatgcagctgatttgcgggccttggtttcattgcattggaatcataaaccaaggctgcaagaaggccatagagacatgaacctaaaggaatgttagtgatgaggatattgtggttcacaccaacactgtttgggccaaatagctctgaggtaatagacactgctgcagaaaacacaaagcctgaactcagccctatcaaggcagtgcctatgtgtaatgcagctccactgccagatatggccagcaaaatgaatgcaattggtgttagcaccaagcctgctccaaaccatccagctcttgcaatgtgtatcttcctgcattgtcatacaacattagatgaatttacgtgcaatgttggtttcgtgacatgtcctccca

SEQ ID NO: 698 - DNA, 412 bp, Glycine max
  unsure (1)..(412): unsure at all n locations
tgcttaagattatatattgatttctctaatttgcacactatgtgtttctttccttcaactaagaatcccattgggtggtccatataaacattctcctctaattctccattaagaaaggcattttttgcattcatctgatgtagctccaagtcataatgggctactaatgctatgataatcctgaaagaatcctttattgagaccgatgaaaacgtctctttataatcaatgccatctttcttagtaaatcccttagcaacaagtctagccttgtaacatttaaggttgtcatgagagtcacatttagtcttgaagacccacttacaaatcttacaactttggtnattctaccaggtgccaaacaccattatgttcccatggaattatctcttctttcatgggatttaactac

SEQ ID NO: 699 - DNA, 365 bp, Glycine max
gcataatattataataatcacttccaaaaattgacaaacataatttaaaagaaatataataataaccataatattaattaacaatcataatttgtttatcacaatagaaattatccaaaataaacattctatcaatttacctaagtaaacattgtatcagtgtaccaatcattacaaatttatccaaattataataattagtcataatctactataaataaaagataaacatatatcatataccaagagtgtccgaccgccaaaattcgaagaagtgaaatatgagttaacatatttttatataatatttagcatattgttattataaataattaaaaaaaaactaaatatcatgtcaacaaaat

SEQ ID NO: 700 - DNA, 470 bp, Glycine max
  unsure (1)..(470): unsure at all n locations
tgccttgccccttgatatatntgagggactcatggtcactatgaatgacaaattccttgggataaaggtagtgttgccatgttttcaaagcccgtactaaggcatacaactccttatcataagttgaatagttaagggtaggaccacttaacttttcactaaaataagcaattggatggccttcttgcatcaacacagccccaatcccaacatttgaagcatcacactcaatttcaaaagatttttgaaagtttggcaacgcaagtatgggggcattagttagctnttgcttaagaacattgaaagcttcttcttgtttctctccccatttgaaaccaacattnttcttgagcacttcattgagaggtgctgtcaaatgtgctaaaatccttcacanatcgtctataaaaacttgctaagccatgaatactcctcacctcggtcacagacttaagtgtaggccattcttg

SEQ ID NO: 701 - DNA, 458 bp, Glycine max
  unsure (1)..(458): unsure at all n locations
agcttganattgaacaacagaagctctcgagaaattcaaatggtcataacttatcacaccgaagtccgattcaggcgcataatataccgagacgctcgaaattgaacaacggaagctctcgagaaattcaaatggtcataactgatcacacgaaagtccgattccggcagatagtataccgagactcttgaaattgaacaacggaagctctcgagaaattctaatgggcataacttttcacatggaactccgattcaggcgcataatatatcgagacttttgaaatataacaacggaagctctcgagaaattcaaatggtcataaaatttcaaacgaaagtccgattcaggtgcataatatatcgagaggctggaaattgaacaacggaagctgtcgagaaattcaaatggtcataacttatcacaccgaagtccgattcaggcacataatatatcga

SEQ ID NO: 702 - DNA, 437 bp, Glycine max
gaagctcttgagaaattcaaatggtcataacttatcacacggaagtccaattcatgcgcatagtatatggagacgctcgaaattgaacaacgaaagctctcgagaaattcaaatggtcataacttgtcacacgaaagtccgattcaggcgcataatatatcgagaagctcgaaattgaacaacggaagatcttgagaaattcaaatggtcataacttgtcacacggaagtccgattcaggcgcataatataccgagacgcttgaaattgaacaacggaagctctcgagaaattcaaatggtcataacttatgacacggaggtcctattcaagcgcataatatatcgagacgctcgaaattgaacaacggaagctctcgagaaattcacatggtcataacttatcacacggaagtccgattcaggcgcatactatatc

SEQ ID NO: 703 - DNA, 456 bp, Glycine max
agcttctcgaatattatgcgtttgaatcggacttccgtgtgataagttatgaccatttgaatttctcgagagcatccattgtttaatttcaagcttctcgatatattatgcacctgaatcagacttccgtttgaaaagttatgaccattttaatttctcgagagcttccgttgttcaatttcgagcgtcttggtatattatgcgcttgaatcggacttccgtgtgataagttacgaccatttgaatttctcgagagctttcgttgttcaattccgagcttctcgatatactatctgccggaatcgaacctccgtgtgataagttatgaccatttgaatttctcgagagctctccgtggtcaatttcgagcatctcggtatattatgcgcctgaatcagacttccgtgtgacaagttatgacaattagaatttctcgagagcttccgttgttcaatt

SEQ ID NO: 704 - DNA, 447 bp, Glycine max
  unsure (1)..(447): unsure at all n locations
agctttccacattgaattcagcacctaatgtcatattagatggaaattgtgtatcttaacataagagatttcagatggactttaatcctaatcccacagccgaccttttcacgagatctctacttaaccctttggttaaatgatcagccaaattatgctgagttctcacaaactccactgatatcacaccatgcatgattaactcccgaaccatgttgtgtctaacacccaagtgtctagacttcccattatacacttgactatatgccttagccaaagttaatatgggggaaccttattccttttgtaggaattcagttcaacaagtaacaggctgtcaacatagcctcaccccanaatccttcacttanacccgaataggataacatggaattcaccatttctttcaaggttttattcttcctttcagctacaccattctggttt

SEQ ID NO: 705 - DNA, 409 bp, Glycine max
ctcagcttaacattcaatttcgagggtctcgatagattactggactcaatcagacatccgagtaaaaagttattgtcgtttgaatttgttcagagcatcaagattctatttcgaacgtgtcgatatattatgggactcaatcggacatccgagaaaaacgttattgtcgtttgaatttgctcagagcttcggctttcaatttggagcgtgttgatatattacgagactcaatcagacataccagtaaaaagttattgtcgtttgaattggctgagagcatcaacattcaatttcgagcgtctcgatatattacgggactcaatcagacattcgagtaaaaaattattgtcgtttgaattgctcagagcttcaacattcaatttcgagggtctcgatagattactggact

SEQ ID NO: 706 - DNA, 435 bp, Glycine max
  unsure (1)..(435): unsure at all n locations
agctntgaggattntcaaacgacaataactttttactcggatgtctgattaagtcccgtaatatatcgagacgctctaaattgaatgttgaagctctgaccaaattcaaacgacgataaatttttactcggatgtctgattgagtcctgtaatatatcgagacgctcgaaattaaatgttgaagctctaagcaaattcaaacgacaataactttttaactggatgtgtgattaagtcccgtaatacatcgagacgctcgaaattgaatgttgaagctctcagcatattcaaacgacaataactctttactcggatgtctgattagagtccgtaatacatcgagactctcgaaattgaatgttgaagctctgaccaaattcaaacgacgataactttttactcggatgtctgaatgaagtccgtaatacatcgaga

SEQ ID NO: 707 - DNA, 478 bp, Glycine max
  unsure (1)..(478): unsure at all n locations
ctcaagcttctaacgctatacaagaatgaagctctgataccacttgttagacaagtggtctcagatatcttaagaaggggggttgaattaagatattccaaactgtttcccctaattaaaaatctatttcactttttactcaagttatgaattcccttaatgacaatcttcttaaatattaattcaaatgaaacaatttgaatatgaatataaagcaataataaataaaggagattaagggaagagaaaatgcaaactcagttttatactggttcggccacacccttgtgcctacgtccagtccccaagcaacccgcttgagagttccactatcttgtaaattccttttacaagttctaaacacacaaggacaatccttcctttgtgtntagaattcctttacaacaagagactcacaatctcttaatcccttagagaatgagaagaagaagaagaacaaatctctctagaaagagat

SEQ ID NO: 708 - DNA, 453 bp, Glycine max
taccatacctttgtgttcgacaagtggcctctgatatcttaagaatgtgggttgaattaagatattccaaactacttccccaattaaaaatatatttcactttttattcaagttataaattcccttaacaatgaacttcttaaatattgattcagataaaacaatctgaatatgaatataaagcaataataaacaaaggagattaagggaagagaaagtgcaaactcagatttatactggttcggccacacccttgtgcctacgtccagtccccaagcaacccgcttgcgagatccactatcgttgaaatttcttgtacaagatctaaacacacaaagacaatccttcctttgtgttagaattcctttacaaaagaacccacggctcttaatcctagagaatatgagaagaacagaatgaattatcctaaagagataaattacagatgacact

SEQ ID NO: 709 - DNA, 457 bp, Glycine max
tacttctaccttactcgattatggattccaacagttcaaggctgattattctcttttcactaaaaggtctcctactggccttaccattgtccttgtttatgttgaagatttggtgcttactgacactgatcttgctgaaatctagcaactaaagcactccctggatgcaaaattcagtattaaggaccttggaatactcaaatacttccttggttatgaagtagcccgatccacctcaggtattgccttgcatcaaagaaaatattgccttgatcttcttctagacactaatctgcttgctgcaaaaccttctttcttacctatggatcctacactaaaatttcacaaatcttctggtattcctttctttgatcctactgtttacaagaggcttatggcgcgattattatatcttactcacacaaagcccgatattagctatgctgttggaaaattg

SEQ ID NO: 710 - DNA, 447 bp, Glycine max
agcttggatgatagaggtttgcggttataaacatattagggtgatagattggtggataaagcagcctggacccaagaatttgcgcacttttgtctatctgatttaagttttagttcctcttctggtatgcttctttcattatctggagaagaatcatctggaatggatttagatagcgagtcaacaatcatccgcgcactatttatgctagcatgaagagttaggaactgctctactgcaggctgtgggttttgttccttatcagaattacttagctctgcatatacactgccaaaaacatcacaaaataagagtcagaaacaatctgttatgctgtattgcaggagggtgacacaatataatgcctaccatcccatagaagaattgtggaagacgtggatgattaacataatatatgcgtaaaccccagtctgtctgtatgattga

SEQ ID NO: 711 - DNA, 461 bp, Glycine max
  unsure (1)..(461): unsure at all n locations
tgagggcactgattcttanaaataactgaataatgtagtggtgttcacttgtcagctgaagcaaagggtccagtgcaacaatactcaagttggtccaatgccaaacgtgcactcttgcaagcaatgacacttccatctgaccctttgacagcaaaatttggaggacaaactatgttcacatcactagggcagctagttgtgttgcaaccccttaagcctccctgagcgatcaccaacactggcagattgaagccatcaacaaggctaacatcatagaaatcttgtcctttatttgaagccaaagtgaattccactagagaaactggaggggttccaccattaccattgcatggtacttgacctgatccacagtcaccagtggcacaagtgaatttcccatatgtgtctgttgagcattgagacttggcccagaatctgccagaccatggagctgtgacatc

SEQ ID NO: 712 - DNA, 426 bp, Glycine max
  unsure (1)..(426): unsure at all n locations
agcttcttagcattgccaacaaagtaagattgcttggttctgaattntccaatttaagaatagttgaaaaaatactggtgactgtccctgaaagatttgaggctactattacagccttggagaatactaaggatctgtcaaaacttaccttggcagaacttgtaaatgctttgcaatcccaagagcaaagaagaagaatgagggctgatgattctgtggaaggagtattgcaagctaaattgcaaattaaccaaggagagaaaagcaagtggaagaaatacaacaagaagaatttcaatacacaagaagcagcgggtaacactagcaacaaaagtggagacaacaacaaaggatttcctccttgcaagcactgtggcagaatgggtcatcctcctttcaaatgttggagaagacccgatgttaagt

SEQ ID NO: 713 - DNA, 317 bp, Glycine max
  unsure (1)..(317): unsure at all n locations
ttgaagaatatgcttgctgcctattacacagttacctaagaaccattatgacgcagataatatgttatgccctgtgggtatggaataccacaaaatacatgcttgccctaatgattggcttttgcataaacatcaatttgctgaantgcgcagctgcgctacatgtggagcgtcacgtttcaaagtgaagtatgatgaaagcagtgtagatggaggcacatacgaagacttggcatgacaagagtggtggggtcttccagtaataccaacgtttaagcgattgtttgctaatgcacatgaagcataattcctcacat

SEQ ID NO: 714 - DNA, 380 bp, Glycine max
  unsure (1)..(380): unsure at all n locations
tgttagctcgatgacttgtcagaaacaatatcttgactagcgtcacatcagagaattaaacttggacatcttttagaaatgcttgctgaattaagacaggcagaaatccagcgtctccactagggacaaaaacccattctttgcagcatataatccaaaaaagcccatgagactgagtcataggccttttcaaaatccaccttgaaaaccatagctggccttatgcttctacaagcttcctcaatcacctcattaagaactagtatgccatgcaggatgtgtctgtttttgatgaaagttgtctgcctctcatcaataagaccagatatcacttgtctcaatctatttgctaataacttagatatcaccntgtacataca

SEQ ID NO: 715 - DNA, 394 bp, Glycine max
gcttacacgaatactgttgttattgaagaatatgcttcctgtagataacacattacccaagaaccattatgaggcggataagatattatgccctgtgggtatggaataccacaaaatacatgcttgccctaatgattgtattttgtatagacatcaatttgctgaaatgcgcagctgccctacatgtggagcgtcacgttacaaagtgaaggatgatgaaagcagtgttgatggaggcacatacaaagattgtccatcaaaagtgtgttggtattttccagtgataccaaggattaggcgatttgttgcttatgcacaagacgcaaaacacctaacatggcatgctaatgggaggattaaagatggatcgctcgtcatccagctgattcttctc

SEQ ID NO: 716 - DNA, 466 bp, Glycine max
  unsure (1)..(466): unsure at all n locations
tcctcgcacatattagggaagttgngagcaagatgctggtcatgtatatctacaagaacaacttctatttgatatcgaaaaagaaacaagcacaaagatacgtaatgttgaatcangaaaagttatgttaaaagaacgacttcgccataaaagggtacttcttatactcgatgatgtaaataaattgcatcaattgaatgttttgtgtggaagtcgtgaatggtttggttcacggagtagaataatcatcacaactagagatatgcatatacttagagggagaagagttgacaaagtgttcagaatgaaaggaatggatgaatatgaatctattgagctttttagttggcatgcatttaagcaagcaagtccaagagaagatttattgaactttctagaaatgtagttgcttattctgcgggattgcactagctcttgaagtccttgggtcctatttgtttgatat

SEQ ID NO: 717 - DNA, 457 bp, Glycine max
  unsure (1)..(457): unsure at all n locations
agcttggtagtaactctatggacttaaactagctagccgcaaatggtatgagaagttgaatttcttgcttctccaacttgggtttcaacattctatagttgatcactccttttttatccatcacacagttgattcccttactactcgtgtatgtagatgacatagtcattgttggaaattctatggatatgataacttcattcaagcagaatttagataatcaatttgggcattcttaagttctttcttggtgctggtgttctcagtgccaaacctgcaagcaccccttctgaacctacctttgagacttcgccaagatgtcgctcctatacctgactttcacacgcccagatatatcccatgttgaccaacaacttagtcaattttcagccctcccaacagtgagtcattatcaataagcccaacgcgtactttgngtatttgaaaaggaatccca

SEQ ID NO: 718 - DNA, 486 bp, Glycine max
  unsure (1)..(486): unsure at all n locations
tgtagaccanatgcttaccactactaaaggagaagccttcaggttgtttcatataaacctcatcctctaaatcactattaagaaaggctatnttcacattcatttgttgtaactcaaggtcaaaatgagcaactaatgccaagataatacgaagagaatctttcttagatacaggagaaaaagtctctatgtagtcgatttcttctttttgagtaaatcccttagcattgagtcttgccttatatctctcaatgttgcctaatgaatccgttttgatcttaaagacatttacagccaatggcctttgccccattaagaaactctacaaggctccaaactccattactctgcatgtaattcatctcatccttcttggcatcataccatagatntgactctntacaactatggattgatcaaacgtctcatgatcattntcagctgcaatattatagtcaaattttgcaaatatacaatataataact

SEQ ID NO: 719 - DNA, 465 bp, Glycine max
  unsure (1)..(465): unsure at all n locations
tctcaggtccggtcatggaaagacttggcaactgccttcattatgcagtaccaatacaacacggatatggctcccgatcggaaccagctntagagcatgaccaagcgagaacatgagtccattaaagaatatgcccaaaggtggagagacctcgcagcccaagtcgttccgcccatgactgagagtgagatgatcacaattatggtagatacgttgcctacgttctactatgaaaagctgatagggtacatcccagctaactttgcggacctcgtcttcgcccgagaaaggatcgagtccggactaagaaaaggcaagtttgaatatgcctccaacgttacccccaacaacaacagaagagccccagtggtgggcacgaagaanaaggaaggagatactcacgcggtcaccaccgccccaacatggatganagcgccccanaatatccaaaactcataccagcac

SEQ ID NO: 720 - DNA, 448 bp, Glycine max
  unsure (1)..(448): unsure at all n locations
agctnttggaaggatcgagaagtgccttatgaatcctcccgtgcttatgccaccggtacctggaaggcctctcatcttatacatgacaatcttagacgagtcaatggggtgtatgctggggcaacatgacgaatccgaaaagaaagagcgcgctgtttactacctaagtaagaagttcacaacctgtgaaatgaactactccttgctcgaaagaacgtgttgtgctttagtatgggcatcccatcgtctaaggcagtacatgctgagccatactacctggttgatatccaagatggacccggttaagaacatctttgaaaagccagctctcacgggacgaatcgcccagtggcaagtcctgctatccgagtttgatatagtctacgtcacccanaaggcgataaaaggaagcgccttagcagaattattggctcaacagcctcttaac

SEQ ID NO: 721 - DNA, 420 bp, Glycine max
  unsure (1)..(420): unsure at all n locations
ggtctacgcagttaatgttntattcatcgttagataattaatttgttaacnnnnnncataatattttgtgtgtaacctaaaacttcattcaaattatataaattctcacaagtggatcaacccagcaatatgacttgttttttcaaattctcactactagaaaaagcagatttaacattggcgcattaacattgattttctacaaaaccgatgttaacataaatgcggtgacataattgtaaataatgtgtatccgttaacatcagttttgaagaagaaaaccgatgttaacgtatgatcagctaacatcggtttgttgaataaaatcgatgttaacgttcacatcaatttgttaacatcgggtttttattgaaaaccgatgttgaacttacattntaaattatatntgacgcgacctat

SEQ ID NO: 722 - DNA, 449 bp, Glycine max
  unsure (1)..(449): unsure at all n locations
agctntcatcaaatatatgcatgttttcaataatgcaattagtaagccaatcacacaaaccaatcatcaaatataaatgtggattaaatattaatcgatgtcaataatatgtttagtaggttatgtaacttaatgtgaaaattttcaaaaattttaataattgcagcattagtccaattcaacttaatgtgataaatacattggtcttcaaatttcacctcaataaattatatgacttatgtagaaaaatctagcaaatgaatctagcaaaatcaaatatataaatagaaaattacattagacgatgttaattaattctccttcatcatgatcattacgattagcatgaacgtgattagcttcttcttctccgacaacattaggagtgatttgtatggacagaggactaacataggtgtccatgtatgaatcatcatcttctacattaa

SEQ ID NO: 723 - DNA, 350 bp, Glycine max
agcttggactatgactacgaagccattatactattggaatgcgatatatgtaatcacgctctcttttgatcctgtcgaacactacacgcagactctgtttctttccattaaaaaaccttcttccttcttttgtgcttattaacaaagactttgctgtgcaagataaatgagaatgatctattcaagcatgactggaggagcagatcatgagttcaagtgctgcagatatatcctagaaatggatactagcattccttgtcggacttctcactgagattatagccactctcatcaatcctgcagatgagaatattgctgggtataagcttctggctgagcttaaatacgtc

SEQ ID NO: 724 - DNA, 419 bp, Glycine max
  unsure (1)..(419): unsure at all n locations
taagagagatgtgttgtgcttctttctatacatttctttttcagactgataacttcctccactgtacagggaaagctgagaaacggttctttggcagctataaaggttttatcagctgaatcaagacaagggatccgggagttcttgacagaaatcaaggtgatctctagtatagagcatgagaatctagtcaagttacatggatgctgtgtggaagacaaccacaggattttggtatatggctatcttgagaacaacagcctagcacaaacacttattggtaagtgaactactgccatgtgatgtgagtatgctntgttagaaaaactatcttgataatgaattaatcctcatgagtttataggttcaggccatagtagcatccaattaagttggcctgtaaggaggaacatttgcat

SEQ ID NO: 725 - DNA, 434 bp, Glycine max
agcttagaccatgtgaactgctcttgcacttccatcgttcaatttcgagcggctcgatatattatgcgcttgaatcggacctccgagagaaaagctcagaccatcatgagcgctcaagagcttccattaatcaatttcgagggtctcgatatgttatgttcctaactcagagctccgaggcaaaagttatgtccatatgaatatgtcgagagctctcggtgtttaatttcgatcgtcttgtatatgtgatgctcctgcatcgcacctccgagtgaaaagttatgaccatttgaatacctagagagcgtccgatcttcaatttctagcgtctctatatgtgatgcgcctgaatcggacctcctaatgagaagcaatgaccatctgaatttatcaagagcttccgctgacaaattcgagcgcctctatatgagatg

SEQ ID NO: 726 - DNA, 448 bp, Glycine max
  unsure (1)..(448): unsure at all n locations
tattagtgacctatgaaactaagctatgctganatattacaatagacctcctcaacctcagcaacaaaatcaaccacagcagaacaattatgacctttccagcaacagatacaaccctggatggaggaatcatcctaacctcagatggtccagccctcagcaacaacaacatcagcctggtccttccttccaaaatgctgctggcccaagcagaccatacattcctccaccaatccaacaacatcaacaaccccagaaacatccaacagtcgaggcccctccacaaccttccctcgaagaacttgtgaggcaaatgactatgcagaacatgcagtttcaacaagagaccagagcctccattcagagcttaaccaatcagatgggacaattagctacccaatngaatcaacaacagtcccagaattctgacaagctgccttctcaagct

SEQ ID NO: 727 - DNA, 448 bp, Glycine max
  unsure (1)..(448): unsure at all n locations
agcttgctcgtcttgctgatatttatcatgcagacttttctgatgatgaccgaggaacaattagggatcaacttgaaacttatgtgcttcaagtgagaagaaatgcttctttttccacttgtgaagatgttcaaagtttggctatgaagatggttcaaactgagaaacatttggtatttccattggtttataaacttattgagctagctttgatattggccggtgtcgacaacatccgttgaaagagctttttcagcaatgaagattatcaagtctaaattgcgcaataagatcaacgatgtgtggttcaatgacttgatggtatgttacaccgagcgggagatattcaagtcacttgatgatattgatattattcgaacatctaccgcacagaagtctcggaaaggacacttgcctcgtaattntatttaacccgctattgtaagat

SEQ ID NO: 728 - DNA, 475 bp, Glycine max
  unsure (1)..(475): unsure at all n locations
cactaagcttcccatcctggtattacaagttccatcaagtcattacctcatatggttatgaggcaaatgcagctgatgattgtgtataccacaagtttagtgggagtaaatactcattcttagggttatatgtcaatgatatactgcttactagcaacgatataagcttcttacttgagactaagaaatttctgatgaaagattctatgatgaaagatcttggggaaacctcttttgtattatgaatttagatactaagagatcactctcaaggtatcataaggttgtcacaagagagttatatcgataagggcctagatagattcggcatgaaagatagtaaaccaggagataccccgatagctaaatgagacacnattagtctcacacaatgtcccaataatgaccttgaaagaatagagatgcaaaagattccttatgcatcagcagtatgaagtctaatgtacgctcaagt

SEQ ID NO: 729 - DNA, 455 bp, Glycine max
  unsure (1)..(455): unsure at all n locations
agcttatatacatctgcaacttgaattctgttacaactganaagctaactaactaattcagccaactaactaactatttctgttaaagctgtttatactgctaagagcccccctcaagctgggaatggatattcatcattcccagcttgttacaaaggtgctgaaaggtggctggtcgtaaagctttggtgaatatgtccacaagttgcattganggatgagaccggaaggagcttgacgagacccgcagtgactttgtggcggataatatgacaatcgatctcgatatgcttggtgcgttcatggaaaacgggatttgttgctatctgaattgcagattggttatcacaatataaagtggctggctgaataaatgctacaccaatgtcttggagaatatacgttaaccattgcagctcacaggcagtagatgcgagagctcgatactcagcttc

SEQ ID NO: 730 - DNA, 414 bp, Glycine max
agcttaacttaaataccttcaattttaacttatgtgcttatatgataagtccaaaccagttctgaagaagctattctaaatggccccaaattgtattcttgagtctttaatgctcgtgctgaccaagcttctgttcctggcctgtttattttcttcactgaaataatttgtgttctgtgctgacgagtgtgctgtaagaaactgactttggcgatcttaacctacctaatactctattttgaaaacaggaaaaaccgagtccatggatccaaattcaagaattatggttcctgaagataggcatggactccatgcaattgatattttggaccctgacttggtatgcttgttttaaagtttgttgaagtgcaatgcagatatccaagcaagttattcatgaatcctatataattc

SEQ ID NO: 731 - DNA, 440 bp, Glycine max
  unsure (1)..(440): unsure at all n locations
agcttaaacaaatccaaaagagaaagaagctacataacataactaattgtacctgtaggaattataagattgttttgagagtgaaagatcgtaacaactaacactgattaaaaaaaaaaaaaaaactaattgtacctgtattggagacatatccctttgcatataatcaagaggggtccaagaggcaagcttttcacaagttttagaacccanaatacagcctctaatagtgttccaatagcgaggatcctgaattctcttcctcaaccatggtgagtaatcttgaagacgatactccttgtaaacccttccaggcacttccacaccaccgcccttgctagtcacaccaaaaccaaatattgtgaagcccatgagtgctgctatgaggaacaacatgaccaccaagtacaaccatagtgcacatgccacatgaaaacatg

SEQ ID NO: 732 - DNA, 439 bp, Glycine max
  unsure (1)..(439): unsure at all n locations
agcttccttaagaagattcctaaagaagctagagcttagctacacatacctctctaatagctaagctcacctccttgagatgagaagctagaacttagctacacaccccctataatagctaagctcacccctatgacaaaaaacatgaaaatacaaaaaaaaattccttactacaaagactactcaaaatgccccgaaatacaaggctaaaaccctatactactagaatgaccaaaatacaaggcccaaacgaaggaaaaacctattctaatatttacaaagataagcgggcttatacttagcccatgggctcgaaatctaccctaaggctcatgagaaccctagggccttcccttggatctctagcccaatctacttggagtattctacccaatgcccttgcggngtaggattgcatcacagcagagtttgaccttca

SEQ ID NO: 733 - DNA, 436 bp, Glycine max
agcttccttaagaagattccaaaagaagttagagcttagctacacacacctttctaatggctaagctcaccaccttgagatgagaagctagagcttagctacacaccccctataatagctaagctcaccctcatgaccaaatacatgaaaatacaaaaaagtccctactacaaagactactcaaaatgcctcaaaatacaaggctaaaaccctatactactagaatgaccaaaatacaaggcccaaacgaaggaaaaacatattctaatatttacaaagataagcgggctcatacttagcccatgggctcgaaatctaccctaaggctcatgagaaccctagggccttcccttggatctctggcccaatctacttggagtcttctatccaatgcccttgtgggttaggattgcatcattccctccaccttggaaag

SEQ ID NO: 734 - DNA, 309 bp, Glycine max
  unsure (1)..(309): unsure at all n locations
gtgcctgtatattgatgcgccggaatcggacatacgatggagaagttatgaccatttgaatttctcgagagcttcctatgtttaatctggagcgtctcgatatattatacccctgaatcgaacctcagctgtgaaagttatgaccatttgaatttctttagagcatccgatgttcattnttgagcgtctctatatgtgatgaagcttaatcggacgtacgtgcgaaaagttatgaccatttgaatttctagagagcttacggtgttgaatatcgagcgtcgcgacatattatgcgcccgaatcggacat

SEQ ID NO: 735 - DNA, 447 bp, Glycine max
  unsure (1)..(447): unsure at all n locations
agctntcatgtcntaataaattgttaattctactgaaattgattattttaaaaattatgtttattatgatttttgatcggatgattataaaactttttctattgatgatatatagaaattagattctatgttataacatttaaaatataaaactacattatgaaaaatgcaatggtaagtaaattaaatactttttcttgagagattcataactaataacgcgaagttgaaatagacataacgttttaagttgaaattctattaatttacaattagtattgtttgattgagtagaaagaaaagtaaaaaaagattaataaaattaaattaaaatagaatgtacaaatataaattctgcattattttactggttattattttttttattctctttttcttcaaacgaaaccttagtattcttataattgaatgagttttttatgtcca

SEQ ID NO: 736 - DNA, 171 bp, Glycine max
  unsure (1)..(171): unsure at all n locations
tcaacatcagaccacttccagggtgctggaactacttcacatgtgacttgatggngcctatgcaagttgaaagccttggaggaaaaaggtatgcctatgttggtgtggatgatttctccagatttacctgggtcaactttatcagagagaaatcagacacctttgaagtat

SEQ ID NO: 737 - DNA, 419 bp, Glycine max
agcttataatatattgatacgctcgaaattaaacgtcggaaactctcgagaaattcaaatggtcataacttttcacacggatgtccgattcgggcgcataatatgtcgagaggctcgaaattgaacaacggaagctcttgagaaattcaaatggtcataacttttcacacggatgtccgattcaggagcatcacatatagagacgctcgaaatttaaatgggcataatttttcacacggatgatcgattcaagcttataatatattgatacactcgagattatacatcggaaactctcgagaaattcaaatgggcataacttttcacacggatgatcgattcgagcgcataatatgtcgagaggctcgaaatcgaataacgtgagctctcgagaaattcaaatggcgatacatttatac

SEQ ID NO: 738 - DNA, 422 bp, Glycine max
ttgagtggcttaatggctggagtagaagattcaatatagttgtagtttgaattaattgctccaagagaagcaatggaagtgagaggaaggggagccaaagcgccaagacaaccaatgatgaaacggagcacatcttccctagagagacaacagtacctatcacggataggagtgatggaagttgaggggctccgattcatgttaagtggtagattgttgctgctgttgccaggagattcactattcttgagccacttgccatagtagataactgagaatcgcttgctcatgcccttccatggctacgctcttggaacaagcagacgcttcacaccttgtttcatcatgttcagcgcatctatcaaccttaatgagaggaagtaaagtaagatattaagggtggttttgtcaaattagaaaaa

SEQ ID NO: 739 - DNA, 376 bp, Glycine max
tggtctaacctttcacatggaggtccaattcaggctcataatatatcgagatgctcgaaattgaacaatggaagctcttgagcaattcaaatggtcataaccttactctcggaggtaagattcatgcacataagttaacgagacgctcgaaattgaacaacggaagctctcgagatattcagatgatcataacttttcactcggaggtgcgattcaagcgcatcatgaatagagacgctcgaaattgaacaacggaagctctcgagagattcacatggacataacatatcacatcgaggtcagattcaagcacataatatatcgagacgctcgtaattgaacaacggatgctgtcgagaaatctaacggcataact

SEQ ID NO: 740 - DNA, 455 bp, Glycine max
  unsure (1)..(455): unsure at all n locations
cgctcgtgaccatntgaataactcaagagcttccattgttcaattntgagcgtctcgatatattatgcgccttaatcggacctccgagtgaaaagttatgaccatttgaataactcaagagcttccattgttcaatttcgagcgtctcgatatcttatgtgcctgaatctgacctccgtgtgaaaagttatgaccatttgaatttcttcagagccttccgttgttcaatttcgagcgtctcgatatcttatgcgcctgaatcggacctccgagtgaaaagttatgaccatttgaataactcaagagcttccattgttcaattacgagcgtctcaataaattatgtgcctggatcgacctccgagtgaaaggttatgaccatttgaattgctcaagagcttccattggtcaatttcgagcgtctcgatatattatgcgcctgaaccggacctccga

SEQ ID NO: 741 - DNA, 367 bp, Glycine max
tccattgttcaatttcgagtgtctcgatatattatgcgcctgaatcggacctccgaatgaaaagttatgaccatttgaatttctcgagagctacctttgttcaatttcgtgcgtctcgatatattttgcgcctgaatcggacctccgagtgaaaagttatgaccatttgaatttctcgagagcttccgatgttcaatttcgagcgtcttgatatactatgcgactgaatctaacctccgtgtgaaaagttatgaccattttaatttctcaagagcttccgttgttcaattttgagcgtctctaactgtgatgcgcctaaatcagacatccgagttaaaagttatgaccatttgattttctcgagaac

SEQ ID NO: 742 - DNA, 446 bp, Glycine max
agcttctatagaaggttcgttcctaatttctctacaattgcatcacctctcaatgagctggtgaagaagaatgtggcatttacctggggtgaaaaacaagagcaagcctttgctttgctcaaagaaaagcttactaaggcacctgttctagctcttcctgacttttctaaaacttttgagctagaatgtgatgcctctggagtgggagttggagctgtattgtacaaggtgggcaccctattgcttattttagtgaaaaacttcatagtgccaccctcaactaccccacctatgataaagagctttatgccttaataagagccctccaaacttgggaacattaccttgtttccaaggaatttgtcattcatagtgatcatcaatcacttaagtacattagagggcaaagcaagttaaacaagaggcatgcaaaatgggtagagtac

SEQ ID NO: 743 - DNA, 451 bp, Glycine max
  unsure (1)..(451): unsure at all n locations
tttgaagtttgtcatttcaatttctcactaagtaaaatggatcattcttaaggtccaacaccttaaaatgatcaccacttaagtaaaacagaatcatttgataagcaagaactacgtaggtctgatttcctcatcgcaattgaggatacgtangagcaaaagccccgcttttgtcgaccaccccaagagatcgttaatgtgccaatgccttaacgtttctctcctttcaaaaacaagagatcgttaatggtccaatgccttaacgcttctctcctttcataaacaagagatcgttaatggtccaatgccttaacgtatctcttctttcanaaacaagagatctttaatggttcaatgccttaacgtctctctccttcataaacaagagatcgtatatgtccaccgcctaacgttctcatctttaaaatcaaataccggtaatggtcaacac

SEQ ID NO: 744 - DNA, 470 bp, Glycine max
  unsure (1)..(470): unsure at all n locations
acgggtggatggatcgatagaatggtcagattagttgtggtagttgatagctgcccagccctacctctcatattattgacaaattctatttctataatatataaaattgtatactttttatgtaagaaagaaaatatataaaaagaataatttatcattaaaagtgggttgtatattaattattataatttaattatgtttatatgagaaactgttaaaatgatatgttaaagtaaaagactacggatatcatttttttactctaacacaactaatggttntagcacatgtttgtgtgtagtcatttgctgtgttcaggatcgacccgtcagaaagtaaaatctaaaataaaaattgagagaggattttttattctaaagaanataatgatagttgaagtcttttatttaactgtgtgacattgtttactttaaaaaataatatatatcataatagacctaaagtttaag

SEQ ID NO: 745 - DNA, 445 bp, Glycine max
  unsure (1)..(445): unsure at all n locations
agataaggctaatatctgcatattntnttcctttctttcttgttttatatatgatcaaattatctaatctataagattaaaagaatgattaatttaattataataatacacttattttcaacttatatcttttcaaaatatttccgttattaatattttttaatggctttgtgatatattttttcttttttataaaatatatttataatttcaaagtaataaatattataaaatgaataatttagaaagaaggtaatatcattctaataaaatggtatttctggcccttttactcatctttaattttgagcttaattcttatttaaatctatttaagaatgtaattatctaactatgttcaattcaataaatgtaattcgcaagtcatatctaatggatgtattacggtcatatgatatgttttgatggaatatcatagttaaat

SEQ ID NO: 746 - DNA, 471 bp, Glycine max
  unsure (1)..(471): unsure at all n locations
actcattctttaactaccaacagaaagaaatgcagttttgctaagcccagtttagagtatcttggcctcatcatttctggttntggggtggcagcagataaatccaaggtggctacaatgagttcctggccagttccgaaagattcgaagagtttgaggggatttttaggattgataggctactatagaagatttgtccaaggctatggtaaaatagcaaagcctttgactgaattactgaaaaaggatagctttgtatggacactagtagctactctagcttttgaaactttaaaatctgccatggtcagtttgcctttattagcagttcctgattnttcaaaaacctttgttctggagacaaatgcttctagcanaggagtaggggctgctcttatgcaagagggcaggcctttggcttttatgagcanaggactctcccctcgagcacagctgaagtcagtctatgaa

SEQ ID NO: 747 - DNA, 452 bp, Glycine max
  unsure (1)..(452): unsure at all n locations
agcttctttgagaaaacttccttgagaagctagagcttagctacacacacccctctcataactaagctcacctccttgagaagcttccttaagaagattcctaaagaagctagagcttagctacagatacctctctaatagctaagctcacctccttgagatgagaagttagagcttagctacacaccccctataatagctaagctcacccccatgacaaaaaacatgaaaataacaaaaaaagtccttattataaagacaactcanaatgccccgaaatacaaggctaaaaccctatactactagaatggccaaaatacaaggcctagacgaaggaaaaacctattctaatatttacaaagataagcgggctcatacttagcccatgggctcgaaatctaccctaaggctcatgagaaccctagggcctttccttggatctctagcccaat

SEQ ID NO: 748 - DNA, 433 bp, Glycine max
gctcttctcaagtgtcttcacttgttctatgttaagcctccttttcttctctcctgcctgagatccatcatcagaatcttcctcagcattagcttcttctccaagttcaatccctgaaaatgacatagatctcttgccaagaaaggatgctcctccacctgcatatcaacattgtgaaacattagtattaggccactacacaacataatattgcaccattggttggtgtttttgtgatctagaggagagagtaccatggtactcttgaggtgcacatgaagttataattgagtcgagtgaacgtggaggttgatggtcatcttggtgaggtgttgtagcatgaaatttgctgagaagatagccatatcattgctggctagcctatgcctgatgccactgatcttcaatggctgaatgatattctgatcaccat

SEQ ID NO: 749 - DNA, 360 bp, Glycine max
  unsure (1)..(360): unsure at all n locations
taaagattgaatttcgagcgtntcgttatattacgggactcattcagacatccgagtaaaaagttattgtcgtatgaattggcttaaagcttaaacattcaactttgaccgtctcgatatattacgggactcaatcagacatccgagtgaaaagtaactgccgtttgaataggctcagaggttcaaaactcaatttcgagcatctcgttatatgactggactcaatcagacatccgagtaataagttattgtcgtgtgaattggctcagagggtcaacattcatttttgagcgtctcgatatattatgggactcatatagacatccgagtaagaagttattggcgcttgaattggcacat

SEQ ID NO: 750 - DNA, 424 bp, Glycine max
  unsure (1)..(424): unsure at all n locations
agctntgagccaattcaaacgacaataactttttactcgaatgtctgattgagccccgtaatatatcgagacgctagaaatggaatgttgaacctatgagcctattcaaacgacaataactttttactcggatgtctgattgagtcccataatatatcgagacgctcgaaattgaatgttgaacctctgagccaattcaaacgacaataaccttttactcggatgtccgattgagtgacttaatatgtcgggacgctcgaaattgaatgttgaacctctgagccaattcacacgacaataactttttactcggatgtctgattgagttccgtcatatatcgagacgctcgaaattgaatgttgaacctctgagccaattcaaacgacaactaacttttactcggatgtctgattgagtcccgta

SEQ ID NO: 751 - DNA, 395 bp, Glycine max
  unsure (1)..(395): unsure at all n locations
catctgatgttntccctttagccacaatttccaagtacttccctaatagaataaaggatatcatcatggaacttgtctcaaagaaatcttgtccttcanatgtgtgcccagcgcaaccagcacgtccatgttagcggattttcgcttcagtgcatgatatgaacctacatagaacctaatagtaatagccatagtaaaatgactataagaatctccaatttcttgaaaacaatacaataaaattgtctttggtgaataaagagaaacattaacaagaaaagaaattagaattaaatagttattgatagtcatagtaccttttgccaactatgaactgcacaggcgtgctaagaatccatcttataaacaacccaagagtaagcgtattgtggatc

SEQ ID NO: 752 - DNA, 451 bp, Glycine max
  unsure (1)..(451): unsure at all n locations
agcttataattggcttccaaattgattttgtgtatacaatatgatggactgattccttttagatcagaaatgtgccaaccaatagccgctttacgtcgttgtagaatttgcaccagttattcttcttcttctttcttcaaaaagttgctaattataacaagtttggtctcatcttcttccaagaatacatactttaaatgtgccagaagggtttttaattttgctttgggcttttctgttggactcagtttttccaattcttcacaacaaccttgtcaacataattgtcttttgaatcatcaagctcttcatcacaagctaagcaatctctcccatagccaggttctttntccaaaggagactgtagcaccatggntgaggctaataatgttatttcctgctccacctcttcttcttcgaaataggcatcacccatatctgagtggttcat

SEQ ID NO: 753 - DNA, 351 bp, Glycine max
agcttccattgttcaagtttcgagtgttttcgatatattatgtcgcctgaatcgacacctccgaatgaagggctatgaccattcgagtctctcgagagctacctttgatcaatctcagagcgatcgatatattatgcacctgaatcgcacctccgcgagacaagattcaccgttctagcttctcaagagcttgcgctggactacttactcccgcattaacagtgatgcgcctacttaagccatacgagtttgacatcctgacctttagactgagtcgcgcacctacgttgctgaaatcctatcgtcccaagagtttttgctctctggtgagccactaccagattattgtat

SEQ ID NO: 754 - DNA, 334 bp, Glycine max
ggcattgcaaacgattcacacctggactctcactcctctgccacctcacaagcaagttgttggctgcccgtggatatacaagatcaagtataatgcagatggtaacattgagctgtccaaagcgagacttgttgcgaaaggatacacacaagtggaaggcttagattaccttgctactttctcccaagtgccaagctcaccatagttcaactcattcttgccctttgcagccattttgattggcatctcaagcaattagacgtgaataatgcatttctttatggagaattgatgaagaagttacatgagtctttctccagaatgcatcagccta

SEQ ID NO: 755 - DNA, 463 bp, Glycine max
  unsure (1)..(463): unsure at all n locations
agcttattgggagataattntcaatcatcattgntatatgcaatgacaatcaacaaatctcaagatcaatcactagcatttgtgggtttgtacttgcctagaccgatgtttagtcataaacaattatatgtggcagtttcaagagttcaaagaaaacaaagattaaagatcttaattcatgacaaggaaagaaaaccattgaagtctgctactaatgttgttttcaaagaggtatttgaaaacctttaataagtatgtccacaagtgctactaattctatttgtatcaactataatttgatttacaatactcgtatatcttatatgcaagtttcctcttggagtggctgcattatttttggtccttggccaaagttacatttttctcctctgaaatgtagatagatgcaagtatcatggttcttaacatattgcattggtgggaatatgtggaaacaatatga

SEQ ID NO: 756 - DNA, 169 bp, Glycine max
agaatcggaagaagtaattggctttttccctggcgatctaactgcagatctcttgacctctgccgtggaagcagctgcataagccattcatgatatttctacaccttagatcaacatgatgaaagcagctgggtgggaccttgatgctgatgccaactgactcgaacct

SEQ ID NO: 757 - DNA, 297 bp, Glycine max
aagaatatccctttatttacaatattgtcacctttaataatttatcatcagttcgagagataatatcggttttgatcaaaattaatgttaacgagcattgtttattaaggtcgtcaaaggaaacttattgatgcaatgctacccgccaagggcattggatagaagactccaagaagattgggtcagataggcaagagaaggccctaggggtctcaagagccttatggtagatttcgggaccatgggctaagtatgagcccacttatctttgtacatatcatattatgattccattat

SEQ ID NO: 758 - DNA, 359 bp, Glycine max
  unsure (1)..(359): unsure at all n locations
agctntgcaacaaatgtcactctactcgaaatttctgatagatatgtttgacaggaaaaacaaacacgtccaccacgagaatattgtcgcggaacgaaaccgcagtgctgtaatacagagaattcttccaccaaaacataaggaccctggtagcgcaactactccttgatcaatcgaagaagtcactctcggaaaggctctcattgactggggtgccagaatcaacctaacggcgctctctatgtgtacaaggtcgggagagctggaaatcacgctcacgagaatgactttacaacttgctaaccgatccatcacaagaccttacggtgcagatgaggaagtactgactagagtgaaac

SEQ ID NO: 759 - DNA, 389 bp, Glycine max
  unsure (1)..(389): unsure at all n locations
tatcttaagtcacgtgcggcatgcaagctcgactagtccacataagtgagaattcntatttgtctaagacgaggagcattaagggttatcattgcctgacaataccgctcatcaacataacatttgtgtggtttgcagaattctttgagcttaggatagtaagtattgtcttcaactatcctaagagctagttctcggctaatttcaaaccactgggagccttttcaccaggcactcatgttgatttcaaattattttgtttggtattagaagcatacttccccaatgagtgagaaaagtgtacataacatatttaatagcatgaacaaacaatttataaagactcaggataagatcatgaacaagcatgagccagaaacccatgatca

SEQ ID NO: 760 - DNA, 448 bp, Glycine max
  unsure (1)..(448): unsure at all n locations
taagtaataataatagtaagaagaatattaataactattatctatanccattttgtggcattatgaatgacaggatgtagtgacataaagtgcttagagagttcacttgcatgtgaaaaattttcaaaaagaaaaagacttaagttaaaaggataatgcaaccagattaatacttccaaagaaaaaaatgttttgcaaagacattttcagacaatttaaatatttttatttgactatattagtataaatcatctctaatccatatattttttaatattatgttctttntattcattntcttttgatatactttgtgttttaataatttgaattcaatatgattntgtttatcaattatttctggatttgacatntacttatacgaaatttataagtttctttttttggtagtatttactaggtttaaaatgttaattggtaaagacgt

SEQ ID NO: 761 - DNA, 427 bp, Glycine max
ttcacatttacttgatggggcctatgcacgtcgaaagccttggaggaaagacgtatgcctacgttgatgtggatgatatctccagagctacctgcgtcaactatatcagagaaaaatcacacccctttgacgtattctaggagctgagtctaagacttcaaagagaaaaagactgtgtcatcaagagaatcacgagtgaccatggcagagagtgtgacaacagcaggtttactgaattctgcacatctgaaggcatcactcatgagttctctgcagccattacaccacaacagaatggcatagttgagaggaataacaggactctgcaagaggatgctagggtcatgcttcatgccacagaacttccctataatctctgggctgaagccatgaacacagcatgctacatccacaacagagtcacact

SEQ ID NO: 762 - DNA, 477 bp, Glycine max
  unsure (1)..(477): unsure at all n locations
ctcagcttaggatgagctntattatgaacataagacttaattntacatatgcatctttctattggatacatccacctgtattgaacaggaccacctaatctaactttgtttgccaagtgaacaggaaagtgaaccattatgtcaaaaaacttggaggaaaaatcatctctgattgacaaagaatttcaataatttgtgattctatataatccaaatcttctacctggatcactntctaacacaaagagcgaaagaaggatccaaggtgaattaaaagatcaaccaccacactaggcattgtgcttctaattgctatttgtaataagtaatgtaacatgatatgtgtatcatgactctngtagccagaatatttgtcagtgatatgcatgcattntgaaatatttgttgcactcccatctangcaattggcatctttcaagataccacanaaaatagacttctttnttgtagtcatta

SEQ ID NO: 763 - DNA, 477 bp, Glycine max
  unsure (1)..(477): unsure at all n locations
cttctacctatgacagtgctaagggatgtttccctagatagtagaaggtatatagattgttttagaaggagtgctcttttgatatcaccttttgttataaaatgattttccttcttaaaaatcttcttggaggaatccttttcctctttttccttccccttggcctttgaagagaaggccttactatccttctttttcttttgtttttctagtttttcttcctcatccctattatctttcatagttagttgatctttggccacctgtgaaggtgtttgaggatgcaacacanatttagtgccaagatgggtgagggtaatctcattagttaggccattttaaatgatcttcctatcanatttccatggccttcctaaaagaatatgcattgcctccatgggaactatatcacaattaacttcacccttttatgtcccaatggagaaaggtacctttacttgttggctaattatcatt

SEQ ID NO: 764 - DNA, 449 bp, Glycine max
  unsure (1)..(449): unsure at all n locations
agcttattgggagataattntcaatcatcatttttatatgcaatgacaatcaacaaatctcaagatcaatcactagcatttgtgggtttgtacttgcctagaccgatgtttagtcataaacaattatatgtggcagtttcaagagttcaaagaaaacaaagattaaagatcttaattcatgacaaggaaagaaaaccattgaagtctgctactaatgttgttttcaaagaggtatttgaaaacctttaataagtatgtccacaagtgctactaattctatttgtatcaactataatttgatttacaatactcgtatatcttatatgcaagtttcctcttggagtggctgcattatttttggtccttggccaaagttacatttttctcctctgaaatgtagatagatgcaagtatcatggntcttaacatattgcattggtggaattatg

SEQ ID NO: 765 - DNA, 401 bp, Glycine max
  unsure (1)..(401): unsure at all n locations
cgaatcggacctcagtgtgaanagttatgactcttttgaatncttctagagctttcgttggtcaatgtcgagcatctcgacatattatgcgctcgaatcagacatccgtgtgaaaagttatgaccatttgaatttctcgagagcttccgatgtttaatttcgagcctctcgacatattatgcgcccgaatcggacatccgtgtgaaaagttatgaacatttgaatttctcgagagcttcggatggttaatttcgagcctctcgacatattatgcgcccgaatcggacattcgtgtgaaaagttatgatcatttgaatatctcgagagccttcgatgcttaagttcgagcggactcgatatatataagcctgaattgccctcagtgtctaaagtatgaccat

SEQ ID NO: 766 - DNA, 356 bp, Glycine max
agcttatctatttcttttgatgaacttcaagattcatttttaacttgcataaagaatctgtcaaacttgccaaattattttcattttctaagaaaactattttaaatttagaaaagaaagttttgaaattaaatgtagaattataaaatcttaaagcagaagttaaaacattaaaaccaatagatacaaaccaatcctctactaaatgtttaatacaagatagcaatgaagcatctcattcatgtaaatattgtaaaatatttaaagaagaaattaaagatgtaaaagattctctttccatacttactcttggcaaaaataatttatatattatactaggaaaacatatatgtgtt

SEQ ID NO: 767 - DNA, 444 bp, Glycine max
  unsure (1)..(444): unsure at all n locations
agctnnttgaanagacacatctcttcttanatttttgaaaaggcacgaaggacctatatatgtgtgtgtccaatttcaaaaagcaagagatagatattccaagaaaacttcattgtcaaatgctctctcaataactcttgggcaaacacttgcaaatctattgagagttcatccaagaacttcaaattgtattattcactctaaaggagaggaatctttctgttcttcttagaaagtcaattgtaatcaaaagactagttgtctcttgaattatgagtttcctgaacacaacggaaagggattccttgngtgttcaaaagttgcaaaagggttgtttacaaagatagtggaaaatctcaagtgggttgcttgaggactggacgtangcacgggaagcggccgaactatgataaatcgagtctgcatatctctcttcccttatct

SEQ ID NO: 768 - DNA, 363 bp, Glycine max
  unsure (1)..(363): unsure at all n locations
ctataaaactaagctttgcctcnaacatattatttccaacttccaatgctctgngaatcgattacaaggcaatgtaatcgattaccagaagacaattttgaaaaacaacttttaaaaaaggttttgaatttaaattttgaatcatgtaatcgattatcagatgtttgtaatcgattaccaacaacggcacttcagtaaacactttgaaaagtcatgacccttcaaaatataattgtgtaatcaattaccaaaaacctgtaatcgattaccagtgaagagttttaggaaaaatcttttgaaaagacacatctctccaaaccattttgaaaaggcacgaagggcctatatatgtgtgtgtctgac

SEQ ID NO: 769 - DNA, 329 bp, Glycine max
  unsure (1)..(329): unsure at all n locations
agcttatccncacaagagtgcagaacatctggtgatgtctgcattgattataggaggctgaatcaggtaactagaaaagatcattttcccctgcctttcattgatcaaatgcttgagcgcttggcaagtaagtctcattactattttcttgatggtttttctggttatttacaaattcatattgctcttgaggatcaagaaaagaccacattcacctgtccctttggcagttttgcctataggaggatgccctttggcctatgcaatgcccttggtaccttccagcggtgtatgcttagcattttcagtgattttttacagacttgcat

SEQ ID NO: 770 - DNA, 385 bp, Glycine max
actcagcttgccgcacggacgtgtccgactatgctctattcgtggggaacatgctacgaaaggagagagcacgagatgaagagccaatggttgatacatggacggagatgaagatgatcatgaggaagcggattgtgccggctagctactcaagggacttgaaattcatgctcctcaaactaacccaaggcaacgaaggggttgaggagtatttcagggatatggatgtgctcatgattcatgcaaatattgaccaatatgaggagggagctatggctcgatctcttaatgtgttgactaatgacatacgcgatattgttgagctgcacgagtttgttgaaatggatgatttgcttcacaaagcaatccaagtggagcaacaatt

SEQ ID NO: 771 - DNA, 453 bp, Glycine max
  unsure (1)..(453): unsure at all n locations
agcttataatatattattacgctcgaatgtattcatcagaagctctcgagaaattcaaatggtcataacttttcacccggatgtccgattatggcgaatcacatatcgagacgctcaaaattgaacaacggaagctcttgagaaattctaatggtcataacttttaactcggatgtccgattcacgcgcatcacatattgaggcgctcganaaggaacaacggaagctctcgagaaattcaaatggtcataactnttcacactgaggtccgattcaggattataatatatcaagacgctcgaaattaaaaatcggaagctctcgagaaattcaattggtcatcacttttcacacggatgtccgatttgggtgcataatatgtcgacacgctcgaaattgacaacggaagctctcgagaaattaaatgggcataactttatactgaggtcgatc

SEQ ID NO: 772 - DNA, 434 bp, Glycine max
ctcagcttagatgggatcattgaaaaatagatatatcttgatttctttaatgtttaatgaatactctgatattgatggtcttgatttattctcacaattgacagtactaagagaagtgttaagagaagaaattagcacaccaatagaactattgagttatattaaaactctatattcttttccaaatgtttacattgcatataaaattctattgacaatctttgtaacagttgctactgctgaaagacgttttgaaaaaaagttgttcataacatacacagaataaagatgatctattttgcatctaaattatatttaaataaacggcatattaaatgtgtacatgttaattgaagcattcaaataattggtgttacgagagaatgagaagagaagtgataacttggtacttcaacgtggagcctaagaatgta

SEQ ID NO: 773 - DNA, 301 bp, Glycine max
  unsure (1)..(301): unsure at all n locations
ctcagcttgtgatcctgatctacagacgactcggttttatgctcttgttcttaactatatctaggncagatatatgctattgtgtgcacaaattatatcaacttgtcttcaacccctatacgaaccacatgcatgctactaacatgtctcttcggtaccttaagcacactgttattcaaggtattttttttatggccaacttatacacaaaattacatgcatatgtggatgcagattaacgatcatgttctgaaagttaaagatcaaccactggcttctgtatcttcttagaaattccttg

SEQ ID NO: 774 - DNA, 467 bp, Glycine max
  unsure (1)..(467): unsure at all n locations
ttaagtcgacgcggctgcagctgctaagaccgatatnggttcttattttgttctcatgngctcctttccttaaactgagaaccccattggttggttcatataaacattctcctcaaaatctccattaagaaagacagttttcacatccatctaatgtagctccaagtcataatgggctattaatgccatgataatcctgaaagaatcctttcatgagaacggcgaaaatgtctcttaataatcaatgtcatctttttgagtaaaatcccttagtaacaagtctagcattgtaatgttcaaggttgccatgagagtcatgtttagtcttgaagacccactttcaactaactctcttataaccctttggtaattctacaaggtcccaaatatcattatgtgccatggaatttatctcttctttcatggtatttaaccacttctcagaatcatcacagcttgcagcttgc

SEQ ID NO: 775 - DNA, 450 bp, Glycine max
  unsure (1)..(450): unsure at all n locations
agcttcanacttcgntgcatctaaccactatctctnttcttcactttccatggcctctctaaagcactcaggttctccatcatctgttaggatcacatactcattagtagaatacctattagaaggttgtctttccttgttggacctcctgagttgaacttgaggtggctcgatagcaccaccaagattttcatcttgtgacatgtcatgctcctcttcatacatcattttgaacatcagtatttagattctgaatatgcggctgaactggttcaaaatcaaccacaccaacattgtcttccttgggtgtagacttcttcaccttatcaatgtcttgaatggtttggtctttcatgaatttcacatcacggcttctgacaagcttcttctcaacaggatcatataacctgtaaccaaattcattctcatcataaccaatgaagatacatt

SEQ ID NO: 776 - DNA, 333 bp, Glycine max
  unsure (1)..(333): unsure at all n locations
actcaagctctgaggaacttcanacaacaacaactntntactcggatgtcttattgagacccgtaatatatccagacactcgaaattgaataccgaagctctgagcaaatttaaacgacaatacgtttttactcgtatgttcgattgagtcccgtaatatattgaatcgctcgaaattgaagaccgaagctctgagcaaattcaaacagcaataaatttttacttggatgtctgattgagtcccgtagtatatcgagacgcttcgacttgaatgccgaagctctgagtaaattcaaacgacaataacttttttcctcggatggctgattgagt

SEQ ID NO: 777 - DNA, 228 bp, Glycine max
agcttcgacattcaatatcgagcgtttcgataatttactggacttaatcagacatccgagtaaaaagttattgtagtttgaagttgctcagagcttcaacattcaatatcgagcgtttcgatatattacgggactaaatcagacatcagagtaaaaagttattgtcgtttgaattatctcagagcttcggcattcaagtccgagcgtctcgatttattacgggactca

SEQ ID NO: 778 - DNA, 425 bp, Glycine max
  unsure (1)..(425): unsure at all n locations
ngaagttgctgagctgaaatccaagtattgtggctctctttgttnttacccattatatgctgtagtttcgttgttagattttttctttataggaatttatggtcctgtaagttcattgagagggcccaggcactaatacatggagatctacacactggttctgtgatggttactcgtgaatcaactcaagttattgatccagaatttgcattttatggaccaatgggttttgatattggagcattcttgggaaacttgattttggctttctttgctcaagatgggcatgctgatcaagcaaatgatcgaaaagtaggtcccctttttccatgtcttctgtggtccttacttgtcctcttctttgcatactataagttgtatttagtcacatttcttgttattctccataatctagctaccactta

SEQ ID NO: 779 - DNA, 423 bp, Glycine max
agctttgaaatccaaagatctaatccaatgtagatgtttcataaatgggattcctttgcttgtgttgtttgattctggtgccacccattcctttatatcctgtttgtgtgtaggaaaacttaagctttctgtgtcttctttaaataaagatatagtagtagagacccctactagtggttctgtgttaacttctgatgtgtgtttgaattgttctgtggagatttctggtaggatattcttgattgatttgatttgtttgcctttgagccagattgatgttattcttggtatggactggttatcttccaaccatgtcttgttgaactgttttgagaaaagtgtggtgtttgatgattctggagtgagtaaggatatgatgtttatctctgccaaccaaggtgtgacatctttaaaggaagatgc

SEQ ID NO: 780 - DNA, 372 bp, Glycine max
  unsure (1)..(372): unsure at all n locations
tagcatgttataaatatatctattagcataatttatactagtgagaatatttgtatgggtatcttaccagaagcagagctcattcaccctttgaatcaagatgtatagtaggtccggttctgcaacagtaatgcaggtgatcctcttcaatttgatcatgttttgtttgctanaacatcataccatctattgccatttactcgaatttatagtcgctaacattagctactacaattaaaataacttaacaggttattgcaattctatctagtatatataagaaataatatggcatgcagtttatacatatattttctttataaagaggaatcataatttgtatatatttgatgcatttaaagtttttactat

SEQ ID NO: 781 - DNA, 262 bp, Glycine max
agcttcggttgttctatttcgagcatctttatatgtgatgttcctgtatcggacctccgtgtgataacttatgaccattataatttctcgagagcttccgctgttcaatttcgagcgtctcgatatattatgcgcccaaatcggacatctcggggaagggttatgaccatatcaatatcacgaaagctttggttggcaatttctagcatctcaattgtgatgttcctgtatcggaccttcgtgtcataacctatgaccattt

SEQ ID NO: 782 - DNA, 407 bp, Glycine max
  unsure (1)..(407): unsure at all n locations
tcgaagaaacggataacagattgattntactctgtaactagacgacatctccgactgatattgtggaccctatttgcttcttgatgcaatcctaccccctaaggacattgaataaaagactccaagaagattggaccagagagatgcaagagaagaccttaggattctcatgagccttagggtagatttcgggcccatgggttaagtataagtccacttatctttgtacatatcatatcaaggttttattatttttgggccttgtatttagggctctatagtgtaggtagggtacccttgaaatgtaggatttttcagcccttgtattttagggcaccttgactagtttattgtattaggggtagttctgtaatttcacatacattaagtgaatatttgatgtgtgt

SEQ ID NO: 783 - DNA, 386 bp, Glycine max
gcttggcacaatgccactccatttactatccgagtatatagtggatcttgggatgacaatggcatttttatttacacaacattaaatcatataaaatattgcctccccaatggagatagtgggataattaaaacattggatgtcccaatttatattacaaaggttgttggaaacaccatcttctgcttgggtcgcgatgggaaaaacaaagctataactgttgatgcaacagaatatatctttaagcttttcttgttgaagaaaaaatatgatcatgtaatgaacatgataaagaattcgcagctttgtgggcaggctatgattgcttatctacaacagaaagggtttcctgaagttgcgctccattctgtgaaagatgagagaat

SEQ ID NO: 784 - DNA, 417 bp, Glycine max
  unsure (1)..(417): unsure at all n locations
tcaagaaaaagatggcctcagctnattccttatttccataagggaattctatcaatagacctccaatctttaatggagagggttaccactactggaaaacccgaatgcaaatttttatcgaggcaatagatctaaatatctgggaagccattgaaatagggccttatatacccaccacagtagaaagagtttcaatagatggtagttcatcaagtgaaagcataaccatagaaaaacctagagatagatggtctgaagaggatagaaaacgagtacaatacaacctaaaagccaaaaacataataacatctgccctaggaatggatgaatatttcagagtttcaaattgcaagagtgctaaggaaatgtgggacactcttcgattaacacatgaaggaactacagatgttaaaagat

SEQ ID NO: 785 - DNA, 413 bp, Glycine max
tgtaatcgattacacacatactgtaatcgattaccagagcacattttcaaaaaatattctcaacagtcacatctttttatgtggttcttgaatggctatcaaaggcctatatatatatgtgacttgagacacgaatttaagaagagtttttggagaacaaaaaggtcttatcctattaaaaagcaaatcgtgttatcctcttacaaattccttggccaaattacttgtgattcaataaggaattatttgagtgctcaaattgttcagtctatctctttcaagagagatttcttcttttcttcttcttcattctgaaaagggattaagagaccgagggtctcctgttgtgaaagaattctaaacacaaaggaagggttgtccttgtgtgtttagaaccttgtaaaggaatttac

SEQ ID NO: 786 - DNA, 369 bp, Glycine max
  unsure (1)..(369): unsure at all n locations
agctttaccattgaattcagcaccttatgtcatattagatggaaattgggtatcttaacataagagaattcagatggactttaatcctaattccacaagcgaccttttcacgagatctctacttaaccctttgggtacatgatcagccacattatgctgagttctcacaaactccactgatatcacaccatgcatgattaactcccgaaccatgttgtgtctaacacccaagtgtctagactttccattatacactggactatatgccttagccaaagntaatatggggtaaccttattccttttggtaggaattcagtttaacatgtaacaggctgccaacatagcctcaccccaaaatccttcactt

SEQ ID NO: 787 - DNA, 391 bp, Glycine max
  unsure (1)..(391): unsure at all n locations
agctntggagaaccaagccaatcagaatgctagacgaaatatagatgggaatagaggtaacaatggcggtaatgacggaccgaggcagaaccgggttgagggagtaaagctcaatgttcctcccttcaaaggtagaagtgatccagatgcctacctggactgggaaatgaagactgagcacgtatttgcctgcaatgactacactgatgcgcagaaagtcaagctagcagcagctgaattctccgactatgcccttgtttggtggcataaataccaaagagaaatgttgagagaggaacggcgagaggtagatacatggactgagatgaaaagggtgatgagaaaaaggtatgtgcccactagctataacaaaaccatgcgacagaaactt

SEQ ID NO: 788 - DNA, 425 bp, Glycine max
tttatctctatatatttttttattcttttaggaatccatataatagccatatgatatacgagttcttgttattcaattatttgttttctaagaaatccgactcaatacgaattttctgagacttcattcacttcaatttactaccacaaattgcctcatgtacctacaacaattcttttacctgtattgaaaaataggggtatggcaaaaaaattagagcaattgtcctccactgagtgggcataagcttagcaagatgaagtagctttttatcctcttctcttgtccacccaatctatacacaaaaagcatcagattgaaaaatcactcattagaaaaatatcacaacaattaataacatagttggtacatactccttatcaataacatcttaaaaaaagagaggctcttaaacccaaagaaag

SEQ ID NO: 789 - DNA, 399 bp, Glycine max
  unsure (1)..(399): unsure at all n locations
tttaacccnctttntaaaagatatgcttagaatacagatgaagaacaagaagcaatcaatttaacaatgttcttttaaacgtgcaaggaaaaattgattgcaataaaataaatgagataagggaagagagaaatgcaaacttgatttatactggttcgaccactttccgtgcctacatccaatcctcaaacaacctacttgagattttccactatctttgcaaaaatcctttttacaacttctgaacacccaaggaatcattttcccttgtgttcaagaaactcacaattcaagagacaaccagtctcttgattacaattgattttatgagaagaacaaaaagatttctctcttttagagtggataatacaatttgaagttcctggatgaactctcaat

SEQ ID NO: 790 - DNA, 415 bp, Glycine max
  unsure (1)..(415): unsure at all n locations
agctntactatgtaatgaataaccaaggtaaattccttcatctgacttggcatcaaattctcctaagttttcctttccattgtttaatacaaagcatttgcaaccaaaaacatgtagatgtgagatgtttggttttctaccattgaacaattcatatggagttttctttaagataggtctgattaaagccctattcatgatataacatgcagtattaacagcttcagcccaaaaatattttggaagaggagtatcattcaataaggttctagcaatttctttcacagacctatttttcctttcaacaacttcattttgttgagggggtctaggtgcagaaaaaatatgttcaataccatgcttttcacaaaataagtcaaattctttattttcaattccccccatgatcacttct

SEQ ID NO: 791 - DNA, 410 bp, Glycine max
  unsure (1)..(410): unsure at all n locations
tcttacatagtccgcctttgcttgaccttctttatgcttaanaacagaaacattatgcataggcaaaagatcaagaggagttagtgggttaaaaccataaacaacttcaaaaggagaacaattagtggcattatgaacaactctattgtaagcaaattcaacatggggtaaacaagcttcccaagtttttaagttcttcctcaaaactgttctaagcaaagttcccaaagttctattaacaacttttgtttgcccatcggtttgtggctgacaagtggttgaaaataacaatttagtgcccaacttgctccacaaagtcctccaaaaatggcttaagaacttagagtccctatcactaacaatgctccttggcaaaccatggagtctcacaatctcctgttggatcaagt

SEQ ID NO: 792 - DNA, 410 bp, Glycine max
tcttaagcacctgcggcatgcaactataccttatcggaattggaaaagatttaatgtaagtcaagagcatgatagtgtgtcgataccattaactggtcacaggttcttaagcaggccgagggcatcaatattgtatttggaaagacccaagagaaggaaaaaactaaaacttccatatggaagaagaggtcgatattgtttgatcttccatactggtatgatctagatgtcagacattgtattgatgttatgcatgttgagaaaaatgtgtgtgatagtgtcattagcacacttggtaacattcaaagaaagacaaaggatggtttgaatactcaccaggatctagtttagataggtatacgagacccagtacattcaaggtctgatggtaacaaaatatacttgccttc

SEQ ID NO: 793 - DNA, 388 bp, Glycine max
ttctctaccacttgtcatccacaaactgatgggcttacagaggtagtgtataggtctttatccactcttttaagggctcttctaaaaggcaaccataagtcttgggatgagtatcttcctcatgtagaatttgcctacaataggggcgttcatagaaccaccaagcaatccccttttgaggttgtctatgggttcaatcccttaacacccttagacctcattcccctcccacttgacacttcttttatacataaagaaggggaatctaggtcagagtttgtaaagaagttgcatgagagggttaagacccaaatagagaaccaaacaaaggtgtattcaactaagggcaatagaggaagaaaggagctagttcttaatgagggggact

SEQ ID NO: 794 - DNA, 380 bp, Glycine max
  unsure (1)..(380): unsure at all n locations
ntgagcaaattgaattgactattactttatacacggatgtctggttgagtccagtaatatatcgagacggtccaaattgaaaatggaagctcgtaggaaattcaaacgacaataactttttactcggatgtccgattgaatcgggtaatatatcgacacgctcaaaattgagactagaagctctgagcaaactgaaacgacaataactttatacatagatttccggttgagtcccgtaatatatcgagatgctccaaattgaaaatggaagctcttagaaaattctaacgacaataacattttactcggatatccgacagagtctcgtaatatatcaagacactcgaaattcagaacagaagctctgagaatttcaaacg

SEQ ID NO: 795 - DNA, 411 bp, Glycine max
  unsure (1)..(411): unsure at all n locations
tctattgcaggaatttcatgccacaccaaccggtggctatataggagtcacgaagaccttagcaaggttacaagagaacttcacgtgcagctcaattcatcaggatgttcgcagattcatcgaacaatgcctcgattgtcaacataccaattatatcactaggaaaccagttggactacttgcacccttccctctaccaactcgaccatgggaagacttttcactcgatttcattgttggtttaccatcttactgngggtatacaaccatattggtggttgttgatagattnttgaagggcattcatttgggtcttcttcttccacactatactgcgtaccaagtcgcaaacctcttcctggatattggttctaaactgcacgacatgcctaagagcctagttntcgatag

SEQ ID NO: 796 - DNA, 404 bp, Glycine max
  unsure (1)..(404): unsure at all n locations
agcttgttgagggtctctgttagggcttctatttgtcgggacaacagcttgttctgagctaaggttgcatcttgagtggtgagttctagaaggcttctctttgttggtgcatatgtgcgatcaggaagaatggcgtgatcactagccgccatgttttctatgagttccattgcctcctccggtgtctttagcttaatcttccctcttgcggatgcatccaatatttgctttgattgtggtcgcaggccatctatgaagatgtttagttgcaccgattcactgtacccatgtgtaggcatctttctaagtagtccatggaaacggtcgagtgcctcgctgagggattcattanngaaatgatggaataaagagatttccatcttccctttagcgggcctttgatt

SEQ ID NO: 797 - DNA, 394 bp, Glycine max
agcttcaagaaaaatggcctcaacaaattccttatttccagaaggaaattctatcaatagacctccaatctttaatggagagggttaccactactggaaaacccgaatgcaaatttttattgaggcaatagacttaagtatttgggaagccatagaaatagggccttatatacccaccacagtggaaagaattacaatagatggtagcacatcaagtgaaagcataacaatagaaaaacctagagatagatggtcagaagaggatagaagacgagtacaatacaatttaaaagccaaaaacataataacatcagccctaggtatggatgaatatttcagggtttcaaattgtaagagtgctaaggaaatgtgggacactctacattaacacatg

SEQ ID NO: 798 - DNA, 416 bp, Glycine max
  unsure (1)..(416): unsure at all n locations
tgccaaagtgaaggctcaagtttctgaagtcaagggtgttatgatggaaaacattgaaaaggtaagacctatacaaaatgacattgtatagaggtctttaacagagtcgatgccatcatccatcaaatatatagtactaatttggattgaaaatttacattttctcgtaggttcttgatcgtggagaaaagattgagctgctcgtggataagactgacaaccttcggtcacaggtttcattttcttctttattcttttagatatatttttaatctaatttacacgactttgtgttcattttttttttatttttttgttaaatatttcttacattatttaaatttttggtgttagtatatgctgacatcattagntacttggttttaatttctatctcaacttgttatgcgatgact

SEQ ID NO: 799 - DNA, 408 bp, Glycine max
  unsure (1)..(408): unsure at all n locations
tttanatatgtatacactnttagggatcacaaacttattaatactgaccagagatgaaagtaaccctcaatagcagtcaattcacacaacataacccacaggacagaagattaagacatggtgtgaaggaacttaccgtaggtttgagcaattctataatttcttgagcttgccaaagccttatgtcaacaatattagcaagtaaatcaacctcaatcaaaatgtgggattgctcattgngatgctgcctggtcttcctcttaattttttcttcctttacgattgaaaggataataatcttagacattacacaagaataatatatagatcaataaaaataagcatcatatttatttcacactttntaatattagacctagaaaggtcatatcaggccttcattacctt

SEQ ID NO: 800 - DNA, 427 bp, Glycine max
tgaaccattatctcctttgggttcgcaggttcttccatgcacggaatccagtgatcatctctattacaatgcacccaagagaccatatatctaacgctggttcaatctgaccaacgaccgattctggtgacatgtaaaaaggtgtccctctaaacttgaccttcccatactcagcatttgcatcttctctagtcttggacaacccaaaatcagcaatcttcagttgataccttgcatgatcatcagatgaaggaaagagaaggatgttgtccggtttgagatcacaatggacgactccttttcgatgaatgcaagaaagccctttgagaagcatacgagtgtagactcttacttcactatccgatattggccccttcttgttactaaaccaagaagagaaccataaggagcacactccatgaaaaga

SEQ ID NO: 801 - DNA, 402 bp, Glycine max
agcttttggtatctttgttttccttggttcactccatatacaactaacaaacttcagaccaagtccgtaccatgtgtttcttatgttacaatcttactcaaagtgcatatcttttgttatgatctttcagagtctaagttgttcacctcccgtcatgttgaattcattgaagatgttctttcgttttcctccacttcaagtcaacaacacatgatccataaccctcaaattcaaaattcacaaccgaatcttccaaatccaacctccaccaattccaacaaacaattcagattccagcttatattttaatatcaacattgtacccacccaagcacctcaatatcaaccacctttaaattcaaattccaccttctcacaattccagcttatcttttaatatca

SEQ ID NO: 802 - DNA, 360 bp, Glycine max
  unsure (1)..(360): unsure at all n locations
agctttgcagcagatgccactctactcttaattcttgaaagatatgttaacaaggaagcataaatatattcatcaggaaaacatcatagtggaaggaaattgcagtggtgtgatccaaaagatccttccacctaagcataaagatcctgggagtgtaactattccttgttcaactagagaagtcaatgtgggaaaagctcttattgacctaggagctagtatcaatttgatgccactctccatgtgcagaagattgggagagttggagataatgcccactcgaatgacattacaattagctgaccgctccattaccangccatatggagtaattgaagatgtgttggtcatagtgaaaca

SEQ ID NO: 803 - DNA, 394 bp, Glycine max
  unsure (1)..(394): unsure at all n locations
agcttctaaactntgtacaagaatgaagctctgataccacttgttagacaagtggcctcagatatcttaagaagggggggttgaattaagatattccaaactgtttcccctaattaaaaatctatttttctttttacttaagttatgaattcccttaatgacaatcttcttaaatattaattcaaatgaagcaacttgaatatgaatataaagcaataataaataaaggagattaagggaagagaaaatgcaaactcagttttatactggttcggccacacccttgtgcctacgtccagtccccaagcaacccgcttgagagttacactaacttgtaaattccttttacaagttctaaacacacaaggacaacccttcctttgtgtttagagat

SEQ ID NO: 804 - DNA, 429 bp, Glycine max
tgaggtccctcattgcaaagatgtttttcaagatactatactcatctggcacttcaatattcaaacttcttgcatgatcgagaagagaggggaaagcaacttcaaacccgataggcatatgttctgcattttcatcctgaagcttgtacaaattctccttaaaaaatgacattcctgttacatatgaatgcatatatacacaatagaaacattaaattaacataaacgtgctgataaaaaaataacatttatatcataatactttactatttcccggtcctcttcttttactatggaatagaggtgtgaaagtattgcagaaaagaaatgattaagagtatgtatctaacaaaagaaatgattaagagtatgaaaatatctgggttaaaaaaaaaagagtacgacaatatcacagtcagcaaggaattc

SEQ ID NO: 805 - DNA, 353 bp, Glycine max
tcctctcagtcacctgcggcatgcaagcttgtaaaaagggaagcaagttaaaaactcttttcaaagtaaaaacgttgtttctacttcaaaaccctttgaactacttcacatagacttatttggtgcctctaaaactatgagtttgggtgggaattactatggcttagttatagtagatgattactcaagattcacatggactttgtttttgaaaaccaaagatgaagcttttgatggttgttgcacacttgccaaggtcattcaaaatgaaaaaaggtcttaacattgtttcacttagaagttatcatggaggtgaatttcaaatgagtctcttgaaatgtttgtgagaaaat

SEQ ID NO: 806 - DNA, 412 bp, Glycine max
tgttggtatgtgatcaaagaagatgtcatcttatctatctctgaatttcattctcatggttccattcctacgagtgggaacacgtcatttctagctctaattccaaaaaaggagaacccacaagaattaagtgaatacatactcttattaggtgcatttataaaattattgatgaacttctagcaaagagattgagatgtattataggggtgttggtggatgacaggcaattcacgtttctgggagataggaacatgttagatggagtggtcattaccaatgaagtgattcaagaggaaaatcgttaagttaaatcatgtgtggtgttcaagacaaatcctggagtggtcattgtcaatgaagtgattcatgaggcctaccagtttggggccgatgcttctagactaactac

SEQ ID NO: 807 - DNA, 383 bp, Glycine max
  unsure (1)..(383): unsure at all n locations
agcttgtttgaaacctgagggatgcctatagcagtcaccttcctagttaccaaccaaacctttgtgcccatgcttgttccacgtcggaccaaagaaaaaggaaacagaaaaggaaaaggccgaaacacccaaaagccaaattccccaccaaaattcaacttcctaaaagtcctattggcccatgattatgcatgttatcgttgatttgataggaaatgatttgcaaagtcaaatcatgacatatctatggtttggaattaggatgaaacacttgcatgtgtgagattttatacactntgagtggttttcctctatttcattcgcacccagtgtttcttctaaatgcccttttagaaatgaaatgctaatatcccacaatctca

SEQ ID NO: 808 - DNA, 390 bp, Glycine max
acaaagaataggttcattcataagcttatcttttaataaattataagttttctcatgcacatcagtccacttgaacaccacatccttttttacaagttcatttaaaggtgcagcaagtgaactagctaaaccacgaaaacttcttacctcattagcattcttaggtacaggctattccctaagtgcctttactttttcttcctcaacacttattccttttgagctagtgacaaaacctaagaatacaacaaattcatggcaaaaagaacacttttaaagattggcacacaatttattttctctcaaaacattaaaaataacatgtaaatgatcaacatgttcctctaatgtttgctataaatcaaaatatcatcaaaatacaccacaaca

SEQ ID NO: 809 - DNA, 394 bp, Glycine max
  unsure (1)..(394): unsure at all n locations
agcttgaaggcaaattggatgcattggttaacttggtaacccagctggccttgaaccaaaaatttgtacctgttgcaagggtctgtggtttgtgctcctctgctgaccaccatacagacctttgcccttccatgcagcaacctggagcaattgagcagcccgaagcttatgctgctaatatttacaatagacctcctcaacctcagcagcaagatcaaccacagcaaaataattatgacctctccagcaacagatacaaccctggatggaggaatcaccctaatctcanatggtctagccctcagcaacaacaacagcagcctgctccttccttcaaaatgttgctggcccaagcagaccatacattcctccaccaatccaacaacagcaacag

SEQ ID NO: 810 - DNA, 411 bp, Glycine max
tctgaaatatgaagtattaacctatcaaggctatcgttccctttaacatgaccctgaccattctcagaactccgcctaagtgaatgtacctcttgttcgtagtctcttattcctttggcaaactcatcacacaaattctccaaaaggatccgtgcttttctctctctttcaagatttctcaaacaaccagagaaggaagacttcacttcagaaagctccctagccagcttccgatgcaggctttctgaatgctgacgtaacctcctctcatcttctagctcttccctgattgattgaactgcagctttaattctaccatgttctttgttcttcctaataagtttgtcaattgtaatttcctttatcaagttctccacttcctgcctattcatttgattctctcgtagtaac

SEQ ID NO: 811 - DNA, 397 bp, Glycine max
  unsure (1)..(397): unsure at all n locations
tcaacattcaattntgagcgtctcgatatatgacgggactcaatcatacattcgagtaaaaagttattgtcgtttgaattggctcagagcttcaacattcaatttcgagggtctcgatatattgcgggactcaatcagacatccgagtaaaaagttattgtcgtttgaattggctcggagcttcaacattcaatttcgagcgtctcgatatatgatgggactcaatcagacatccgagtaaaaagttattgtcgtttgaattggctcggagcttcaacattcaatttcgagcgtctcgatatatgacgagactcaatcagacatccgagtaaaacgttattgacgtttgaattggctcggagcttcaacattcaatttcgagcgtctcgatatatta

SEQ ID NO: 812 - DNA, 339 bp, Glycine max
  unsure (1)..(339): unsure at all n locations
agctntgagccaattcaaacgacaatatctttntactccgatgtctgattgagtcccttcatatatcgagacgctcgaaattgaatgttgaagctctgagccaattcaaacgacaataactttttactcggatgtctgattgagtcccgtaatatatcgagacgctctaaattgaatgttgaacctctgagctaattcaaacgacactaactttatactcggatgtctgattgagtgccgtaacatatcgagacgctcgaaattgaatgttgaacctctaagccaattaaaacgacaataaacgtttactcggatgtctgattgagtcccgtcatatat

SEQ ID NO: 813 - DNA, 413 bp, Glycine max
  unsure (1)..(413): unsure at all n locations
agctcgaactcttgcacctccttgaagttcaaccatgacttctcccaaactttggcttcataaaccttcttttgcccaccatcttttgcctccaaagtgatggtgtacaaggtaccagaaaccacttgctgtttcgcagttaccaccttttcaaactccaaaagggcattctgcatagccatttacaattcaataaaaataaaatataattcatatttaccacaaaataaaaagaaaatagaagcccgttcgtggttattgaaattgaccctaccaatctatttattccttgacataatggaaatgcaaatttatcctaacaatcaattaatttttggtgaacaaaattttggnggaggggtaatgccccagtacaagacagaanaagcctccaagctcaaagaacattcaca

SEQ ID NO: 814 - DNA, 426 bp, Glycine max
tcttacatagtccgcctttgcttgaccttctttatgcttaaaaacagaaacattaggcataggcaaaagatcaagaggagttagtgggttaaaaccataaacaacttcaaaaggagaacaattagtggcattatgaacaactctattgtaagcaaattcaacatggggtaaacaagcttcccaagtttttaagttcttcctcaaaactgttctaagcaaagttcccaaagttctattaacaacttttgtttgcccatcggtttgtggctgacaagtggttgaaaataacaatttagtgcccaacttgctccacaaagtcctccaaaaatggcttaggaacttagagtccctatcactaacaatgctccttggcaaaccatggagtctcacaatctcctgttggatcaagtggcctcagaataatta

SEQ ID NO: 815 - DNA, 387 bp, Glycine max
agcttatcacctttatcggcaattgaaaaaagattttaatgtaagtcaagagcatgatagtgtgtcgataccattaactggtcacaggttcttaagcaggccgagggcatcaatattgtatttggaaagacccaagagaaggaaaaaactaaaacttccatatggaagaagaggtcgatattgtttgatcttccatactggtatgatctagatgtcagacattgtattgatgttatgcatgttgagaaaaatgtgtgtgatagtgtcattagcacactggttaacattcaaagaaagacaaaggatggtttgaatactcaccaggatctagtttagataggtatacgagaccagttacatccaaggtctgatggtaacaaaatatac

SEQ ID NO: 816 - DNA, 375 bp, Glycine max
gggatcctcttagtcacctgctgcatgcaagctataagaaattttgcaacatcgttttggatatttaacaagaacattctatttcttgacattggtaccttggtaattatattatttctcccatctctgatggaaagactggaatctttcatgtgaatatcatagccttttttgaggaattgtcccaaactcaaaatattgttcttcatatttgggacgtagtagacatttgatatgaattcatgtcttgcatccttcaaatggattatgatcttacctttttccttttataggaatattggaattattaccaaattaagcattgccacttactgactcatcaagatccacgaaacatgcttcttttccacacat

SEQ ID NO: 817 - DNA, 414 bp, Glycine max
  unsure (1)..(414): unsure at all n locations
ntaagctctgcagtttatcttattaatagagttccctctagtgtgttaaactttaagagacctcttgatgtcatttctcatcatttcacccttaatcttgtcaatcatttaccaccccatatttctggttgtcatatatgtacattcgcatcctcaccaacaaacaaaattagaatctagagcaatgaaatgtgtttttgtgggatacaacaccactcaaaagggatataaggcctatcatccatctacaaaaagattttttgtatcattggatgttacatttcatgagcatgaaatgttttttcccttgaaaacacttcattcttcaccttataggggaggtgatttggaggtgcagaatcatgatagacttgaccaagatatcaggttatttgatattatgccaacaacaac

SEQ ID NO: 818 - DNA, 390 bp, Glycine max
  unsure (1)..(390): unsure at all n locations
agcttgtagggttaaagtctcacgattgtcacgtgttgatgcaacaatggttagtcgtggctatacgagacatcttgccaaacaaagtcaagttagccataactcgcctgtgctttttcttccatgccatatgtagcaaagtcgttgatcctgtcaagtttgatgagttggaaaatgagaccgcaattatactatgccagttggagatgtattttccccctgctttctttgacatcatgattcacttgattgtgcatctggtcagagaaatcaaatgttgtggtcctggttatttgcggtggatgtacccggttgagcgatacatgaagatcttaanagggtatacaaagaatctatatcatccagaagcatctattgttgagaggtaca

SEQ ID NO: 819 - DNA, 416 bp, Glycine max
gtgcttgtacaatctccctctttttgatgatgacaacttctgaaatcaagaaacacacacacacacactttttcctagtcgatcactcacataaatttccattctccccctttgtttttgaatttatgcttcacttaaaattaagttaattactcatgtgagttcttgatttaatccctatttctctccccctttggcatcaacaaaaagccaaagtgcgtaacaagtatgaaacatacaaatacaactagtcattcacacaacaatcatggaaaaaatataaactaatcataccagagaacagaaaacaattaagcaagatattttaaccattcatcaaacttagaaacgttaagaaatataaaaaccatacataattgacataccccagaatagaaaaacaatcaaacagatat

SEQ ID NO: 820 - DNA, 388 bp, Glycine max
  unsure (1)..(388): unsure at all n locations
agcttgtcaaanagggaagcaagttaataactcttttcaaagtaaaaacgttgtttctacttcaaaaccctttgaactacttcacatagacttatttggtgcctctagaactatgagtttgggtggtaattactatggcttagttatagtagatgattactcaagattcacatggactttgtttttgaaaaccaaagatgaagcttttgatggtttttgcaaacttgccaaggtcattcaaaatgaaaaaaggtcttaacattgtttcacttagaagttatcatggaggtgaatttcanaatgagtctcttgaaatgttttgtgaagaaaatggaattcaccacaacttttctaccctaagaacacctcaacagaatggtgtcatgga

SEQ ID NO: 821 - DNA, 312 bp, Glycine max
agcttatgctgcaaatatttacaatagacctcctcaacctcagcagcaaaatcaaccacagcagagcaattatgacctttccaacaacagatacaaccctggatggaggaatcaccctaacctcagatggtccagccctcagcaaacacaacagcaacgctgctccttccttccaaaaagctgctggcccaagcagaccatacattccttcaccaatccaacaacagcaacaaccccagaaacaaccaacagtttaggcccctccacaaccttccctcgaagaacttgtgaggcaaatgactatgcagaaca

SEQ ID NO: 822 - DNA, 707 bp, Glycine max
  unsure (1)..(707): unsure at all n locations
ctctagcttcatgatgaatcaagattgattcaaagagttttgatgatcacaaagatgatgacaaaaggctcaaaagtcaagaacacttcatgataacaaagatgatgatctcaagaatcaaagaatgagttcaagattgaatcaagtacacttcaaggatcaagaggaaagttgaattcaataatcaagaatcaagtttcaagattcaagctccaagaatcaagatcaagattcaagactcaagattcaagaatcaagagaagactcaatcaagataagtattaaaaagttttttcaaaaactaagtagcacatgaatttttctcaaaaaccttttatcaaagagtttttactctctagtaatcgataaccaaattattgtaatcaattaccagtagcaaaatttttttcaaaaagctttcaattgaatttacaatgttccaattgatttcaaaatgttgtaatcgattacaatgatttggtaatcgattaccagtatgtttgaacgttagaattcnatttaattgtgaagagtcacatcctttcacaaaatagctttgtgtaatcgattacactgatttgggaatcgattaccagtgatagtttctgaacaaaatcaaaagatgtactctttccatagttttcaaggttttctaaaagtcataacttttccaaatggtttttaagtttttctaaaggttataactc

SEQ ID NO: 823 - DNA, 629 bp, Glycine max
agcttgaaggtaaactagatgccttggttaacctggtaacccaactggccatgaataaaaaatctgcacctgtcgccagactctgtggtttatgctcctctaccgatcaccacacagaccttttcccttctatgcaacaatctaaagccattgaacaacctgaagcttatgctgcaaacatctacaacagacctcctcaacctcagcagcaaaatcagccacaacagaataattatgacctctccagcaacatgtacaatcccggatggaggaatcatcccaaccttagatggtcgaatccttcacaacagcagcaacaacaacaacaaccttattttcaaaatgctgctggcccaagcagaccatacgttcctccaccaatccaacagcaacagccccagaaacaacaaacaattgaggcccctccgcaaccttcccttgaagaacttgtgaggcaaatgactatgcaaaacatgcagtttcaacaagagaccagagcctccattcagagcttaactaatcagatgagacagttggctacacaggtaaatcaacaacagtcccagaattctgatagattaccttcttaatctgtccagaatcccaaaaatgggagtgccattacattg

SEQ ID NO: 824 - DNA, 640 bp, Glycine max
  unsure (1)..(640): unsure at all n locations
ttcaataacccttcccactcacttacaggaagcaatgaatgatgaagggaacaaagttaacttgtcataaaaagtttgtgttctatttaatgtaactatgctaaattttccttatcataattgtcatgatgtagaattgtagttgattcagaggaattttttatttacattttatgcatacaatgcaatttgtcatccatactcctatctattcactgataataataaaaaaatactcctaagtcctatctattcatttaacataaaatttctaaaacgagaattattaggttgccgtttcggcggtttggttggctttattgtgtcgtgcaacacttttgtatgtcccctccttcaatctaagacgccacgacatagatattcaattcagttttcactttaactttgtattatactctcaagtctcaatcttttaaattatttttatttggtgtataatgccagcaacggaatttgaacttaagacctgaaaactacttgaatcctccaccactagtttgccttttcaattatttgatctttatctttcgctttcctcttatttctaatattntttttctttatatttctttaaaaatattccaaatccatttatgtatgatcaatggaacttaataat

SEQ ID NO: 825 - DNA, 632 bp, Glycine max
agcttgaatgtccaaagagcaaagtctccaacaaaaatgtagaaaaaattaacattcaattaaaccaaaaaccctaaaaatgtgaaaacacgtcttagaattctgcatagattttagattaatatgcaattttgaatatgtgatatatgtgaaaggaacttttaatcacaccgtaagttataaaacaatattatttagttgaaagttatagaatggtataataattgtcaatgttacactggtgtaatttgatccttccttatatattaaagttttagaactccccttgagtccaacatcttttatgtatgctcagtaagatatataagatcaaagtggacatgcatacatatgtaaaaagcatagttaagaggcgaaattgaataatccaaccaactcatttataaaagcaacataacatatgttacaacatatatattacaacaaagcatataaagatgaaagataagtctaagctcatgatacatcaaaattccaatttctccctcttatgtaatcaacaaatacaggtttgaaagatggaaaatgataaactatcattatcatttatggctgctgaggtggatcttcatttcgtggtgaatttggatgtggatgttaaagttgatcat

SEQ ID NO: 826 - DNA, 548 bp, Glycine max
tgtaatcgattacacacatactgtaatcgattaccagaggagtttttcagaaaacattctcaacagtctcatctttttatctgattcttaaatggccatcaaaggcttatatatatgtgacttgagacacaaatttgaaaagagttttcaagaacaaaaaggtcttatcctcttaaaaagcaaaatagttttatcctcttacaaattccttggccaatacacttgtgattcaataaggaattatttgagtgctcaaaatgttcaatctatctctttcaagagagattacttcttctcttcttctttattctgaaaagggattaagagaccgagggtctcttgttgtgaaaagaattctaaacacaaaggaaggattgtccttgtgtgtttagaacttgttaaaggaatttacaagatagtggaactcccaagcggattgcttggggactggacgtatgcacaaaggtgtggccgaaccagtataaatctgagtatgcactttctcttcccttaaactcctttatttattattgatttatattcatatt

SEQ ID NO: 827 - DNA, 544 bp, Glycine max
agctttgatacttacagctgatgcaataaccactgtctgcccaacttcaaggccatttattccagcatgtatattgatggaatttgtgcaaaaaacagccaagagccccatatatagtttatacatccatcctgccccataaaacaaagtcaaaatagtgaatctttacagtaattagtaataactcctcaagtatcatttacataaaggtacaccatcaatatggaagctcagaaatgacattatcttcaacaatcatccttttgtcatatcgaggctgttggacaatacaattttcctctcttggtcttggatgagggggtgggaaaaggattttaatgttccttttcaccaatggtcttcatctatggctttggtttttaagtagtgatagtgttgttgggttgggttgaattgtttctgctgggatgttgcataattttatttacttttctgtcccaggagaacctacctcctgtggcttcttgtaatacctctggtactatgtatcttctattctataaaaaacttcgtaccccattgc

SEQ ID NO: 828 - DNA, 536 bp, Glycine max
tgcatgatttacagaatttgtcttttatatttaatatcttgttttattttataaagaaaataattatttttatcattgtttgatataatatggtctctatttataaatcaagacatctagtttccttattttccaaaataagcaattttagtcctatcagttgaccatccaaagtctaatgttgacttctatgtgacatattggtgctgatatggaacttatgtatgcaaatgacatgacacttatgtgaaaaaaaattaaatgacgtgaataataaaaaaacatcttaatatgaattaaacttgtgaccctttattcatagacaatggaataaactactaatatactcaatttgtctacctaaatatattactattattctctatgtattcaatagtcaagagttatattttttttgcagattatcaaaatctataaattaaaaatatttaatatataaatctttttaatcctataatatataaatttatatgtttctattttgaataatttaccatctaatttttatttttacc

SEQ ID NO: 829 - DNA, 362 bp, Glycine max
agcttgttaaacgattctatgaaccatactttgttttggaccaaattggcaaggttgcatacaaacttctattgcctgaaagatcccgcatttctcctgctttccattgttccttccttaaacccttccaccaatcatctgaagaagattgtgtcccactagcattgccttccaatgatgttgaaaatcaaccagttatctctcttttaaccattctgggcactcattaggcctctgaatctactgatccaaagctaaggtattaattcaatgggcagggttgtctcttgatgacattacatgggaagattgtgaaaaactcaagactgtctatcaccttgaggacaaagtgtttttttgat

SEQ ID NO: 830 - DNA, 496 bp, Glycine max
ttggtcctattcaaatagccataacttttgacatgggggtactattgaggcccatgatatatcgagaggctcgaaattgaaaaatggaagttctcgagaaattcaaatggtcataacttttaacttggatgtccgattcacgcacataatatatccagacacacaaaattgaaaaatggaattctcgataaattcaaatgttcataacttttgcctccaatgtcagatttaggcgcataatatatcgagacgctcgaaattaaacaagaaagctctggtccaattcacacggccataacttttgacatgagtgtatgattgatgcccatgatatatagagacgctcgaaattgaataatggaagttctcgagaaattaaaattgtcataacttttcactcggatgtccgattcagacacataatatatcgagacgcttgaaacctaacaaggaagctctggtcccattcagagggccataacttttgacatgggtg

SEQ ID NO: 831 - DNA, 576 bp, Glycine max
  unsure (1)..(576): unsure at all n locations
tgaagganaacttgatgccttggtccacctagtaactcagcttgccatgaataaaaaatctacacctgttgcaagagtctggggtctatgttcttctgcagatcaccatacagatctctgtccttcttttgcagcaatctggagtcaatgagcaacatgaagcttatgctgcaaacatttataatagacctcctcagcagcaaaaccaacaatagcagaataattatgacctttcaagcaatagatacaatccaggttggaggaatcatccaaatttgagatggacaagtcctccacaacaacaacagtctgttcctcctttccaagatgctgctggtccaagcaagccatatgttcctcctccaatacagcagcagtcacaataaagacaacaagagactgaggctcctcctcaaccttacttagaagagttaatgaggcaaatgaccatccagaatatgcaaattcagcaagagacaagagcctccatttagagtctgacatatcatatggggcagatggctactcagatgaaccaagctcagtcccaaaattctgacaaattgtcttcacaaa

SEQ ID NO: 832 - DNA, 389 bp, Glycine max
tgaccaggaattatttgtatgggtcgaatgttgaattccggttgttcctggcgcggagatgatggtacagcgggtgaaccataatcggaagattcttttggtgaagtagccatggaaaagcagagcgtttggaatgatttcgtaaatctcagaaggctattgggaaatgctggtataaacacgaatgccaagcagatataaatttgaatgaggaatgtacagggtcgtgtgaagcaacggtcaaattttcctgggttcattagagaacgcgctataaatgttaagagatccgttggggcactttcacattgctggaggtgctataatccctctagcacacaaatgcccatcttgcccctcagtttttcaaactgatgcgcctccaaagc

SEQ ID NO: 833 - DNA, 194 bp, Glycine max
agcttccgttgttgtatttcgagcgtctagatgagttaggacagcgagtcggacatcctgtgaaaagttgtgaccattctaagctctcgagcgcttccgatgaacaatggccagcgtcatgatcataaatgatgctgaaacagacatccgagagatatgtgctgaccattctaccctgtgcagagctttcgctg

SEQ ID NO: 834 - DNA, 610 bp, Glycine max
  unsure (1)..(610): unsure at all n locations
tttcttctggttgctcggctagggtttccaagcattagagagaaggagaagggattggagcctcaatttcattgtctccgtgttgaatgcattgctctctctacagacattatttcccaaatctcaacggtgagaatgtgaggaaatgagttctaaaggtggtatccaaatttcatgatgatccaatggttaaaaggtttgggatcatatttttactgagatagatttgagtgtatgcgggaaagaaaagaaggttttgggagaggaaaaaaggaaaacgaatttgagaggaaaaaagagcatagagacgtatcgtaaatattaaaattgacctaatatgtctctatttatagctggactactctcagcctattatttactttatttttctttattttattattttataaaaagaaactctattttactctctcattgaataaataaccaattaanatatctttatattttctaaaacatcattttactctatttgctttctaatgctatgaaaccattattttaattaaaaaaaacccttttccctcaattatngtaattctaaaaactctataaattttagataaatctctatttattttacgaaaaa

SEQ ID NO: 835 - DNA, 423 bp, Glycine max
  unsure (1)..(423): unsure at all n locations
tgtggtgcaaaagattacatctatacaaaggaatttttgatggggcagcctccaagactccattaagattccttgggtgaggtgggacatagtctgcctacctaagagtaaaggtgggttagggatcaaagatttgattaaattcaacgaggctttgcttgctaaatgggggtgggagttggcaaataatcagaatcagttgtgggccacaattctattgtgtaaatatggtggttggagggatttgatttctcataggaactgcagtttagactctccttggtggaaagacctcaaggttatcttcaagcagcagcaaagcaacacaatttgtaaaaatagctttatttaggccatangtaaggacggtccatggaatacaaaccaagtacttattggcttgacaacaaaaaaaacactcat

SEQ ID NO: 836 - DNA, 470 bp, Glycine max
agcttcaaaggcttagacaagggagtataagtgttgaagaatatagaaaacaaatggaactactccttttaagagctggacttagggaggaggaaagaacaagcatagctaggttccttagtgggcttaatatggaagtgagggacaaggttgaactccttccatatatggacctagatgagctagtccaactttgtataagagtggagctacaacttaaaagaaagtcttctttaaaatcttaaggctttcactcttatccaaggaaggaccaagcccaaggaattttggaggctgcaccttgaaaacccaaggaagataagggtaagaccatagagaaatccacccctaagactagttcccaagaaaggactagcaacataaaatgtttcaaatgtcttggcagaggtcacattgcctcttaatgccccacaaagaaaaccttgattatgaggggtgaagacatttat

SEQ ID NO: 837 - DNA, 581 bp, Glycine max
agcttggaggaagaaggagatgaatgaagggagagggagagaagaacacgaaattttgtgctctaagagagctctgaaatttgaagtttaattttcaaatgatcaaagtttaaaaaatgcacacacatgacctttatttatagcctaagtgtcacacaaaattggagggaaatttgaatttatattcaaatttcacttgaatttgtggagccaaaatttcactaattatgattaatgaatttttgctatgggtcagcccactaatccaagatcaagtccaagattaagtgtgcttaggtgtcatcagacatgtaaagcaagaaggacatgcacaaagtgtgactatatgatgtggcaatggagtgtagcaagcaaatgctcacctccctttctaaaatttaattggattgggcttctcccaattctattaaatttatttctcaacacacacatcaaatattcacttaatgcatgtgaaattacaaaagtacccctaatacaaaaactagtctaggtgtcctaaaatacaacggttgaaaaatcctacttttctagggtacccttccttcattatggatccc

SEQ ID NO: 838 - DNA, 506 bp, Glycine max
attcaatggttcagatgcagctgcataagtggagtctcatcctgatgatgctcgtgtatatatgctgacccatcctaaataatttgctgtggtaagtggatgctactcttatgaacttgtgttccccctttaatataaggaaaatgcacttttcatgatcattacatgtgctgatttttcaggttgatcttgatccttatggctcaccttcagggtttctggatacatcagatcactctactgctgatggaggtatgctgatgtgtactgcaacaaacatggctgtgctctgtgggggaaatggggaggtctgctattcaaagtaatgtgcatactcttattcacaatcaactttcattttgtttgattggtggactgaacttttaacaactgctattcatactacatatggatcatacccattgagagggaaatcttgcccttcaaatggctttgaggaacaagccggcctgcattgacgtatggtatataacgcagaaactctt

SEQ ID NO: 839 - DNA, 512 bp, Glycine max
tacctgctgccaattcagttcccaaggctaacaacaatctcattactattaagtctgcgacgtcttgtaataacaaagtcattgacatttggcatttccatttgggtcatccttcatatgataggatgcaattgttctaacaaacttatcctatgttgacttgtgataaaacctttgtttgcgatacttgccctagagcgtaacagagaaaactttcatttcccaatagtgactcataagcttctagtcctttcaattttatacatgtagatatttggggtccttgtgccacaactgctttgaatggacataagtattttcttacaattatggatgatcatactaaaatggattggatttttataatgacttcaaaagttgagactcaaactcatttacaagcctttgttgcctatgttgagaggcaatttaatacaaaaatgaaagctattcgatcagataatggtgctaagtttatcatgaaacacgtttatcataatactggtatcata

SEQ ID NO: 840 - DNA, 572 bp, Glycine max
  unsure (1)..(572): unsure at all n locations
agcttgtaatcgattacacaaatcttgtaatcgattaccagaggagaatttcagaaaataatttccaagagtcacatctgttcaaatgattttttaatggccatcaaatgtctatttatatgtgacttggaacacgaatttgcttagagttttttagaacaaaaaggtcttatcctctcaaaagaaaaatcatcttatccacttaaaaattccttggccaatacacttgcaattcaataaggaattattttagtgctcaattgttcaatctatctctttcaagagagatttctttttctcttcatcttatttctgaaaagggattaagagaccgagggtctcttgttgtatagcaatctaaacacaaaagagggtttgtccttgtgtggtttaaaacttgtaaagggcttttgcaagatagtggaactctcaagcgggttgcttggggactggacctangcacaagggtgtggccaaacttgtataaatctgaatttgcaatttttttcccttgaacccttttattggttaatgcttattgcttctattcagaaagtttaaattcgcataat

SEQ ID NO: 841 - DNA, 603 bp, Glycine max
agctttgggggcatatgtactttaagtgagagataatatataaaaaaattggaataataattaatattacgagtaaataacatatacaaagatgattaatttttacataatcaatcacatattatcatataatgtaaattgattgatagtaataataaaaatataaaattcatattaattatgatttaagttctaaacattatagatgatatgataaaaaaaatgtgtataaaaatgagaaattaagcaataatgagagaaaataaaattgaataatgaaagagagaaagagtgtgaccgtcacagcttccaatagattggtgttgtcgtgcaagtacttgaggacccatgttagaacacttgctgtggtgtcatgtgcagcaaagatgacaccaatgagattatcaacaacttgagaatctgtgtgctgctgatagtacatcttgttcttctcacctcgagcttgcaatagaactcccaatagccccccaccataatttaacagattatagactcttataattacatttcaacagaaaaacccaagtcagtgtgaccatcaacaaatgttacatattatatataaccagtgctggataaaaa

SEQ ID NO: 842 - DNA, 606 bp, Glycine max
cttctggtgggacatcttgacttgctttccaatctgacattcatcacaaattctgccttcttctattttcagattgggaatgcctctaacagcacttttgtcaaggattttcttcatgcctcttaagtgcagatgtcccaacctttgatgccatattctgacttcatcttctttggaggataaacatgtggaggagtacctggtttcttggggtgtccataggtaacaattgtcctttgatctgctgccctctattagaacttcactcttctcatttgtcaccaagcattctgactttgtgaaagttacattgaatccttcatcaaacagctgactgatgctgatcaagtttgcagtcagtcccttcaccagcaatactttgttcagactaggaagtccatcatgaactacctttcccattccaatgaactttcctttagagccatctccaaatgtcacataactagtggagcccggctcaatgttcaccaggaattctttgactcctgtatgtggtgggaacaaccgctatctaagtacccatcttccttaactgatgctctaatggaggatgaacaacaagaatgaagtcttgtgtttaggaac

SEQ ID NO: 843 - DNA, 605 bp, Glycine max
  unsure (1)..(605): unsure at all n locations
tattctttatctagagtagttgagcacaacaacttactactgacatatattcgactttagtagtggacaatgtagttgagccttgcatcttgcatattcatgttactaagttagcaccgataaagtaatagcttccactagtgctttttctttcaactttatcaccaacatagtcaacatcataatagcttgtaagtctgaaactttctcttcttttgaacataagaccaagattagaagttccaattaaatatctacaaatatgtttaattttagttaggtgaacttccctttgttctttttgaaatcttgcacatagataaacattgaacataatatcagaaatggatgcagtgagatagaccagtgagttgcatccactttttttgatccttgtccaatccaaggtatgtcatggtgtgcattggagtcttcatttcttttcatcgcccatgttgaatttcttcagcaattctttcacatacttagtttgatgaatgtagatgcatttggctttttggtttatttgtaatccaagaaagaatntcatctctcccatcatgctcatttcaattttgtctgcataagcatagaaaaatcttcat

SEQ ID NO: 844 - DNA, 529 bp, Glycine max
agcttgacagtgtttgatgcatcagggaacaatttcactttagaagtgggtcctaattggattcctaattttcaacttacctatttggatgtgacatcatggcagataggtcccaactttccgtcgtggattcagtcacaaaacaaacttcaatatgttggactgtctaacacggggattttagattttattcccacttggttctgggaagcacattctcaggttttgtatttaaacctctctcataatcatatccgtggtgagcttgtgactacaataaaaaatccaatatctatccaaactgttgatctaagcacaaatcatttatgtggtaaattaccctatctttcaaatgctgtgtataggttagacctttcaaccaattcattctctggatccatgcaagattttttatgtaacaatcaggacaaaccaatgcaattagaaattctcaatcttgcatcaaataatctatcacgagaaatacctgattgttggatgaattggccatttctagtggaagtgaatt

SEQ ID NO: 845 - DNA, 548 bp, Glycine max
agcttgtagaactccccaaaagaaaatcagctattggagctaagtgggtgttcagaaacaagttggacgaaataggtaaagttgtgaggaacaaggctaggcttgtagccaaaggaaactcacatcaggaaggtataaattatactgagacctttgcttttgttgctcgtttagaggcaatacggattctactatcctttgtttcccattatggtatgatgttgtatcaaatggacgtataaagcgcattcctcaatgctattattaaggaagaattctatgtggaacaaccccctgggttttagagttctatttaccctcatcatgttttcaaacttaataaagctttgtatggtttaaagcaagctcattgagcttggtatgaaaagttaagttccttcttaactgaaaatggttttataaaacggaacgttaacactatttttttttgcaaagattatataaatccattcctaattgtccagatatatgacgatgatatattatttactgcttctaatgactttttgtgtgaggactctttcaaa

SEQ ID NO: 846 - DNA, 589 bp, Glycine max
agcttgaagacaagactatacgaggtatcttccttgggtatagcaatatctctaagggctaccgtgtctacaacttgcaaactaagaaactcgtcatcagtcgagatgttgaagttgatgaatatgcttcatggaattgggatgaaaaaaaagtggagaagaacgttcttatacccgcttaactacctcaagaagaatatgaggaagaagatctaggtgaaccaccttcacctacatcacaacaacaagatcaagaactatcatcaccagagtctactccaaaacgagtaagatctttggtggacatatatgaaacttgtaacttggccatacttgaacctggaagctttgaagaagcgtcaaagcacgaagtatgggtcaaggcaatggaagaagagatacagatgatcgagaaaagcaacacatgggagttagtaaatcgtccccatggaaaagatatcattggggttaagtgggtctataagacaaaagctaaaccctgatggcaccatacagaaacaccaagcgaggcttgtagctaaaggtttctcatagcaacccggaattgactacaatgagacatttgccc

SEQ ID NO: 847 - DNA, 525 bp, Glycine max
tggtgcatatgatttatatgatctcacttacagggggcttgttataaacttgaattgtcatgaaccaactcttgtcaaagaattaactgttaggctgttaagtgaagacacacatggctttatgttatatatctaacaataatgaatctattaatatagcttacaagttcattatgcatacaattttaggtccaagtcattgcatatattttcatgaacgaaatcaggacctgcatattcattattagattcatatataaatttttgtccgtacttccatagtgtccattgacacatttttagcatatgattctcttttctatctttttctccacaacaatgagcccaaggagcagagttttcttatgagcatcaatcaagaacgttcaattatttatattacatgatagacaaactaaatttagtttattaatattgaacacttttttggataatagaaataattttaatactttaaccaggtcatttttatttgtcttagaataggcattatgtgcactttct

SEQ ID NO: 848 - DNA, 468 bp, Glycine max
agcttctctcttttcttgtttaattattatattttgtttttaagtcttgtattttgctatgtttttatggcatttgaacacttagtatttctttttaatatttgttgagtatgactgaacatgataattatatttacttgcttttggttgtttatggttatgaattttaaacttaattattttgataatatatgatcagtggtatgtttgatcaaatattaattatgttatttgataatgtggttttttttatatatttgatctatttatggttcttgctatgatttggtttatatttttccatgaatgattgtatggatgcttaagttatatttgtatgtttttaatttgttacgcactttggcattttgttgatgcccaagggggagaaaaatatggattaaatcaacaactcacacgagtaatcaacttactttttagagaagcattaattcaaaaacaaagggg

SEQ ID NO: 849 - DNA, 572 bp, Glycine max
agcttctcatttgatctaacagagaaggagcatgcaacctatttcactcaagtcacacccacggaactctggcacaagagacttggtcattgccatcttgaaagaatgctaaacatgaaaaaaaggacatgtcaaaaggtctaccaatactttctgatagtttgccaaactataatgcttgtcaatttggtaaacaaaatagaaaatcattccccaaattagcttggagaacctctcaaaagttgcagctaattcacactgatgtggcaggacctcaaagaacaccatcactacaaggtagtctctactttattcttttcatagatgactttacaagaatgtgctggattttttttcttgaaattcaagcatgaagtggctgaagttttttgtaaattcaagaaaatggtggaaacttcaagggacctgaagattcaatgaaaatgggaaagaatatccatccccataattatttactttggggaacaccttggtttgaatattaactcacagccccctaccctctgaacattggggattttgaaggattaacaattcattgttgggaaggc

SEQ ID NO: 850 - DNA, 528 bp, Glycine max
agcttgaaggcaaactggatgcgttgatcaacttggtaacccagctggccttgaatcagaaatctgtacctgtcgcaagggtttgtggtttgggctcctctgctgaccaccatacagacctttgcccttccatgcagcaacctggagcaattgagcagcctgaagcttatgctgcaaatatttacaatagacctcctcaacctcagcagcaaaatcaaccacagcagagcaattatgacctttccagcaacagatacaaccctggatggaggaatcaccctaacctcagatggcccagccctcagcaacaacaacagcagcctgctccttccttccaaaatgctgctggcccaagcagaccatacattcctccaccaatccaacaacagcaacaaccccagaaacagccaacagttgaggcccctccataacctttcctcgaagaacttgtgaggcaaatgactatgcagaacatgcaatttcagcaagagaccaaagcctccatttagagcttaaccaatcagatgg

SEQ ID NO: 851 - DNA, 589 bp, Glycine max
agcttcttagtttcagatgatgcagatgggtttgtagctacctcatgcactcctctaatgactatggcatcatttctggcgctaaactgctgggagttggaagccatcttctcaattaaatttctggcttcagcaagagtcatgtctccaagggctccaccactggcagcatctatcatacttctctccatattactgagtccttcataaaaattttggagaagaagctactccgaaatctgatggtgggggcaactggcatatagttttttaaatctctcccagtactcatacaggctctctccactgagttgtctaatacctgagatatccttcctgatggctgtggtcctggaagcagggaaattttttttctaagaatactctcttaaggtcatctcagcttgtgatggaccttggagcaaggtaatacagccagtcctttgccactccctctaatgaatgaggaaaagccttcagaaatatgtgatcctcttggacatctgggggtttcatggtggagcagacaatgtgaaattctttcaaatgtttgtgcgggtcttcacctgcaaggccatgaaactttgga

SEQ ID NO: 852 - DNA, 603 bp, Glycine max
aacatgatcacgcttattaattactcagttttatttcattttgactagaatattttttttaagaatgaattttgactagaaaattaatcacatatttatgtttatctttacatttatatacatacaggacatatcatatgagagaaatatatattatatgagagtgagaaaattaaatctaatccatataactaaaatattgatcatcatcatttaatgtcatttgaccccttaagaaatcatgtgactttttgacattaaatcttaattttttatatatgattatataattcaaatttaatcatttcactctcatataatatgttttctcttaaaagatatgtcatatatatataaaaggagaagggtgggatatttttacatataaaaggagatggtgaaggtagttttgaaagaaaatcaaattcatgaggatcactttaatttatgagaaacacatttcattatgttaattgtcacctaatgtaaattcaagatttgggttaaaacaccagggaataaaaataaaaattttaatatattatgtacttaaaacaacaaaaaaattattttggactcagaaacaaaatcccttctttatta

SEQ ID NO: 853 - DNA, 539 bp, Glycine max
tcttgaacgtgatcaatatatttattggcacagaataaaggatgaagatgtggttcgtgatatcttttggtgtcaccctgattcactgaagttagtcaacgcatgtaatttggtgtttttgatagacagcacctacaaaacaaaccggtatagactcccattgctcgattttgttggggtgacaccgactgggatgacattctctgccggttttgcatatgtggagggtgaacgcgttaataattttgtatgggctttacaacgcttctgaagcctttttttaaagcgtgatgccctccctggagttattgtcactgatagagaccaagcattgatgaatgtagtgaaagatgtattccctgaatgcacaaatttgttgtgcatctttcacataaacaagaatgtgaaggccaaatgtaaatcactaattgcgcaaaaaaatgcttgggattatgtcatggattgctggggatctctgactgattgtccttcaaaacaacagtttgatgaatgccttgaataagttcgaaatagcttgc

SEQ ID NO: 854 - DNA, 558 bp, Glycine max
tgtgcatgggaaaatagttgtttgtgaaagaggtaaaaagggaataactaagatgggagaggtagtgaaagtggcttatggggcgggaatgatagtacttaatactaaaaatcaagctgaagaaatttatgttgatcttcatattttgctagccacttccttaggagcctccagtggtaagactattaagacctatattctatctgataagaaaccaacaacttcaatttcctttatgggaataaagtatattgaccctgcaccagtaatgagagcattttcttctaaaagaccaagtatagtgggactagatgtgactgacccaactgcgaatatcttggctgctcggccactaaaaactaacccaagttttatcatgaatgacataagagaagtactatttaacattctcttaggtgcttcaatgtctatgcctaatgttagtggcatagcaacactttttaaatatttgcacactgattggtcccctgcagctatcaaatctgctttgatgactactgcttacacattgaacaacagaggagctgcaatttcata

SEQ ID NO: 855 - DNA, 619 bp, Glycine max
tctagaatctagtgttttgcgaaatcaaattggaatttggaacagtgcgacgttgctcatgactttgaggtccctcaattaaaggtttagtgtaacatttgagtgagtaatttcagtgtaaactggaaaattaaatgtatagtatacttgtatacatttagttgtaattgtatagaatttttagtaaaagagaaccaaaactaatataagattaccagaaatgttaaaactaaaatatttaaaatgcaaaacacaagatacaacatttcacttgttattaaataattatgaacaaagtcactgagttgaaaaccaactctaattatacataacacaactcaacattcaaagttgtaaaaccccccaaaagtaaaacataagtcatccttgaaaagaataaatgaaaatcaaatctaataaaattgaaatacgtaatatattatatataataaaattgtctagttcaaaaatgatagtagaatcattcccaacatcatttctcacaaaatacaccaaagagttataaacataagtttatagagattgatagagtataatgtacttaaattacaaacaaatgcagaatagaacagagttagattttggatttgggaactca

SEQ ID NO: 856 - DNA, 503 bp, Glycine max
agctttatcaaatggatgtaaaaagtgaattctcaaatggctttattcaagagaaagtatatgtagatcaaccccctggatttgaaaactcagacaagcccaatcatgtttttagattaaaaaaggctttatatggcttaaagcaagcccctagggcttggtatgagcgtctaaataagttccttttagaaaaggatttctctagaggccaagtagatactactcttttcataaagagaaaattacatgatattttattggttcaaatttatgttgatgatattatttttggatctactaatgaattattgtgcaaggaattctctcatgacatgcaaaatgagtttgaaatgtcaatgatgggagaacttaatttctttcttggattacaaattaaaaaaaccaagactggaatttttgtcaatcaatccaagtactgcaaagagttaattcacagattcaggatggaaaatgctaagcacatggctacaccaatgagcact

SEQ ID NO: 857 - DNA, 401 bp, Glycine max
agctttgagccaattcaaacgacaataaatttttactcggatgtctgattgagttcaataatatatcgagacactcgaaattgaataccgaagctctgagcaaattcaaaagacaataactttttactcggatgtctgattgagtctcgtaatatatcgagacgctcgaaattgaataccgaagctatgagcaaattcaaaagacaataactttttactcggctgtctgattgagtctcgaaatatatcggaacgctcgaaattgaatatagaagctctgagcaaattcaaacgacaataacttttttttcggatgtctgattgagtcccataatatatcggaacgctcgaaattgaatgtagaagctttgaaccaattcaaacgaccagaactttttact

SEQ ID NO: 858 - DNA, 455 bp, Glycine max
agcttgtaatcgattacacacatactgtaatctattaccagaggagattttcagaaaatattctcaacagtcacatcttttcatttggttcttgaatgggcatcaaaggcctatatatatgtgacttgagacacaaatttgctaagagtttatctgaacaacaagtgtttattctctcaaaaagcaaaatcgttatatcctcttaaaaattccactggccaatgcaattgcaattcattaaggaatcatttgagtgctcaaattgtaaaatctatctcttcaagagagattcattcttcttctctttctaattcactaacggattaagagaccgcgggtctcttgttgtaaaagaattctaaacacaaaggaaggaatttccttgtgtgtttagaacttggaaaaggaatttacaagatatggtaactctcaagcgggttgctatgggactggac

SEQ ID NO: 859 - DNA, 620 bp, Glycine max
agcttgtaggtaaactagatgccttggttaacctggtaacccaactggccatgaataaaaaattttcacctgtcgccagactctatggtttatgctcctctattgaccaccacacagacctttgcccttctgtgcaacaatctgaagcaattgaacaacctgaagcttatgctgcaaacatctacaatagacctcctcaacctcagcagcaaaatcagccacaacaaaacaattatgacctctccagcaacaggtacaatcccgggtggaggaatcatcccaaccttagatggtcgaatccttcacaacaacagcaacaacaacaatagccttattttcaaaatgctgctggcccaagcagacatacgttcctccaccaatccagcagcaacaacaacaacaacaaccccagaaacaacaaacagttgaggctcctccgcaaccttcccttgaagaacttgtgagacaaatgactatgcaaaacatgcagtttcaacaagaaaccagagcctttattcagagcttaactaattaatgggacaattggctacatagttaaatcaacaacagtcctaaaattctgacagattaccttcttaatctgtccagaaatcccaaaa

SEQ ID NO: 860 - DNA, 532 bp, Glycine max
agcttctggtgggacatcttgacttgctttccaatctgacattcaccacagattctgccttcttctattttcagattgggaatgcctctaacagcacttttgtcaaggattttcttcatgcctcttaagtgcagatgtccaaacctttgatgccatattctgacttcatcttctttggaggatagacatgtagaggagtagctggtttcttggggtgtccataggtaacaattgtcctttgatctgctgcccttcattagaacttcactcttctcatttgtcaccaagcattctgactttgtgaagtttacattgaatccttcatcacacagctgactgatgctaatcaagtttgcagtcagtcccttcaccagcagtactttgttcagactaggaagtccatcatgaactagctttcccattccaatgatctttcctttagagccatctccaaatgtcacataactagtggagcagggctcaatgttcagcaagaattctttgactcctgtcatgtggctggaacaaccgc

SEQ ID NO: 861 - DNA, 591 bp, Glycine max
tgactcatttatttaaacaaacctaattataagcttgagtttggcttttttgaaaaaactaaagcatgagcttgagcttgaatggtttagctcatttaaaatttgattattttttaacttgcaaaaaaattattaaatcattttttaactgtcaatttattatttaataaaatattttaatactatgtaataatctacaaataaaatatgtgttaaacatatgatatgatattgtagaatctatgtaattttaatttttatattctatttataaacgagctatttatgagttattaatgtcaagcttgtaaaacttaggcttagcttgagtttgtttatttcattaaacaaacgagtttgatggagcatttagcaagttgaactcgagaagttcacgaataacttgactcatttacatctctatctagaaatacttttgaatttttaattaagtgtcgcattatatatagattgttaacatagtggtaataaatgacatttgtttatagtgataactattatttatggtgatgaaaattgaatgaaaaataattttcatttatagaaataagaaatattatattttatatt

SEQ ID NO: 862 - DNA, 501 bp, Glycine max
agcttctgacgagtgattatcgatcctctcatcaccttcaataatatctttgactatatatataattgatattttttcacaataaaccactaaaaataatataacttatagcacataatcaaaacactacgatttgaaacattttttcagcaatttattttatcccgtgattttaaactgctaccaattttaaatatttttgttcacctgttactatagtctttatttaaagaaccttgctatttggtacgaaatatacacgctagaaagtagctaagacatacctgaaccaatcacggttgtatggggtcacttaaaatctgatgattaatatttttttcttcaaaaatacaatttgtaactagtatgtaattttttcgtacaatattcatctttttcgttattataaatactcaaggacaaatatggtacatcataaatgaagcccacctctgtcagtataataaaaaattctaacacaagtgaataagatcgaggaca

SEQ ID NO: 863 - DNA, 617 bp, Glycine max
  unsure (1)..(617): unsure at all n locations
tcacagcaaatgatagaatgtctatagttttatcatttgacaatttattgttattatatgtcttatccttcatatatatagactcttttttttcatctttttcaactgtgaatttttacataattcataaattttatttgataccttgcatagcattgcatttagcaaatacaatttaacatgcttggtttataagtattgacacaaaaaaggcttatgaaaataccttgtattgcatgttgctagggcttattaaaaatatcaaataattttacatgtgtctgtgaaatcagacttattaatgatgcgataaattatgtaactatcatgtctctcgttgatgttgctaaaaaaattgtttatgaagtatagggattaaaagtgcattttgcaaaaagtttaaagatcgagaacataattaacccattaaattattatcaataaaataaccttaaatntaaaatacaaacataggtacatgtaatntatattatcaattattgataaaaaaaaatataataatgtttatgtgaacaaaatatttttttgaccaaaaaataaacgcatgttttttatattcaaaatcattttacagttaaatatttaatggttataaa

SEQ ID NO: 864 - DNA, 377 bp, Glycine max
ttgacagaaatccgacatcgtaacattgtaaagttacatgggttttgttcacattcacaatactcatttttggtgtgtgagtttctggagaatggcgacgtcaaaaaaatttttaaagatgatgaacaaacaattgcgtttgattggaataaaagggtggatgttgttaaaggtgtagcaaatgctttatgctatatgcatcatgattgctcacctccaatcgttcatcgtgatatatcaagcaagaatgttcttttggattccgattatgtagctcatgtcttagacttcggaacagccaaattttttaatccagattcatccaattggacctcctttgcagaacctttgatatgctgctcccggttaatttcctt

SEQ ID NO: 865 - DNA, 612 bp, Glycine max
  unsure (1)..(612): unsure at all n locations
tcatgggagagtcaaagatcaaattgagaggaaaaataatttctatgctaaacaagccaacaaaggaagaaagaaggttgtcttcgaacccggagattgggtttgggtgcacatgagaaaagaaaggtttccggaacagaggaaatcaaagcttcaacaatggggagatggaccatttcaagtgcttgaaagaatcaatgacaatgcttacaaagttgagctgcccggtgagtataatgttagttccaccttcaatgtctttgatttacctctttttgatgcagatgtagaatccgatttgaggacaaatccttctcaagagggagagaatgatgaggacatgaccaagagcaagggcaaggatccacttgaaggacttggaggacctatgacaagggctagagcaaggaaagccaaggaagctcttcaacaagtgctgtccatactatttgaatacaagcccaagtttcaaggagaaaagtccaaggttgtgagttgtatcatggcccanatggangangactaaatgacaccactttgtctcaatttttagagtgtttagtttgtctaaataatggcccaatccttgtaaagttgctgaccaaaaatatg

SEQ ID NO: 866 - DNA, 555 bp, Glycine max
agcttatgaccattcgaatttctcgagagtttccgttgttcaatttcgagcgtgtagatgagttatgtccccgaatcggacatctgtgtgaaaagttatgaccattcgattttctcgagagcttccgttgttcaatttcgagcgtctcgatatattatgaccccgaatcggacatctgtgtgaaaacgtatgaccattcgattttctcgagagcttccgttgatcaatttcgagcgtctagatgagttatgtccccgaatcgaacattcgagtgaaaacttatgaccattcgaatttctcgagagcttccgttgttcaatttcgagcgtctcgatatattatgttcccgaatcgggcatccgagtgaaaagttatgaccattcgaatttctcgagagcttccgctgttcaatttcgagcgtctcgatatattatggccccgaatcggacatccgtgtgaaaacttatgaccattcgaatttctcgagagcttccgttgttcaatttcgagcgtgtagatgagttatgtcctccaatggacattgggtgaaaagtt

SEQ ID NO: 867 - DNA, 554 bp, Glycine max
tgctcgtcttgctgatatttatcatgcagacttttctgatgatgaccgaggaacaattagggatcaacttgaaacttatgtgcttcaagtgagaagaaatgcttctttttccacttgtgaagatgttcaaagtttggctatgaagatggttcaaactgagaaacatttggtatttccattggtttataaacttattgagctagctttgatattgccggtgtcgacagcatccgttgaaagagctttttcagcaatgaagattatcaagtctaaattgcgcaataagatcaacgatgtgtggttcaatgacttgatggtatgttacaccgagcgggagatattcaagtcacttgatgatattgatattattcgaacatttaccgcaaagaagtctcggaaaggacacttgcctcgtaattttatttaacccgctattgtaagaatatgcttatctcttttattttaaactatatttttggtgacaaaatgacgagtctcttttattttgattgattactatttacatattatatacaaggtgaatttgctatctt

SEQ ID NO: 868 - DNA, 615 bp, Glycine max
  unsure (1)..(615): unsure at all n locations
ttttcaaagtcaactttgaaaaccatgcaggggttatttttgaatttagcttcagctaagacctcattaactatcattacacccgggaggatatgtctgcctttgaaaaaaacaatttgtctttaatcaattaaatgaagcagcacaagagccagcctattagccagactttggacattattttgtagacacaccctatgagagagatgggtctatagtcattaagagattgggggctattggttttggggatgagggctatgaaggatgcattacttcctttggggaatctgccattaatgaataattcatcaaagaatctgataaaattaggttttagagtttcccaaaactgtttgatgaaattgaaattcaaaccatccgagccaagacttttatctcccccgcaagcccaaactgcagacttgatttccagctcggtgaatctatcaacaaggctttccttctgcctttgatcaagggaagagaactagatcccttcaaggttggtctgcaaggattctactttgagaatctttctttanagtgctgaagaactgcaatcttgacactgttagggtcantggatccatcctccatcaatacacagacctt

SEQ ID NO: 869 - DNA, 558 bp, Glycine max
ttcatcctaagcctaaactgtattatttgatttgatcataggaaaagggggaaaaagatacaagatataaacatgaatacaaataagaaattgtaaactacattacttgaattcctattatatacaaccagcataccgagttgaatttggataatttcctcccaccaccaacttcaacctcaaggggagaattacaagaacaaatggtttagtgtcaaaaaagatagcacacagacaaattaaaaaagatagcctgaacagctactggagttctatgaatatgtcttggcacttaagatgacctgccatacttgttaactgaattcatatgattcatctacatctgcaagttgtttggtcttgaaaattgattatgcatggctgagttaacaacaaggttattatcacaaccaacaaattgctgactaaatgccggagaaacagtatcaggcagaataggtagctcagagttaccaattgtttgggtatcagacctattacggataaaacaaactcttggctaaaagtatctatttgagtgttaacattttgattaac

SEQ ID NO: 870 - DNA, 636 bp, Glycine max
tgttccggcgccaccagcgaccgctcgcaacgacgacacttgttgggtaccatgctgaattttactaatttacgggatcaaaccacgcggtgatgatatggtttgcctttaagaaagtcaaaaagtatattaccagtttgttggaaatccccattgggccttctgttgttaaaacgtgactccaagttctttcaaagataaatgataaagtgatattctcatggaacatgagaaattattgactattattttgaatgataaaaattatttccgtaaaatattaaaatttaatcaaacatattaaaagataaatagaatgtgatgggattaaaacaagaaaaaggttttacagcctaaaaaaagttacatagtatgtgtttagtcctttcaaaatgagtgaaatttaactttggtttctctaaatttctttttgaattttattcttaagaaatataatttggcctattcttatgaatttaatggttatacattattcatgtaaaacctaactctatatcattattgaatcattagtcatcatttaaattactttaggacaattattttgaaaataataaatttatcatacttaatttaaaattattttaaaagtaaccaaatttatcattgtgaatt

SEQ ID NO: 871 - DNA, 463 bp, Glycine max
agcttatcctgccattttattcattcacgctattctgcatcattcttcctttgaccatgttccttcctgaagccgagctcccagcctgggttgtttgttacattcctggaatcatgtccctcctaagtgttctcccagctccacggtcatttccatttatagttccttaccttctatttgagaacactatgtcggtaactaaatttaatgccatgatatctggattattacgctttggaagttcttacgagtgggtggttacaaaaaagttgggaaggtcatcagagacagatttggttgcctttgagaaagaagctgaacctctaatgcgatctactagtcttcatagatcatcctcagattcaggcattgaggaactaagcaaactagaattgtcaaagaaaactgggaagaccaataaaaatcgtcttttcaagaaagaactttatctcgcattaatttt

SEQ ID NO: 872 - DNA, 501 bp, Glycine max
acactatctagatctcaagcttacaacataaactaccctcattctttgattcatttaatataggggaacttattccaaggattaccaaatgaggacccctatgaacatttggcaacattcattgaaatctgtaacactgtaaagattgcaggtgtgccatatgaagccattatactcaatctatattcaatttccttagtaggagaagccaaaaggtggctacactcatttaagggtgacaatctgaaaacctgtgaagaagttgttgaaaagtttctgaagaaatatttcctatagtcaaagactgtgaaagggaaagctacaatctcttcatttcatcagttgcctgacgagtccttgagttaagcgttggaaaggtttacaggtctattgagaaagactcccacccatgggttctttgagccaattaagttgaatatgtttatggactggctgagaccacagaccaagcaactactatatgcttcataagggggaaaa

SEQ ID NO: 873 - DNA, 630 bp, Glycine max
  unsure (1)..(630): unsure at all n locations
agctttctccactaagttgcctgatgcttgaaatgtattttctgatggcagtggtcctagatgcagggaagaatttctccaagaacaccctcttaaggtcatcctagctggtaatggacctgggagcaaggtagtacaaccaatcttttgtcactccctccagagaatgaggaaaagcctttagaaagatatgatcttcctggacatcagggggcttcatggtggaacagacaatatggaactctttaagattcttatgaggatcttcacttgcaagaccatgaaacttgggcagcaaatgtattagtccagtcttgagaacatatggaacatcgtcatcaggatattgaatgcacaagctttcataagtgaagtcagctgcaaccatctccctaagagtcctctcacgaggtggagattgagccatgttcttagtatgaaaattagcagccgaatgctcaaaatcagaatgttcagaccaacaacagaatgctcaaaatgcacagaatgattaggatgcacagaatgataaggatgcccagaatgatcangatgcacactatgccttactaatatatgaaaggttctatcttattcagggatcaaggggtgtaaatcacctggattggc

SEQ ID NO: 874 - DNA, 634 bp, Glycine max
tgaaggtaaactagatgccttggttaacctggtaacccaactggccatgaataaaaaatctgcacttgttgccagactctgtggtttatgctcctatgctgaccaccacacagacctttgcccttctatgcaacaatctaaagtaattgaacagcctgaagcttatgctgcaaacatctacaatagacctcctcaacctcagtagcaaaatcagccacaacagaacaattatgacctctccagcaacaagtgcaatcctgggtggaggaatcatcccaaccttagatggtcgagtccttcacaacaacatcaacaataagattagccttattttcaaaatgctgctggcccaagcagaccatacgttcctccaccaatccggcagcaacaacaacaacagccccagaaacaacaaacaattgaggctcctccgcaaccttcccttgaagaacttgtgaggcaaatgactatgcaaaacatccagtttcaacaagagaccagagcctccattcagagcttaactaatcagatgggacaattggctacacagttaaatcaacaacaatcccagaattctgacagattaccttcttaatctgtccagactcccaaaaatgtgagtgccattacattg

SEQ ID NO: 875 - DNA, 458 bp, Glycine max
  unsure (1)..(458): unsure at all n locations
atatatttgagggactcatggtcactatgaatgacaaattccttgggataaaggtaagtgtgccatgttttcaaagcccgtactaaggcatacaactccttatcataagttgaatangtaagggtaggaccacttaacttttcactaaaataagcaattggatggtcttcttgcatcaacacagccccaatcccaacatttgaagcatcacactcgatttcaaaagatttttgaaagtttggcaacgcaagtatggnggcattaattagctnttgcttaataacattgaaagcttcttcttgtttctctccccatttgaaaccaacatttttcttgagcacttcattgagaggtgctgccaatgtgctaaaatccttcacaaatcgtctataanaactntctaagccatgagaactcctcacctcggtcacggacttatgtgtaggctattcttgaat

SEQ ID NO: 876 - DNA, 454 bp, Glycine max
  unsure (1)..(454): unsure at all n locations
agcttcttatccaaggctcatcttggtggtgaagctccttctttcatggcttattccctagtggatggcgccgcctcttacctcttctcctttgtcttccgctgcatctccatggtggaaaatcaccattaaaggacctcattgaagctcaaagatccagcttccatagaagctccacaagcaagtttccatcaggaatgatgcaatcctaccccgcaagggcattggatagaagactccaagtagattgggctagagatgcaagagaaggccctagggttctcatgagccttaggatagatttcgggcccatgggctaagtatgagcccacttatctttgtacatattagattaaggtttcattaattntgggtcttttatttaaggctccataatgtaggaagggtaccctagaaatataggaattttcagcccttgtattttagggcacct

SEQ ID NO: 877 - DNA, 396 bp, Glycine max
  unsure (1)..(396): unsure at all n locations
atcctctagagacacccgccgcatgcaagctntgcatacnccaaggatccattatgaaattacttgtgaaagagagccatgtgggtgggttcatgggccactttggaatagacaagacccttgtcttactcaaagaaaagttttattggccccatatgaagaaagatgtccataagcattgcactacgtgtgtggcttgtttacaagccaagtctagggtgatatctcatgggctatacacacccttacccatcccatctgcaccttgngtagacattaatatggactttgtncttgggctttctagaacccaaagaggtgtagactctatctttgtggtggtggataggtgtagcaagatggcacactntataccatgctacaacgtggatgatg

SEQ ID NO: 878 - DNA, 428 bp, Glycine max
  unsure (1)..(428): unsure at all n locations
tcgaaattgaacaacgtaagctctcgagaaattcaaatggacataacttttaactcgggtatccgatttaggctcatcacatatagagacgctcaaaattgaacaacggaagctctcgagaaattcaaatggtcataacttttaactcggaggtccgattcaggcgcataatatatcgagacgctcgaaattgaacaacggaagctctcgagaaattcaaatggacataacttttaactcggatgtccgattcaggcgcatcatatatagagacgctcgaaattgaacaacggaagctctcgagaaattcaaatggacataacttttaactcggaggtccgattcaggcgcataatatatcgagacgctcgaaattgaacaacggaagctctcgagaaattcaaatggacataacttntaactcggat

SEQ ID NO: 879 - DNA, 397 bp, Glycine max
  unsure (1)..(397): unsure at all n locations
agcttgtagcanatgcaaacggcaataacattttactcgaatgttctatttagtcacgtaatgcatcaaaatgctcgaaattgaaaacagaagctcggtgcaaattcaaacgacaattagtttttactcggatgtccgattgagtcccttcatatatcgagacgctcgaaattgaaaacggaagcttgtactatattcaaacgacaatcatnttttactcggatgtccgatggagtcccgtaatatatcgagacgctcgaaattgcaaacagaagctctgagcaaattcaaacgacaataacttttttttcgaatgtccgatggagtcccgtaatatatcgagacgctcgtaatggaaaacagaggctctgacataattctacaacaatacatttta

SEQ ID NO: 880 - DNA, 434 bp, Glycine max
  unsure (1)..(434): unsure at all n locations
agctnttcanaatatttatgtatttcttttataaccttccttctctcttcttcaacctanaagtttccaaaatcttgttctcaaactcgtgactcttccctcacgtcgatgatcatcttcttcaagaaacgccgtctgaacttgcgagcgtctatcgggtgcgggcgtagggggacacataaaattgcacctgccagtcatgggagcagttgtcgctatccatcacgtgacggaggtgcttgccggcgcggaggatctcgatcattccttggatcgctgacggaatgctgtggtcgggtgaggtgatgtatgtcgccgtatcccgattcccctacgacttcccatgccgtatcagtattcttaattttagaagcacaccaaccatatattctcttctctttgcattccattttctttcatgctgacaaatttaa

SEQ ID NO: 881 - DNA, 415 bp, Glycine max
atgcaagtcaattgtaggaaacatctcggagaggatcttttctgtgcatatttgcgcaaaatgtcttgaactaagaagatgttgtccatcatctttctgttcttgatgaaggcagtttgagtttccccaacaatagtctcacgcactgtggctatgcggttggccaaaattctagacacaatcttgtattacaaattacagcaagatatgggtctaaaatggttaacctgagaggtctgatcatgcttaggaataagcgcaataataacatggttgagttgctttaaaaatttgtcagtggtaaagaattcatttaccggctcatagatatcatcaccaatgatattccaagccttcttcgaaaataaatcattgagaccatctggccctacagctttattgttatccatcacag

SEQ ID NO: 882 - DNA, 462 bp, Glycine max
  unsure (1)..(462): unsure at all n locations
agctntgtccgcanaaatcactaataaccgttttaaggtccaacgccttanacggccctctttgcttttatcgattaacatggaccgttcaaaagcataaaatcaatatgtaactttactgcttttgcaagaactacgtaggtctgatttcctcatcgcaattgaggatatgtaggagcaaaagccccgcttttgtcgaccaccccaagagatcgttaatggttcaacgccttaacatttctctcctttcaaaaacaagagatcgttaatggtccaacgccttaacgtttctctcctttcaaaagaatcaaagatcgtttaatggtccaatgccttaaacgacttttgtgcggttaaaatcgatcttgcgaaaaaagatcaaaacaacttaactggaaatactgatcatacattagtatgattaaacattgtanacacaatcaaacaattttcaacaattat

SEQ ID NO: 883 - DNA, 353 bp, Glycine max
  unsure (1)..(353): unsure at all n locations
agcaagctttgtatattgcctctgtgctggatatagagactactttctactttctagaccaccaagatatcaagttgggaccaacatacactgctgcaccagagttagagtgcctatcaatagggtctgaagcccagtaagaatcacaaaaaccttacatgggaagagttttatgaggtgaggcaagatacaaaataagtcctgaatgtaaagcacccttaagataccttaaaattctttctactgttgtccagtgggattcaagaggtgcagacatgaactggcaactttatttcaacanaactaactctagatgagtgatagtacatactgacagctccacaacagatctg

SEQ ID NO: 884 - DNA, 370 bp, Glycine max
  unsure (1)..(370): unsure at all n locations
tcttacaagagactaaganatttctgacngaaaattntgagatgaaatatcttggggaagcctcttttgtattaggaatcaagatactaagagatcactctcaagcatnctaaggttgtcacaagagagtatatcgataaggcctagatagattcggcatgaaagatagtaaaccagtagatacccagatagctaaaggaaacaaatttagtctcaaacaacaccccaataatgaccttgaaagaatagagatgcaaaatatttcttatgcattagcattagaaagtctaatgtacgcttaagtttgcactcgtctcgatatagcatttgtagtaggagttctgggtagatattttgagtatcctggaat

SEQ ID NO: 885 - DNA, 495 bp, Glycine max
  unsure (1)..(495): unsure at all n locations
atctcagagtcacctgcggcatgcaagcttctaatatctcccacactnnttggngtgggccattcttggatggccttgattntctcagggtccacttggaccccatttctaccaactacaaaccctaagaaaactatattttctacacaaaaagtacacttctctatatttgcatagagggtgtttttcctaaggactgaaagaacttgtctgagatttcataagtgatcatctaggcttctactgtacactaaaatatcatcaaaataaacaactacaaatctacctatgaaatcccttaagacatgatgcataagcctcataaaggtgcttggtgcattagtgagcccaaaaggcatcactagccattcatacaaaccaaacttggtattgaaagcggttntccactcatcaccctttntcatcctgatttggtgatacctaactttaagatcaatntttgaaaagatattggcaccatgcaactcatcaagc

SEQ ID NO: 886 - DNA, 356 bp, Glycine max
  unsure (1)..(356): unsure at all n locations
gtactgaaccgtaccatgagacgtatgtcgtggtttgagatctcctttcttcttttgccacagtgccccgatcctcctagtgtcggcatttgtggaggagacgtgatgcaattctacctcgcaagggcattggatagaaaactcctagtacattgggccagagatgcacgagaaggccctagggttcttatgagccttacggtagatttcgggcccatgggctaagtacgagcccacttatctttgaaatattagattaaggtttcattatttttgggccttggatttagggctccataacgtacatagggtaccctaanatataggatttttcagcccttagattgtaggacatc

SEQ ID NO: 887 - DNA, 392 bp, Glycine max
tgttgaacctctcccattactcatataatgtctctccaagttgttgccttattgatgcaagctccattggagcttgtaggcctaggatcttcttcatcaatggattcctttgcttcttggaagatgaatggcagtggaatgaagaaggaagagagagaggagacgccacttcaaggagaagatgagtctagaagaagctcaccaccatatgaggccatggataaaagcttggaggaagaaagagatgaatgaagggagagggagagaagagcacgaaattttgtgctccaaatgagctctgaaatctgaagtttaatattcaaatgatcaaagttgaaaaaaatgcacacacatgacctctatttatagcctaagtgtcacacaaaattgga

SEQ ID NO: 888 - DNA, 472 bp, Glycine max
  unsure (1)..(472): unsure at all n locations
agcttaacatcagaccacttccagggtgctggaactacttcacatggatttgatggggcctatgcaggttgaaagccttggaggaaagaggtatgcctatgttgttgtggatgatttctccagatttacctgggtcaactttatcagagagaaatcagaaacctttgaagcattcaaagaattgagtctaagacttcaaagagaaaaggactgtgtcatcaagagaatcaggagtgaccatggcagagaatttgaaaacagcaggttcactgaattctgcacatctgaaggcatcacccatgagttctctgcagccattacaccacaacagaatggcatagttgaaaggaaaaacaggactntgcaagaggctgctagggtcatgcttcatgccaaagaacttccctataatctctgggctgaagccatgaacacagcatgctacatccacaacagagtcacacttagaaga

SEQ ID NO: 889 - DNA, 411 bp, Glycine max
  unsure (1)..(411): unsure at all n locations
tgtcattcgaatggaacccccaaggtcaaactctaaactntccaaccattttccttcttcctcctttctagttnttttatttttttttttatttttttatgcagctgaatagtgtgcttcatgttatgtttttgcagagttgctgtggataacatttcaagcggaacagacactgtcataaaggttccaaattcacctttcgttggctttgtcttttctgcattgccaaagggtcctttttctctttgtgtgaccaattttccgtgtgtgttgttgcaggttgatagcgcgaacaagcgtgggagcttgttggaggtggttcangttctcactgatatgaatctcagtgttagaagagcttatatttcctctgatggagaatggttcatggatggtacggatcccttcacg

SEQ ID NO: 890 - DNA, 471 bp, Glycine max
  unsure (1)..(471): unsure at all n locations
agcttgaaccttgagtcttgattcttgaaatcaaatttcctcttgaaccttgaagtgttcttaattcaatcttgaacatcttgaacatcttgattcaatcttgaacatcttgaacatattgaactcattctttgattatcatgaattgacctttgagctttttgtcatcacctttgttatcatcaaaacatctttgaatcaatcttgattcatcatgaagctttgcttctacacatacttagtaggatcaaaagttattgtttatactgaccatgaacccattaagtacctgttgaataaagctgattccaagcccagattaatcagatgaatcttgttgctttaagaatttgatctggttatccaagacaagaaaggatctgaaaatcttgtagctgatcacttatcaaggttagtcaatgaggaggtgactttgaaagagctatagataanggatgaatntcctgatga

SEQ ID NO: 891 - DNA, 452 bp, Glycine max
  unsure (1)..(452): unsure at all n locations
tgtaatcgattacacatatactgtaatcgattaccagagcagattntcagaaaatattctcaacagtcacatcttttatgtggttcttgaatggctatcaaaggcctatatatatgtgacttaagacacgaatttgctaagagtttttcagaacaaaaaggtcttatcctcttaaaaagcaaatcgttttatcctcttacaaattccttggccaaattacttgtgattcaataaggaattatttgagtactcaaattgttcaatctatctctttcaagagagatttcttcttctcttcttcttcattctgaaaagggattaagagaccgagggtctcttgttgtgaaagaattctaaacacaaaggaagggttgtccttgtgtgtttagaacttgtaaaaggaatttacaagatagtggaactctcaagcgggttgcttggggactggacgt

SEQ ID NO: 892 - DNA, 456 bp, Glycine max
  unsure (1)..(456): unsure at all n locations
agctntggagtttccaagtgccaattcgtcctcttctttagtccagtcttcttctggcttcaattcatcagtgggctttccttctgtgtccagcatcttgngatgttcccagcctatgatgacagctttccaggttctgctatccactgatttgaggaaggccaccattcttgctttccagtattcatagttgcttccatcaagaattggtggtctgttcactggtcctccttctttctccatgttcatcagaatttatctccccagatctcactctgtgatttcgagtgtttgctctgataccaattgaaattctgataccacgggacagatgtcgtacaggatgtcacgacatcacgcttcataacatgcagattgtatgtgtccgtatgaacagactacacaagtnaataacacaagagaattgtaacccagtcggtgcacctcacctacatt

SEQ ID NO: 893 - DNA, 348 bp, Glycine max
  unsure (1)..(348): unsure at all n locations
agcttgccgacagtagtaatggcggattgcatgtaaataacagacccgcaccggatattgttntgaaacggaccctctctcgtaaattggttctaaaaggaaccccatacagtaaatttgccaagaaattaatgctgtacccataaaataattttttaaaatgaatactaatgttatacgagataataaaaactgatattaattctatgattttattttttaatattatagtatcgaccatgaataaattatataatatttttgaaaatatatatacgcgtaaagaataattataatttgctacaatataagcattctgaatccttttatcatgagattatatatttt

SEQ ID NO: 894 - DNA, 467 bp, Glycine max
  unsure (1)..(467): unsure at all n locations
agctntagcacaatggcaaggttactttcttatgagttactaattcaattcttaacccccactatgtaagagccttgtccattgggtcacctcttttttattttgtaacatttatattaataaagcaaagtatgatacatagtaggaacacaataatatacaaaagttaaataatatattttatcgctcaatatataattcgctgataaatgaatccttgaacgatgaatatataaaatttagtccctaaaagtataaatagtgtgaaaagtaagtaatcgacaacgtgaccatgctgattagatttgatgaaaatgtcaacaagatacaacgtaaatgttaatcattntttggtggacaaaaaatgtcaatatttcttattgaagataatatcagtaatttgttatttacctaaatgtcaatacatttcattggatcaaaatatcaatacgttatcattattggac

SEQ ID NO: 895 - DNA, 452 bp, Glycine max
cctatcgcccttagactaatggctagattgaacggaccattcagtcgctggaggaccttttgagggcatgtgtcttagaacaaaagaggagttgggagagttaaagactactcaaagtaggcagaaaaactatcaggctgctcaagaaaaactgagaaggtcaagttaatccaagaaaggctaaagactgctcaaagtacgcagaagagctatcatgacaagaggaggaaagacctgaaatttgagattggtgatcatgtattcttgagagtcattccattgattgcgttggtcaagcattgaaatcccaaaaactcatacctcgttttatcaacccttgttaaattctcaacagagtcagtcctacggcataccatattgcattacctctgtctctgtacaatcttgacaatatctttcatgtgtctcaactcagtaattatatctgtgat

SEQ ID NO: 896 - DNA, 446 bp, Glycine max
  unsure (1)..(446): unsure at all n locations
agcttgaaccttgagtcttgattcttgaaatcaaatttcctcttgaaccttgaagtgttcttaattcaatcttgaacatcttgaacatcctgattcaatcttgaacatcttgaacatattgaactcattctttgattatcatgaattgacctttgagctttntgtcatcacctttgttatcatcaaaacatctttgaatcaatcttgattcatcatgaagctttgcttctacacatacttagtaggatcaaaagttattgtttatactgaccatgaacccattaagtacctgttgaataaagctgattccaagcccagattaatcagatgaattttgtcgctttaagaatttgatctgggtatccaagacaagaaaggatctgaaaatcttgtagctgatcacttatcaaggttagtcaatgaggaggtgactttganagagctag

SEQ ID NO: 897 - DNA, 459 bp, Glycine max
gacactatgaatactcagcttgtaggctagatatgaactgttggactctgttaacactgtgtcgctgtgtgagcattctggacatacacgcacactttctgattcatgctcttatgcacacacacacagagagattcgttctctcgtcagaaacactacgcatacgaacaggcagacgctcacgctgagaacctgtaacacagacacttgtcagactcacgcacttacacagacaccacagactgactatgacctattcagagacaagcgcactcccagatacacgcactctgatagacttagatggcagaacttttcacagaagcacacacacccacagattcactgtcacacagttgctgacacacagagaccatgcgctcatccacacttgtagacacacacatacacacacgcacactcacactgagaactagccccagacacacacacacgctg

SEQ ID NO: 898 - DNA, 451 bp, Glycine max
  unsure (1)..(451): unsure at all n locations
gtgaagctcctgttttagctttacccgattntactcaaccattngaagttgaatgtgatgctagtggagttggcattggggctgttttgatacaaaacaaaaggcctatagcttatttctcggagaaattgggaggagccagattgaactattgcacctatgacaaagagttctatgccattgtgagagctcttgatcattggaatcattatttgcgttctaatcactttatattgcattcagatcatgagtcattgaagtatatcaatgggcagcagaagttgagtccaaggcatgctaaatgggttgaatttcttcaatcttttaatttctcttcaaaatacaaggatggtaagagtaatgtggtggctgatgcactctcaaggaggtatgctttaatttcaattcttgaaactcgtttacttggttctgagactctgaaagattatat

SEQ ID NO: 899 - DNA, 376 bp, Glycine max
  unsure (1)..(376): unsure at all n locations
agctntgagcanattcanacgacaataacctttttactcggaagtcggattgagtcccgttatatattcagacgctcgaaattgaatgttgaagctctgagcaaattcaaacgacaataaccttcttactcagatgtcggatagagacccgtaatatattgagacgctcgaaatggaataccgaagctctgagcaaagtcaaacgacaataactttttactcggatgttcgattgagccccgtaatatatcgaaacgctcgaaattgaatgctgaagctctgagcaaactcaaacgacaataaatctttactcggatggccgattgagtctcgtaatatatcgagaagctcgaaatggaataccaaagctctgagc

SEQ ID NO: 900 - DNA, 453 bp, Glycine max
  unsure (1)..(453): unsure at all n locations
ctgaagcaatctctgctgcttgaatgcaatttcagagccaatcccttcaatagctttgtcccctgggatgataagagcaaagaaataataaatttggaaatctcttttgttagctcactaaaaggtgatacttaaaagcaaacacttttcaagtttcaaaactgtatataaagaatgtatacttacagtattctttgtcaatacattaagtgaatcctcatgaaaccacaatcgactgcgcttcccaggtttctttgttgaactttcacgaattatctctcttcccatgtctcgtagtaatggatgcattccaagttcgttgttctttgcaacttttacgaggctacgctccatgagaactgttattcctatatcagcatgtagtccacagccatntagtatctctgtaacataagctctatctttaccaataaagagacaacatacatcaag

SEQ ID NO: 901 - DNA, 396 bp, Glycine max
tactcattgactataagcctctcaatcattttcttaaagatgataagttccctatcccaaaggcttcatctttccccaccttgataagagaatcaaactcattctcaaagaatgatttaaaatcaggttctcggcaacttggcctaaaaccacataatcgatacaaaacagcatcctgtatgccaaatgctcaatatcaatggacaggcttacctttaggcttaaaagtagcttcttctctcttgcagaaagccatgaccaaaatctttgaacccattctggaaaacactcttgtctacatagatgacattctcctttgttcaaaagatattgcctctcactaaaaattgttgaaccaattctttgaaatagcacaccaacatgggatcatgcttt

SEQ ID NO: 902 - DNA, 364 bp, Glycine max
agctcgatgcaatcctaccctccatgggtattgtatagaagactccaagaggattgagctagagctgctaaagaaggccttggcgttctcatgaaccccaaggtagatttctgagcccatgggccatggttgggtccactcttctttgtaaatattagaatatgtttttccttcttttgggccttgtatttaggccattctagtagtataggattttagccttgtctttcatggcaatttgagtagactttgtagtagggacttttatttttcatgtattttggcatgggggcgagcttatctattatagggagtgcgtaactaagccctaccttttttaggaatcttcccaaggaatcttctt

SEQ ID NO: 903 - DNA, 461 bp, Glycine max
  unsure (1)..(461): unsure at all n locations
actatgaaactcagctgatagatttanaccacacctttatctctatagtactttataattgaagaatacacattcgtttatttattatttattattttaaaatgataacaaaattgaataaaagtgagtttattctttattcgttgcaagtgtaatttttttatattgtcaagtaactagaaatcatgttagatattatttttaagatcattttataaaattcaagaaacttatttaatctataattgaataattctgtaaatttaaattaaactttaaaagtaattataaacattcaatagataatttaacttcaaaccataattatgaatgcctccttttcataactataagatgttttagctntatttcttatcttanaataattgatattntagaaattcanaatttaattaatattttttccaattatatccttatttattatctcattattaatg

SEQ ID NO: 904 - DNA, 372 bp, Glycine max
aagtccaacgcagcacgcgtgtcgttaaagttgttatatgttatgctttgaaggagatgaacgtggagtgtagttaccactgtactctactctagcagtggttgtggtgttatcaaaggcaacaccaacaccacttgaatatgctcttgcagcaagacacccatgattaggttcttggttggcatgcaataacacatacattggtcgtcccggtgatatgcaaatgtattcccttgccaatggcttggttaacataccatcagcaccaacaacagcgaggttgtgttctgtatcatagaacaagagaatgagattcattgccgcattgtctacacggagataataagtcctgccttgctctacatgaaactc

SEQ ID NO: 905 - DNA, 469 bp, Glycine max
  unsure (1)..(469): unsure at all n locations
ggatggagaatatgggtccatacttgtcagccaagtcacccaatgttntatgaggtgtctttgaaccaagcaacaatgggaggtgaccaattattggccacgcacctgcaactgtgggaggaccctcttcgccactcttcgaggaacgacgacacaaaaacaagtataagaggatcagagaaacaacaccaactccaattgttgtggtgtttagaactaagtccattntgacttgtttttgtgttgttgcatgcagatcctcatcagtttaaataggaactgcaccgtgcatctgtgtgccgttgtacgacctgactagatcgagtagagatatttagatattntaatattntagaatatattcattacttgaattaactaanaaataaaataatgttgctgaaatgatgaaataatatagccaaataaaatcttgatattntaagatatnntttaattttatattaca

SEQ ID NO: 906 - DNA, 465 bp, Glycine max
  unsure (1)..(465): unsure at all n locations
taacgtctntcacagtanaaggaccactccatctctcaattntaattntccaggaaacaactttagttntaagttgtagagcaatacttgttgtctgggactaaattctttgtggaggatctttttgtcatggtccctcttataatccctgaacactttaaacttggagccaaacaggtaatgcctccacatcttaagggcaaaaactacagtagccaactccagatcaagggtgggataattcctctcatgagtcttgagttgtctagaagaataggccactccttggccattttgcatcaacactcctcctaaacgcatctttgatgcatcacaatacacctcaaggngttctcttgggttaggcaaaactagcatgggagcggccgtcaacttttccttaagggtttggaaactatgctcacattaggtatcccacacaaaagcttgacccttacgagttag

SEQ ID NO: 907 - DNA, 456 bp, Glycine max
  unsure (1)..(456): unsure at all n locations
agatggaccatttcaagtgaaagaatcaatgacaatgcttacaaagttgagctgcctggtgagtataatgtttgttctaccttcaatgtctctgacttatctctttttgatgtagatgaagaatccgatttgaggaaaaatccttctcaagagggagagaatgatgaggacatgactaggagcatgggcaaggatccacttgaaggacttggaggacctatgacaagggctagagtaaggaaagccaaggaagctcttcaacaagtgttgtccatactatttgaatacaagcccaagtttcaaggagaaaagtccaaggttgtgagttgtatcatggcccacatggaggaggactaaatggcaccactttgtctcaattntagagtggttagtttgtctaaataatggcccaatccttgtaatgttggctgaccaaaaatatgttttgggttaatc

SEQ ID NO: 908 - DNA, 449 bp, Glycine max
  unsure (1)..(449): unsure at all n locations
tgtaggcgttggatcttcttcatcaatggagtcattggcttcttgaagatcatggcagcggaatagagaaggaagaaagatgattggagaccccacttcaaggagatgatgagtcaagaagaagctcaccaccacaggaagccatggataagagcttgaaggaaggcgaagatgagtggagggagagggagagaaggggcacgaaattntatgcctcaaatgaggtctgaactttgaagtgtaattctcaaatgatcaaagttcaaaaaatgcacacacatggcctctatttatagcctaagtgtcacacaaaattggagagaaatttgaatttctattcaaatttcacttgaatttgaaattgaatttgtggagccaaaatttcaataattatgattaatgaattttagatatggttcagcccactaatccaagatcaagtccaagat

SEQ ID NO: 909 - DNA, 434 bp, Glycine max
  unsure (1)..(434): unsure at all n locations
nttataanaagcatttctaagcataaaactaaaatatgttgtattgagctcttggtattttttttatgataacatttttaattatgagtataattttataattattaaaagccatcagtttttttttaaataataatttgttcacattttgttcaaataaacttaatgtaagttctctgaatttattgcattctggcgactgaaattcacaatcaaaacttaaagtgtgctgaataaaagtttttcatagatgtaatctagtaaaataatgcttcataaataattaggtgtctaatagaagaataaagttaatacaactgttctcgaaattaaagtagaatcgatacattcacagatgtgtatacataataatggtgtagtattcaatacatattgttttgctttactgtcgaactatggaattccatatacat

SEQ ID NO: 910 - DNA, 330 bp, Glycine max
agcttgagctttgaattgagtgtcattgtcagtggcaatggcgtaaagaagaccatattttcatatgaagggtttgcatgagaacttctctacctcatctggtgaaatttctcgcaatggtcttgccttaatccacttagtgaaataatcaatagcgactaataagaatttgacctatcctgcggcttttgccaatggtcctagtatatccatcccccacatggaaaaagggccaggtcctagtatgaccaataagaatgtaccctttggctcgctcacgtagctcgtccatgctgctagggggtttcttgcatatactatcagggaact

SEQ ID NO: 911 - DNA, 444 bp, Glycine max
ctcagcttgaatgaagtccaacgcagcacgcgtgtcgttaaagttgggaaggttaggcaatgaaggagatgaacgtggagtgtagtttccactgtactttactctagcagaggttgtggagttatcaaaggcaacaccaacaccacttgaatatgctcttgcagcacgatagtaatgattaagttcttggttggcatgcaataacacatccattgtttgtcccggtgatatgcaaatgtattcccttgccaatggcttggttaacataccatcagcaccaacaacagtgaggttgtgttttgaaacagagaagaagagaatgagattcattgccgcattgacaacacggagaagataagtcctgccttgctctacatgaaactcgaacgtttctgaaaattaaaagaaagttttgtgtttagatgagcttaacctcatagatac

SEQ ID NO: 912 - DNA, 347 bp, Glycine max
ttagacctttgatggcatgctggcatcaccctcattcttgctcttgtcagcttcaaacttatcaattgctacctgcagttcatcagtgcctccaacagccctcatggtgtagaagtatgcaccaaagacaaaagctgtcaaacccccagcaactaccagattctttgccttaggtggaaggctcctatatcctaaaagtccagccatcttgatcaatgtgggaaaaaagggttagcacaatttcacacaattacaattacccttcaattgcagaaagcacaaaagatcacaaaacagataattcagatctgtaaagaataatgagtagacattttcacaaacagatt

SEQ ID NO: 913 - DNA, 464 bp, Glycine max
  unsure (1)..(464): unsure at all n locations
agctntaatggtgttaagaagaaatcacatgttttgtatcatcaacaagagggagaatgtgaatgtatgtatacatgattttgatgatgtcaaaagaagaatcaaacaaggctcattttgcttcaagattaatacaagattggttcatcaaacaaagccttgattcaagatttcttcaagatcaagccttgcctcacaatgaaaggtttcaagtcattcaaggcacatgtaatcgattaccaatacatgtaatcgattaccaatggtttgaaagtgtgtaatcgattacacatcatatgtaatcgattaccagagactctgaacgttgggaattcaaattttacatgaagggtcacaactgttcaagacaaacaactgtgtaatcgntacactaattatgtaatcgattaccagagaggattttcaggaatatcgccaacagcacatcttatcatttgaatttg

SEQ ID NO: 914 - DNA, 416 bp, Glycine max
  unsure (1)..(416): unsure at all n locations
agcttcttgacctgaatcaacacatcctcaatcacttcatatggtcttgtgacagagcgatcaaccaactggagggtcatgcatgtgggcattatctctatctctccaagtcgccgacacatggagagaggcattaaattgatactagctcccaagtctatgagagctntacccacaacaacctcaccaatagaacacgatatactgacacttccaggatctttgtgcttcgggggaaggatgcgttgaatgaccacactatagttaccttccacaactattgtgtcactgtggatataccggttattctttgtcagcatgtcttttaaaaatatggcataaagtggcatctgttggagagcttctccaaaaggcaaagtgatcttcatcttcttgaagatgtcaagaaatctggc

SEQ ID NO: 915 - DNA, 402 bp, Glycine max
  unsure (1)..(402): unsure at all n locations
taagctctttcaactgcacaaagctattaatattngaagagtatccatatggaaccttcacccgacgaagacactgacaaaaacttatcttctcctttttggacaaagcatggcaagctaggggcaagtaaattttcttcccatcagaccttggatgcaactgtgatcgtatccccatataagctagatcttgatgggtattcaagccatccttcgtctttccttgaatgttaaggagcatcccaatcacactgtcacaaacatttttctccacatgcataacatcaatacaatgtctaacgtctagatcagaccagtacggaagatcaaagaaaatggacctcttcttccatatgcaactcttacttttatccttcttttgggtttttccaaatataatat

SEQ ID NO: 916 - DNA, 350 bp, Glycine max
agaatcggacctcagtgtgaaaagttatgaccatttgaatatctcgggagcttccgttgtacattttcgagcgtctgtatatgagatgcgcctgaatcggacatccgagtgaaaagatatgaccatttgaatatgtcgagagctttcgatgtttaattttgagcgtttagatataagataagcctgaatcggacatcctggtgaaaacttatgaccatttgaacttctggagagcttccgttggggattttttaacgtctctttatgtgatgcgcatgaattggacatccgaattaaaagttatgaccattagaatatctcaagagcttccggtgtacaattctgagcgc

SEQ ID NO: 917 - DNA, 399 bp, Glycine max
  unsure (1)..(399): unsure at all n locations
agcttctatagaaggttcgttcctaatttctctacaattgcatcacctctcaatgagctagtgaagaagaatgtggcatttaactggggtgaaaaacaagagcaagcctttgctttgcttaaagaaaagcttactaaggcacctgttctagctcttcctaacttttctaaaacntttgagctagaatgtgatgcctctggagtgggagttggagctgttttgttgcaaggtgggcaccctattgcttattttagtgaaaaacttcatggtgcgacccttaactaccccacctatgataaagagctttatgccttaataagagcactccgaacttgggaacattaccttgtttccaaggaatttgtcattcatagtgatcaacaatcacttaagttcatt

SEQ ID NO: 918 - DNA, 399 bp, Glycine max
tagtatatggacttgggtgttgcccagtttcatcatatcttccgtaatacttatcacctctatcatatctaataattttcacatttatgtctaattgccattttacttcattgtagtaaatttctaaagcatccattgcctaagaaatctcgggcagtaagtagacataaccgtaacgtgaataatcatcaataatggtgataaagtattattcctttccgaaagaactaacatcaaaaggtccacaaatattagtatgcacaatttcaagaagctgagtgcttcttgtagctcttttctttgtatgttttgcttgttttccattaatacaacccacacaaatatttagatccataaaatctagataaggaagaatttcattctttattaatttttcca

SEQ ID NO: 919 - DNA, 381 bp, Glycine max
taaagcacaacattgaccatgagctcttcatatcgccctcagtccaatggccagactgagaatcttaataagaccattgagatgtatctaaggtgctttgtatttgaacatcctaagagttgggttactatgctaccttgggcttaattctagtataatacttcctttcaccaaagcttgggcatgacaccatttcaagcagtttttggtagacctccaccaacggtgatgcactacgaggttgatcctaaagatcccgatccactcaaggctttattacaactacgtgatcaacttttgagcaagcttaaaggtaatttactaaaggctcaacaatatatgaagatgcaagctgataagaaaagaagagaaagagaattg

SEQ ID NO: 920 - DNA, 402 bp, Glycine max
tgtaagatttgcaagatcatcttccttgacaactccttgaaaattattgccatcaatacgcagagatgacaatttagagagtgatccaatactttcaaatggatttccactgaatttattaatagacagattgagatatcttaatgatgaaagttttccaaatgatattggaagagcaccaccaattaagttgttggaaaaatctagcatgtcaatatttttaaaagccccaatttgatctatcagattgcctgaaagttgtgaactccgaactgcaagtgttgtgattccctaggaaatacaaagagcaagaatttctaaaagttcattaacctgttggttgagtttgagatatgataaacctatctcccttaagttgcagagattatccaaagaagttga

SEQ ID NO: 921 - DNA, 397 bp, Glycine max
ggacactatgaatactcagctcgattggagcggatgggccagtctgcctcgtttttcacgaatcaataaatgattcgccctgcctcgtgaccccacgggtcaaacgtgccgatccgcgacctaatttaaaagaattcgattttataaaaatacaatacaatgaaattaagttgaatacaaatgtaaataaaatctcaataattagtcaattacatcaataaaataaatattgtcttaataaaagaaaatccaagcaatacatctaaaatatgaaatttaaacatctccaacaacaaatgattccatatttgataatgtttaatgaattctgactttaataaaaatataatacaatgaaattaagttgaatacaaatgtaaataaaatatcaataatt

SEQ ID NO: 922 - DNA, 361 bp, Glycine max
tgaaggtacgagatgatgagaggatggataaagagtgtaggaactctatcgcctgtgcctcagagaaggtctaaacattgaagagtaatcctcaaataatacaaggtgaaaaatgcacacacatggcctctatttatagactcagtgtcgcaaacaattggaaggaatttataatttcttttcaagattcacttgaatctgaatttgaattggtggagcccaattttggagccgaaattgcagtaattattattagagaatttcagttatggttcagcccactaatacaagacctggtgcaagagtttggactaatagtgctgatgtggcatgacgaatgtatagcatgaaagacatgcac

SEQ ID NO: 923 - DNA, 380 bp, Glycine max
ttggagaatgatttctatacaaaagttagtcgtataaagcgactaacagtgtgttacattatggcatttgcctatgttcctgatgcaggaggcttgaggaagaagattttggaggaagctcatcattccttttacaccactcatccgagttctactaaaatgtatcaagacttaaaggagttttattggaagggagggatgaaaaggatgtagctgaatttgtatctaaatgcctagtatgtcagcaagttaagacagagcatcagaagcccgtaggtttgttttagaggattgatatacttgaatggaaatgggagagaattgtaacaccccagattctagttcaaaacattgctttgaaaactctcgttaattatttt

SEQ ID NO: 924 - DNA, 397 bp, Glycine max
tgttgaacctctcccattactcatataatgtctctccaagttgttgccttattgatgcaagctccattggagcttgtaagcctaggatcttcttcatcaatggattcctttgcttcttggaagatgaatggcagtggaatgaagaaggaagagagagaggagacgccacttcaaggagaagatgagtctagaagaagctcaccaccatatgaggccatggataaaagcttggaggaagaaagagatgaatgaagggagagggagagaagagcacgaaattttgtgctccaaatgagctttgaaatctgaagtttaatattcaaatgatcaaagttgaaaaaaatgcacacacatgacctctatttatagcctaagtgtcacacaaaattggagggaa

SEQ ID NO: 925 - DNA, 391 bp, Glycine max
taataagtgcatatgatgtagctccatgtagagcttgtaagccttggatcttcttcatcaatggagtcctttgcttcttgaatatcaatggtagcggaatggagaagggggaaaggtgattggagacgccacgtctaggagaagatgagtcaagaacaagctcaccaccatatgaagccatggataagagcttgaacgtatgagaagataaatagagggagagggagagaaggggcacgaaatttatgcctcaaatgaggtatgacctttgaagtgtaatttctcaaataatcaaagttgaaaattgcacacacatggcctctatttatagcctaagcgttacacacaatcggagggaaatttgaatttctattcaaatttcacttgaatt

SEQ ID NO: 926 - DNA, 304 bp, Glycine max
  unsure (1)..(304): unsure at all n locations
agcttaaaggatactagggtaatttgttcatccatcctggtgctaccaagatgtatcatgatttaaagacgatgttttggtggcccaacataaagagagaggttattgagtttgtgtatgcatgcctagtctgtcagaaggctaagatagaacattagagaccttcagggaagttacaacccttatagataccctagtggaagtgggacagtatttccatggatttnnnnggtggactacctangacccctatagggttagattctatctgggttattctcnatagattgactaagnctgctca

SEQ ID NO: 927 - DNA, 376 bp, Glycine max
  unsure (1)..(376): unsure at all n locations
ttgagccaattcaaacgacaataactttttactcggttatctgantgagtcctggaaaataacgagacgctcgaaattgaatgttgaacctcagagcgaattcaaaccacaataactttttactcggatgtgtgattgagtcccgtaatatatcgagacgctcgaaattgaatgctttagctttgagccaattcacccgacaataactttttactcggatgtctgattgagtcccgcaatatatcgagacgctcgaaattgaatgttgaagctctgaaccaattcaaacgacaataactttttactcggatggctgaatgaggcccgcaatatattgagaccctcgaaattgaatgttgaatctttgagccaattc

SEQ ID NO: 928 - DNA, 325 bp, Glycine max
agcttcaacattcaatttcgagcatctctatatgttacgggactcaatcagacatccgagaaaaaagttattgtcgtttgaattagctcagaagttcaacattcaatttctagcgtctcgatatgttacgggactcaatcaaacatccgagaaaaaagttattgtcgcttgaattagctcagaggttcaacattcaatttcgagcgtctcgatatgttacgggactcaatcagacattcgagaaaaaagttattgccgtttgaattggctcagagcttcaacattcaattcccagcgtctcgatatattacgggactcaatcaca

SEQ ID NO: 929 - DNA, 439 bp, Glycine max
  unsure (1)..(439): unsure at all n locations
agctntaacaaccatatgatgaaacactttgctatcttgtactggtttggttgtgtttggcactccttaaattatgacaaatgatgtagttccatgtagagcttgtaggccttggaccttcttcattaatggagtccttttcttctagaagatcaatggcagtggaatggagaaggaggaaaggtcattgaagatgccacttcaaggagaagatgagtcaagaacaagttcaccaccataggaaaccatggataagagcttgaaggtaggagaagatgagtagagggagagggagagagggggccacaaaatttatgcctcaaatgaggtctgaaatttgaagtataatttctcanatgatcaaatttccaaaaaatgcacacacaaggcctctatttatatcctaagtgtcacacacaattagagggaaatttgaatt

SEQ ID NO: 930 - DNA, 429 bp, Glycine max
  unsure (1)..(429): unsure at all n locations
agcttctaaactntatacaagaatgattctctgataccacttgttggacaagtggtctcagatatcttaagaagggggggttgaattaagatatcacaaactatttcccttattaaaattttatttcactttctattcaagttataaattcccttaaaaatgaacttcttaaatattgattcaaatagagcaatttgaatatgaatataaaacaataataaataaaggagtttaagggaagagagattgcaaactcatatttatactggttcggtcacacccttgtgcctacgtccagtccccaagcaacccgcttgagagttccactatcttgtaaaagcttattacaagatctgaaccacacaaggacaacccttcctttgtgttcagatttctgtacaacaagagaccctcggtctcttaatcctt

SEQ ID NO: 931 - DNA, 406 bp, Glycine max
  unsure (1)..(406): unsure at all n locations
actcaagctagtagcacattcaaaccacaataactnttaactcagtatgtctgattgagtccggtaatttatctagacgctcataaatgaatacggaagcacgtaacaaatgcaaactgcaataaattttaactcagatgtccgaatgaatcccgtaatatatcgagacactcgtaattgaaaacagaagctctaaacaaattctaacgacaataactttttactcagatgtccgattgtgtccagtaatatatcgagacgcttgaaattgaaaactgaagctctgagcaaattcaaacgacaataactttttactcggatgtatgattgagtcccggagtatatcgagacacttgaaattcagaacagaagctctgagcaaatttaaacgacaataacatttaac

SEQ ID NO: 932 - DNA, 431 bp, Glycine max
agcttctttcaaaatgctactcacaatattgcggattctcttgtccatctccgtgtctacttccctaggaattgttgcagggctagggttttcagcaatcttcactccctgttgtcttctgggaaccagtgtctcagggactgaagcttgaccaggaattacttgtatgggttggatgttgaaatctggttgttcctggtgcggagatgatggtacagcgggtgaaccagaagcggaagtttcttttggtgaggaagccatggaaaaacacagcgtttggaatgatttcgtaaatctcaaaatactattgggaaatgctggtgaaaacactaatgctcagcagatattaatttgaatgaataatgtataggggcgcgtgaagcaacggtcaaatacgtttcgcttaatagtgaacgtgctattaatgttaa

SEQ ID NO: 933 - DNA, 351 bp, Glycine max
  unsure (1)..(351): unsure at all n locations
tgatgctctgatacctgttgntaaacaagtggcctcagatatcttaagaagggggggttgaattaatatatgccaaacttttctctctaattaagaatctatcttactttttactaaagatatgaattcccttggtaacaatcttcttagatattgattcagctgaatcaacttgaatatgaatataaagcaatattccatcaaggagattaatggaatagagaatgcaaactcagttttatactgtttcggccacacccttgtgcctacgtccagtccccaagcaacccgcttgagagtttcactaacttgttaattccttgtacaagttctaaacacacaaggacaacc

SEQ ID NO: 934 - DNA, 350 bp, Glycine max
  unsure (1)..(350): unsure at all n locations
ntggagtttccaagtgccaattcgttttcttctttagtccagtcttcttctggcttcaattcatcagtgggctttccttctgtgtccagcatcttgggatgttcccagcctttgatgacagctttccaggttctgctatccagtgatttgaggaaggccaccatccttgctttccagtattcatagttgggtccatctaggattggtggtctgttcactggtcctccttctttctccatgttcatcagaatttatctccccagatctcactctgtgatttcgagtgtgagctctgataccaattgaaattctgataccaggggacagatgtcgtaccggatgtcacgact

SEQ ID NO: 935 - DNA, 398 bp, Glycine max
tgtagcatattcaaaccacaataactgttaactcggatgtctgattgagtccggcaatttatctagacgctcataaatgaatacggaagcacgtagcaaatgcaaactgcaataaattttaactcagatgtccgaatgaatcccgtaatatatcgagacgctcgtaattgaaaacagaagctctaagcaaattctaacgacaataactttttactcagatgtccgattgtgtccagtaatatatcgagacgctcgaaattgaaaactgaagctctgagcaaattcaaacgacaataactttttactcggatgtatgattgagtcccggagtatatcgagacacgtgaaattcagaacagaagctctgagcaaatttaaacgacaataacatttaactc

SEQ ID NO: 936 - DNA, 426 bp, Glycine max
  unsure (1)..(426): unsure at all n locations
gcttctttcanaatgctactcacaataccgcggattntcttgtccatctccgtgtctacttccctaggaattgttgcagggctagggttttcagcaatcttcactccctgttgtcttctgggaaccagtttctcagggactgaagcttgaccaggaattacttgtatgggttggatgttgaaatctggttgttcctggtgcggagatgatggtacagcgggtgaaccagaagcggaagtttcttttggtgaggaagccatggaaaaacagagcgtttggaatgatttcgtaaatctcagaaaactattgggaaatgctggtgaaaacacgaatgccaagcagatataaatttgaatgaagaatgtagaggggcgtgtgaagcaacggtcgaattcgttttggcttaatagtgaacgtgctattaat

SEQ ID NO: 937 - DNA, 387 bp, Glycine max
  unsure (1)..(387): unsure at all n locations
tgtaatcaattacacacatattgtaatcgattaccataggagatnttcagaaaatattctcaattgtctcatcttttcatttggttcttgaatggctatcaaaggcctatatatatgtgacttgagacacgaatttgctaagagtttttcagaacaaaaaggtcttatcctcttaaaaagcaaaatcgttttatcctcttacaaattccttggccaaatcacttgtgattcaataaggaattgtttgagtgctcaaattgttcaatctatctctttcaagagagatttcttcttcttttcttctttattctgaaaagggattaagagaccgagggtctcttgttgtgaaagaattctcaacacaaaggaaggattgtccttgtgtgt

SEQ ID NO: 938 - DNA, 298 bp, Glycine max
  unsure (1)..(298): unsure at all n locations
tgaatacatagctgcaagaagttgttgtgctcaaagtctttggatgaaacaacaatgatgtaagctccattggagcttgtaagcctaagatcttcttcatcaatggattcctttgcttcttggaagatgaatggcagccgaatggagaaaggaacagagagatgagactccactcgatgagaagatgagtctagagaaagctcaccaccatatgaggccatggataagagcttgtangaagaaggagatgaatgaacggagagggagagaagagcacganatattgtgctctaaatga

SEQ ID NO: 939 - DNA, 402 bp, Glycine max
tatcctttgaaagatcaatactctcagttcttttgaattcgttcactagaaaatccaataaagcattatcaaaatcctctcctcccaagaaagtgtcaccatttgttgctttcacctggacacaaaaaagttattagtgacaatttccaacattatttccaattactggctatgaaatataagcatagaataaacaagtgttaatacctcaaaaacaccattagaaatctctaagatggacacatcaaatgttccacctccaagatcaaaaactgcaatgagaccctccttgttgttcatcccataggaaagtgcagcggcagtgggctcattgatgattctctgaacatcaagaccagcaattctaccggcatcttttgttgcctgcctctgagcatcatt

SEQ ID NO: 940 - DNA, 375 bp, Glycine max
acaagtctcctttgatgagtctgatctcattcttccaaggaaggattttttagatgatatttcagataccttagaagatacacatattcatggaaatgactctgaagaacaagatgaatgaagctatgacgattctcaagataatggagttagaggaaataatgatcttccgcgagaatggatagcctcaagagatcatcccctcgacaacattattggtgatatatcagaaggggtaacaactagacattctcttaaagagttatgcaataatatggcttttgtatctatgattgcacctaagaatataaaagaagcgatagtatatgataactggataatttccatgcaagaagaactgattcaatttgaaag

SEQ ID NO: 941 - DNA, 391 bp, Glycine max
tgaaagtgcataccccaccatttttcatagtaaaacactggtaatgtgtctactattattgagatcatatctttctttgtcattggaggtgccacttgagctgccaggtctctccacctttgggcgtattctttgaaagattcgtgcccctttttgcacatgttctgtagttgcatcctatccggagccatattagaattgtattgatactgcccaatgaaggcaaccattaagtctttccaagaatggactcgagaaagttccaagttagtgtactaggtaacagctaccccgataagactttcttggaagaaatgtatcaacagtttctcatcttttgcgtatgcccccatcttccgacaatacatctttagatggttcttggggcaag

SEQ ID NO: 942 - DNA, 421 bp, Glycine max
agcttgtaatctattactagaagatttaaacgttttattacaacctttagaaatttgaatttaaattttaaagcctgtaattgattacaacttgtgtgtaattgattaccaacatgagaattcaaatttcaagtctgaagagtcacaactcttcagaaattaactgtgtaatcgattacaacagttatgtaatcgattaccaataaggaattttcgaaaataactcccaagagtcacaactgttcaaattttttttgaatggtcatcaatggcctataaatcaattaccagacatgaaaattcaaatttcaagtctgaagagtcacaactctttagaaactaattgtgtaatcgattacaacaattatgtaatcgattaccagtaacgaattttcgaaataacttccaagagtcacgacta

SEQ ID NO: 943 - DNA, 432 bp, Glycine max
  unsure (1)..(432): unsure at all n locations
agctntntattntcagtagatgaagatttatctgtggccacctcatggactcctctaaggacaataccatcatttcttgcactgaattgttgngagttggaagccatcttctcaatcaaattcctagcctcaacaggggtcatatcaccaagagctccaccactgggagcatcaatcatactcctctccatgttgctaagtcccttgtagaaatattgaagaaggagttgctcaaaaatctggtggtgaggacagcttgcacacaatttcttgaatctttcccagtactcctacaagctctctccactaagttgcctgatgcctgaaatgtcttttctgatggcagtggtcctagatgcaaggaagaatttctccaagaacaccctcttaaggtcatcccagatgaaaatggacctgggagcaaggtagtat

SEQ ID NO: 944 - DNA, 417 bp, Glycine max
gcttgttcagaaatgtgcatttgtgtgtaatacacaattaatggttcaccacaacaaaatggtgtatcagaaaggcggaatagaactttaatggatatgattaggagtatgttaatcaattagactttatccgtatccttgtggatgtataccttgaaaactgccatgtagttgttgaacaggattcctagtaaggtagttccaaagacaccttttgagctgtagacaaataggatacctagtataaggcacctgcatgtttggggttgccaggcagaaataaggatttataatccgcaagaaagaaaattggatgcaagaacaatcagtggatatttcattggttatccagaaaagtcaaaggggtatatgttctattgtcctaatcatagtatgagaattatcgaaactggaaat

SEQ ID NO: 945 - DNA, 371 bp, Glycine max
ctcaagcttaacaaaatataaatctaggagcttctacctatgtattataaacaaatttaaattaaaactcatggagagtttagtaagggaactcagaaaaatagccccgtaaaataaaactcatggggtgcctcctcacaaagggggtcgcagtgaccaggcttgggcgactggttatcaaaaacacaggtgttcacaaaggcataagatcatttatgggggcttagatgtaatctggaatatgagagatgtttaatgaaaggaaaatggactccatttggataaaaataactactttctttagacgccttttttttgcctagattcttcacaacctatctaagtggttaagctactttccgcgttttata

SEQ ID NO: 946 - DNA, 404 bp, Glycine max
  unsure (1)..(404): unsure at all n locations
agctntgaaggtgcgtagtccaccactttccctagtataatactggtaatgtgtctactatcattgtcatcgtttttttcgtcattgaggtgccacttaagttgccaggttctctccacctttgggcgtattcttttgaaagaatcgtgccccctttttgcacatgttctgtagttgcaccctatccgaagacattatactgacactgcctaacgaaggcaaccactaggtccttccaagaatggactcgagaaggttccaagttagtgtaccaggtaacagctaccccagtaagactntcttggaaggaatgtatcagcaattccttatcttttgcgtatgcccccatcttgcgataatgcatctttagatggctcttggggcaagtagtcctctcggacttg

SEQ ID NO: 947 - DNA, 294 bp, Glycine max
  unsure (1)..(294): unsure at all n locations
agctntgataaagaaggcgatgggatgttcctattgtgacaaaaccgcccccattccgactctcaacgcgtttgtttccactgtgaatggaaggctgaactcatgcaaggccagcacaggcgccgtcgacaatgcatgtttgagattgtcaaaggccaaatgagctngcggggtccagtggaagggatcaacantgatgaactagactaacggagttgcaatcgttgcatatccactaatgaagcgacgataaaatcctaccacactaangaagctttgcacagcttttatgga

SEQ ID NO: 948 - DNA, 393 bp, Glycine max
  unsure (1)..(393): unsure at all n locations
tactcccgcttaataagtgcatntgatgtagctccatgtagagcttgtaggccttggatcttcttcatcaatggagtcctttgcttcttgaatatcaatggtagcggaatggagaagggggaaaggtgattggagacgccacgtcaaggagaagatgagtcaagaacaagctcaccaccatatgaagccatggataagagcttgaacgtaagagaagataaatagagggagagggagagaaggggcacgaaatttatgcctcaaatgaggtatgacctttgaagtgtaatttctcanataatcaaagttgaaaattgcacacacatggcctctatttatagcctaagcgttacacaaaattggagggaaatttgaatttctattcaaatttca

SEQ ID NO: 949 - DNA, 421 bp, Glycine max
ttagaaaatgatttctataccaaagttagtcgtataatgcaactaacaaggatgaagctttaagtgtgattcctttctttttcttatcattctcctcatgttgattcagtctcattagatccatttcgtgttcctataactttccaaataaagttgcaagagacatgttagaaagatcccttgattctgtaatagttgttacctttggttgtcattccctacttaaacatcttagaactttattaataagatcctcattgggaaatatctttcctaatgatgcaagatgatttactatgtgtgtgaatctcttttgcatatcatgtatagtttcatttggattcattctaaacaattcatattcatgggttaaggtatttattctagacccttttacatctatggttccttcatgggttac

SEQ ID NO: 950 - DNA, 398 bp, Glycine max
tgaaggtaggagaagatgagtggagggagaaggagagaaagagcacgaaattttatgcctcaagtgaggtctaaaatttgaagtgtaattctcaaatgatcaaagttgaaaaaaatgcacacacatgacctctatttatagcctaagtgtcacacaaaataggaggggaatttgaatttctattcaaatttcacttgaatttgaatttaaattggtggagccaaatttggagccaaaatttcactaattatgattagtgaattgtagctatgattcaacccactaatccaagatcaagtccaagattctccactaagtgtgcttatgtgtcatgaggcatgtaaaacatgaaggatatgcacaaagtgtgactatatgatgctgtaatggggagtagc

SEQ ID NO: 951 - DNA, 383 bp, Glycine max
agcttcttggcaatccccattccagcgatcagtttggtttttgcgtaagagcttgaacaacggctcacaaatggcggtgagctgtgatatgaatctggcaatataattcaagcgtcccaggaagcctcggacttgcctctcagtacgtggttctggcatctcaaggatggccttcaccttttcggggtctacctctatccctttctggcttacaatgaaaccaagcaatttccctgatttgaccccaaaggtacacttggcggggttcaaccttaactgatatttcttaagcctttcgaacaacttccgcaggttgacaaggtgttcttcctcagatttagatttagcaattatgtcgtccacgtagacctcgatctcttgat

SEQ ID NO: 952 - DNA, 421 bp, Glycine max
  unsure (1)..(421): unsure at all n locations
agctntataagcaaaaagtaaaaatctatcatggcgaaaagctatcaaaaaggaatttttagcttggtcaacaggtattgttatttaattcttgattaagattgtttccaagtaagctgaaatccaagtggtctagaccattcatcatcaaagaagttatgccatatggagcagtgatattggaggacccaaccaccaaaaggacatggaccgtgaatggtagaagaatcaaacactacctaggtggagatttcgagaggataatcactgttgtccagatgcaaaaggcttgaaccataacgaagacgtccaattataaagacgttaaagaagtgctcttgggaggcaacccagtgttttttaaactttgtcttaacttgtgttactttaatcttatgccttatatatctaanacttactt

SEQ ID NO: 953 - DNA, 409 bp, Glycine max
  unsure (1)..(409): unsure at all n locations
agctttataagcaaaaagtaaaaatctatcatggcaaaaagctatcaaaaaggaatttttagcttggtcaacaggtattgttatttaattcttgattaagattgtttccaagtaagctgaaatccaagtggtctagaccattcatcatcaaagaagttatgccatatggagcagtgatattggaggacccaaccaccaaaaggacatggaccgtgaatggtagaagaatcaaacactacctaggtggagatttcgagaggataatcactgttgtccagatgcaaaaggcttgaaccataacgaagacgtncaattataaagacgttaaagaagtgctcttgggaggcaacccagtgttttttaaactttgtcttaacttgtgtactntaatcttatgccttatatatct

SEQ ID NO: 954 - DNA, 374 bp, Glycine max
agcttcttataccaatgtcacgaggagtgtggtagtcagattcatcaagaaggagctaatttgtcgatgcggactccctaggaagatcatcactgacaatggcaccaatctgaacaacaagatgatgtaggaaatgtgcgaggatttcaagatccagcatcataactccaccccttatcgtccaaagatgaatggggctgtagaggctgcaaataaaaatattaagaagattgtccagaagatgaccgtgtcatacaaagattggcatgagatgttgcctttcgccctacatggatatagaacttcagtacgaacttctactggggcaacgccgtattccttggtttataggatggaagcaatactcctatttg

SEQ ID NO: 955 - DNA, 338 bp, Glycine max
agcttggaaaatggcagggcaatcttgctaaaatcctggatgaatctcttctaaaaacttgcatgtccgagaaaagaacgtacttcctgcatagaagcgacgtaaggaagagaagtaataacatcgatcttggccttatcaacctcaatacctttactaaagaccaaatgccctaagactatacctttatggaccataaaatgacatttttcaaagttaaaaacaaggccaatctcaatgcattggtcaaaaaatctagagaggctactcaagcaacccacttgagatttttcactccctttgtaaaaatcgtttacaacttctgaaccacacaggga

SEQ ID NO: 956 - DNA, 423 bp, Glycine max
  unsure (1)..(423): unsure at all n locations
agctnttaggcagtaaaatagtataaaatctaatgaaagaaaaaataagttggaggaaaataatcataagctacaaatgttcaatttcataaaaaataacttttttcttagaaagaaaagcattttgtaaatttaatttaggattccaaatatccaacttaattgtttcggaaaaaacttaaaaaaaaacagttaaaattttagattatgagttctcccaaacattttaatcacataaccttatatttcctagattaatacttaacctttctactatttttgtcccttttttttctctcttcttcaatcaatttaattctctcacaatcttatctaatattatcaagtgtcttaatttagtcatatttactatatttttttaaataaaatgtttaataaaaaaattaatgaaacatataaagc

SEQ ID NO: 957 - DNA, 417 bp, Glycine max
agcttcttagtcttggctgatgaagatgaattcgtgtttacttcatgcactcctctaatgacaatagcatcatcacttctatcactaaattgatgggagtttgaagccatcttctcaattaaacttctggcttaagtaggggtcatgtctccaagggctccaccactggcagcatctatcatacttctctccatgttactgagtccttcataaaaatattggaggagaagctgctcaaaaatctggtggtgagggcaactggcacatagtttcttaaatctctcccagtattcatataagctatctccactgagttgcctaatgcctgaaatatcctttctaaaggttgtggtcctggaaacacgataatattttctaaaaagaatactctcttgaggccgcccatctcgtgatgga

SEQ ID NO: 958 - DNA, 418 bp, Glycine max
  unsure (1)..(418): unsure at all n locations
tagtaaatatggtccaatgaaggaggtgaagttttattgagaaggcaaatgggaagtcgaatggctattgtcaagttgagttatttgacccttttgctgctactacttgcaaggaagggatgaatggattttttttaattttaatttaatttttcattctaaattaattttaatttaattaaaatatgatgttatatcagatgacaagtggtcagcatacatgtcacacttaatctaacgtgatatcacaagtagtttgtcgacgtatcaaataaataaccacatcagcaattaatggatcctttntaacgacagagacctcatacaaaacttttaaattatagtgacccatctcannaatgaaaaattatgaggaatcaaatgtaaaattcaagtatatatcangggatcaaaatat

SEQ ID NO: 959 - DNA, 440 bp, Glycine max
ctcaagcttgtaggctacatttacaaccatacattggctttgaactctatgaggaaattcacactttaaactgaattagagacatggagttacaagatttgctaccactttcttaactttgcaaagattgcataagcaaaaggccaatcttagaaggatgtttaattcagatgaatggttgaagtctaaggcagctaaagagcccaaggggaagcaagcaacagatgttgttcttatgccatcattttggaatgatgttgtttatgctttaaaggctatggggcctcttgtaagtgtgttgaggttggtggataatgaaaaaaaacctacaatgggtttcatttatgaagcaatggatagggccaaagaagcaattcaaagagctttcaataacaatgaagggaagtataaggatatcctttgcatcattgataaaagat

SEQ ID NO: 960 - DNA, 366 bp, Glycine max
agcttatctgctataagttagaagctaaataactaaaagcttatattctctagctgatttaatttacagtatttaataagactaatatttaaaaaatataaatgtcaaatgatgaaaaattatatatttattatttctaacatttaaattttatgtctaataaatttcatcttaaaaagtaggtaaaattttaatctctttttgttggggtttcaatgctatacaatggattatgcataattttgatatttttatcatcaactctgatttagaaaccaaatattttaaccataaatccaaataaacaatgcaataattcattaaaataaatagtttgacattaaataaattaataaaaaagtagaa

SEQ ID NO: 961 - DNA, 278 bp, Glycine max
tgaattgaacaatggaagatcttgagaaattcaatcggtcttaacttttcactcggaagtccgattcacgcgcataatatattgagacgctctcgtgaaattcaaatggtcataacttttcactcagaggtccgattcatgcgcataatatatcgagatgcacataattgaacaacggaagctctcgagaaattcatatggtcataccttttaactcggagctctgatttaggcgcataatacattgagacgctcgaaattgaacaatggaagctctc

SEQ ID NO: 962 - DNA, 383 bp, Glycine max
  unsure (1)..(383): unsure at all n locations
agcttattggatagaatactccaagaggattgggctagagcagctaaagaaggccctaggattctcatgaacctcanggtaaaattttgagcccatgggccaaggctgggtccactcttctttgtaaatattagaataggttttctttcttttaggggttgtattttgatgcaatnctaccccttaagcttattggatagaagactccaagaggatcgggctagagcagctaaagaaggctctaggcttctcatgtacctcagggtagatttctgagcccatgggccaaggctgggtccactcttctttgtaaatattagaatagtgtttccttcttttaggccttgtattttgaccattctagtagtataggaatttaccct

SEQ ID NO: 963 - DNA, 374 bp, Glycine max
agctttggctattcaactatcataatttttgactcgaatgtatgatcgatgccgattatatatcccgacactcaaaatggaacaacagaagctcttgagaaattcaaatggccaaaacttttctctcggatgtctgattcacgtgcattttatatcgagaccctcgaaattgaacagggaagttttggcaaatatcaatggccatattttttagtcgaatatatgatcgacgcccatgaaatatcgagacgctcaaaaatgaaataagacagctcgcgagaaattgaaatggttataactgtttacctggatgtgagatttacgcgcataatatattgaagttttgaaattgaaaacgaaaagtgttggctaat

SEQ ID NO: 964 - DNA, 381 bp, Glycine max
  unsure (1)..(381): unsure at all n locations
agcttattttcatcaaatcttatgttaataacttcttcaactaccaaggttcttgagttatacactctgagtgcctttgaagtttgaaagtatccaagaaatatctcattatcacttttcgagtcaaattttcccaagttgtcctttgtgttgagaataaaatatttgcatccaaatggatgaaaatatgttatgttgggtttcatcccttccataattcataaggagtatttttaaggttaggtcttatgtaaattcttttttgaagataacaagtagtattcactgcttcaacccagaagtgtttaagggttgaattatcattaagcatgggcctagtcatctcttgtagatatctattaattntttcaattacccctg

SEQ ID NO: 965 - DNA, 421 bp, Glycine max
tatcataggtggggtagttgagggaggcactatgaattttttcactaaaataatttatagggtgcccaccttgtaacaatacagctccaactcccactccagtggcatcacattctagctcaaaaggtttagaaaagtcaggaagagctagaacatgttccttattaagcttttctttgagaaaagcaaaggcttgctcttgtttttcacccaagtaaatgccacattctttttcactagctcattgagaggtgatgcaattgtagagaaattaggaacgaaccttctatagaagcttgctaacccatggaagctcctaatatctcccacactttttggggtgggccattcttggatggccttgatattctcagggtccacttggaccccatttctaccaactaccaaccctaagaaacta

SEQ ID NO: 966 - DNA, 412 bp, Glycine max
agcttgaagagaatggaagagggaggatattaaaacttgagatagcaacatggaaagaaatgaaggtgtttatgaggaagacattcttaccaccttcttgtgagaaagatgcttatgaaaggcttcaaaacctcacacaaggtagcaagagtcttgaagagtaccatcaagaaatgataatgactatgaggagagctaattacaagagcctaaaacttccatggcaaggttcctatgtgggcttaatagagacattcaatgcattgtgaagttgaagcactatgaaagtttggaggatatggtgcagaaagccaagaaagtggagagacaacctgagaggaagcattcctacaagaagacctatcactatgacttttctagtggtaaagacaagtccaagaaggagggatct

SEQ ID NO: 967 - DNA, 361 bp, Glycine max
tgccgcgacacctaaattcgatgtacggcaaatcctcatgcgggatcagttggaacatggatgccagagtggcaagggcatcggccatctaattctccactctggggatgtggtgaaaggatacatcatcaaagtactctatcagttttctaatgtaggcctggtagggtatcaacttatgatccctggtctcctattctactttcaattggtggattaccaaggctaagtccccatataccttgagcaacttgaccttgaagtcaatttccgcttggatcccaagggcatacgcctcatattcagccatgttgttcgtgcagtcaaagcccaacctagtcgtgaagggtatacattgatc

SEQ ID NO: 968 - DNA, 403 bp, Glycine max
agcttgacacaatttatctttctcaaacttgagtttctgaagaccaattactaagtctttcgtaactagatgagttagattatgcatattagtatgtgcagtcctacaatgccacaaccatgaatcatctattttactcaccaagcaactaagctcatgaaaagatgcatgctcaatattcagcatatagatgttacctattctcttaccaaggtggacaactttaccggatatggcttcacttatcagacaacaatttttgttgaattcaatcttgacacctttatcacaaagttgactaatgcttataagactatgctgtagtccatccacatataacacattctttatctgatttttgaggtgatcccctatatttccttctcccattatattacctttg

SEQ ID NO: 969 - DNA, 377 bp, Glycine max
  unsure (1)..(377): unsure at all n locations
tcaatttgcttggatagcaacttgttatgtgccaacaatgcatcatatgatgaaagttccagcacgcttcttttggttgggatgtccttcagcagtcttggactctgtgaagtatttcttcaagaatctttcaaccacttcatcccaagtcttaagactattacctttaaatgaatggagccatctttgtgcctctccagacatggaaaatgaaaacaagctcaatctaacagcatcttcatgcacgccagccagtctgacagtgttgcaaatttcaatataagtggctagatgtgcatacaggtcttcttttggcagaccatgaaacanattgttcttaatcaactaaattaatgaatgtggataggttatatttt

SEQ ID NO: 970 - DNA, 412 bp, Glycine max
  unsure (1)..(412): unsure at all n locations
tatgctgcaaacatttataatagaccctctcagtagcttaaccaacaacaatataataattatgatctttcaagcaacagatataatccaggttggaagaatcatccaaatctgagatgggcaagtcttccacaacaacaacagcctgtccctcctttccagaatgctgctggttcaagcaggccatatgttcctcctccaatgcagcagcaacaacaacaacaaagacaacaagcagctgaggccccttctcaaccttccttagaggagttagtgaggcaaatgatcatccagaatatgcaattntagtaagagacaagagcctccattcagactctgacanattagatagggcagatggctacttagttgaaccaagctcagtcccaaaattctaacaaattgtcttcac

SEQ ID NO: 971 - DNA, 404 bp, Glycine max
  unsure (1)..(404): unsure at all n locations
agcttgttgatctcttcatgatgatcaacacaatattgcatttgctgcttcaattttgggctgcagatttcataagcaatgcatttagtatgtttacttggtaggtttaaattttcaataaaagtaattaatttttttagaatttaattttttatgcaaggtcaatgtgagttcttgttacacaaatgtaattcattttattaccatattacccaattcattaatatgatgcagtgaatttgtattaaaaaaatatacttttaattatatataatatagaagttttagcatttagcaactcactctttaacacatttttatataagaaattntattatacgttaaaatttattanaaaatataaaagaaaaaagactcacaaaaattatgaattttaattaatt

SEQ ID NO: 972 - DNA, 404 bp, Glycine max
tataatatattgatatgctcgaaactaaacatcggaagctctcgagaaattcaaatggtcataacttttcacacggatgtccgattcgggtgcataatatgtcgagatgcgtcaaagttgaacaacggaagctctcgtgaaattcaaatggtcataacttttcacactgatgtttgattcaggcttataatataacgatacgctcgtaattaaacatcggaagctctcgagaaattcaattggtcatcacttttcacacggatgtccgattcgggtgcaaaatatgtcgacacgctcgaaattgaacaacggaagctctcgagaaattcatatggtcataacttttcactcggatgtccgattcaggcgtatcacatatacagacgctcacaatttgacaacgg

SEQ ID NO: 973 - DNA, 398 bp, Glycine max
  unsure (1)..(398): unsure at all n locations
tggtcacctcctttntcaccacatctagaatgatggggttgagtcgttgctgtggctgcctcactggcttagctccatcctctaaaagtatcctatgcatgcaggtagatgggctaatgccaagaatgttttctaaagtccatccaatggatttcttgtgcttcttgagcactagcagcaacttctcctcttgctcagtagcaagggaggcanagatgatcactgtanattnttccttgtcctcacagtaagcatacttgaggtttactgggaaggacttcaactctggtgtgggtggtggctgaacagtgngaggaaccacngtaggagaagaagaaaaacgttctcggcttgtacctcataaagcaagtaagaagatatgtaccttctgcaacatg

SEQ ID NO: 974 - DNA, 365 bp, Glycine max
  unsure (1)..(365): unsure at all n locations
tattgggcattaaagtttttgaacttcgattcanatgcatctagtgaacacaggaagctcccactccatganatggaagaattgtggtttccagcttatgagaattcccagctttataagcaaagaagtaaaatttatcatgacaaaaaagttgtcaaaaaagaaaattttcagctttggtcaacaagtattggtatttaattatagattaagattgtttccaggtaatctgaaatccaagtggttcggaccattcatcatcaaagaagttatgccacatggagcagtgatattggaggacccaactaccanaaggacatggaccgtgaatggaacataataaacactagttagatgatatttca

SEQ ID NO: 975 - DNA, 380 bp, Glycine max
tgtaagaattgcaagatcatcttccttgacaactccttgataattattgccatcaatacgcagagatgacaatttagagagtgatccaatactttcaaatggatttccactgaatttattaatagacagattgagatatcttaatgatgaaagttttccaaatgatattggaagagcaccaccaattaagttgttggaaaaatctagcatgtcaatatttttaaaagccccaatttgatctatcagattgcctgaaagttgtgaactccgaactgcaagtgttgtgattccctatgaaatacaaggagcaagaatttctaaaagttcattaacctgttggttgagtttgagatatgataaacctatcttccttaagttgc

SEQ ID NO: 976 - DNA, 389 bp, Glycine max
  unsure (1)..(389): unsure at all n locations
agctngctccactatatttggattggatcataaagtttgcacccctgaatcaataacattntgttcactcattgatggcttggccagacatggcaaggtgaatgatgcctatatgctttatgaaaaaatgttagattatggtcagactccaaatgcagtgttgtatacatcccttattaggtactttttctcgtgtggtaggaaggaagatgctcacaaaatttataaagagatgatgtataagggctggtctcctattccttgctccttaataattacatggattgtcttttcaaagctggtgaaattgagaaaggtatggctctatttcaagagataaagcctcaaggtctaacttctgatgtaagacgtattcaatttttattcat

SEQ ID NO: 977 - DNA, 409 bp, Glycine max
agcttaaagataaattaagaataatgattgaatatcttatcttatattctgataatatattctatcaaatacaaactgattagttaggctaaaaatactgatataatatcttatcatatattctataactcgtaaattaccccacaaaaattatttacttcgaaatcttctagctgaaatttcttggacaaatttccaaattcaattgtaagcattattatcacagtttcagataaaacaaaaataacattacctctctactcttataatccatacaaaaattatcatattaaggctatgcaacttcttctgaattctttttaaccacttgatcaagcataattaaaatatccaatatccaatgtcaatggataaaaacatgtagaatgggagtataattctacatgtt

SEQ ID NO: 978 - DNA, 333 bp, Glycine max
tgtccaaaatgcagacaataataatttttaactcggatattcaattgagtattgtaatatatcgagacgctcgtaatggaaaacagaagctcgtataaaatgcaaatcgcaataacttttaactcggatgatcgagtgggtcccgtaatatatcgagacacttgaaattgaaagcagaagctctgagcaaattcgaacgacaataacttttgactcggatatccgattgagtcatttaataattcgagacgctcacaactgaatacacaagctctaagcttattcaaatgacaataacttttgactctgatgtccgattgaggcattatataa

SEQ ID NO: 979 - DNA, 305 bp, Glycine max
agctattgtattcaattttgatgcgtctttaactattaaatgactcaatcggatatccgagtcaaaagctattgtcgtttgaatttgctcagagcttctgcttgaaattcgagtgtcttgatttattacgggactctatcgatcatccgagttaaaagttattgtcttttgaatttgcttagagttactgttttcaatttcgggcatctcgatatactacaggactcacttccacttttcagtaaaaagttattgccatttgaattttgtgagagcttctatattcaatttcgagcgtcctgaat

SEQ ID NO: 980 - DNA, 396 bp, Glycine max
agcttgtgcatccaataccttgatgaggatgtcccatatgttcttaagactggactgattcatttgcttccaaagtttcatggccttgcaggtgacgacccgcacaaacatttgaaagaatgtcacattgtctgctccaccatgaaacccccagatgtccaagaggatcacatatttctgaaggcttttcctcattcattagagggagtggcaaatgactggctgtattaccttgctccaaggttcatcacgagctgggatgaccttaagaaagtattcttagaaaaatttttccctgcttccaggaccacatccattaggaaggatatctaaggtataagacaactcaatggagagagccttgttgagtactgggagagattaagaaactatgtg

SEQ ID NO: 981 - DNA, 240 bp, Glycine max
  unsure (1)..(240): unsure at all n locations
agcttntcggtatattatgcacctgaatcagacctccgggtgacaagttatgaccatttgaatttctcgagagcttccgttgttcaatttcgagcgtctcgatatcttatgcgcttgaatcggacctccgagcgaaaagttaagaccatttgaattgctcaatagcttccactattcaatttctagcgtctcgatatattatacgcctgaatcggacctccgagtgaaaagttgtgacca

SEQ ID NO: 982 - DNA, 257 bp, Glycine max
tctcgatatattatgcgcctgattcagagtttcgtgtgaaaagttatgactcttggaatttctcgagagcttccgatgttctatttcgagcgtctcgatatattatgcacctgaatcggacttccttgtgacatgttatgaccattttaggtactcccgagattctggtgttcaatttcacacttctcgatatattatgcggctgaatcagacttccgtctgaagagttatgaccatttgaatttatcgggagcttt

SEQ ID NO: 983 - DNA, 302 bp, Glycine max
agcttctcgatatattatgcgcctgaatctgactttctgtttcagaagttatgaccatatgaatttctccactgtattccgtgtgacaagatatgaccatttgaatttctcgatagcattcgttgttcaatttcgagcgtctcgatatattatgcgcctgaatcggacttccgtgtgacaagctatgaccatttgaatttggcgagagcatgcggtgatagatttcgagcggctcgatatattatgcgcctgaatcagacattcgtgtgacaagttatgcgcatttgaatttctcgagagca

SEQ ID NO: 984 - DNA, 414 bp, Glycine max
  unsure (1)..(414): unsure at all n locations
tcaagaataatggcctcaacaaacttcttattcatagaaggaaattcaattaataggcctcctacttttaatggagagggttaccattactggaaaacccaaatgcaaatcttcattgaggcaatagacttaaacatttgggaagccgtagaagtacggtcttatgtacccactatggtggctggaaatgcaacaatagaaaaacctacagaagagtggactgaagatgaaagaagattagtgcagtacaatttaaaggctaaaaacatcattacttttgccctaagaatggatgaatattttagggtttcaaattgtangagtgctaaggatatgtggcacactttacaagttacacatgagggcacaactgatgttaaacaatctangatacatactntaactcatgagtat

SEQ ID NO: 985 - DNA, 404 bp, Glycine max
agcttcatgcttaagtatgtatggcaaaatcttattactgttgttcaagacatacaagtgagcttgtaacaaatcttctagacttggagtgatcacatgtagtcctcttgaacccttaccacccactcaggaaggccaacaggtttagccttctcaatgtattttgaacaaaattcaatggcttcttctgcaatgtacctttcaacaatagatgcttctggatgatatagattctttgtatacccttttaagatcttcatgtatcgctcaaccgggtacatccaccgcaaataaacaggaccacaacatttgatttctcttaccagatgcacaatcaagtgaattgtgatgtcaaaaaaagcaggggggaaaatacatctccaactggcacagtataattggga

SEQ ID NO: 986 - DNA, 369 bp, Glycine max
gttttagtttcagatgatgcttatgggtttgtagctacctcatgcactcctctaatgactatggcatgatttctggcgctaaactgctaggagttggaggccatcttctcaattaaatttctagcttcagcaggagtcatgtctccaagggctccaccactggcagcatctatcatacttctctccatattactgagtccttcataaaaatattggagaagaagctgttctgatatctgatggtgggagcaactggcacatagtttcttatatctctcctagtactcatacaggctctctccactgagttgtctaatacctgagatatcctttctgatggctgtggtcctcgaagcagggaaaaaattt

SEQ ID NO: 987 - DNA, 332 bp, Glycine max
agcttgggggagccttgatgctctcatagggaggcttagggctgcttatgaggaaaatggtgggtccccagagactaacccttttgcaagtggctccatcaaggtgtatctcaaaaaggttagggagtgccaagccaaggcaagaggtatcccttacaagaagaaaaagaaggcctcaaatcaaagcaagggaaatgatgaatcatcctccaccatgcacttctcttgaacaacatcttcagtatcgatccctttggacctttcaagtcatggtaattaattaattaactaatcttgcttgccatcacactcatgatcataaactatgctta

SEQ ID NO: 988 - DNA, 412 bp, Glycine max
  unsure (1)..(412): unsure at all n locations
gtaaccccccttntaaatgataggcttagaatgcagattaagacgaagaagaagaagaagaagaagaagaagacgaagaagcaatcaatttaacaatgttcttttaaatgcgtaagatcaaattgattgcgataaaataaatgagataagggaagagagaaatgcaaactcaatttatactgggtcggccacttctcgtgcctacgtccagtcctcaatcaactcacttgatattttcactaacttcgtaaaaaaacctttttacaacttctgaacacccaaggaatccctttcccttgtgttcangaaactcacaattcaagagacaaccagtctcttgattacaacttactttctgagatgaatataaagatttctctcctttagagtggataatacaacttgatgttct

SEQ ID NO: 989 - DNA, 400 bp, Glycine max
  unsure (1)..(400): unsure at all n locations
tgtgagcaagctntcttggccttcatgaagactattgccatgccgccagtcctaagtcgactcaagccaggagtaccttcacttctatacctctcagtggctgacaaagttgtaagcttaaaccttgtacaggaggacgggaaacaccagcttcccatctattttaccagtcgtatccttcatgatgctgaaaagtggtaccagatgatagagaaggtagtgctggcactcataacctcagatcgacgcctcaggttgtacttccaaagtcaccaagtggtagtcaagacaaactaccctgtcaaacaggtgttgtgaaagcctgaactggaggaaatgatggtattatggtcctaagtcgacccaagctaggagtacctttacttttatacctctcaat

SEQ ID NO: 990 - DNA, 335 bp, Glycine max
  unsure (1)..(335): unsure at all n locations
cacctgcggcatgctgcttggcaaggcataagcatatgatcctaagtgggtaaaggcgcacgatctatgtgccgaanagggtttaaaactacagggtgggttaggctattttaattatatgctatcttgctattttgaattttcttcgaattggtatttttgttttgatatttgaaatagctcatctttgaagagtgatatgtacaaaccccaatttgctgggtttgtagatgtggatttggccgcagataagaacatttttcttaagagtttggtatgtgaaaattcaattcatttggtgcttatatatagccattatgagctcgaanatacta

SEQ ID NO: 991 - DNA, 316 bp, Glycine max
gctacctgaatgcccgcatcgagaattaatatgccaagagagatttttctgtctttgaagaaggatgtgcggctctcatcaatgaggacctgtataacatgcctcagcctatttgctaataacttagcgatcaccttgggcatacacccaatcaaagaaatggggttgtgatcatcaaaagactgatggtgattaactgtgggaagtaaagccaaaagagaaacattactgcctatagggaatcttccatgcacaagagaatcatgtacaaatcttctggagtcaattattaccactccccacaattacttaatga

SEQ ID NO: 992 - DNA, 318 bp, Glycine max
  unsure (1)..(318): unsure at all n locations
ntccctctntgaacaaatacctctcagccaaatagaattcatcttgtgcctttttcccacaactcttgtaaatgggagagaaatgttcatctaaagcatacaagtccctaatgttatcaaatcctaaaatttgagctcctatggagcaaaacaatgtgtgtctcctaaagagggcatcaactacaacattttgttttccctttttgtatttgataacatatnggaaatgctctangtactctacccattttgcatgccttttgtttaacttgctttgccatctaatgaactaaatgattgatgatcactatgaatgac

SEQ ID NO: 993 - DNA, 408 bp, Glycine max
  unsure (1)..(408): unsure at all n locations
gaaaaatctagtctttgtgggtgtcgtggatctaatttgttttncttcctgtgttgaaaatggagctntgcaaattagaggaaaaatgaactttatggtaatgcaaaggactaaagcaaggaaagttgtacatccttctanggtccactataacaggctctatcttaactatttcacaagctgggagccatgcgtccaatgataatttgttgtgacatctgtgtctagcccacatgagtgaaaaaggactggaaattatgagcaagcgaggcttacttggaaatcacaatgtggaacctctttagttttgtgagcactatgtctatatgaagcaacatcgaaagaaattcccaaagggtttgtagactaccaaagtcacattggactattgccattcttattgttggg

SEQ ID NO: 994 - DNA, 333 bp, Glycine max
  unsure (1)..(333): unsure at all n locations
tccgttgctcaattgcaagcgtctcgatatattatgcttctaaatcggaccttcgagtgacaagttatgatcatttgaatttctcgatagcttccgttggttaatttcgagcgtcttgatatnatacgcgctggaatccgacctacaagtgaaaagttaagaccatttgaatttctcaagagcttccattggtcaatttaacccgctcgatatttatgtgcctgaatcggacctccgcggtaaatgttatgaccctttgaatatctcgagagcttccattgtcaattgcgaccgtttctattgtgatgcgcctgaaatggaccaccgagtaaa

SEQ ID NO: 995 - DNA, 326 bp, Glycine max
  unsure (1)..(326): unsure at all n locations
agcttctgtattcaattttgagcatctgtatatattacgggtactcaatcggatattcgagtaaaaattaattgtcattagaatttgctcagaagatttattttcaatgtcgagcatctcgatatattacgagactcaatcagacattcgagtaaaaagctattgtcataagaattgcacagagcttctctttttaattntgagtgtctcgatatattacgggactcaatcagatatccgagttaatagttattgccgtttgcgtttgctacgagcttccggttcaattactagcggctcgatatattatggcactcaattggaca

SEQ ID NO: 996 - DNA, 312 bp, Glycine max
agcttatgctgcaaacatctacaacagacctcctcaaccttatcagcaaaatcagccacaacaaaataactatgacctttcctgcaacaggtacaatcctggatggaggaatcatcccaaccttagatggtcgaatccttcacaacatcaacaacaaccttattttcaaaatgttgctggcccaagcagaccatacgttcctccaccaatccaacaacaacaacaacaacagccccagaaagaacaaacagttgaggcccctccacaaccttcccttgaagaacatgtgaggcaaatgactatgcaaaacat

SEQ ID NO: 997 - DNA, 167 bp, Glycine max
tgcacccgaatcagacataagtgtgaaaagtcatgactatttgaatttctcgagaggttcgcgtgttgaaagcttagcgtctatacatagaattaccctgatctggacctgagagagaatagttgtgaacatgagaaatggacgagagcttccgaggttcttttata

SEQ ID NO: 998 - DNA, 361 bp, Glycine max
aagctggaatcatttattttatctccgatagtctatgggttatgtccgtccaggtagtgccgaagaatactggcctcacagtgatcataaatgagaaggaggagtttattcctactcaggtgcagaacagttggagagtctgcattgactattggaggctgaaccaggctaccaaataggaccatttctccctgccattcattgaccagatgcttgaacgcctggcaggttaatcccactactgtgtcctgatgagtttctggtatatgcaattactattgctctgagatcacgaaagaccacttacctgcccataggactttgctataagagatgccttctgctggcatgcccctgtcct

SEQ ID NO: 999 - DNA, 356 bp, Glycine max
  unsure (1)..(356): unsure at all n locations
tcgaatgggcatcgtttcatcttatttgccaatgatatctttaccaaagggtggaaaccggcctcatatgctaacctgactaagaatgtggtggttagaattcatcagaaggagataatttgcagatatgggttacccaaaaagataatcaccaataatgccaccaatttgaacaacaaaatgatgaacgagatgtgtgagggattcaagaaccaacaccataattcgacgccttatcggcccaagatgaatggggcagttgaggcttgccaataaaatatcaagaagattattcagaagatgacaatgtcatacanagaatggcatgaaatgctacccgtcgcattacatggtta

SEQ ID NO: 1000 - DNA, 387 bp, Glycine max
  unsure (1)..(387): unsure at all n locations
agctntntgttgtttttgaaaaatttattccagacttcggataaactttaatttatggctaattcaagaccaactttttgatatatttcttgctaggactatccctaatcctagggataattagtaggaccaaataaatggaggttgtcgaattataccacatgatttcagcaacaacaaaagttgcaataaagacaacaatgatattttttttattgcaataaagacaacaatgatatttatggacattatcaatgtttcccatgtgtaatcctttatataaaccttgagctggtcacacagtaagatgaaagagaccccgntaatatattatctaacattctgcaatgatgataaactatttctcttcttcttcaaaaaaaaaaa

SEQ ID NO: 1001 - DNA, 338 bp, Glycine max
  unsure (1)..(338): unsure at all n locations
ntgatgttatttttttatgcatcgctntgattttntgttttaatgttngtgctagtccaaatttttttttaataattttcttttaataaaactcatttcatgatattttgcaaagtgatgcatatcaagctattggctactaaaatttcttacctcaatgattattcaagtcaatagtgaaatagcaatgggtgcaaccatttccccaattctgcataccgaaactcccagttcaatattagtgtacttatctggaaggataatcccaagaatcttcctagtgattaatctgcaaatggaaaccagcctttaagcatctggggtctcatctcattatt

SEQ ID NO: 1002 - DNA, 360 bp, Glycine max
agcttagctaagccaaagtcagagatcttggcattcagatccttgtcaagtaagacattggttgccttaatgtccctgtgtactattttcaaccttgactcctcatgaagataagccaatccccttgctatccccacacagatcttcattcttgtgggccaatacaagtgcagcttctgttcatgttcacctacgggaaatgcggggggaaaggaaataagctttttctgttatatattgattttgaagcagaaacatacacacacaaacacaaggtatatgttgcccgtaaagcatttaccgaaaagtgcacgagcaagactggtggtctccatgtattcatatataagtagcaactgg

SEQ ID NO: 1003 - DNA, 222 bp, Glycine max
agcttgaccaggaattatttgtatgggttggatgttgaattccggttgttcctggtgcggagatgatggtacagcgggtgaaccaaaagcggaagtttcttttggtgaggtagccatggaaaagcagagcgtttggaatgatttcgtaaatctcagaaggctattgggaaatgctggtaaaaacacgaatgccaagcagatataaatttgaatgaaaaatgt

SEQ ID NO: 1004 - DNA, 296 bp, Glycine max
  unsure (1)..(296): unsure at all n locations
agcttctatgatccgtcaaaatttcaatgtggtgccccaataggtattgcctccacttcttaacagcagtggtaatggcagctagttcacgaacataggtgaaggagctgagtaacttatggcaaaactgtttgctaaagaaagctattaagtgtcttcctttgtgacaacactgtgcccattcctgagtcggaggcgcctgtttccaccacgaagggtttggtgaaatcaggaagtgctaatactggngaattattcacgacattcttcaagttttggaaggcaactgtagcttc

SEQ ID NO: 1005 - DNA, 279 bp, Glycine max
  unsure (1)..(279): unsure at all n locations
agcttcagagtgatgctntgcgtgaagccatttcangaatcatggcttattcccaggagaagaatcgcaaatttgtggagaccatcgaactccaaatcgggttgaaaaactacgatccacagaaagacaagcgtttcaagggctctgtcaagctgccccacattcctcgccccaagatgaaaatttgcatgcttggtgatgctcancatgttgaagaggtctctatttgccatattcatcaagactcttaatggatcataactatttcatgataattag

SEQ ID NO: 1006 - DNA, 386 bp, Glycine max
  unsure (1)..(386): unsure at all n locations
tcaaacttgcaacaaaggagttgagcaggtaaaaaagattcgtcttcaaactcttagaggtgactntgagcgtttgtttatggaggaatccgagtcaatttctgaatatttttctcgagtattggccgtagtcaatcaacttaaaaaaaatggtgaaaatgttgatgaggtgaaggtcatggaaaaatacttcgaactttaaatccaagttttgacttcattgtaccaacattgaaaaaacaaggattaaagaccatgactattgagcaactcatgggttccttacaagcatacgaagagnaataaaagagaaaaattaaacaaaatgaggctactgagcaactactacaactcaacgtaagggagcaaactatgcaaattacaag

SEQ ID NO: 1007 - DNA, 274 bp, Glycine max
  unsure (1)..(274): unsure at all n locations
tactcaagcttctttcgaattcaaactgccataactttctgctcggatgtttgattgcagaccataatatttcaagatgctcaaaattggagatggaagtcccagataaattcaaactgccacaacttttgactaggatgtctgactgcggcccatcatataacgagaccctcngaaatgattatggaagctccgagcanattcaaattgtcataacttttgaatcggatgtctgactacagaccatactatatcgagaaactcgaaatgaaca

SEQ ID NO: 1008 - DNA, 371 bp, Glycine max
  unsure (1)..(371): unsure at all n locations
cgggatccttaagcacctgagctgcagcttatgcttattatgtatggcaaaacttcattattggtggtcaagacatacaagtgagcttgtaaaaaatcttctacacttgaagtgatcacatgcaatcctcttgaacccttaccacccactctgtcatcatgccgagacttangaaggccaacaggtttagccttctcaatttattctgaacaaaattcaatggcttctttagcaatgtacctctcaacaatagatgcttctggatgataaagattctttgtataccctttcaagatcatcatgtatcgctcaaccgggtacatccaccatatgataacaggaccacaacatttgatttctctgactagatg

SEQ ID NO: 1009 - DNA, 377 bp, Glycine max
  unsure (1)..(377): unsure at all n locations
agcttgggggagccttgatgctctcatatggaggcttanggctgcttatgaggaaaatggtgggtccccagagactaacccttttgcaaggggcttcatcaaggtgtatctcaaagaggttagggagtgccaagccaaggcaaagaggtatcccttacaagaagaaaaagaaggcctcaaatcanagcaagggaaatgatgaatcatcctccaccatgcacttctcttgaacaacatcttcagtatcgatccctttggacctttcaagtcatggtaattaattaattaactaatcttgcttgccatcacactcatgatcataaactatgcttaactaggatgattaactcaatgcggtgctaggatctagttttttt

SEQ ID NO: 1010 - DNA, 314 bp, Glycine max
  unsure (1)..(314): unsure at all n locations
agctggcttaaagacgtctttgatcaattaattattntanaacctagtgaaatattaactaaaaaaagaaacttataaaatttagtatgagtaatgtacaaatccaaaaataattgataaacaaaatcatattaaattcaagtcattaaaacacaaagtatataaaaaaaatgaacaaaagagagcataatattaaaaaatacatacaaagacaaggaatgactntaactangatgggtaagactatttggtgtagatacaagaacttagagaaagaaaatgaattaaaagagtgagaatgcanagggatgtgt

SEQ ID NO: 1011 - DNA, 258 bp, Glycine max
  unsure (1)..(258): unsure at all n locations
cactaagcaatcactacgcatagctctcaactcgaaggtggaagacacatgaacgataacgcaattcatggggctccgaaatgatngagaatggagaatggcactaagcaatcactacgcatagcttcaaaatggaaggtggaggacacatgaacgaaaacgcaattcatggggctccgaanaaggttgagaatggagaattgcactaagcaatcactacgcatagctccaaactcgaaggtggaggacacatgaatg

SEQ ID NO: 1012 - DNA, 439 bp, Glycine max
  unsure (1)..(439): unsure at all n locations
agcttggtcactctaatgtttggggaccaacatctgtatcataagttggtgggaaacaatactttgtgacttttgtagaaggtataagtttactttctaaaacacaagtcaaaattatttaaggcttttaagatctaaaaagccatggttgaaaatgagacagggttgaagatcaaaacgctcaaaactgacaatggtggtaaatatgaagacacaaaatttaagaggttctgctataagtatggaatcaaaatgaaaaggatngtatcacgtactcctcaacaaaatggtgaagctaagcatgtgaacagagaacattgacctaaagaaacagcctcagaagtgaagtgttgaggagcaacnaaaagctcggcacgagcccgagcttggcttaaagaaacagccttagcaacaacattcctattgcggcatctggtgg

SEQ ID NO: 1013 - DNA, 289 bp, Glycine max
agcttgtgagcaattcaaatggtcataactttacactcggtggtccgattcatgcgcataatatctcgaaatgctcgaaattctacattggacgctcttgagcaatatatatggccataactattcactgggacgtgcgattcaagcgcataatatatcgagatgctccaaattgaacaacacaagctctcgagaaattcagacggtcataacgtttcactcagaggtcggattcaggcgcctaatatatcgagacactcagaattgaacaacgaaagctctcgagaaa

SEQ ID NO: 1014 - DNA, 429 bp, Glycine max
  unsure (1)..(429): unsure at all n locations
agcttataaaattntccaaccgcanatggaaaaagtagtgttagcagggatgttcactntgtggaagatgaagaatggaattgggataatccaaggatgataaatcaagcccctggacatttgaacttaaactttcctgcaccaagttcaaaaaattggcaagatgagcttgttgatgatgttctagtaagaggtactagacttctctctgatatttatgacaggtgcaatattgttgtatgtgaacctgaaaactatgaagaagccaagaaaaatcaaatttgggttgctgcaatgaaggaggagctctcaatgatagagaaaaatcaaacttggcatcttgtagaaagaacctcagacaggaatgtgattggagtcaaatgggtatatagaactaagcttaatgctgatgggtctattaataaacat

SEQ ID NO: 1015 - DNA, 452 bp, Glycine max
  unsure (1)..(452): unsure at all n locations
agctntgtagagattgttccaactcccaacaagctataacagcttccatggcatgaacacggacatgttgttgcaattgttctttgaaagcacagagcagtataacataatgcgtctacaacgaaaataagagcaaaacttgtaaattaaggagcatcatgtgaaataattgagcccattgtcctgaaaactaaattcaatcatgggaattcatgaaaattagagaaattctaacaataaaaacacaattttagtgaattcacctctcatttaatgagttttcttaattntatagttntcaatggattnntaattattgatcaaatattgccttgctagccgtccttttaagaatatccaaaccaacattcagaagaaaggaactggagtatatgatnaacagataaccatgagtgctaacttaacaataatctttatctattttttttttt

SEQ ID NO: 1016 - DNA, 429 bp, Glycine max
  unsure (1)..(429): unsure at all n locations
gctataccctaccgggatgaaaaagctttaatagaagtcaagagcatgaaagtgtaacgataccgttaactagccagtaggttcttgggcgggttgaggacatcaatagtatatttggaaagaccaaaaagaaggaaaaaaagtaaaacttggatatggaagaagaggtcgatattgtttgatcttccataatggtttgatctaggtgcctgacattgtattgatgttatgcatgtggagaaaaatgtgtgtaatagtgtcatcgacatgttttttaacattcaaggaaagacaaaggatagtttgaatactcgtcaagatctagttgagatgggtgcatcctctagcttgtcatactntgtccagaanagagaagataagtttttgttagtgtctgtaacatgtgaaagtgtcacaaggatactcttc

SEQ ID NO: 1017 - DNA, 156 bp, Glycine max
agcttcttctcaataggatcatagaacctgtgactaaattcattctcaccataaccaatgaagataccactgccttgactttgcatccaacttggatctcttatcctttggaacatgcacaaaagccttgcagccaaaaactcaaaagtgatcaca

SEQ ID NO: 1018 - DNA, 286 bp, Glycine max
  unsure (1)..(286): unsure at all n locations
atggcttattccttatgcgcctgaatcgaacatccgagtgaaaagttatgaccattctaatttctcgatatcttccgttgatcaatatcgagcgtctcgatatgtgatgttcctgaatcggaccttcgngtgaaaagttatgagcatttgaatttctcgagagcttacgttgtgcaattacgagagtctcgacatgtgatgtgcctgaatccgaccaccgtgtgcatagtatgaccatttgatattctcgagagcttctcgccgttcaattgcgagggtctcgata

SEQ ID NO: 1019 - DNA, 387 bp, Glycine max
  unsure (1)..(387): unsure at all n locations
agctggcactaagaattctgattcaagttcctaatgtatcgagacattggttattgaacaatggaaactcccgagaaattaaaatcgtcattacttttcactcggatgtccgattcaggcacttcagatatcgagacgctcgaaattgaacaacggaagctctcgagaatttaagatggtcattactttacacatggaggtncgattcataaacatcacatgtcgagatgctcgaaattgaacaacggaagctgaagagaatttcagatggtcataacttttcacttggatgtccgattcaggcgcatcatatatcgaggcgttggttattgaataattgaaactctccagaaaataaaatggtaataactttcactcggattccga

SEQ ID NO: 1020 - DNA, 384 bp, Glycine max
  unsure (1)..(384): unsure at all n locations
agctnttcctctagttgctctggtaaggtttccaaatgttagagaatgaaaagagattgaagccttcattntgtactgtcttcgtgcgattcacttttctctcttgataaatagtatttcgtaaatcccaacggtagaagtgtttacaattgaatcgggaaccaggtgtccaaatttcatgacgatccaatggttaatgattccgggatcgtagttttactggacaggttttgagtctccgtgggaaaagagaaagctacaatgcaaaggagatttctcttagctccgacattctttcgcaatttctgatggngagaatgctcggaactgagttgaaatcagtgctgaatatacaacgatccacggttaaaagttgagatcgtg

SEQ ID NO: 1021 - DNA, 406 bp, Glycine max
  unsure (1)..(406): unsure at all n locations
ntataattgaattgtgaatatttgattggaatcattctatttagaaattgatttaagtaaaatatgtaattcaattaagttgatttataaaagttagtaatataaaagagaaatattntactcaaaaaaaggaaaatattctttgaattaaggttaatatataatactttaattgttattattattntatttattaaattattaacatgtaatcaattaatatttatttaatgttaatactaatagtaatagtaacatattattctgattggaatttatttttaattattttaattattattgaatcaaataatctaacataatgattcaacatctaaaaaataatgagttttgtataataatngatattatatataacaattcattaaatattaatatacacata

SEQ ID NO: 1022 - DNA, 439 bp, Glycine max
agcttctaaactttgtacaagaatgaagctctgttaccacttgttggacaagtggcctcagatatcttaagaaggggaagttgaattaagatattacaaattattttcccaattaaaaattctatttaactttctattcaagttattaattcccttaataatgaatttcttaaatattgattcaaatagaacaatttgaatatgaatataaaacaataataaatgaaggagtttaaggaaagagaaagtgcaaactcagatttatactggttcggccacacccttgtgcctacgtccagtccccaagcatcccgcttgagagttccactatcttgtaaattccttttacaagttctaaacacacaaggacaatccttcctttgtgtttagaattctttcacaacaagagaccctcggtctcttaatcccttttcagaat

SEQ ID NO: 1023 - DNA, 271 bp, Glycine max
agcttccatcaagttatgaccatttgaatttctctgagatcttccgggttcaatttccggcgtctccatatgtcatgtgcctgaatcggaccttcgtaagaaatattatgaccatttgaacttctctagagcttccgttgtttaatttcgagcttctcgatatctgatgtgcctgaatcggacatccgagtgaaaaggtgggacaatttcaatttctccagagcttcccgtgttcaatattgagcgtctcgatatgtgatggtcctgaatc

SEQ ID NO: 1024 - DNA, 403 bp, Glycine max
  unsure (1)..(403): unsure at all n locations
agcttagctccaaactctntgggtggaggatgaatgaacagcgcttggcaatgacattcatgggtctccgaataaaagtggagaatggagaattggcgtatagagctaggcaatcacattcgcggngctccagactcgaaggtggaagacacatgaacagcgctaggcaatgaccttcatggggctccgaaaaaaagtggagaatggaggattgcactatagggtccacacttaggcaatcatgaagcatagctcaaaacacgaaggtggaggacacatgaacagcgctaggcaatgacattcatggggctccgaataaaagtggagaatggagaattggcgaacagcgctaggcattgacattcgtggggctccacactcgaaggtggaggacacatgaaca

SEQ ID NO: 1025 - DNA, 404 bp, Glycine max
  unsure (1)..(404): unsure at all n locations
gtggcattagagcacaagagcttcaagtaggtgctccttaaacctccattaattntttttctttaccttctcttccattgntgtttcttcatttttctccatgtatctcctcacatgtcttgttctaaatgttgttaacatgattctttagagtttccaccgattaaacttgctatagaagctagatttgattttctatggttcaaatttcttgttcttgttcttgaaccatgaattgtgttgagtttaagttcctttgagtcttgtcttggtatatcttgtggctgatgttagtgtttggctctactgagctntaaaagaatggctaagaatttgttaaacataagcacttagacaatgaaggaaagctggagttgctgcacatgatgtccaacgttatgtca

SEQ ID NO: 1026 - DNA, 355 bp, Glycine max
  unsure (1)..(355): unsure at all n locations
ggctgaaagtcggaaatntattntattaaatcataaatgttttgtaaaattatatattgaagtagctaaaaaatgtaatattacataatgggcatatntatgtaatgatttatacaaattnntaattgattnntgtgacaaaatatattttgtagtatttataattttggtattaaattaattttaaacacttgtagctttttatttataaaatatccaaagaataaacaaaaactacataaacttattatatatcattatcactatcatatngttnttttatanattcaatatcatatataataaaagggtaaaatgagtaatcatatatatgtaaaaaggataaaataataag

SEQ ID NO: 1027 - DNA, 425 bp, Glycine max
  unsure (1)..(425): unsure at all n locations
cgcttggtaaaatagagaatggatccatctcatttgagatattcacatgtgaagagagcatcctatctaagatatttgtttcattctgccatatgaatatatcatgtgaaagtctatatatgatcaattaccggtcaaatatttgaagccaaaaaaagagaaagggaaatggtaacaataacgcacctcaatttgatcaaatgaccttaatcttctaaaacaaggagaatggctaatttcataatttgtgtgcaggttgctaaagaaagtgcagatgtcataattctggatgataatttctccacgatagtgacagtagccaaatggggacgttcagtttacataaatattcaaaaattcgtacagttccagcttactgtaaatgtgngtgcattactggtgaactnctcatcagcatgcatgac

SEQ ID NO: 1028 - DNA, 284 bp, Glycine max
taagcttgggttttcaactgcaagtccaggtggtatttgcatatacacttcttcttcaagctctccatggaggaacgcattgttgacatccaattgtcgcaagtgccattgattttgcgcagccaatgccagaagaacaccaaccgtagtgagttttgccaccggagagaatgtgtcgaggtaatctaacccctccatctgagtgtaacccttggcgaccaagcgtgctttatacctttctatggaaccatcagcccgatatttaatcttgtaaattcatctgc

SEQ ID NO: 1029 - DNA, 309 bp, Glycine max
  unsure (1)..(309): unsure at all n locations
ggagattcggtcctatggttgctaatggaggagttggaatggatgatggagggatgtcatctgctctagcccattttcttgatgccatctgtaactaaaaagaactcaaaattccttagaccaaatttattcaagtttaaaaatagaaataaaggctgaaattaatgatggctgatgcaatcctactccgcaagggcattggatagaaggctctaagaagaatgggccagagatgcaagagaagaccttanggttcccatgagccttatggtagattntgggcaaatgggctaagtatgagcccgctta

SEQ ID NO: 1030 - DNA, 284 bp, Glycine max
  unsure (1)..(284): unsure at all n locations
actcggatgtctgattgagtcccgtaatatatcgagacgctcgaaattgaataccgaagcgctgagcaaattcaaacgacaataaccttttactcggatgtctgattgagtcccgtaatatatcgaaaagctcgaaatcgaatgttgaagctctgagcaaattcaaacgacaataactttntactcggatgtctgattgagtcccgtaatatatcgagacgctcgaaagtgaatgtcgaagctctgagcaaattcatacgacaataactttntactcggatgtc

SEQ ID NO: 1031 - DNA, 418 bp, Glycine max
  unsure (1)..(418): unsure at all n locations
agcttgccttacctgcaaagtctttggctaaatgttattaaaacaacaggctggcgtccaccaccatactcaatttctccacttgattcttgtgctatttgtcttatatgttgcaaggcctgcatagttaatttcacaattgtcactcactaagttttgaaaaagttaaacatatctaattcatttaacaagcaactaattaatcttacaacaattgtcaacttttgagtcaagaattctgatgattcatacagaagcctgagtacttcaagtacactctagagcttcattcaataagtcaaacaattgagggactataggtctacaatatnaaattcacaaaatgacttggatatatattacacatctaaatcaatatgcatttaacaagtactagttatttagttctcttcaattc

SEQ ID NO: 1032 - DNA, 373 bp, Glycine max
  unsure (1)..(373): unsure at all n locations
ntctccactaagttgcctgatgcctganatgtcttttctgatggcagtggtcctagatgcanggaagaatttctccatgaacaccctcttaaggtcattccagctgaaaatggacctangagcaaggtagtatagccaatcttttgtcactccctctagagaatgaggaaaatcctttagaaagatatgatcttcctggacattanggggcttcatggtggaacanannatatggaactccttaagatgcttataaggatcttcacctgcaagaccacgaaacttgngcagcanatgtattagtccagtcttgagaacatatggaacaccctcatcangatattgaatgcacaagctttcataagtgaaatca

SEQ ID NO: 1033 - DNA, 449 bp, Glycine max
tatgaggagaagcataagaagaagcaagagatcaccaagctactctttaagttgctactgaaggagaaggaagaaagtcaatgaaatgaaagaagtcattgacgccgaggtagaggttgaggtcacggtcgacgatacgttggaggtggcaatagtgtacgaggttcaaatttcatcaacaatagttacgagaaatgaaatagctcaagagaatgtggaaaaggctatacaagcacaaggcatgataaatctcaaactcgatgttataaatgtcaaaagattggccactatgcttcaaaatgtagattcgccaataatagagttgaggaggagactaactatgtggagcaaaatgatgagaagtttcaaatagtgctcctagagtgtggaataatgaacgtagccaaaaaacacatggtaccttgacactagtgcaaacaaccttatgt

SEQ ID NO: 1034 - DNA, 457 bp, Glycine max
agcttatgctgcaaacatctacaacagacctcctcaaccttatcagcaaaatcagccacaacagaataattaagacctctccagcaacaggtacaatcccggatggaggaatcatcccaaccttagatggtcgaatccttcacaacagcagcagcaacaacaacagacttattttcaaaatgttgttggcccaagcagaccacacgttcctccaccaatccagcagcaacaatagcaacagccctagaaacagcaaatagttgaggcccctccgcaaccttcccttgaagaacttgtgaggcaaatgactatgcaaaacatgcagtttcagcaagagaccagagcctccatttagagcttaactaatcagatgggacagttggctacacagttaaatcaacaatagtcccagaattatgatagattaccttctcaatctgtccagaatcccaaaaat

SEQ ID NO: 1035 - DNA, 345 bp, Glycine max
  unsure (1)..(345): unsure at all n locations
agcttgccgccacggagtttttcgactatgctcttgtgtggtggaacaagctacaaaaggagagagcacgaaatgaagagccaatggttgatacatggacggagatgaaaaaaatcatgaggaagcggtatgtgccggctagttactcaagggacttgaaattcaagctccaaaaactaacccaaggcaacaagggggttgaggagtatttcaaggaaatggatgtgctcatgattctggcaaatattgaacaacatgaggaggtaactatggctcgatttcttaatggtttgactaatgatatccgtgatattgntgagctgcaagagtttgttgaaatggatg

SEQ ID NO: 1036 - DNA, 269 bp, Glycine max
  unsure (1)..(269): unsure at all n locations
agcttgtagggttaaagtctcacgattgtcttgtgttgatgcaacaattnttagccatgactatacaagacatcttgccaaacaaagtcaggttagccataactcgcctgtgttttttcttccatgccatatgtagcaaagtcgttgatcctaccaagtttgatgagctggaaaatgaggccgcaattatactgcgccagttagagatgtattttccctctgccttctttgacatcatgattcacttgattgtgcatctcgacagacaa

SEQ ID NO: 1037 - DNA, 416 bp, Glycine max
agctttcttcaatcgacgatacgggtgatatgctgtcaaatttcttcggtgtctactatatgctgatttctttccatgtttcagttggatgaagctggtgtttgtctcacatacagggcatgcataatgtcctttcacactatatccacttaaattttcatatgttggaaagtcattaatagtacaaaacaccattgcgcgtaacctgaagatctactacaaatttgcatcccacacatcaactccatcttcccacaattttgtcaagtcttcaatcaacagactgagatacacatcaatatcattcctaggttgccttggacccgctatcattagacaaaacataatgtattttcgcttgatgcacaaccaaggagggagattgtaaatcatcatcataacacgccatgaactat

SEQ ID NO: 1038 - DNA, 448 bp, Glycine max
  unsure (1)..(448): unsure at all n locations
agctntctcaaaatccacttctcaaatgagactagctttattccctctcctagaatcatccaccatctcatttgctacaagtacactatcatgcatgtgtctcccccccaacccaccccacaattgcactctgcttatcatcaataattttttcaagcaccatctccatccttttggcaaacactttggatataattttgtaaacacacccaatcaaggatatatgccgaaactccacaagctcttgtgcgttgtctctttttggtatcaaagcaatgaaggaggaattaccacctcttggaatagcatcattctcccaaaattcatgcatcatactcaatactcctagtattaacagttcccaacatcttttaatatttattgataatctaacgaactcattaaattaaatcatcttatttaacccatctaattgtaaataataata

SEQ ID NO: 1039 - DNA, 458 bp, Glycine max
  unsure (1)..(458): unsure at all n locations
tctctaagcactctgcaggctgcagctttcaggtcaactggccaaggatgtgatttctaacgctctataacagcagtagntatagctttaagtattgaattattaaagcgtctctggtgttcaaaaagaccaattcttgcatcagtatgatacttataattaagtataagaagcagtggttaacttatatagaataatcgaaaaaactctttctctctgaaccctgctggaatctgtatttgtgagttgttattcacaatttgattatgatactatgctagaattatatatagagttaaccaagtttgcttcataaaatatattatatacaatcagaaattttggctgatgcatgattattcgcctaattatattatttatgtaactatgttttctctttatgtttgttacaacattacctaattgattttatacttttcttttttatggttcatata

SEQ ID NO: 1040 - DNA, 418 bp, Glycine max
ctgcagctagcagatataatttttagatggaatatactttaacataatttatgcaggtatccatcacaatccagaagaacattgatgcttctattaaagatctagaagttcaagttggacaactgtaaaaatagctatctgaacatggaagtggatctttctcagcaaccacacaggtcaaccaatatgaacattgtaatttaattacaacaaggtgggggactgtggttggtttgaaggataataatgagaaaaagaataaagaatgagttgaaaaggaaaacgagaaaaatgatgatgtggtgactagtgaaaaagtggtaagtgaagaagacagaagacatctatgaacaaccactaataaaagtgatctatagtaaatcatccaccattgagcatctttcttatccacatgctc

SEQ ID NO: 1041 - DNA, 294 bp, Glycine max
  unsure (1)..(294): unsure at all n locations
aatttcatatgctggatagtcattgatggtacaaaaaaccattgcacgcaacctaaaggtctctcgcagattcccatcccacatatctaccctgtgttcccaattttttgtcaagtcttctatcaacagagtcaagtagacgtcaatatcattccctggatgtcttagatccgctatcatcatgcacagcattatgtacttttgcttcatgcacaacgaangaggaaggttgtaaatcattatcaaaacaggccatgaactgtgattgctgcttaagttaccaaatggattcat

SEQ ID NO: 1042 - DNA, 424 bp, Glycine max
  unsure (1)..(424): unsure at all n locations
agctntagcacgagtattcatgtttcatctatgccttttgagtatgtgcattcaaatttatggggatcatctagagtgaaaactcatggtggaagctcatactttctcactatcatagatgatttctcaagaagagtatggttgtatgttttgaaaaataagtcaaaagtttttcaaaaattcagagaatggcatactctagttggaaatcaacttggtacaaaattaaaagttttaagaactgacaatggcctagagtttttttcagagcagttcaatgagttttacaggaaaataggcatcaaaaggcataaaatagtccctcacactccacaacagaatggcttggcagaaagaatgaatatgaccattntggaaagagtgaggtgcatgcttctaagtgtacgactgccaaagacctttt

SEQ ID NO: 1043 - DNA, 362 bp, Glycine max
  unsure (1)..(362): unsure at all n locations
catatgctggaaagtcattaatggtacaaaaaagcattgcacacatttgaaaagtctcattctgaaacccatcaaacactaaaaccccctcgtcccaaaactttctcaagtcttcaatcaacggacttagataaacatcaatgtcatttcctgattgtcttgggcccaatatcatcatagacaacatcatgtanttttgcttcatgcacaaccaaggaggcaaattggtaattactagcaaaactggccatgaactgtgttgagtgcttaaactgtcatatggattcattccatcactagctagtccaagcctaagatttcttgcctcttagccgaaatccggatacanactatcaatcttc

SEQ ID NO: 1044 - DNA, 415 bp, Glycine max
tctatagaaggttcgttcctaatttctctacaattgcatcacctctcaatgagctagtgaagaagaatgtggcatttaactggggtgaaaaaccagagcacgcctttgctttgcttaaagaaaagcttactaaggcacctgttctagctctgtctaacttttctaaaacttttgagctagaatgtgatgcctctggagtgggagtcggagctgttttgctgccaggagggcaccctattgcttattttagtgaaaaacttcatggtgcgacccttaactacaccacctatgataaagagctttatgccttaataagagcactccgaacttgggaacattaccttgtttccaatgaaatggtcattcatagtgatcaacaatcacttaagttcattagacggcccatcaagttaaa

SEQ ID NO: 1045 - DNA, 292 bp, Glycine max
  unsure (1)..(292): unsure at all n locations
agcttgaatcggaccttagtgtgaaaagttttgaccanttcnntttcgcgtgtgctttcgttgttcaatggcgagcaccncgacacgagatgcgctctaatcggacatccgtgtgaaaagcnatgaccacncgagagtctcgagagcttccgtggttcaatttcnagcatctggtcatattatgtgcccgaatctgaccttcgngngaaaaaggatgaccatttgaatttctcgagagcctccgatgtttaatttcgagcgcctcaatatattgtaggcccgcctcggagct

SEQ ID NO: 1046 - DNA, 427 bp, Glycine max
  unsure (1)..(427): unsure at all n locations
gcatggacactgganaagactaatttctattntcaaaattgtactaactggtttctctgtctcagggagttatgccagggaccaagggtacaggtggcttcggtttctttattntatccaccaaaatagcttgagtagttagaatgacaccagcaacagaaactgcactttgaagagcacatcttgcaacacgactaggatccgctactccagcattcaaaagatcttcatacgtgcctgtcattgcattatatccagttctccaatcatgtgttctagtcttccggacaacaatgtctccatcaactccggcattagttgcaattgattttgcaggttcaaggagtgcctgcaacgattcatgtgcaaccgcttacatatgttaaaagcactccagagtccagacaaagtcatacttcatatggaa

SEQ ID NO: 1047 - DNA, 416 bp, Glycine max
agcttatgcagcaaatatatacaatagaccttctcaacctcagcagcaaaatcaaccacagcagagcaattatgacctttccagcaacagatacaaccctggatggaggaatcaccctaacctcagatggtccagccctcagcaacaacaacagcagcctgctccttccttccaaaatgctgctggcccaagcaaaccatacattcctccaccaatccaacaacagcaacaaccccagaaacagccaatagttgaggcccctccacaaccttccctcgaagaacttgtgaggcaaatgactatgcagaacatgcagtttcagcaagagaccagagcctccattcagagcttaaccaatcagatgggacaattggctacccaattgaatcaacaacagtcccagaattctgacaagc

SEQ ID NO: 1048 - DNA, 446 bp, Glycine max
agcttctaagttctaacagggtgatggagagtataatttctgaatgtgaaccacaagtataaagttattataatacactgaagctccattaaaaactgaaccatgagtacataattattatactacattgcagctgcattaaacatgttattgttatttaatttcaggacctaaaggaccccttcccttatttttgagaaaactagcttaatataatctacttctataattaactaaggagttgagagaagctaacccaaaaacgcaatatcaccttcttatgtttgttcacaaagttcaattagagaatcttgataaagagaatagtatataatcactaattaatagtaaatattatagaggttcaaacctagttccagctttcacaatgattgcgagggtttcccaaaagcaagcagtagacaagatggcttcaacttatgata

SEQ ID NO: 1049 - DNA, 487 bp, Glycine max
  unsure (1)..(487): unsure at all n locations
gcttaacattcaattcggagcgtctcgtaatattacgggactcaatcagacatccgatatataatttattgtcgtttgaattggctcagagcttcaacattcaatttcgagcgtctcgatatatgacaggactcaatcagacatccgagtaaaaagttattgtcgtttgaattagcttagagcttcaacaatcaatttcgagcgtctcgatatatcacgggactcattcagacatccgagtaaaaagttattgtcgtttgaattagctcagagcttcaacattcaatttcgagcgtctcgatatgtgacgggactcaatcagacatccgagtaaaaagttattgtcgtttgaattggctcagagattcaacattcaatttcgagcgtctcgatatatgacgggcctcaatcagacatccgagtataaagttattgtcgtttgaatnggctcagagcttcaccattcaatttcgagcgtctcgatata

SEQ ID NO: 1050 - DNA, 431 bp, Glycine max
agcttcttagtttcagatgatgcagatgagtttgtggctacctcatgcactcctctaatgactatagcctcatttatggcgctaaactgttgggagtcggaagccatcttctcaattaaattcctggcttcagcaggggtcatgtctccaagggctccaccactggcagcatctatcatacttctctccatgttactgagtccttgataaaaatattggagaagaagctgctcagaaatctggtggtgagggcaactggcacatagttttttaaatctctcccagtattcatataggctctctccactgagttgcctgatgcctaaaatatcctttctaatggtcgtggtcctggaagcagggaaaagttttctaaaaatactctcttgaggtcttcccagctcgtgatggaccttggagcaaggtaacat

SEQ ID NO: 1051 - DNA, 408 bp, Glycine max
  unsure (1)..(408): unsure at all n locations
tgtgtctaccatcacgattatcgtgtccctttccattattgggggtaccacctgngccgccatatccctgcaccttttgggcgtgttctttgaatgatccgttcccctttttgcacatgttccgtagttgccttctatccagaaccatatcaaaattgtattgatactgtctaacaacggcaaccattacgtccttgctataatggactctggaagattccaagttagtgtaccacgtaacagctaccccaataagactgtcttggaaggaatgtatcancaattcctcatcttttgagtattcccccatcttctgacaatacatctttagatgggtcttgagacaagtatgtcccttgtacttgtctaagttcagcaccttgaacttgggaatgaccatgtttgggt

SEQ ID NO: 1052 - DNA, 412 bp, Glycine max
  unsure (1)..(412): unsure at all n locations
acctgcagctgcagctagagctacacctaccgctctcctttatctagagatctctattatgagcctcactttgagcctccagatctgctatgaccttcttcagttgtgcttcttgccgaagaaccatctcactattgacgcgtaatgctctatccgatgtaacaagctcatcaaaagtgatgtgcactgtctgtatcacttgaatcttcagcagactctaatctcccagtgagtgcatgcacatcgctgacagagtcgctttattgttcactctctgcatcggatcgacgtacaaaaagtcctttcctccgcttcttgagatgagcgggacattcatctgtgatgtgcccatgggcttcacacccatggcatagaattcacttgctgtgactgangtttacatctgaccttt

SEQ ID NO: 1053 - DNA, 438 bp, Glycine max
  unsure (1)..(438): unsure at all n locations
agctntatgacccatttgttttaactaagagtgcaagtaacactagtactcactattattggttgaaatttttttaaaactacaaaatcaggagagagactcattagataagaaacgggagccacatatttgtgattttcaataaatttgcgacctatttctcattcatttgtctatagtttatgcattttcaaaaatcttcaatccatatttggactgtggatctcactaatgctatgacctgctttggtttcaaaatgcagtggttacttggcaccagagtatgcaatgggtggccagttaaccatgaaggctgatgtatacagttntggggttcttatacttgaaataatcagtggcaaaagcagtgcaaggacaaactggngagggtccaacaaatttctattggaatgggtatgtaactttcagcttcccata

SEQ ID NO: 1054 - DNA, 240 bp, Glycine max
  unsure (1)..(240): unsure at all n locations
attgcgggaatagttttcctcctcttgggctcgaggtacangactgcgccgaatgaaaagacccttatgaccccctggaggaacttgtccttttgtgacaacagagctgtggaggaccccatctgtgcctcaagctgttcccaacccaccaaacactcttcttgtaccaagaggttgattgttacgcgctttggtgatgctcaaacgtaaaaaaagatgagaatggctccattcaacatt

SEQ ID NO: 1055 - DNA, 272 bp, Glycine max
  unsure (1)..(272): unsure at all n locations
tctgggaggatgtatcagctgattntatcacagggttgccttggtcgagaggctatgaagctattctggttgttgtggacaggctgaccaaatatagccattttgttccattgaaacacccttatacttgccaagggaattgttgagattttcgtaagggaagtagtgaggctacatggagttccaaaatctctcgtgagtgatagagatcctttatttatgagtttgtttggaagggaatttttaagttacaagggaccatgctcaagatg

SEQ ID NO: 1056 - DNA, 418 bp, Glycine max
  unsure (1)..(418): unsure at all n locations
gacactatgaaactcagcttaacattcaatttcgagcgtctcgatatattacgggactcattaagacatccgagaanaaagttattggtcgtttgaatggctcagagcttcaacattcaatttttagcgtctcgatatgttacgggactcaatcagacatccgtgaaaaaagttattggtcgttgaattggctcagagcttcaacattcaaattcgagcgtctcgatatattacgggactcaatcagacatccgagtaaaaagttattgtcgttggaattggctcagagcttcaacattcaatttcgagcgtctcgatatattacgggactcaatcagacatccgagaaaaaagttatggtngtttgaattggctcagagcgttcacattcaatttcgagcgtctcgatatgttacgg

SEQ ID NO: 1057 - DNA, 421 bp, Glycine max
agccttggagtttccaagtgccaattcgttctcttctttagtccagtcttcttctggcttcaattcatcagtgggctttccttctgtgtccagcatcttgggatgttcccagcctttgatgacagctttccaggttctgctatccagtgatttgaggaaggccaccattcttgctttccagtattcatagttgcttccatcaagaattggtggtctgttcactggtcctccttctttctccatgttcatcagaatttatctccccagatctcactctgtgatttcgagtgttggctctgataccaattgaaattctgataccaggggacagatgtcgtacaggatgtcacgacatcacgcttcagaacatgcagtttatgtgtgtccgtatgaacagattaaacaagtaataacacaagag

SEQ ID NO: 1058 - DNA, 289 bp, Glycine max
  unsure (1)..(289): unsure at all n locations
agcttatgaccatatgaatttctcgtgtgctttcgttgnacaactttgagcgtcgtgatatattatgcgcctgaatcgggcctccgagttaaaagataacccaaatcgcattttatgagagctttcgtctgttaatttcaagtgtctcgatatattatgcgcctgaatccgaccttcaagtgacaagttacgaccattagaattgctcgagagcttacgtggaacaactgctagcgtcacgataaattaagtgcctgaatcggacttccctgtgacaagttattacgat

SEQ ID NO: 1059 - DNA, 300 bp, Glycine max
  unsure (1)..(300): unsure at all n locations
actcctctaatgactatggcatcatttctggcgctaaactgctgagagttggaagccattttctcaattaaatttctggcttcagcaagagtcatgtctccaaaggctccaccactggcagcatatatcatacttctctccatattactgagtccttcataaaaatattggagaagaagctgctccgaaatctgatggtgagggcaactagcacatagttntttaaatcgctcccagtactcatacaagctctctccactgagttgtctaatacttgagatatctttcctgatggatgtg

SEQ ID NO: 1060 - DNA, 338 bp, Glycine max
  unsure (1)..(338): unsure at all n locations
tcctctaatgactatggcatcatttctggcgctaaactgctgggagttggaggccatcttctcaattaaatntcttgcttcagcaggagtcatgtctctaaaggctccaccactggcagcatctatcatacttctctccatattactgagtccttcataaaaatattggagaagaagttgttctgaaatctgatggtggggcaactggcacatagtttcttaaatctctcccagtactcatacaagctctctccactgagtagtctaatacctgagatatccttcttgatggctgtggtcctggaagcanggaaaattntttctaagaatactctctt

SEQ ID NO: 1061 - DNA, 364 bp, Glycine max
gtagtttcctcttccccatgtctaccacacagcttgcggtggacataaaaggtcttccaagaattatgggaatgtcagcatcttcttcaatgtctatcactattgaaatcaacttgtgatggagcgattagccaactggagggtcatgcgtgtgggcattatctctatctctccaagtcatcgacacatagagagaggcattaaattgatactaggtcccaagtctatgagagctttacccacagcaacattgccaatagaacacagtatagtgacacttccatggtctttgtgcttcacgggaaagatgcgttgaatgacagcactacaatttccttccacaactattgtgtcactgtgtatg

SEQ ID NO: 1062 - DNA, 426 bp, Glycine max
  unsure (1)..(426): unsure at all n locations
agcttctatgattagtcaggattataaagtggtgccctaaaagatactgtctccattttctaacagcagtggtgatcgcaacgagatcacgaacataagtggaagaggtgagtaacctgngacaaaactgtttgctaaaaaaagctatcagatgtcttccttgggacaacaccgcacccatacccgaacccaaggcttctgtctcgaccatgaaaggttttgtgaagtcaggaagtgctaagaatggagaatgtgtcatagcatgcttcaatttgttgaaggcaacgtcagcttcaagggtccaatggaactcttccttggttagcaggcttgaaagtggtgctgccaaagtagcgtagctccttataaatcttcgataaaagccagcaaggccgaggaacccacggagggctcgtgtcatgcgtg

SEQ ID NO: 1063 - DNA, 439 bp, Glycine max
  unsure (1)..(439): unsure at all n locations
agcttctaaactttatacaagaatgaagctctgataccacttgttagacaagtggcctcaaatatcttaagaaggggggggttgaattaagatatcacaaactatttccccaattaaaattttattcttctttaatgataatgtcaatgttcccttattatgaattactataattcaattcaaactaaacttccttaatgcaaaagataaataacaataaataaatgagtttatggaaagagaaagttcaaactcagttttatactggttcggccacacccttgtacctacgtccagtccctaagcaacccgcttgagagttctactatcttgtgaaaaccctttacaagatctgaaccacacaaggacaacccctcctttgtattcagatcgctntacaaaaagagaccctcagtcccttaatcactntccttaagta

SEQ ID NO: 1064 - DNA, 394 bp, Glycine max
agcttattaactgtactttataagatataaaagcatcattaaaaatataatgcccaattgtttagtaaacataaattagctagaattaaggtataacaacatttataaccaaccaaatagtgtttatatgttagttaaaaagttgattctgtcatacattaaaaaaaaaaaacctttgattgttataagaaatcattataaactttttaaaatttctcgattgaactatcttaccataaaaaaatgttatactaataatagcatattcctgtattaaagagaaaaaaattatgaaacatatagcaaatatgacaacttatttatttatagttaatggaacatttaaaatgttttcactatttagatacaaaatataaagattattcttaaattt

SEQ ID NO: 1065 - DNA, 288 bp, Glycine max
tgtttacctctacttttctgaatgtctcgaagatctctttctctgcctcttccatttttttgttggaaactgctcttggagggaatggaagatgagggatgtgctgcttctgcaaatcggaattaccagtggaagattcaccttgcacataaattgttagggaaatttttgtcatcacctttttctggagtagagtgaagtttggcaagttcatttgcagatgaagaaggtgctacaggttgaggtccatgacattgctttcccgacgtcaatgaaatggcactgaca

SEQ ID NO: 1066 - DNA, 401 bp, Glycine max
ctcggatgttcgattcatgcgcatatatatattgagacacttgatattgaataacaggaagcttctcgagaaattacaatggccataacttttcacaccgatgtccgattccggcgcataatatgtcgagacgctcgaaattgaacaacggaagctctcgagaaactccaatggccataacttctcactcggaggaccgattcaggcgcataatatatcgagacgctctgaattgaacaacggaagctctcgagaaatcaaacggtcataacttttcactcagaggggccattcaggcgcataatatatcgagacgctcgaaatgaacatcgaaagcttctagaaactcacatggtcataacttttcactcggaggtccaattatgcgcataatatatcga

SEQ ID NO: 1067 - DNA, 416 bp, Glycine max
  unsure (1)..(416): unsure at all n locations
agctntgcatccaataagatgttgctggcttttatatctctgtgaattattcttgttttggagttctcatgtagataaaccaatccttcagctgtcccgatgataatttcatatctattttcccagttcaattctttgcccttgtttttatcttccatgtataaattgagaaatattatatttagttcacattatgatgaattgataatcacttttagtgacccaaatgaggtgttataggtgaaaagggtagtcaagcgtactgcatcagttcagtaattaccaaaaatgtagcggtcaagacttcggttgggtagaaattcatatacaagcaggctttcaggtcctgaacaactgcatcctaacagtctgactagattcttgtgctccacgctactaattatgttgacttcatt

SEQ ID NO: 1068 - DNA, 370 bp, Glycine max
  unsure (1)..(370): unsure at all n locations
atattttgagaaaatttagagatggtttataaccataccaagcctcatatggtgtctgatccttaactgcttttgagaggagtctattttgcaagaaaatggctgtatgagctgcttctgcccaaaacttcttgggtagatttttttcatgcaacatgcacctagtcatctctaggatgtatttgtttctcctttcactcaccccattctgttgtggagtatanggagtggttagctgatgctcaatgtcagcttcctcacaaaactgattgaattttattgaggtgtactccttgccattatcagatcttagaatctgaatttgcttgccactgtgattntctactgcctttttgaattccaaaaagct

SEQ ID NO: 1069 - DNA, 431 bp, Glycine max
agcttcgaccaagagaggatggtccatttcatgtacttgaaaggataaatgacaatgtgtacaagattgaattgaccggtgagtataatgtgagtactacatttaatgtgtcagacttaactctttttgatgtagatggagaagccaatttgaggacaaatccttttgaagagggagagagtgatgaggacaaggcaaggaacctttagaaggacttggaggacctatggcaagggctagaacaaagaatgccaaggaagttcttcaacaagtgttaaccatgctatttgaatttacgcccaagttacaaatggagaagcttcggattgttaattgcaccatgttccaagaagagtagagggtgccacttttgttgagtggttttattagcattctgttagttgaaataaaggctcaaacttgtgttaaag

SEQ ID NO: 1070 - DNA, 424 bp, Glycine max
agcttgtcaagcattgttttaagtccaaagtcatcaagtacagcaccaaatttattcattgtattcggacgcatgatccgaaatttagtttcattcacccacttctcaaaattttcaatctagggagaccacaaatacattttaacatacacaaaacataagtatacaaacagccatctgcttacaatttccaatttaaaagatgagatactgcttgtatcataggtaatgatagttaaaatgatgaagtacctcagatagcaataactcacaaaagtgggtctgaaatatgtcaaatataaaaatgcctggagagggctcagacactatacttctaatactttgttccgtattatcattaattgctctcagaaatgtggggacaaagaatgtagcaggatccacagagtacaactcccgatgt

SEQ ID NO: 1071 - DNA, 402 bp, Glycine max
  unsure (1)..(402): unsure at all n locations
ggcaggaccgaatgtccaccgagttttttcacttaanaaggagaacatgctttagcaatgaaaaataaatcattcacgagagcaccatattttagagaaacaatatactcatgccaaaagtaattttccttgtaatcgaaaatgaagggcaggatgtcaacatttagcttttaaatgaacattcaggggaaacgtcgggtcaaactgaaactaggaataaaatcactcatagtgtataaaaactcacacaggtaagtgttttaccctaatcccaaaccatagctgcaccatgactttattttgcacatgatttcctatcgaaccaaaagatcacacgcacaatcatggatcaataggattttctcgagggtagtgtttttggagaggaagttgggtgtttcg

SEQ ID NO: 1072 - DNA, 253 bp, Glycine max
acatctttttacttgattcttgaatggctgtcaaaggcctatatatgtgtgacttgggacacgaatttgctaagagtttttcataacaaaatagtcttatcctcttaaaaagcaaagtcgtttatcctcttacaaattccttggccaaattacttgtgattcaataagggaatatttgagtgctcaaatggttcaatctatctctttaaagagagattacttcttttcttcttcttcattctgaaaagggatc

SEQ ID NO: 1073 - DNA, 388 bp, Glycine max
acagcaaaatcagtcacaacagaataattatgacctctccagcaacaggtacaatcccgggtggaggaatcatcccaaccttagatggtcgaatccttcacaacaacagcaccaacaacaacaacaaccttattttcagaatgcttctagcccaagtagaccatacgctcctccaccaatccagcagcaatagccccagaaacagcaaacagttgaggctcctccgcaaccttcccttgaagaacttgtgaggcatgactatgcaaaacatgcaatttcaacaagagactagagccttcattcagagcttaactaatcagatggaacaattggctacacagttaaatcaacaacagtcccagaattctgacagattaccttctcaatc

SEQ ID NO: 1074 - DNA, 364 bp, Glycine max
tagctttgcagcaaatgccactctactctaaattgttgaaagatatgttaacaaggaagcataaatatattcatcaggaaaacatcatagcggaaggatgttgcaatgctgtgatgaaaaagatccttccacccaagcataaagatcttggtagtgtaactattccttgctcaatcggagaagtcaatgtgggaaaatatcttcttgacctgggagccagtctcaatttgatgccactatctatgtgcacaagacttggagagttggatatactgcccactcgaatgactatacaattagttgaccgctccattaccacgccatatgcagtaattgaagatgtgctggtcatagtataacattt

SEQ ID NO: 1075 - DNA, 365 bp, Glycine max
gagagtttccgatgtttaatttcgagcgcatcgatatattataagcctgaatcggacatccgtgtgacaagttatgaccatgtgaatttctagagaggttccgatgtttaatttcgagtgtatcgatatattataaacctgaatcggaccttagtggtaaaagatatgaccatttgaattcgcgagagcttctggtgatcaattcgagtgtcactatatgtgaagcgccaaaatcggacattcgagttaaatgttatgagcattcgaatatctcaagagctaccaattgttaatactgagcggctgatatgtgatatgcctgaatggacatccgtgtaaaagtatgacatttgaattctcaagag

SEQ ID NO: 1076 - DNA, 426 bp, Glycine max
agcttgtgggaatttgtgatagtgattctgccggagatgttgatgatagaaaaagtactaccggatttgtattttttatgggtgattgtgtttttacatggagttctaagaagcaaggcattgtgacactttctacttgtgaagccgagtatgtagctgcaacttcttgcacatgtcatgccatttggctaagaagattgttggaggaacttcagttgttgcaaaaggaaagcacaaagatctatgttgataatagatctgcacaagagcttgccaagaatccggtgttccatgaacgaagtaagcatatagatacaaggtatcatttcattagagagtgcattaccaagaaagaagtagaattgactcatgtgaaaactcaagatcaagttgcggatattttcaccaagcctctcacatttgaag

SEQ ID NO: 1077 - DNA, 349 bp, Glycine max
  unsure (1)..(349): unsure at all n locations
gagacaaggaggancnnngagtctctgagcaccctgcgactctcgaaacactcgcaatgaagccgaaagagaaagagtgtatcatcaatgaccttgtgaagttcaagagtgggaaaacttattatgccaaaattgggaaagcttggaaaagaaggtacttgctgtatggccctccaagtaccgggaaatctaccatggtcgcggctatggctaatttcatgaactatgatgtgtatgatcttgaatagacagcggggaaggacaattcagatntgagacagctgttgattaacacttcaagtaagtcgattatggtgattgaagacattgattgctcccttgatctcac

SEQ ID NO: 1078 - DNA, 280 bp, Glycine max
ctactgcatcaatattcccagggttcactctgattgctccacttaaagatggggaacagccaatgaattcagacacaactaacatgcttttcttcttatgggaggaagctagacccaaaactttatccaaggtttcatttccttgacgactgatgatatattcatacggtatgagattcattccatcccttactgcagtgactaaacaacactccgcgacaacatagtaagcaactctctcataaaacttgagaggctcctcgatcagaatgacgggatc

SEQ ID NO: 1079 - DNA, 374 bp, Glycine max
agcttcaacctagaggagacggaccattccaagtgttggagaagatcaacgacaatgcctacaagattgacttgcctagtgagtataatgtaagtgccactttcaatgtgtctgatctatctctttttgatgcagatggaggagccttggatttgaggacaaatccttttcaagaaggagggagtgatgaggacataaccaagggcaaggaccatgaagcacttgaaggtcccatgaccagaggcagacttaaacaagcccaacacgtcatagagacaaggctggtcatttgtatagctgccattgatgatgattgaacgcccaagtggagaaagatgaacgcccagaggcagacgcactaccaagactactaa

SEQ ID NO: 1080 - DNA, 313 bp, Glycine max
  unsure (1)..(313): unsure at all n locations
cgagcggnttatatcgagacgctcgaaattaaccaacggaagctctcgagaaattcatatggtcataacttgcaactcggaggtccgattcacgcgcataatatatcgagacgctcgaaatagaacaacggaagctctcgagaaattcaaatggtcataacttttcacacggaggtccgattcaggcgcatcacatatcgagaccctctaaatntaacaacggaagctctcgagaaataccaatggtcataactnttcactgggacgtccgattcatgcgcataatacattgagacgctccaaattgaacaac

SEQ ID NO: 1081 - DNA, 439 bp, Glycine max
agcttatataagtaatgggggagtttatcagataattatatatcaggtaaaattttatattatttttcttatgtaaatatataatacattattttcttgtcacggataaaaaaataacattttcttgcccccactaaacaatttttctagattcgtccatactcatggttgcctttgtttatgtttctttaattattttgttggtatacatttataaatcattgattgatatttaatgactatggctggcatttttttttttaaatcattcctataataaatacaaatattaatttattcttggaatatcttaatgtagtaaatatgtattttgtgtcagtttggccgatgctaactcgagtgaaaatattctttaaagtgtattaagtgtgttggagttaggggtaggaataggccaggtcaggctttaaaaggcctg

SEQ ID NO: 1082 - DNA, 299 bp, Glycine max
ttgagtttgaatatatcgagacgcttgtgatggaaaacagaagctcgtagaaaatgcaaatcgcaataacttttaactcggatgatcgattgagtcccgtaatatatcgagacactcgaaattgaaagcagaagctctgagcaaattcaaacgacaataactcttgactcggatatccgattgagtcatttaataattcgagacgctcaaaattgaatacagaagctctatgcaaattcaaatgacaataacttttgacttcggatgtccgaatgagtcattatataatttgagacgct

SEQ ID NO: 1083 - DNA, 437 bp, Glycine max
  unsure (1)..(437): unsure at all n locations
agcttggcattgatagagtacaaaatttatgaaaccgatggattggcagatgcttcaactaaaactaaaactttggagtatctgattagagctgatgctagtaaagtgaacaactttaggattctggaggaggagggcatgcatatgtcgaccaacacgaggatgaaagcttcaaatttgcttatgcaactgatctcatgtggctcaatattagtgaaaaaccatagttttggccttattccttcctataagcccatgttttatagttcaaaatgtcctttcttttgtgttgggggagtttgattgcttagtgattgagcatttgtagtttaatatttttctattctttttatctcaattgacatctctttgacttttattttttcaccttaactcagttntggtctaaggcaaatgattgaggttaattgagaact

SEQ ID NO: 1084 - DNA, 412 bp, Glycine max
agcttctgttttcaatttcgagcgtctcgatatattaccggactcaatcagacatccgagtataaagttattgtcatttgaattttgtgagagcttctatattcaattccgagcgtctttaattattaaatgactcaatcggacatttgagtgcaaagttactttcgcttgaatctgctcagagcttctgttttcaattttgagcgtctagatatattacgggactcaatcggacatccgagtaaaaagttattgtcatttgaatttggtaagagctcctgcattcaattttgagcgtctcaaattataaaatgactcaatcggacatccgagtcacaagttattgtcatttgaatttgcttagagcttctgcttcaattttgagcgtctcaaattattaaatgactcaatc

SEQ ID NO: 1085 - DNA, 440 bp, Glycine max
  unsure (1)..(440): unsure at all n locations
atgctgtaatttgaatatctagaagataaaaatgctcaaatttccatcgtgaaattaaattaatcaagtagtgaaatgtgtgtatattcaatttttgacaatattcaaatttcaatccataatcacgataacatttatcatgtctttgatccaagagaaactcgttgaagtctctaaattaaaattgtaaattaagtcttgtagatagaaaaagtataattgaaagtgaagacctattataagtgattaagttctcaaaaaagattattcttgaacataaataatagatatttcacactaataagtaaaaatattatagtaatatttagaatcttttgttgttttaaaaattctagatgtaaagagataatcactctcttattaattagtaatcaagagtcattntcttaacatagaatacatcattacagatgaagtat

SEQ ID NO: 1086 - DNA, 412 bp, Glycine max
  unsure (1)..(412): unsure at all n locations
agcttcaatacagtgacactagtgttgcaacaaaggagctgacaaagtcttttggatgggatacatatgattctttcatgcagcatgatgttcaagaactaaatcgggttctctgtgaaaaacttgaagacaaaatgaaggtatggcaagagatttggaatgtttgttcatgattcttcttgatgagtgatcataccaaatggttgttgtatgttatttttcttcacgaaactgttgttgagggaactatacaaaagttatttgaaggacaccatatgaattacattgaatgcatcaatgtagactacaaatcaactagaaaggagtcattntatggtacttncttatgcattttgaattcaattatatggttagttcttctttgtatgaattctatttagttttgcatatg

SEQ ID NO: 1087 - DNA, 440 bp, Glycine max
agcttcaacatcagaccacttccagggtgctggaactacttcacatgtacttgatggggcctatgcaagttgaaagccttggaggaaagaggtatgcctatgttgttgtggatgatttctccagatttacctgggtcaactttatcagagagaaatcagacacctttgaagtattcaaagagttgagtctaagacttcaaagagaaaaagactgtgtcatcaagagaattaggagtgaccatggcagagagtttgaaaacggcaagtttactgaattctgcacatctgaaggcatcactcatgagttctctgcagccatcacaccacaacaaaatggcctagttgaaaggaaaaacaggactttgcaagaagctgccagggtcatgcttcatgccaaagaacttccctataatctctgggctgaagccatgaacacagca

SEQ ID NO: 1088 - DNA, 421 bp, Glycine max
  unsure (1)..(421): unsure at all n locations
agcttctaagtctcactgatgaagatgaatntgtggctacttcatgcactcctctaatgacaatagcatcatttctggcactgaattgctgggagttggaagccatcttctcaattaaatttttggcttcagcaggggtcatgtctccaagggctccaccattggcagcatctatcatacttctctccatgctgctgagtccttcataaaaatattggaaaagaagctgctctgaaatctggtggtgagggcaactggcacataattttttaaatctctcccagtattcatataggctctctccactgagttgtctaatacctgaaatatcttttctgatggttgtggtcctggaagcagggaaaatttttttaagaaactctcttaggtcatccagctcggatggccttgaacaaggtat

SEQ ID NO: 1089 - DNA, 410 bp, Glycine max
agcttgacggccatgagccatgggcgcttgtatcaacaaagaatgaagaatgtgtttgacaagaaggtgcgcttgcacaagttccatgagggggaccttgtgctgaaaaagatgtcccacgctgttaaagataatcgagggaagtgggccccgaactacgaaggacctttcgtcgtgaaaaaggcttttttcggaggggccctagtgcttaccaacatggatggcgaggagctacctttacccgtaaactctgatgttgtcagacgatactatgcttagaatctggggcaattgaggatatcgctgcatgttcttttatttttatgtgtgttcttcttggtttcccctagggattcctgtctgctgtatatttcttgtcacagacttttaaaagaagagaacatgagttt

SEQ ID NO: 1090 - DNA, 412 bp, Glycine max
agcttggagatgctccaacacttaagatacttatctcgcacttccttagccaatcttatgtcggctaaacggacttcatacttgacttgattgttcatcgtcccaaacttgaaccttagggattgctctaggattatttcatttgggctttctaggatgacaccagtcctactccctttttcattggatgaacccatctgcatacaaattccaccactcggattgtagttctgtagtcgctgtcaattccacgatgaagtctgctaagcattgagccttcgttagatcccttggtttgtacttgatcccaaactcgaacaactagaccgactaacatatcattcgcgttgcaagttctgggttcatcatgactggtaagatatggtgcgttggttaaactatcatttgatga

SEQ ID NO: 1091 - DNA, 425 bp, Glycine max
  unsure (1)..(425): unsure at all n locations
cacacatcctttctaatagctaagctcacctccttgagatgagaagctagagcttatctacaccccccctataatagctaagctcacccctatgccaaaaaaacatgaaaaaaacaaaaaaagtcgttgctacaaagactactcaaaatgccccaaaatacaaggctaaaaccctatactacttgaatgcccaaaatacaaggcccaaacgaaggaaaaacctattctaatatttacaaagataagcgggctcatacttggtccatgggctcgaaatctaccctaaggctcatgaagaaaaatgcctaaaattattacacacaaatggaagtttggaacctattggaagtcctaacacacttccatganaaggcctttgtacaaacttgaagcatgaagtagtaattgcaataaaaatacaacac

SEQ ID NO: 1092 - DNA, 442 bp, Glycine max
agctctgacgatttagatagattataagattaattcttagtccgatatttaatcaaatttaaagctttcaaattggtttcttattgtctttattgtacacaaaaatattattaagatataaatttatgatataacctcgcatgaaaacttattaaataagtatttaattaaatttagggttggccaacattattccaatgcaaactttggagtgagcttttacaaaagttttatattttgatttacgcttaaatgtaattttaatcatcttatcttatttaatatgtaatcttgattcctttattttaaaatagatatttggtctccttattttaaaaaataactaattttaatctctctattctaatatataaacatttggtcctcttactttaaaatttttataatttttgtcaaatctttaattctacatatattttat

SEQ ID NO: 1093 - DNA, 440 bp, Glycine max
  unsure (1)..(440): unsure at all n locations
agcttgcattccctaaggatccattaggaaattacttgtgaaagagagccatgagggtgggctcgtgggccactttgggatagacaagacccttgtcttacttaaagaaaagttttattggccccatatgaagaaagatgtccataagcattgcactagatgtgtggcttgtttacaagccaagtctagggtgatgcctcatgatctatacacacccttacccatcccatttgcaccttgggtagacattagtatggactttgtccttgggcttcctagaacccaaagaggtgtagactctatctttgtggtggaggataggtttagcaagatggcacactttataccatgccacaaggtggatgatgcttcctatatctcanaactcttttttagggaagttgtgagactccatggtttgcctaggaccattgtgtcag

SEQ ID NO: 1094 - DNA, 360 bp, Glycine max
  unsure (1)..(360): unsure at all n locations
agcttaatgaccctcaatctttcaatgattatagacccatctccctcatagggtgtgtctataaaatcgtggctaaagttctggccaagaggctggcccttgtgttacctcaacttatacatgaaaggcagacgactttcatgaagggaagacacattcttcatggtgttttgattgccaatgaggctatagctgaggctaaggctaaaaataaaccttgcatggttttcaaatcggatttcgaaaaggcgtatgattcggtttcttggggttttgtcaactacatgctcatgaggatgggcttttgtganaggtggaggaaatggattaatggttgtctgtccattgcaacccatatca

SEQ ID NO: 1095 - DNA, 325 bp, Glycine max
ctgcaagctttcatcggtgggatttcatgggatacgacggaggacaagctcaaggagcatttcggtaactacggcgacgctttgagcacttccatcatgcgggagaagaacactgggaagccaaggggcttcggtttcgtcgtttttgcagatcctaacattctagatagggttttggaagacaaacatgtcatagatggcagaaccggaacgcttctatcattttttttgtcatttctttacttcatgttccgattgaaaatattgtattgtactttttagcgtgattggtgctggttctgaattggggataatcttgaaaccc

SEQ ID NO: 1096 - DNA, 392 bp, Glycine max
  unsure (1)..(392): unsure at all n locations
aattccttcatctgacttatcatcaaattttcctaattnttcttttccattgtttaatacaaagcatttgcaaccaaaaacatgaaggtgtgaaatgttaggttttttttatcattaaacagttcatatagagttttctttaaaatgggtcttattaaagccctattcatgatatagcatgcagtattaacggcttcagcccaaaaatatnttggaagaggagtgtcatttaataaggttctagcaatatcttccaaagatctattnnttcctttcaacaactccatttgttgaggggttctaggtgcaaaaaagttatgttcaatgccatgcttatcacanaataattcaaattttttattttcaaattcacccccatgatcgctcctaat

SEQ ID NO: 1097 - DNA, 404 bp, Glycine max
  unsure (1)..(404): unsure at all n locations
agcttgtaggaggaagaaaccagcaatgattttcaaggtggactntgagaaggcttatgacacagtctcatggtctttcctggactatatgctgtatagattgggcttttgtcataaatggagaaagtggatctcagcttgtcttcactcagcaaccatctctatccttattaatggcagccctacaaaggagtttaccccatctagaggcttgaggcaaggggatcccctagcccctctactctttaacatagttggggaaggcatctcaggcctaatgagggaagcagttaggaagaatctatatagcagctacagggttggtatgaattatgagcccacaaatattctgcagtatgcagatgatactgtttttgtgggtgaggcttcttgngaaaatgtct

SEQ ID NO: 1098 - DNA, 286 bp, Glycine max
  unsure (1)..(286): unsure at all n locations
agcttaagctcctttttctgcacttggctcttataanncgaagagcatccctgtggaacctttacccgacgaagacactgacaaaaacttatcttcttctttgtggacaaagtatggtaagctgggggcaacgaaatcttcttcccatcaaaccttggatgcaaatgtgatcgtatgcccatatcagctagaacttgacgggtattcaagccatccttcgtctcgccttgaatgttaaggagccgcccaatcacactgtcgcacactattttcttcacatgcataa

SEQ ID NO: 1099 - DNA, 441 bp, Glycine max
  unsure (1)..(441): unsure at all n locations
ggtctaaactnttcactcggagctctgattatgcacatcacatatatagacgctcaagattgaacaacggaagctctcgatatattcaaatggtcataactnttaacttggaggtccgattcacgcacataatatatcgagacgcccgatattcaacaacggaagcacttgagaaaatcaaatggtcattacttttaactcggaggtccgattcangcgcatcacatatagagacgctcgaaattgaacaacggaagctctcgagatattcaaatggtcataactcttaactcggaggtccgattcatgagcataatatatcgagacgctccgaattgaaacacggaagctcttgagatattcaaatggtcataacttttcactcggaggtctgattcaagtgcataacacatcgagacgcttgaaattaacaacagaagc

SEQ ID NO: 1100 - DNA, 434 bp, Glycine max
  unsure (1)..(434): unsure at all n locations
gctntgaccatttgaattgctcaagcgctttctttgttcaatatcgagcgtctcgatctattatgcgcttgaatcggacctccgagtgaaaagttaagaccatttgaattgctcaagagcttccattaaccaatttcgagggtctcgatattttatgttcctaaatcagacctccgagttaaaagttatgtccatttgaatatctcgagagcttccgttgtttaatttcgagcgtctctatatgtgatgctcctgaatcggacctccgagtgaaaagttatgaccatttgaatatctcgagagcatccgttgttcaatttcgagcgtttctatatgtgatgcgcttgaatcggacctccgagttaaaagtaatgaccatttgattttcttaagagcttccgctgttcacattcgggcgtcttgatattttatgc

SEQ ID NO: 1101 - DNA, 448 bp, Glycine max
  unsure (1)..(448): unsure at all n locations
agtagggttaaagtctcacgattgtcatgtgttgatgtaacttcttgtcatacaaagtcaggttagccataactcgcctgtgctatntcttccatgccatatatagcanagtcgttgatcctgtcaagtatgatgagctggaaaatgaggccgaaattatactatgccagttggagatgtatttttcccctgctttctttgacatcatgattcacttgattatggatctggtcagagaaatcaaatgttgtgggcctggttatttgtggtggatgtacccggttgagcaatacatgaagatcttaaaagggtatacaaagaatccttatcatctagaagcatctattgttgagaggtacattgcaaaagaagtgattgaatcttgttcagaattcattgagaaggctaaacctattggccttcctgagtctcgcgatgatgacagaac

SEQ ID NO: 1102 - DNA, 468 bp, Glycine max
  unsure (1)..(468): unsure at all n locations
gctttaagaaaaaccttatttatcactcactagacgacattcttttgtgttaaactaaaactaattttctatcactagatgatatagtttatcttgttatcttgtgaaaaactcttctttgtgaaaaaagcttatatctttggttaacacacttttcgacccctttctaatatgatctttgatatttcaaaagtgtactagtcttcttcgtatattggcttatgactcacctgctgatagtgtggacatgtatattcagattactaaaagcactgtagtggaatgcttacaaaaaattgtatcaaacatgtgtgcaatatttggggatgagtacccgaggaggccaaataataaagacacatgaagactacaaattgaagcagtacatggttntctaggtatgttagggttcattgattgtatgcaatgggaatagaaaaaaaatgtccagttgcgtggaaaggtcta

SEQ ID NO: 1103 - DNA, 459 bp, Glycine max
  unsure (1)..(459): unsure at all n locations
tataatatattattacactcgaaattaaacatcagaagctctcgtgatattcaaatggtcataacttttcacccggatgtccgattatggcgaatcacatatcgagacgctcaaaattggacaacggaagctcttgagaaattctaatggtcataacttttaactcggatgtccgattcacgcgcatcacatatagaggcgctcgaaaaggaacaacggaagctctcgagaaattcaaatggtcataactttncacactgaggtccgattcacgattataatatatcaagacgctcgaaattgaacatcgaaagctctcaagaaattcaattggtcatcacttttcacacggatgtccgattcggcgcatatatgtcgaacgcttgaaatgaacaacggaagctcttggaaattaaatggtttaactttcacacggatgtcaattcaacgcatacatat

SEQ ID NO: 1104 - DNA, 224 bp, Glycine max
agcttgccgccacggagttttccgactatgctcttgtgttgtggaacaagctacaaaaggagagagcaagaaatgaagagccaatggttgatacatggacggagatgaaaaagatcatgaggaagcggtatgtgccggctagttactcaagggacttgaaattcaagctccaaaaactaacccaaggcaacaagggggttgaggagtatttcaaggaaatggat

SEQ ID NO: 1105 - DNA, 328 bp, Glycine max
  unsure (1)..(328): unsure at all n locations
tanagataaactaagaataatgactagaaatcttatcttagttcttgataananaggctatcaaatacaaactgattagctaggctaagaataccgatagaatatctcatcatatattctgagaatatattctatcaaatattaactgactagcttggctaagaaaaccgatagaatatctcatcatatagtctgataatatattctatgaaacacagactggattagtaagctaacaatactaataagatatctaatcatatattttatcattaggtaggcttagaatacagatagaatatcttatcatatattgtgatagtatatt

SEQ ID NO: 1106 - DNA, 353 bp, Glycine max
  unsure (1)..(353): unsure at all n locations
agctttccattctttcggaagtttatcatctttattggcttcttgaggaggagcttcattgcttccttttccttttcctttacaatctngtccatgaatatgcatttgttctaaagattctgcaacatcatctaaaatatcctttcttgaagaaatagcattagactcatcaaaggaaacatgaatagattattcaatagtcatagttcttttattatatattctataagctttactatgcaaggaataaccaaggaaaattccttcatctgacttagcatcaaattttcctaagttttcttttccattgtttaatacaaagcatttgccaccaaacacatgttgatgagaga

SEQ ID NO: 1107 - DNA, 349 bp, Glycine max
  unsure (1)..(349): unsure at all n locations
cggaagctctcgagaaaatcgaatnntcatatcttttcacacggatgtccgattcggngacataactgatctagacgctcgaaattgaacaacggaagctctcgacaaattcgaatggtcataacttttcacacggatgttcggttctgggacataacacatctagacgctcgaaatgaaccaccaaagctctagagaaattcgaatggtcataacttattacacgaatagtcgattgggaaaataatatatcgagatgctaaaaattaacaaccgaagctctagagaaattccaatgggcataactcttcacacagatgtccgattcggggatagaatatgttgagac

SEQ ID NO: 1108 - DNA, 373 bp, Glycine max
  unsure (1)..(373): unsure at all n locations
agctntgatgcaacattnggagaggttaatgtatcaactatatgatgcgctccatgagaggttggatcaaatggagaatagagatcataatgaagaagaaaggaggagaagagggaatgatggtgttcctagacaaaaccgaattgatggtattaaactcaacattcctccatttaaaggaaagaatgatccggaggcctacttggagtgggagatgaaaatagagcatgttttctcatgcaacaactatgaggaggaccaaaaggtgaagcttgccgccacggagttttccgactatgctcttgtgtggtggaagtgattatgcaagttgaagtggacgtttccattgggaaatacaatgataagggacttt

SEQ ID NO: 1109 - DNA, 411 bp, Glycine max
  unsure (1)..(411): unsure at all n locations
agcttgagggaaaaattgatgccttggtcattctagtaactcagcttgccatgaattagaaatttgcatctgcacttgttgcaagagtctgtaatctatgttttctgcagatcaccatacagatctatgtccttctttgcagcaatctggagtcaatgagcaacctgaagcttatgctgcaaacattcataatagaccccctcagcagcaaaaccaacaaaataattatgatctttcaagcaatagatacaatccaggttggaggaatcatccaaatctgagatgggcaagccctccacaacaacaacaacagcctgtccctcctttccagaatgttgccggnccaagcaagccatatgttcctcctccaatgtagcaacaacagcaacagtcacaataaaaacaacaagc

SEQ ID NO: 1110 - DNA, 427 bp, Glycine max
  unsure (1)..(427): unsure at all n locations
gagatggtatctggtcttagaaaataatttgctaagagccaattcggtgcgattggccaacctgaggaatggtgtagtcttgctgctgactacttgcattgtggccccctgcagctcccattcatatacctagggatgcctataggtgttaaccctagaaggaaggtggtgtgggagcctataatcagaaaatttgaagccaaattgaacaaatggaaccacagaagcatctctatggctggcagaattaccttaatcaatgctgtcttgacagctntgcccttgttntatatgtctttnttcagggccccttcagcagtcatcaagaggctcactactatccaaagacaatttctttgnggtggaaacttggaaggaaaaaagatagcttggatctcatggcagcaagtgtgtgctcctagagaaa

SEQ ID NO: 1111 - DNA, 450 bp, Glycine max
cgattgtcacgtgctcatgcattatttgttatccgtggctatacgagacatcttgccaaacaaagacaggttagcaataactcgcctgtgctttatcttccatgctatatgtagcatagacattgatccagtcatgtttgatgaaatggaaaatgaggccgcaattatactgtgccagttggagatgtattttccccctgctttcttagacatcatgattcacttgattgcgcatctggtcagagaaatcaaatgctgtggtcctgtttatctacggtggatgtacccggttgagcgatacatgaagatcttaaaaaggtatacacagaatctatatcgttcacaagcatttatcgttgagaggcacattgcagaagaagccattgaattctgtctgactacttacagaatgctaaacctgttggacttcttgagtctctgcatgatgac

SEQ ID NO: 1112 - DNA, 447 bp, Glycine max
  unsure (1)..(447): unsure at all n locations
tgctctacattacattgatgtttgtatttattggaggatgttgtatgccattnttgttttaagggtagcatttcttggtaaaactaactttccaaatgtttgcattcgcaggaaacggccccgaggaagtgatgcaatcctaccccccaagggcattggatagaacactccaataagattgggccaaaaatgcaagagaaggccctagggttctcatgagccttagggtagatttctgagcccatgggccaaggttgggtccaattatctttgtacatattagactaggatgtcattatatttggtccttgtatttagggatccatattgtaggtagggtaccctagaaatataggattnttcagcccttgtatttttgggcacctagactagttnttgtattaggggtagttntgtaatttcacatgcactaagtggatatttgat

SEQ ID NO: 1113 - DNA, 346 bp, Glycine max
  unsure (1)..(346): unsure at all n locations
tgtactatnggtcatatgcatatgatacaatcaaagccttctcttcaccaaccaggattccgaatgcttgcagtgcaaacaccgctgatatcaacgctccgcgcgtcttgttgctggcatatttatacatgattgtggctgaaagagggtagtctccaccgatggcaaacgctagacagaatctgaagaagcatagagaggccatgacaccctgtggagctgacccacaggagagttgctgggcaagggaccacactaccatgagaatgagcgttagtgcccatactctatatctccccatttaggcaccaagccaaccaaataataatggtccgtattatgcgcc

SEQ ID NO: 1114 - DNA, 409 bp, Glycine max
  unsure (1)..(409): unsure at all n locations
atgctttaatcagtgttttctctaactcatcttttctttaaatcaacctcccggtgtcaaaaatcacttgatccatgacatgcactctaaaatactttgtcttatgtttaaggtgtttcatggaaatacattaaactgtacttcatcatcttgtaccttgacagtgagtgttccatcatccacatcaatcacaactttagaaatcttgatgaaagatctactaagaatcaattgaacttcattgccttcatccatatccatcactgcaaagttgactggaaagacagatttgtcaacttttatcaatacatctacaacaatgccataaggaagctgtgttgttctgtcagctaactgcaaacccatccttgntggtctgatttcaacttctcctatctgcttgatcatg

SEQ ID NO: 1115 - DNA, 474 bp, Glycine max
  unsure (1)..(474): unsure at all n locations
ctcagcttataaggcacctgttctagctctttctgactcttctatatcttttgatctagaatgtgatgcctctggagtgggagttggagctgtattgttacaaggtgggcaccctattgcttattttagtgaaaaaattcatagttcccccctcaactaccccacctatgataaagagcgttatgccttaataagagccctccaaacttgggaacattaccttgtttccaaggaatttgccattcatagtgatcatcaatcacttaagtacattagagggcaaaacaagctaaacaaaaggcatgcagaatgggtagagtacctatagcaattttcatatgttatcaaataccaaaagggaacaacaaatgtggtagctgatgccctatctacgagacacacattgtnttgctccctangagctcaaattttaggatttgatcatatcanggacttggatgctttagatgaaca

SEQ ID NO: 1116 - DNA, 341 bp, Glycine max
  unsure (1)..(341): unsure at all n locations
agcttgtaatcgattacacatatactgtaatttattaccagaagagagtttcagaanacattctcaacagtcacatctttttgtgtgattcttgaatggctatcataggcctatatatatgtgacttgagacacgaatttgataagagtttttcaaaacaaaaaggtcttatcctcttataaagagaaatcgttttatcctcttacaaattccttggccaaattacttgtgattcaataaggaattatttgagtgctcacattgttcaatctatctctttcaagagagatttcttcttctcttcttcttcattntgaanagggattaagagaccgagggtc

SEQ ID NO: 1117 - DNA, 374 bp, Glycine max
agcttatgcagcatatatatactatataccttctctgcgcagcagcagactcatacgctggctgacaattatgacgtttccagcagccgatacaaccctggatggatgaatgcccctaacctcatatgtgacaggacctcacaacaaccacagtagtctggtgcttccttacaaaaagctggtgggccaagctgaccatacattcatccaccaatccaacaacaacgaaccccccggacacagccaacagttgaggcgcctccacaagctttcctcgaagaactagtgaggcaaacgactatgcacaacatgcagttttagcaagagaccagagcctccatttagagcttaaccgatcagatgggacaattagc

SEQ ID NO: 1118 - DNA, 423 bp, Glycine max
  unsure (1)..(423): unsure at all n locations
atcttagagcacctgcagctgcagcttggtagggagggatgttcattgttctttgcctgaattntggaagcaacgggtgcaactccgtgacccgaaaccacatgacccaagtactcaacttgtggttgggcaaatgaccatttagagaacttgagcacgaattggttgtgaaggagggtctcgaatgcttgctcaagatgaatgagatgctcaggcaatgtacgactataaattaaaatgtcgtcaaagaaaacgatgatgaatcgccggaggtaaggccggaaaatgtcattcatggtggcttggaacgacgaatgtgcgttacacaaaccanacggcatcactttgaattcatagtggccgtggtgagtgcaaaacgcagtcttggccacatcggattcatgcatncttatctgataatat

SEQ ID NO: 1119 - DNA, 372 bp, Glycine max
  unsure (1)..(372): unsure at all n locations
ctcactcggaggcccgattcaggcgcataatatatcgagactctcgaaantgaacaacggaagctatcgagaaattcaaatggtcaatacttcgaactcggaggtcctattaaggtgcataatatatctagacgctcaaaattttacaatggaagctctatggctatacaaatggtcataacttttcactcgaaggtccgattaaggcgcataatatatcgagacgctcaaaattgaacaatggaagctcttgagcaattcanatggtcataacttgtcactcggaggtacgactcagctgcataatatatcgtgacgctcgaaattgaaaatggaagctcttgagcaatgcaaatggtcataacttgtcac

SEQ ID NO: 1120 - DNA, 378 bp, Glycine max
  unsure (1)..(378): unsure at all n locations
gctntgatgtaacatttggagtggttaatgaaacaacgagatgatgcgctccatgagaggttggatcaaatggagaataaagaccatatgaattgctcaagagcttccattgtttaattncgagcgtctagatatataatgcgcctcaatcggacctncgagttaaaagctatgaccatttgatatgctcacgagctttcattgttcaatttcgagcgtcacgatatagtatgcacctgaatcggacctgcgagtgacaacttatgaccatttgaatcgctcaagagcttccattgcccaatcttgacgcgcacgatatattatgcacctgaatcggacctgcgagtgacaacttatgaccattcgaattgctcaaga

SEQ ID NO: 1121 - DNA, 355 bp, Glycine max
ttctgctggatcttcatggtggaaaatcaccattaaaggacctcattgaagctaaaagatccagcctccatagaaaccccacaagcaagctttcatcatcacgataccgggttctattggtgaggttgatgtaagcaaagctcttatacttgggagctagtatcaatttaatgcctctctccatgtgctggcgactttgagagatagagataatgcccacacgcatgaccctccaattagctgaccgcttcatcacaaggccatatggagtcattgaagatgttttggtgaaaggtaaaccccttatatttccagatgatttcattgcatagatatataagaagatgctgacatt

SEQ ID NO: 1122 - DNA, 345 bp, Glycine max
  unsure (1)..(345): unsure at all n locations
cggatccttaagcacctgctgcttgcaagctaacagtttttttttcttagtgcatacttttcaaaattagtatcaaaataatcttcaaatgattcatattntagtgtattttaaatttctttgaatttttatctacatatgaattaattatcaaataattgtttattaatgcaaaatttgataaatatgatatgcctgaaaggacactttcatctaatttgaacttttacaatagaattattcaattagaagttattaaaaggtattaaatgatgtgatattgaacgcattacattcatgtcatctgatctctcctatatatgcattaattgttatatattaata

SEQ ID NO: 1123 - DNA, 402 bp, Glycine max
tgttactgcatgatggcagcaatttcgacagatagatgacatgtaacatgttgagtccacttctcaaatttctggaaatccagagggaaaactgaaagatgataagtaaattatgcagtataaaccttttatgcagtaacaagccccaaacacatgacttgtaaataacaatttgaatagtaaaatttgattacactgtgaacaattatataatccagagaaattttggaactctcaacttccatttcaaattgttatgacaagctactacttccatttcaaattgttatgacaagctactgtggtgaaccatctgcttgaaaaaattaaattaaatgtcatatgagccaatggcccacatatcacatataaaactgctaagaacagatatgcacttgatct

SEQ ID NO: 1124 - DNA, 214 bp, Glycine max
gagcacctcgatgtattatgcgcctgaatcgaatctcctagtgaagagctactaccatttgaattcctgcagagctttcattgttgaatctcgagcggatcgatatattatgcacaagaatccgacctatgagtgaaaagctatgaccagtttaattgctggagagctttcggtgatgaatttctagcacctcgatatattatgcgcctgaatc

SEQ ID NO: 1125 - DNA, 463 bp, Glycine max
  unsure (1)..(463): unsure at all n locations
cactaagcttctttgagagacttgcttgagaagctagagcttagctacacacacccctctcataactaagctcacctccttgagaagcttccttaagaagattcctaaagaagctagagcttagctacacatacctctctaatagctaagctcacctccttgagatgagaagctagagcttagctacacaccccctataatagctaagctcacccccatgacaaataacatgaaaataatataaaaaaagtccttattacaaagacaactcacaatgccccgaaatacaaggctaaaaccctatactactagaatggccaaaatacaaggcctagacgaaggaaaaacctattctaatatttacaaagataagcgggctcatacttagcccatgggctcgaaatctaccctaaggctcatgagaaccctanggcctttccttggatctctagcccaatctact

SEQ ID NO: 1126 - DNA, 331 bp, Glycine max
ttctggcttcaattcatcagtgggcttgccttgtgtgagcaacatcttgcgatgtatccaggctttgatgacagcgttgcaagggctgctatccactgatatgatgaaagccaccattcttgctttccaatgtacatagatgatgccatcatgaattggcggactgatcactggtgctccttctatctgcatgttcatcagaattgaactgcctagatctcactcgaggatttctagtgcacgctctgataccaattgaaattctgatactgaagacagatgccgcacatgatgccacgacattactctgaatgacatgcagattgtgatg

SEQ ID NO: 1127 - DNA, 413 bp, Glycine max
  unsure (1)..(413): unsure at all n locations
gganactgagcagccatcattccanatcttggtgggaagccaaagacaaaaccatcagcatcacggagctcatttctggtgatgattggtacatcactcttgggcggtgctctcaatgcctcaagctcctcagttgatagtgtctcgggtacctgctcatatgtttagttaagtaaaaaaggaaatcctttaaataccctattnttattctcaataatgaagttgttttctacccttgactaaatgaatgcttacaacatccctttagctagagtaaatttgggaaattaagtcttagtcacagagatcatacagaatanagcacaggggccattggactaaaagtgacataagttgaattaatgcatatacagcattaggaattntgatggattaaaaatgaaaattacatg

SEQ ID NO: 1128 - DNA, 445 bp, Glycine max
  unsure (1)..(445): unsure at all n locations
cttctctatggatcaagctggtgaggaaagaaagttgcaactgagtgagttagatgaaatccgcctagaagcctacgagaacgccaagttctacagagaaaagaccaagaagttccatgatagcatgatagttaaaaaagacttcgtggttgggcaaaaagtgttattgtataattctaggcttggactcatgagtggtaagttgaggtctaagtggattggtcctttctgtgttactaatgttnttccttatggtacagttgagatcagaagcgactccacaaacaagagcttcaatgtcaacagacatcgacttaagccattcctcacgaacccttctttagtggacgtagtggtggaagagacttcttactccccctactctttctcaccatgacttagggagttttatttctatctcctttttgttttattacactgctga

SEQ ID NO: 1129 - DNA, 411 bp, Glycine max
  unsure (1)..(411): unsure at all n locations
tgcagcttaacattcaatttcgagcgtctcgattatgacgggactcaatcagacatccgagtaaaaagttattgtcgtttgaattggctcagagcttcaacattcaatttcgagggtctcgatatattgcgggactcaatcagacatccgagtaaaaagttattgtcgtttgaattggctcagagcttcaacattcaatttcgagcgtctcgatatatgacgggactcaatcagacatccgagtaaaacgttattgtcgtttgaattggctcagagcttcaacattcaatttcgaggcgctcgatatattacgggactcaatcagacatccgagtaaaaagttattgtcgtttgaattggctcagaggttcaccatttcantttcgaccgtctcgatatattacgggactc

SEQ ID NO: 1130 - DNA, 480 bp, Glycine max
  unsure (1)..(480): unsure at all n locations
ctaagctttagccaatgaactntgttagtgcttagctctactggagtttataagattggctaagattttgttaaaacataagcacttagacaatgaaggaaagctggagttgctgcacatgatgtccaacgttatgtcaaagaataagatcgggctgcacaatgcacaaggcaagatgaaatgtctaatgaagaattgaagctgcaggattcacgatgtcggatacaatgtccaggacatcctgcctgaaaatactggaattgctaaaagcattgaagctgcaggatccacgatgtcggatacaatgtccaggacatcctgcccgaaaatactagagttgctaaaagcattgaagctgcaggatccacgatgtcggatacgatgtccaggacatctggcccgaaaatactggacatataaatctgttatatctttaacagattattgtgcagttagcaagagataagatgatctattctt

SEQ ID NO: 1131 - DNA, 357 bp, Glycine max
tcttgtacggtaaagtctcacgatagtgacttgctcatgcaacaattgttagtcgtggctatacgatacatcttgccaaacaaagtcaggttagcgataactcgcttgtgctttttcttccatgctatatgtagcaaagtcattgatccagtcaagtttgatgagttggaaaatgaggccgcaattatactgtgccaagtggagatgtattttccccctgctttctttgacatcatgatttacttgattgtgcatctggtcagagaaatcaaatgttgtggtcctgtttatctacaatggatgtacccggttgagcgatacatgaagatcttaaaagggtatacaaagaatctatat

SEQ ID NO: 1132 - DNA, 496 bp, Glycine max
  unsure (1)..(496): unsure at all n locations
actcagcttacacaatntaattttctcaaacctcgagtttggaagaccaattactaagtctttcttaactagatgattaagatgatgcatgtttatgtgtgcagtcctacaatgccacaaccaagagtcatctatcttaccaaacaactcagctcctaaaatgatgcatgttcaatatttaacatatagatattacctactctcttgccaatatggacatcctgaccagacatagcttcactaataagacaataattcttgttgaattcaattttgaagcctttgtcacatagttgactaatacccaagaggttatgctntagtccatccacatatagaactntctttatctgagttntgtactgatttccaatatttccttcttccattatctttcctttgttattggctccaaaagtgacatatcctccttcttttgacacaaagtaatgtagctccatgtggagctngtaagccttggatcttcttcatcaac

SEQ ID NO: 1133 - DNA, 388 bp, Glycine max
agcttgtaggcctaggatcttcttcatcaatggattcctttgcttcttggaaaatgaatggcagcggaatggagaatgatacgagagaaggagacccacttcaggagaagatgagtctagaagaagctcaccaccataggaggccatggataatagcttgggggaagaacgagatgaatgaagggagagggagagaagacacgaaattttgtgctccaaatgagctctgaaatctgaattgtaatattctaatgatcaaagttgaaaaaaattcacacacatgacctctatttatagcctatgtgtcacacaaaaattggacggaaattcagattctcttgaatttgtggagccaaactctggcagccaaattcactaattatgatta

SEQ ID NO: 1134 - DNA, 450 bp, Glycine max
  unsure (1)..(450): unsure at all n locations
tcagcttagctacacaccacccctctcataactaagctcacctccttgagaagtttccttatgaagattcctaaagtagcttgagcttanctacacatacctctctaatagctaagctcacctncttgagatgagaagctagagcttagctacacaccccctataatagctaagctcacccccatgacaaaaaacatgataatacaaaaaagagtccttactacaaagactacttataatgccccgaaatacaaggctaaaaccctatactactagaatggccaaaatacaaggcccagacgaaggagatacctattctaatatttacaaagataagcgggctcatacttagcccataggctcgaaatctaccctaaggctcatgagaaccctangaccttcccttggatctctagcncaatctacttggagtcttctacccaatgccct

SEQ ID NO: 1135 - DNA, 305 bp, Glycine max
  unsure (1)..(305): unsure at all n locations
tacttcacatggacttgatggggcctatgaagttgaagccttggagaaaaaggttgcctatggtgttgtggatgatttctccagatntacctgggtcaactttatcagagagaaatcagacacatttgaagtattcaaagagttgagtctaagacttcaaaaagaaaaagactgtgtcatcaagagaatcaggagtgaccatggcagagagnttgacaacagcaagtttactgaattctgcacatctgaaggcatcactcatgagttctctgcagccattacaccacaacaaaatggcatagttg

SEQ ID NO: 1136 - DNA, 441 bp, Glycine max
  unsure (1)..(441): unsure at all n locations
tgcttctcacacgttactctgatgacaacatctcttcctgagactcttgcttcaactctgggacatatcttgataggtgtatcatcacatgcgcaaacgttgtcagcaacattggttgtatttattttgaaacatcctacggattctgtctttctcttcttgttatctttttccaaatcctttacacgctgctgaagatatttcacatgctctatagcgttgganagaacagaagccttgtccatctacacattagagatatcttacatattattttataagctaatgatggattggtgtgatctaaatntcttaagtttggctttgaaattacaataacaacaagaataaattttattccagtggatgactcagatatatgaatatcgatcacaagagatcattaaactagcttaaaatcaaattctgggaatatattat

SEQ ID NO: 1137 - DNA, 384 bp, Glycine max
  unsure (1)..(384): unsure at all n locations
cctcttcacgttaggaatatgaatgtagcatatatatccatagattcttacgtgctntgctgatggcttcttcccgttccaagcttcaattggagtcttgacttttacagacttagttggacatctgttgagtatgtaaacagcagtgtagactgcttcagcccagaatgtgttaggtaatcccttctccttgagcattgatctagccattatcataactgtgcgattctttctctcgaacactccattttggtgaggagaatatgcgactgntagttgtcgcttaatgccttcatcctcacataatctttcaaactcgcgagaggtgtactctttgccgtgatcacttcttagtacttttatacattttccactgtgattttc

SEQ ID NO: 1138 - DNA, 422 bp, Glycine max
gacaatataatccatatcttgtgataaataataatgtataatatataaagagacatctaattacttagcagatcatagtccattaggtaacattatatgatataagcaatttatttcattttaccttccttaaatttctcacattccttatttggaagcattagtaatggtgcctcttttaaccaatcttgagtgcaaataatagtatccactatttttggtgttagggagttgcagtatggatcaagcactcttccaccattgctgaatgttgacttagaagtcacaatggtgacatgtatagccagaacatctctcgcaatatgttcaaggaccaagaattgcccacactttaatctgcaccaatgtggatatccaaagccttagcctctaaggattccttcatgtatctatctaactca

SEQ ID NO: 1139 - DNA, 421 bp, Glycine max
  unsure (1)..(421): unsure at all n locations
tgacaatgactntntactcggatgtctgattgaggcccgtaatatatcgagacgctcgaaattgaatgtggaagctctgagccatttcaaacgacaataactatttactcggatgtctgattgagtcctgtcatatatcgagacgctcgaaattgaatgttgaagctctgagcaaattcaaacgacaataactntttactcggatgtctgattgagtcctgtcatatatcgagacgctcgaaattgaatgcggaagctctgagccaattcatacgacaataactttttactcggatgtctgattgagtcccgtcatatatcgagacgctcgatattgaatgttgaacctctgagctaattcaaacgacaataacttcttactcggatgtctgattgagactcgtcatatatcgagacgctc

SEQ ID NO: 1140 - DNA, 390 bp, Glycine max
tctctctcttgtgcaactgtctcatcctattctcaggtgtataatgaagctttgcaggttcaggtgcaggtgttgctactggtggaggcacttgaatttggttgctatacctcaacgtgatggcactcacatgtttcggattttgcacagtttgtgaatgcaatttgtcagaattctgggactgagctcggttcatctgagtagccatctgccccatctgatttgtcagactttgaatggaggctcttatctcttgctgaaattgcatattatgcatggtcattgtgcctgactaacttctttaagggaggttgatgacgagcctaaatagttgttgtctttgtgggactgctgctattgctgatgctgttttgaggatgaacatatggc

SEQ ID NO: 1141 - DNA, 428 bp, Glycine max
  unsure (1)..(428): unsure at all n locations
tggatntcctgttagtacggaatctttccttcctaagatggagccaaacccagtccccctcattaagaactagctcctttcttcctctattgcccttagttgaatacaccttctgttggatctctatttgtgtcttaaccctctcatgcaacttctttacaaactctgacctagattccccttctatatgtataaaagaagtgtcaagtgggacgggaatgaggtctaatggtgttaatggattgaacccatagacaacctcaaaaggcgattgcttggtggttctatgaaccctcctattgtacgcacattctacatgatgaagatactcatcccaagattatggntgccttttagaagagcccttataagaggggataaagacctattcactacctctgtttgcccatcagtctgtggatgacaac

SEQ ID NO: 1142 - DNA, 475 bp, Glycine max
  unsure (1)..(475): unsure at all n locations
tattaggacctataatactcagcttatgagagagtcaaagatcaaattgagagganaaatataagctatgctaaacaagccaacanagggagaaagaaggttgtcttcgaacccggagattgggtttgggtgcacatgagaaaagaaaggtttccggaacaaaggaaatcaaagcttcaaccaaggggagatggaccatttcaagtgcttgaaagaatcaatgacaatgcttacaaagttgagctgcccggtgagtataatgttagttccaccttcaatgtctctgatttatctctttttgatgcagatggagaatccgatttgaggacaaatccttctcaagagggagagaatgatgaggacatgaccaagagcaacggcaatgatccacttgaaggacttggaggacctattgatgatgacatgccaagagcaatggcaacgatccacttggaggacttggatgacctatgac

SEQ ID NO: 1143 - DNA, 284 bp, Glycine max
  unsure (1)..(284): unsure at all n locations
agcttgaaccctaacaatggaagctctctatattttcaaatggnnntancttctcagacggatgtttgatttggacacataatatatcgagacgctagaaattgaacgattgaacctgtcgagaaattcaattggtcataacgttacacacggatgtgcgattcgggcgcattatatatcgtgactgttgaaattgaacaatggacccttttgagatatttcaatggtcattactatatcacacgaatgtgcgattcagggactaaatatatcgagacgtgtga

SEQ ID NO: 1144 - DNA, 312 bp, Glycine max
agcttactgggggacatcttgacttgctttcctatctgacattcaccacagattctgccttcttctattttcagatagaggatgcctctaacaccacctttgtgaatgatttccttcatgcctcttaagtgcagatgtccaaatctttgatgccatattctgacttcatcttctttggaggatagacatgtggaggagtacctggttttttgaggtgtccataggtagcagttgctctttgatctgctgcccttcattagaacttcactctactcatctgtcaccaagcattctgactatgtgaagttactt

SEQ ID NO: 1145 - DNA, 168 bp, Glycine max
  unsure (1)..(168): unsure at all n locations
gtccgatncnggcgcataagagatcgagacgcttcaaattgaccatcggaagccttagagaaatttcaatggtcataacttctcactcggaggtccgattcaggcgcataatctatcgagacgcccaaattgaatcatggaagctcttgagcaattcacatggtcata

SEQ ID NO: 1146 - DNA, 348 bp, Glycine max
  unsure (1)..(348): unsure at all n locations
ctatgattgtcacgtgctcatgcatttattgttcgtcttgtctatacgagacatcttgcctaacaaagtcaagttagccataactcgcctgtgctttttcttccatgctatatgtagcaaagtcattatatcctgtcacagttgatgagttggaaaatgaagccgcaattatactatgtcagntggagatgttttttccccctgctttctttgacatcatgaatcacttgattgtgcatctggtcagagaaatcaaatctcgtggtcctgcttatctacggtggatgtacccggtngagcgatacatgaagatcttaaaagggtatacaaagaatctatattgtccag

SEQ ID NO: 1147 - DNA, 367 bp, Glycine max
  unsure (1)..(367): unsure at all n locations
agctatacatttgctattactaatatttgattttgttttaagcatctgcttacttgacaagacgtgcaacttgagtaataaactgagagaccgattcttgagttgccaacactgaagaagatggttctgctaaaggctttgcgggtggttcctcctttgatttggctttcataggaggagaagtagcattggaggaactatcaagggcaaccttgttgaagccaaaaagatgagaccaatatgtgtgtcacaggagaagattttaacaagtttacacattctagtgatgtttggatgaacttcttcaacaacacttgaggaagatattaataaggtaaaatggattaaactanaatcaacttatgca

SEQ ID NO: 1148 - DNA, 338 bp, Glycine max
agcttctcaatgatgtgaggtctgaatttgcttttctatcacgcgttggcgtcttccagaatttgattggatgaccacgagcggttgttggaacaggatctgactgagcttggtgagcccaggtgcagcgtgatgtcaaacatggaaaatttgaatgacgcacacattgaagtggacagtgagagaaagaaactcagggttgcagagtctcctaacagacagcttgaacgggatctgaatatggaatacgagcttattgtgagtcggaggatgagctgataaagagacgacttttttggagcaggcagtcaacgaagtggcttttttttagaggaatt

SEQ ID NO: 1149 - DNA, 352 bp, Glycine max
catgcaagcttaccattcatagaatacctcttctctattttatattgacgtaccacagctccatcttgaacatgtcctaattgcgcaaacgctgtaatatcaattaacaaggttctatcatcacgcaccacatgtgtcgaccttttcatataataaaatattgtcaaagcctcgatgctacaaccattctgatcatatccagccattatcgtattacaagaattaacatctcctctgcgcatttcatcaaataaccgcgtggctgcaagaacgctaccccgatttcgcttaaccatctatcaaactccacgccctttttccacttaacataccctaccgacattgaattcca

SEQ ID NO: 1150 - DNA, 385 bp, Glycine max
  unsure (1)..(385): unsure at all n locations
tgagcgtctcgatatactacgggactctttcggacatctccagaaaaagntattgtcgtttgattttgctcagagcttctgttctgaatttccagcgtgtcgatataccacttgtcacaatcagacatccgagtaaaaaattattgtcgtttgaatttgctcagagcttttggtttcaatcttgagtgtctcgatatattacgggattaattcggacatccgagtaaagagctattatcgttagaatttgctcagagcttctattttcaattacgagcgtctcgatatactacgggacacaatcggacatccgagtaaaaagctattgttggttgaatttgcttcaagcctttgttttgaattttgagccgttctgtttactatg

SEQ ID NO: 1151 - DNA, 386 bp, Glycine max
aaatttaggaggctggaggggggtatcccatgaaagcaagctgagaggactaccattatttaatctccccgctcgctattgttaatgatgtgtacttgtctagaagtttagaactaaatgctcacaagagttcaacatcacatctttcacgccccccgagctattacacgttttcgtccgtgggccaagataaccccaagctcagtacgaaataataaatattacctctatatcattgattatttttcaagataaacatgggtctatttcttaaagcacaaatcataacgtctttccaccttcaagaagttcaaagctgcagtaacaaaagatagtggctgagagatcacagtcattacgactgatcgaggatgagaattcacttg

SEQ ID NO: 1152 - DNA, 444 bp, Glycine max
  unsure (1)..(444): unsure at all n locations
gcaaacttcttatatccataaggaaattcaatcaataggcctccaatctttaatggagagggttaccactactcgaaaacccgaatgcaaatttttattgaggcaatagacttaattatttgggaagccatagaaatagggtcttatatatccaccacagtagaaagaattacaatagatggaagcacatcaagtgaaagcataacaatagaaaaacctatagatagatggtctgaagaggataaaagacgagtacaatacaatntataagccaaaaatataattacatctgccctgggaatggatgaatatttcacggtttcacattgtaagagtgctaaggaaatgtgggacactctacacttaacacatgaaggaacaacatatgttaanagatctangataaacacattaactcatgaatatgaactatttacgatgaat

SEQ ID NO: 1153 - DNA, 404 bp, Glycine max
gatccttagagataacctccacgcatgcaagcttgtagaacttcccaaaggcaaatatgttgttggagcatagtgggtggtcagaaacaagctagatgaaatatgtaaggttgtgaggaataaggctatgcttgtagccaagggttattgagaataagaaggtgtaaattataccgaaacttttgctcatgttagtcgtctatagacaatacatattttactatcctttactgctcatcatggtatgatattttgtctatagaaaaaagaattgtattttttctatattttgaaaaacgcacaatggtgtgtataaatacggttacaagactgattgtatacactaattctgagctaaaaataaggaaccaaaatccctataattgctgtaactatgaaaggaa

SEQ ID NO: 1154 - DNA, 332 bp, Glycine max
gtagacaatataatcaatatcttgtgataaaaaaaaatttataaaatataaagagacatctaattacttagcaaatcataatttattaagtaacattatattatataagcaatttatttcattttaccttccttaaatttctcaaattccttatttgtaagcattagtaatggtgcctcttttaaccaatcttgagtgcaaataagagtatccactatttttggtgttagggagttgcagtatggatcaagcactcttccaccagtgctaaatgttgagttagaagtcacaatggtgacaggtatagccaaaacatatttcgcaatattttc

SEQ ID NO: 1155 - DNA, 433 bp, Glycine max
  unsure (1)..(433): unsure at all n locations
actaagcttaatttacaccagattgttgaagctgttaataaagataaaggtggtatgttttttctctatggatatggaggtacaggaaaaacatacatttggaaaacacttgcaagttcactaagagctgacaataaaattgtaataatggtagcctctagcggcatagcttctctactatttcctagaggtagaactgcacattcaaaatttaaaattctagttccagtttttgaagactcaacttgcaatatccatcaaggaactcaattagctgaactattaaatcagacaagtctaatcatttgggatgaagcacccatggctcacaaattctgttttgaggcacttgatcacagtcgtagagatatcatcaaacacaactcanaggacaataaaatctttggaggtaaagtcatggtctttggtggag

SEQ ID NO: 1156 - DNA, 337 bp, Glycine max
  unsure (1)..(337): unsure at all n locations
agctntggaaaatgatatctatacaaaagttattttatgaagcgactaacactcatgcctcttgtccttcatcgtaagttgatccttagctacctatgaagttgtttgaggatgcaacacaaatttagcgctaagatgggtgagggtaatctcattacttaggtctttataaatgaccttcctatcaagctgccatgaccttactaaaagaatatgccctacctccatgggaactatatcataattaaattcatccttatatgtcctaatggagaaaggcaccttcacttgctggtaacaatcattatccctttctcactgagccattaaagtttat

SEQ ID NO: 1157 - DNA, 397 bp, Glycine max
agcttgagcttggctcattacttgtcataggttttttttaaggctcggctcggcttatataaaagtctggtttggcccacgagcctatttaaaagcttgcttaaagacgtatttgattaattaattattttaaaacctagtgaaatactaactaaaaaaagaaacttataaaatataaaatttcgtataaataatgtacaaatccaaaaataattgataaacaaaatcatattgaattcaagtcgttaaagcacaaagtatatcaaaagaaaataaaaagagcataatattaaaaaatgtatggattagagatgattggtagaaaatgaattctattctacgtgaacagtgtgcatgaacagtaataaaaactgaaattctaaaatcctaaaattat

SEQ ID NO: 1158 - DNA, 305 bp, Glycine max
cactttgcatgtctaacatgagttctcatactctcggttacatccctataagcgcaaaaaccattctctaggtctttctctactacatatctacgacgaacacattgaggaatcttcttttggtgatacttctccaaacctgatttggcaagggctatatcaattatacccagcttctgcctctctcttctgcacccatatcatgcaatatggtgtatcagacacaattgtccttcttttcttgtccttttgagacctataatcattgtgtactctatgtattatgatagactgaagactatgga

SEQ ID NO: 1159 - DNA, 438 bp, Glycine max
  unsure (1)..(438): unsure at all n locations
ctatgttctaatgcaggcacttagagcttgtcatgatgctctcaaatcatttatattatcatatggtttcacaaccagaagaagcaacccttctctctttatctacatctcgggtaacataactgtctattttttggtgtatgttgatgacctccttctcacaggaaataacactacattcatagacacattcattgagttcttatctaatcggttgtcactcaaaaacatgggggcaccatactactttatgggtattgaacttatacccatgaactcaagcatgttcctctcacaacacaaatacatcaaggatgtacttgagatatttgagatgcangatgtgaagtcgtcacccacaccacttgcctcgacgactacactcatgtngcatgatggtacaccaaccaataatgctactcaatatcatagaattat

SEQ ID NO: 1160 - DNA, 429 bp, Glycine max
agcttgtttaccccatgttgaattcgcttacaataaagttgttctttttcaccactaattgctctccttttgaagttgtttatggttttaacccactaactcctcttgatcttttgcctatgcctaatgtttctgtttttaagcataaagaaggtcaagcataggcggactatgtgaagaagcttcatgagagagtcaaagatcaaattgagaggaaaaataaaagctatgctaaacaagccaacaaaaggagaaagaaggttgtcttcgaacccatagattgcgtttggatgcacatgacaaaagacaggtttccggaacaaaggatatcaaagctttaaccaaggtgagatggaccatttctagtgcttgaaagaatcaatgacaatgcttacaaagttgagctgctcggcgagtataatgttagtt

SEQ ID NO: 1161 - DNA, 377 bp, Glycine max
tgcaagcttgatgtttgtgttgaatgcattaaaggtttacaatctcaaaaacaagaaattaagtgcatatagggctacagacgtcttggaattgatacatacaaacatttgtgggccatttcatacaccttcgtggaatggttaacaatattttatatcattcatagacggttactctagatatgcatacttgtttcttatacatgaaaagtcacaatctctggatgtgttcaaaacatttaaagttgaagttgaaaatcaactcaacaaaagaataaagtgtgtcaaatctgaccgtggtggtgaatactatggcaaatatgacggttcaggtgaacaacgtctggcgtctttttcctggtacctagatgaatgtt

SEQ ID NO: 1162 - DNA, 292 bp, Glycine max
  unsure (1)..(292): unsure at all n locations
agcttatgaatgcttactgtgaccgattattctgtttatntcaactacattgcttttctgtttgatggacaccgcctcctagctgagcagactccagatgaggtttgtgtttcctacatgtattcatgaattccccttgtattctttattcttataatctacatttttcggtttgacttgaatttctttttgttgcagttggaaatggatgacggtgacgagattgatgccatgcttcaccaaacaggaggttctgttgtctgaaggatgtgattacctttgctcctcatta

SEQ ID NO: 1163 - DNA, 430 bp, Glycine max
  unsure (1)..(430): unsure at all n locations
tttgagcaattcanatggtcataactnttcactcggaggttcgattaaggcgcataatatatcgagacgctcgaaattgaacaatggaagctctcgagaaattcaaatggtcataacttttaactcggaggtccgattcaggcacataatatatcgagacgctcgaaattgaacaatggaagctctttagcaattcaaatggtcataacttttcactcggaggtccgattcaggcgcataatatatcgagacgctcgaaattgaacaacggaagctctcgagaaattgaaatgatcataacttttctcacggaggtcagattcacgcgcataatatagcgagacgctcaaaattgaacaacggaagctctcgatatattcaaatggtcataactcttcacacggaggtccgattcaggcgcttaatatat

SEQ ID NO: 1164 - DNA, 435 bp, Glycine max
  unsure (1)..(435): unsure at all n locations
tgaaggcgtgtagcccaccatcttttcatagtagaatatttgtaatgtgtctactatcattgttatcatntttttcttcgtcattgaggtgccacttgagctgccagatctctccacctttgggtgtattctttgaaagaaccgtgcccctttttgcacatgttctatagttgcatcctatccgaaaccatatcaaaattgtactgatactgcctaacaaaggcaaccattaggtccttccaagaatggactcgggaaggttccatgttagcgtactatgtaacagctaccccagtaagactttcttggaagagatgtatcaacagttcctcatcttttgcgtatgcccccatctttcgacaatacatctttagatggttcttggggcaagtagtccccttgtacttgtcaaagtccggcaccttgaacttggga

SEQ ID NO: 1165 - DNA, 429 bp, Glycine max
ctctatattttaacaatcccatcctccctccagataatgagtttctggtggagagtagatggcacagccccgactccatggatccattcccttcctaatagcacgtcaaaattagccttggactgtatcaccaggaataaagttggtcgaactatactgcctacagcaacatctacttgaatggctcccacagaatagccagtgttaccctcataattcgaaagcacaatgttgtgggcagatagatcagtgtcatgtttcccgatcttgtagagcatacatcgaggcattaagttaacagacgctcctccatctatgagcacatttgtgattccaacattctcaactcttgccctgatgaaaagaggttcgagatgacttttcactcgaaaatctggcttatgaagaacgctaattgttcatccacac

SEQ ID NO: 1166 - DNA, 394 bp, Glycine max
tctagccaaatggacttaccttgaattaattcctttgatttctcctttgagccttgtttccctttccttgttttgaagctcactacaagccttaagtgaaaaaccatgatattaccatatccttaaggaattttggagctctggaattgttttgcgaataagtgtggggggtatttgtttcattggacaacttgtgatgcaatcctactccgcaagggcattggatagaaaaactccaagtagattgggccagagatgcaagagaaggccctagggttcttatgagccttagggtagaattcgggcccatgggctaagtacgagcccgcttatctttgtaaatattagattaaggtttcattatttttgggccttgtatatagggcttcataat

SEQ ID NO: 1167 - DNA, 516 bp, Glycine max
agcttgtcaatgcagccttatcttgagatacacccaatccccctccttaatctttgaaggtaggcgatgattattggcatactatgtcatgtgattttgggctctgtttagatgaaacttcaactgattaagtgcttcatctctttctataagatcctaagccactgcctcaactaggacttcccctagaatgaaccttgccaaagatggggatggtcgaccataacctatttcaaatggggtacacctggcagctccctggtaatatgtattataccactattctgcccacgggataaactcaacccaagatttggattgctttgcacacatctcaaatatctctccatggttatgtttagtaccttagtttggccatttgaccgagggtgataagcaatacttattttcaaagttggtccttgttttttgaataactcctgctaaatataactcaaagcatccttgtcccttcactattgaaaaaaggaattccaagctgccttattacttcct

SEQ ID NO: 1168 - DNA, 678 bp, Glycine max
tcccaagtttttaagttcttcctcaaaactgtcctaagcaaagttcccaaagtcctattaacaacttccgtttgcccatcggtttgtgggtgacaagtggttgaaaataacaatttagtgcccaacttgctccacaaagtcctccaaaaatggcttaggaacttagagtccctatcactaacaatgctccttggcaaaccatggagtctcacaatctccttgaaaaacaaatcagccacatgggaagcatcatcaatttttttacatggaataaaatgagccattttagaaaacctatcaacaaccacaaaaatggaatctctaccattgcttgtttttggcagccccaaaacaaaatccatggataaatcaatccaaggatactccggaattggcaatggagtatacaatacatgaggctttaccttagactttgcctttttacatacaatgcaatgttcacaaaatttctgcacatcctttttcatatgaggccaataaaaatgttcttgtaatgtttctagagtcttttggaccccaaaatgccccatttaacctccttcatgtgcttcacaaacaagcaaatttctagtagaacattaggcacacacaattgttttcttgaaaagaaagcttcatgtctaaaaaacatttctgaaaaatttcacaattttaaaa

SEQ ID NO: 1169 - DNA, 578 bp, Glycine max
  unsure (1)..(578): unsure at all n locations
agcttcttcttgtttctctccccatttgaaaccaacatttttcttgagcacttcattgagaggtgctgccaatgtgctaaaatccttcacaaatcgtctataaaaacttgctaagccatgaaaactcctcacctcggtcacagacttaggtgtaggccattcttgaataaccctaaccttctcctcatccacttgcactccttttgaactcacaacaaaaccaagaaacacaacatggttagtacaaaagatgcatttttcaagattgacatacaattgttcttctctaagcacagtcaagacagattttaaatgatcaatatgcaaatcaagtgaagtgctatagataagaatatcatcaaagtacaccacaacgaactttcctatgaactctctcaagatatggttcattaatctcatgaaagtgctaagagcgttagttaggccaaaaagcataaccaaccattcttacaaaccatattttgttntaaaagccagttttcattcatcccctttctaatctaatttgatggatccctttttaaatcgattttaaagaatacatgccccatgcaatt

SEQ ID NO: 1170 - DNA, 552 bp, Glycine max
atatgttatatttaatcattttaatatataatactatatatggagaaaaatacttattttaatacataaatattaaattaataacattaaatgcaaccttaatatttttgtttaaatctcgtttaaaattttaaatttaattacttaaaaaatatgtattaaaaatattttttttacatatatagttaaatataaattaaaatatttttttggttaccatgcaatttatataaaatattcacctgctttaactttaccgaaaccttaaagtttttattttttaaatccgcaaacaaattatatatattagaagtaagtatcagagataccttaagaacaaaatataagcccaacattcagcaactcggttaatcaatattaatatctgatcaaaagatataagattaatttgataaataaaaattaaaatttaagagtgaaaagagaaattgtgagtttaaatttctgtcattaatatttctaacaaaactaataaaataactcatttactgaaaaaagaacacctcatccgattaaatataaactaaccca

SEQ ID NO: 1171 - DNA, 420 bp, Glycine max
tgcaagcaaactggatgcgttggtcaacttggtaacccagctggccttgaatcagaaatctttacctgtcgcaagggtttgtggtttgtgctcctctgctgaccaccatacagacctttgcccttccatgcagcaacctggagcaattgagcagcctgaagcttatgctgcaaatatctacaatagacctcctcaacctcagcagcaaaatcaaccacagcagagcaattatgacctttccagcaacagatacaaccctggatggaggaatcaccctaacctcagatggtccagccctcagcaactacaacaccagcctgctccttcctttcaaaatattgttggcgcaaccaaaccatacattcctccaccaatccaacaacataaccaccccataaacagccaacagttgaggcccct

SEQ ID NO: 1172 - DNA, 496 bp, Glycine max
tgccttccaagaatgatattgcggttatcatgtacacaagtggtagtacaggtctgccaaaggtttgtttcttcgtcaagttttgttaaaggtgtccctttctgtgtgtctgtgaatgtataatctcttattcatatttgtgatttgatgcaaagtgcttttgtccagagtcatgcttgtgaataatgattttgggtgataaaatatcaacaagaaccatatcaagacattgtattaatataatgaaaattttcttgtctgcaacattgagaaccaataggatctccctcagctcagttctatgattccctttgatttgacagggtgttatgattactcatggaaacattgtagcaacaacagcagcagttatgacaattattccaaatcttggtagcaaggatgtgtacatggcctacttgccccttgctcatgtttttgaaatggcagcacaggtaatttcttcttagccttctaactgtcaaagtagttgatg

SEQ ID NO: 1173 - DNA, 486 bp, Glycine max
ctaattaacctaaaattgagagaaaatgattttttaacacacaaaccggaagtactaaatatttattaccaaataaattggaataatctcatacaatttacacaagttttatacataaaaggtagtgattttcaccgactaacagaggcctctacaatcacctttcctccttctctattatactgccattgatcttcaagaagcaaatgactctattgatgaacaacatccaaagtctacaagctccacatgaagctacatcatgtgggatcaagaacagcttcatctacgagaagctcttttgcttcctctatcttttgcttgggcaattcaatttaataacgtattcttaacaatttctccatgtatctgcttcattgccttgcggtttggttctgctgaaagtttattccaataaacacaccgatttaatcctacatctacacttgttattggatttctatgggtcaaatttatccatatact

SEQ ID NO: 1174 - DNA, 615 bp, Glycine max
gaaagatagaacagccaaaaagactgacaaactgacatgaataatgtactattgttgtaagcttttcaaggaatcaccgcatcctgatgaaaagcagaggcaacaactcagcaaccaacttggccttgctccaaagcaagttaagttttggttccaaaatcgtcgaacccaaatcaaggtatctaaatttatttacctaaatattactcaagaatatatgcaaacttaatttatttaattagaaattatgtaagcattatgcaatattattgccttttgcaggcaatacaagagcgccatgaaaattcattgttgaagacagaattagacagacttagggaggaaaataaggccatgagagagaccataaacaaatcttgttgccccaattgtggcatggtaacggctaccatagatgcttccatgtccactgaagaaaaacaacttcttattgaaaatgccaaactcaaagccgaggtaataaatttgtataaaactaaatctaaatacaaggaacatgaaactttaaaaaaagaaaatgtattaatgctagaataatggtggatctatgtgtcaaagtacaaactacaatcttaatgaaaagattccctaata

SEQ ID NO: 1175 - DNA, 684 bp, Glycine max
  unsure (1)..(684): unsure at all n locations
tatatcgttgctagcaagcagtatatcatcgacatataacaccaagaatgagtatttactcccactaaacttgtggtatacacaatcatcaactgcatttgcctcaaaaccatatgaggtaatgacttgatggaacttgtaataccattgacgggaaccttgcttcaaaccatagatggacttatttagtttgcaaaccatagactttgagtcacctgatacaaagttttctggttgcatcatataaattgtttcttcaatgtcaccatttagaaacatagtcttaacatccatttgatgtagctctaaatcataatgagctaccagtgtcattattgttctaaaagaatcctttgaagatattggagaaaaggtttctttatagtcaatgccttccttttgggtaaatccttaggcgagccttatatctctcaacattgccctttgaatcccttttgattntaaatatccatttgtaaccaataggtttcacacttttaggcaattcgacgagatcccaaacgtcattgtcttgtatagatttcatctcatctttcatggcattgatccaattttgagagttagaactacgcatgacttgtgataactgctaaataattgtgaataaatgtagaaaattagccaaatttttgctttaaaatattatttagcagttatttgtga

SEQ ID NO: 1176 - DNA, 506 bp, Glycine max
agcttgagcttggctcattacttgtcataggttttttttaatgctcggctcggcttatataaaagtctggtttggcccacgagcctatttaaaagcttgcttaaagacgtatttgattaattaattattttaaaacctagtgaaatactaactaaaaaaagaaacttataaaatataaaatttcgtataaataatgtacaaatccaaaaataattgataaacaaaatcatattgaattcaagtcgttaaagcacacagtatatcaaaagaaaataaaaagagcctaatattaaaaaatgtatggattacagatgattggtagaaaatgaattttattctacgtgaacagtgtgcatgaacagtaattaaaactgaaattctaaaatcctaaaattattctcctctccgaaaaaaaactccttacctaaaacttgggggctggtatataagtccacggtcctcaaacttacaaatttatttaagttccaccccttaacgaaatttaa

SEQ ID NO: 1177 - DNA, 559 bp, Glycine max
agcttctaaactttgtacaagaatgaatctctgataccacttgttagacaagtggcctcagatatcttaagaagggggggttgaattaagatgtcccaaactgtttcccctaattaaaaatctatttcactttttactcaagttatgaattcccttaatgacaatcttcttaaatattaattcaaatgaagcaacttgaatatgaatataaagcaatgataaataaaggagattaagggaagagaaaatgcaaactcagttttatactggttcagccacacccttgtgcctacgtccagtccccaagcaacccgcttgagagttccactatcttgtaaattccttttacaagttctaaacacacaaggacaatccttcctttgtgtttagagatcctttacaacaagagactcacagtctcttaatcccttatagaatgaaaaaaagaaaaagaaccaatctctctagaaagagatggattttacagattgaccactcaaataattccttaatgaattgccatttgaatggccaacgaattctttagaagattaaatga

SEQ ID NO: 1178 - DNA, 369 bp, Glycine max
tctattctgaatgtcaagcgtctcgatatactacaggacactatcaaatatccgagtaaaaagttattgtcgcctgaatttgcttagagctttcgttttcaattttgagcttctcgatatattacgagactcaatctgacatccgagttaaaagttatcgtcgttagaaatttctcagagctttcgttatcaattacgagttactcgatatattatgggattcattcggacattcgagtaaaaaattattgccgtctgattttgctcagagattccgttatcaatttcgaggatctcaatatatcacaggattcatttcgacatctgagtaaaagttattggcctttgatttgctaacagcttctattc

SEQ ID NO: 1179 - DNA, 511 bp, Glycine max
  unsure (1)..(511): unsure at all n locations
ntatgcttgctctcttattcacaccaaaaaaaggagaccaaatctaccaaagccaaaatctcctacaggtccaaactcaaaaagacccattgatctgtgatgattatgcgcattaccccttgatttgatgggaaatgacttgcaaaatcgatttatgacgtgtttgtgatttggaattgagaggagacacttgccagtgtgagattttatacacctttgagtggttttcctccattttattgaatctagtgtttcttctaatgtttctgtagaaaagaaatgcaaaatgtcttaatctcattcttggttatgagaaattctatctttgtgctttcattcctcattcgtggcattatttttgaaaaaaaaagtgtgttctgatcggtttgggagtttgatttctttaccaagtgtgttcgcattttaatggaagttttcacaaactccaatgccttctgtcttttacatttcaaagactgtaatgtcttcagtcttttacaatttcaaagac

SEQ ID NO: 1180 - DNA, 531 bp, Glycine max
  unsure (1)..(531): unsure at all n locations
tcctcaatttttttggattgatgctcttaagacggttgcgtatatattaaaccgagttccaaccaaaattgtctcaaagacaccttttgagctattcaagggttggaaaccaagtttgcgacatatacgcatttggggatgtctgtctgaagtaagaatttataatccacaagagaagaaactagaccctaagaatattactgggtatttcattggatatgctgaaaggtctaaagggtataggttctattgtccatcccacaacactangattgtggaatcaaggaatgcaaagtttcttgaaaatgacttgatcagtaggagtgatcaatttcagaacatttcttctgaaagggatcactatgaagcttaaccttctaggacaagtaataggttggtagtcattcccacccctcaagttaaaatgggtgttagacaaccagtgattgaagttccacaagctgttgaaagtgatcatgtagatcaagttgtttgtgaggaacaaaatgatgatattgaaacaactagtga

SEQ ID NO: 1181 - DNA, 361 bp, Glycine max
  unsure (1)..(361): unsure at all n locations
tatagagctctgtagtgggttgtaaatggaataacgatttaaacaaatgaattaatatattcttggacttgannagaagattannaaatagtaccatattttaatttaagatgcccgaaacttcgacaaaataccgacaacaatttatttaacgaaaaaaataagtatttctattaaaaaaacttgttttattcaaatattatattttatcaaaaacaagaaatttggaaaagtaagtaattgaatttctttatccaagcataaaattctaaaaatgaagcaatttattttattaatccaagcacacaattttgaaaatgaaataatttcatatgaagcatttaaaattctatagaatttt

SEQ ID NO: 1182 - DNA, 444 bp, Glycine max
ggataatgtgagtgtatgtatacatgattttgatgatgtcaaaagaacaatcagacgaaggtgcttcaaaggataagcatggcttcaagattaatacaagactgattcaacaaacaaagccttgcttcgagattaactcaaagatcaagccttgccttaaaacaaatagctttcaagacatgcaaggctctagtaatcgattaccaggcgttgtaatcgattaccacgcagtgtaatcgattactagcagacagggttgaaaaatagctggtgaaaagagttttacatttgaattttcaacatgtaatcgattaccatatgtgtgtgatcgattaccagcaacgaaactcttgaaattcagattccaaagtcatgacccttcaaattataactgtgtaatccattacaccaacattgtaatcgattactagtggagagttttca

SEQ ID NO: 1183 - DNA, 494 bp, Glycine max
agcttgctaacccatggaagctcctaatatctcccacactttttggggtgggccattcttggatggccttgattttctcagggtccacttggaccccatttctaccaactacaaaatctaagaaaactatattatctacacaaaaggtacacttctctatatttgcatagagggtgtttttcctaaggactaaaagaacttgcttgagatgtcctaagtgatcatctaggctcatactatacactaaaatatcatcaaaataaacgactacaaatctacctatgaaatcccttaagacatgatgcataagcctcataaaggtgcttggtgcattagtgagcccaaaaggcatcactagtcattcatacaaaccaaacttggtcttgaaaacggttttccattcatcaccctttttcatcctgatttggtgataaccagttttaagatcaattttttgaaaaatattagcaccatgcaacttatcaagcaaatca

SEQ ID NO: 1184 - DNA, 597 bp, Glycine max
tcatgatgatgaatcaagttgattcaagtatttttgataatgacaaagttgatgacaaaaatcccaaagaatgatttcaagattaagtcaacaagaagaaatcaagaagattcaagaatcaagtgaagtttgatttcaagattcaagaaaagatgaattcaagattcaagagaagaaatcaagaagacttcacaagggaagtattgaaaagttttttcaaaaaacaaacatagcacaattttgttttttcaaaagagttttctcaaaattttctaagttaccagagtttttactctctggtaatcgattaccagtttcttgtaatcgattaccaatggcaaagtttgatttcaaaaagctttcaactgaatttgcaacgttccaattgatttcaaaatggtgtaatcaattacaagatattggtaatcgattaccagtgtatctgaacattgaaattcaaaatcaattgtgaagagtcatatcctttcataaaaagctttgtgtaatcgattgcatggttttgggtatcgattaccagtgacaagtttgaataaaaatcaaaggatataactctttccatgggttttagtttttttt

SEQ ID NO: 1185 - DNA, 590 bp, Glycine max
tcataaggctatctatgggctaaggcaggcacttagagcttggcatgatgctctcaaatcatttataacatcatatggtttcacaaccagaagaagcaacccttctctctttatctacatctcgggtaacataactgtctattttttggtgtatgttgatgacctccttctcacaggaaataacactacattcatagacacattcattgagttcttatctaatcggttgtcactcaaaaacatgggggcaccatactactttatgggtattgaacttatacccatgaactcaagcatgttcctctcacaacacaaatacatcaaggatgtacttgagaaatttgagatgcaggatgtgaagtcgtcacccacaccacttgcctcgacgactacactcatgttgcatgatggtacaccaaccaataatgctactcaatatcaaagaattattggtgcattacaataccttaccctaacaagacctggcctctcattctccatcaacaaactctcaatattatgcacaaaccaaccttccttcatcttccacatctcaggcgccttctcgaatacttgaagccactattaac

SEQ ID NO: 1186 - DNA, 424 bp, Glycine max
agcttgtacggccagccgctctaacatctaatccatgaaaggaaggggaaagtgatccatccttgttgccttgttaagatttttataatctatgtacattctccatccggtcattgttgttgtgcgaattaattcatttttctcattcttaacaattgtcatgccacccttcttcagatccacttgcactcaactaacccatgcactatccaaaattgggtaggtcattctagcttctagaagtttcaaaacctctttccttaccccttccttcatcacaagattcaatcttctttacgattgagccactagtttaaagtcttcctccataaaaattttatgcatgcaacaagaaggatgatgtagctccatgtagagcttgtatgcattggatattcttcatcaatggatttctttgtttctt

SEQ ID NO: 1187 - DNA, 436 bp, Glycine max
tctggtgggacatcttgacttgctttccaatctgacattcaccacagattctgccttcttctattttgaaactgggaatgcctctaacaacacctttgtcaatgatattcttcatgcctcttaagtgcagatgtgcaaatctttgatgccatattttgacttcatcttctttggaggatggacatgtggaggagtaactgggttcttgaggcgtccataagtagcagttgtcctttgatctgctgcccttcattagaacgtcattcttctcatttgccaccaaacattctgactatgtgaagcttacattgaatccttcatgacacaactgactgatgctgatcaaatttgcagtcagtcccttcaccagcagaactttgtttagactaggaactacatcctggactagctctaccattgcaggatctttccttta

SEQ ID NO: 1188 - DNA, 514 bp, Glycine max
  unsure (1)..(514): unsure at all n locations
tcattctacacctgaaaaagaggatgagatagttgcacaaaaaaaaaagcttcttaacaaaaattttcatgcaggtggaccttcttctagtaattccgacttacagcagcctcgtatccctcttccattcccacctagagcgattccaaacaaaaaaaatggaagaagtggaaaaggagatcttggagaccttcagaaaagtagaagtgaacatacctctgctagatgccatcaagaagattccaagatatgccaagtttctaaaggagttatgcacccacaaaaagaagctcaagggcaatgaaaggattagcatgggtagaaatgtgtcagcattgataggtaaatctgttcctcacattcctgagaaatataaggacctangtactttctgtataccttgcatcattgggaacattaaatttgagaatgccatgctagatctangagcatcagttagtgtcatgcctctgtccattttcaattctttatctcttggatccttgcaatctac

SEQ ID NO: 1189 - DNA, 511 bp, Glycine max
agctttgagaatgcaaatttagctctattgtctctttgtttgcattcgctgaacctttgatgtattatctgatatgttatcgaagattttcttgtttactaacttactctccctttatatctcaattttttatgtgtgcacgtgagctgatgagcatgccaatgactgattactattgtttgaattttacttgattgagatataggaggtgaagatgtcgaccccggcaaggaagagactgatgagggattttaaaagattgcaacaagatcctcctgctggcatcagtggggctccccaagacaataatattatgctttggaatgctgttatctttgggtgtgtaggagtatataaatcatgaaatttttgttttcttaagagtgtgtttctcttaactttgggggtttggatgatttaaggtatgataacaatctaattgtgcctttcttggtctttttttccagaccagatgaccccccttgggatggaggtacaattttatctatct

SEQ ID NO: 1190 - DNA, 363 bp, Glycine max
agctttgcagtagatgccactctactctaaatttttgaaggatatgttgacaaggaagcacatgtacattcatcaggaaaacatcatagtggaaggaaattgtagtgctgtaatccaaaagatccttccacctacgtgcaaagatcctgggagtgtaaccattccttgttcaataggagaagtcaatgtgggaaaggctctgattgatctgggagccagcattaatttgatgccactctctatgtgcagaagactgggagagttggagattatgcccactcgaatgactttgcaattagctgaccgctccattaccaggccctacggagtgattgaagatgtgttggtcaggggtaaacattt

SEQ ID NO: 1191 - DNA, 498 bp, Glycine max
agctttgatgtttgtgttgaatgcattaaaggtaaacagaccaaaagcaagaaattaggtgcatataaggctacaggtgtcttggaattgatacatacgaacatttgtgggtcatttcatacaccttcatggaatggtcaacaatattttatatcattcatggacgattactccagatatgcatacttgtttcttatacatgaaaagtcacaatctctatatgtgttcaaagcatttaaagttgaagttgaaaatcaactcaacaaaagaatcaagagtgtcaaatttgaccgtggtggtgaatactatggtagatatgacagttcaagtgaacaatgcccagggccttttgccaggtacttagaggaatgtggaatcgtcccaccatacaccaagtctgggtcaccttacatgaatggtgtgggtgaaagatgaaaccaaattcttaaggatatgggaaaaaatatgaattgtcattttaactgtaccaaagtcact

SEQ ID NO: 1192 - DNA, 440 bp, Glycine max
agctttagttcactacttcaagtagtgcacgatatgcttccagaggaaaacacgttgcctaaaagttattatcaagcgaagaagatactgtgtccgataggtatggagtatcaaaagattcatgcttgcctgaattattgcatattgtacagacatgaatttgaagaattgtccaaatgccctaggtgtggggtatcacggtacaaagtcaaggatgatgaggatcatagtagtgatgaaaactcaaagaaggccccccccagcaaaggtgttgtggtatctatcgatcgttccaaggattaagcatctttttgctaatggagacgacgctaaagaccttacatggcatgcaaatgggagaaactgcgatggaatggttcatcatctgattgattgctcgtagtgcaagaaaatagaacgtttgtttcggatttcgggaa

SEQ ID NO: 1193 - DNA, 621 bp, Glycine max
aaatggattttaaacccccaaaattgtaatactaaatatttattacctatacttaatagaaaatacttataacactacaaaataaccattaattggaagaagttgatacaatttacacaagttttatacacaaaagttagtcgtattcaccgactaacaccttttacataacaaaaatatgtttatgctttataatttttttataaaaaaattgcgattaattgcataaataagttttttatctataggaattaaacacaatgccaaaggatttataatactcacatcctgctcaacaaaaatatgtttttgatttataattttttacaaaaaaaaaattgttattaattacataaatatgttgctttatttacaattgatgatataagctaccctttttaatccttcttgaattaattatgatacacgacacaaactatcttaataatgactcattacttttttaatagtaatagaataaaatggtcgataattatttttatttaaatttgtattattaatgacacttagtaccctttatttataatcaattaattgacgtacaaaattaagtaactatgatacaattagttgtattcaataaaaaaattactcttttta

SEQ ID NO: 1194 - DNA, 526 bp, Glycine max
agcttatgtcgcaaacatctacaatagacctcctcaacctcaacagcaaaatcagccacaacaaaacaattatgacctctccagcaacaaatacaatcccgggtggaagaatcatcccaaccttagatggtcgaattcttcacaacagtagttacaacaacaacaaccttattttcaaaatgttgctggcccaagcagaccatacgttgctccaccaatccagcagcaacaacaacaacagccctagaaacaacaaacagtcgaggcccctccgcaaccttcccttgaagaacttgtgaggcaaatgactatgcaaaacatgcagtttcaacaagagactagagcctccatttagagcttaactaatcagatgggacaattggctacacagttaaatcaacaacatgttggatcgagtggcctcagaatattaagaaagggggttgaattaattattcctaaacctttacccaattaaaaattactcttttaaggcttttacttatgttgttaagaaaatatggag

SEQ ID NO: 1195 - DNA, 347 bp, Glycine max
tctcgatatattatgtccccgaatcagacatctgtgggaagagttatgaccatttgtatttctcgagagctaccgtagttcaatttcgagtatctcgatatactattttcccaaatcggatatccttgtaataacttatgaccaatcgaatttctcgagagcttgtgttgttaaatttcaagcgtgtcgatatattatgtcctataatcagacatccgagtgaaataatatgactagtcgattttctcgagagcttgctttgtccaatttcgagcgtctcgatatattatgttccaaattcggacatgcgtgtgaaaagatatgaccattctaatttatcgaggagc

SEQ ID NO: 1196 - DNA, 469 bp, Glycine max
agctttcgagaaattcgaatggtcattacttttcacacggatgtctgaatttgggacgtaatatatcgagaggctccaaattgcacaacgaaagtactcgagaaattcgaatggtcataacttttcacgcggatgtcaaaatttgggagataatatatcgagatgctcgaaatggaacagcggaagctctcgagaaattcgaatggtcataactattcacacagacgtccgaatttgcgacataatatatcgagacactcgaaattgaacaacggaagctcaccagaaattcgaatgagccataacttttcacacggatgtctgattcgcggacataactcatctagacgctcgaaaattgaccacggaagctctcgaaaaaattcaatgggcattaacttttcaaaccgatgttccgaattggggggactaattattttgaaaccccccaaaatttgccccacggaaa

SEQ ID NO: 1197 - DNA, 371 bp, Glycine max
agcttataatatatcgatacgctcgaaattaaacatcgaaaactctcggaaaattcaaatagacataactattcacacggatgtccgattcgggcgcataatatgtcgagaggctcgaaattgaacaacggatgctcttgataaattcaactggtataacttttcacaccgatattcgattcgggcacataatatgtcgagaagctcaatattgaacaaccaaagttctttagaaaatcaaatgggcataacttttcacacggatgtccgattcaggcttattatatatcgatacgctcgaaattaagcatcggaactcttccgaaaatcaaaagggcggaaattttcacaccgaaatttccctttggggc

SEQ ID NO: 1198 - DNA, 494 bp, Glycine max
agctttggagtttccaagtgccaattcgtcttcttctttagtccagtcttcttctagcttcaatccatcagtgggctttccttctgtgtccagcatcttgggatgttcccagcctttgatgacagctttccaggttctgctatccagtgatttgaggaaggccaccatccttgctttccagtattcatagttggttccatccaggattggtggtctgttcactggtcctccttctttctccatgttcatcagaatttatctccctagatctcactcagtgatttcgagtgcctgctctgataccaattgaaattctgataccaatgacagatgtcgtaccggatgtcacgacatcacgcttcagaacatgcagattatatttgactgtatgaacagattaaacaagtaaataacacaagagaattgtaacccagttcggtgcaacctcacctacatctgggggctacccagccagggaggaaatccactaaaat

SEQ ID NO: 1199 - DNA, 535 bp, Glycine max
taataaatctatatatggtttaaaacaagcctcctgtcagtggtaccttaagtttcatgggataatttcttcatttgattttgatgaaaaccccatggattaatgcatataccacaaggtaagtgggagtaaaatatgttttcttgttttatatgttgatgatattttacttgacaccaatgatcgaggtttgctacatgaagtgaaacaatttcaatctaagaattttgacatgaaagatatggatgatgcatcttatgtcatcgacattaagattaatagagataaacctcgaggtattttgggtctatcacaggaaacctatattaacaaaactctagagagatttcggatgaaagattgttcacgaagggttgctcccattgtgaagggtgataggtttagtttgaaccagtgcccaaagaatgactttgagagggaacaaatgaaaaacatttcttatgcttcagttgttggaagccttatgtatgctcaagtgttcacaaggcctgacattgcttttgcaattggaatg

SEQ ID NO: 1200 - DNA, 463 bp, Glycine max
  unsure (1)..(463): unsure at all n locations
tgtataagcgagtgcaagaatgcaggatagttttgaaaccagtgtctgtgacacgacaaaagccaccaaggcatatgctctccatgtttgcacacttgtcagccattagaagtaatcccagatcattcactcttcggaagtaagtaatttggaactcttggcttcgaaccaatgaaagatgtttcaatctcccaagttgattaatttgttgaagaccagcattggttaggtcaaatgtaattcttggttcaatcagtggtgcatcttgaagatccaaatgggtcaaaagcatgagacctttggatattgtaccaaccatagcatcagttatatagtctacattaagacacagtttctgaatgcttggaagtatggatggttgagcangatttgagggcagctgggatcccaaatttgggctaagcagttcagtcactgtcactgaagaaatgtagccaatctc

SEQ ID NO: 1201 - DNA, 439 bp, Glycine max
tggaatgatctgcaaaagctaaacccttcttgctggacaatgtctgcttttaaagtaaacacaaagtgtgatttgcaagtaaataacatgtataaagcattcaataatgtaataatgtagtacagacataagccaattattacactattggagggaattcaattttacataagttctagaattgtgaagttgaggactaccttgatgaagtatgaggggtcaatctgtcctaaaattaagcaaatcatggaaaagaataaaaaagcatgtgaaccatggcgggcacattggtgtggtgatgataatctgtttttgtttgaagtgtcaaaaggcatggaaaaatatgttgtcaatcttaaacaataaacatgttcttgtacaaagtgggagtgtactggaattccatgcactcattccataacatgcatgtggatcaatg

SEQ ID NO: 1202 - DNA, 395 bp, Glycine max
agctttggaaagacttcttagttcttttcagtcttgctttggtcattgggcctttcatccattgcaaaagatatttgaagtcattggactcttgttggatcatatcaacaagactttggacatttttcatgagattttcttttggcctaaaatgaaacatgatgttaataaatattatgccaaatgcattgtatatcataaagctaagtctaaggtcttaaaccatgaattgtatacccctttgcctattcccacctctccttgaactaacatatccatggattttgctcttggtcttccaaggtccaagagaggtaaaaattctatttttgttatggttgataggttctcaatgatggttcactttattccttgccataaaggggatgatattt

SEQ ID NO: 1203 - DNA, 238 bp, Glycine max
ttcgagaaattcaaatgggcaaaacttttcacactgtagtcctattcatgcgcataatatatcgaaacgctcgaaattgaacatcggaagctctcgataaattcacatggtcataactcttaactcggatgtctgatcttggcgcataatatatcgagacgctcgacattgaacatcagaagctctcattggtcatatacggtcactcgggggtgataaaaaagcgcattatatacct

SEQ ID NO: 1204 - DNA, 437 bp, Glycine max
agctttccctctttgaacaaatacccctcagccaaatagaatccatcttgggcctttttcccacaactctcataaatgggagagaaatgttcatctaaagcatacaagtccctaatattatcaaatcctaaaatttgagctcctagggagcaaaacaatgtctgtctcctagagagggcatcagctaccacatttgtttttccctttttgtatttgataacatatggaaattgctctaggtactctacccattttgcatgcctcttgtttaacttgctttgccctctaatgtacttaagtgattgatgatcactatgaatgacaaattccttggaaacaaggtaatgttcccaagtttggagggctcttattaaggcataaagctctttatcataggtggggtagttgagggtggcactatgaaatttttactaaaa

SEQ ID NO: 1205 - DNA, 461 bp, Glycine max
  unsure (1)..(461): unsure at all n locations
agcttcataacctgtcttggcacctctggaggatttgcacaacggatcagtgcccagttaacattctgaaagaatggatgctgttttatctctgtcgcaccacgtctataggcaagacgatgctgaggctctttcacaagcaagcccctgatcaagtccctggcagcaaagctgacactaggagattctggaaaccgtagaggctgcccaattacgttaaacagtgttgcacgattcactgaacctttgaatggtgttctgccaaacaaaagctcatacaagaatatcccaaatgtccaccagtccacggcacttccgtgcccttcacccttgatgatctccggcgccaagtactcgtgtgtccccacaaaggacattgatctggcatttgttggctcancaattagctcaggaagaggggtcacttggtgatgcatgtcattctttggtttgaacttttt

SEQ ID NO: 1206 - DNA, 527 bp, Glycine max
agcttgacattaagaaaagataaacatcttatatgtctgagtataatcataaacaaaaatattaattttggataaagaaaaaatacttagtaaattttacttgtcttaaaaaaatagcattatctaatttttatgttcacgtttcattatactttctttcttctctttattttatttcattttttacaagtaaatgtctattaaatagttaataaactttaaaatacttcaaaaatatatttgataaattagaataatcaagttataaatgagtaacaagctaaatttaaaactttttatttgtataacttcgtttatttaaattaattgaacttcaacataatatcttacaagtgaaacttgaatattaaatactcaaccatgttcaaaacatttacgccatagatgcagtcactcaaattaattagcactagatcgtttgaatttaaccgatagttttgagccaatattgattatatttgattgaacataactatatatgtgatagaactggagcaggcaaaatg

SEQ ID NO: 1207 - DNA, 503 bp, Glycine max
ttactatgcaaggaataaccaaggaaaattccttcatttgacttagcatcaaactttcctaagttttcttttccattgtttaatacaaaacatttgcaaccaaaaacatgaagatgcgagatgtttggtttcctgccattgaacagttcatatggagttttctttaaaatgggtcttattaaatccctattcatgatatagcatgcagtattaacggcttcagtccaaaaatattttggaagaagagtgtcatttaataaggttctaacaatttcttccaaagacctatttctcctttcaacaactccattttgttgaggagttctacgtgcagaaaagttatgttcaatgccatgcttaccacaaaataattcaaattctttttttcaaattcacccccataatcactcctaatagatataattttgagatttttattgtcttgaatgatttatgctagtttcctaaatacttgaaatgcatcattcttatgagtgataaat

SEQ ID NO: 1208 - DNA, 511 bp, Glycine max
tgagggaaaacttgatgccttggtcaacctaataactcagcttggcatgaatcataaatttgcacctgttacaagagtctgtggtatatgttcttctgcagatcaccatacagatctttgtgcttctttgcagtgatctggagtcaatgaacaacctgaagcttatgctgcctacatttataatagaccccctcacagcaaaaccaacattagcgaactaattatgatcttccaagctacagatacaatccacgttggagaaatcattcaaatatgagatgggcaagtgcttcacaacaacaacagtctgtccctcctttccagaatgttgctggtccaagcaaaccatatgttcctcctccaatacagcagcaacaacgacaacagtcacaacgaagacgacaagcaactgagacttctccttaaccttccttagaagagttagtgaggcatatgaccatccagaatatgcaatttcagcatgagacaagagccttcattcagagtctga

SEQ ID NO: 1209 - DNA, 570 bp, Glycine max
tcagctgcagcaattaccctgccagaaataaggtttcccccactattctgtgtattattctccaaagaaaggtctttccagaagccggatgaataatttctagctaggatgcgccaaatatgcacagcttttgagctcattcctttacttgcacataagaaggcaagtgtccttaggtgcccagactcttctaacatctgctccaattcctcctgaaaaagagatgtatttcacacggtcatttttcaggcaacccccaggtaattaccattatgtcatgcaaccaaagttttctttaaggagcagcatggatttaaaaaagggaatttttttcattttcctgtatatgcttgtgcttgacattcaaagaaggttaggttttgggttttcatgtttattttgctgctgaggctattctctttctgcagagcttcaatatgatcatatcaggaaaaggaaaaaagtatttctcaaatctacatagaaataatgggtataattcaattcacgacatatttattttacagtattaattatgaaaaatgtattgaaattacttcattcaataac

SEQ ID NO: 1210 - DNA, 561 bp, Glycine max
ggtgcgagcttgtaaagatccttgcagctgatttatcatcattttttctaagactttggtttcctcgattggcacaaccatgtgcttgaatttgggatctatcgagtgtagagtcttctccataattcttacatcttctaacttctcaccatttatttttagtttatttgaaacagcgagaattcctgaaaaataatcggaaatggacgctgactctttcatatgtaaggattcgaactcacctcttatagtttggagatgcaccttctttactttgtcttctcctttgtgagaggtttgaagcttatcccatgcctccttagcagatgttgcataagaaatcttctcgaatgcatcattctttaatgcttgatacatgaagaagagagctttattgtctcctctttttgagtcccttaatggctccttttgtacttgggataatgaaagcccatcttgggactccttttagcatttttcaacctttccccaacattatgtgcttcaagaaaggcccttcttttgatgctccatttgcaatagggcctccccttttgaagt

SEQ ID NO: 1211 - DNA, 504 bp, Glycine max
agcttgttaaagaacttcgaaaaaatcaagaacaagcttgttcgcacatcgttcgcgtgtatgacatccactccacaaggtttgaagttgaggagaccttcaatcctattacacaacgtggccgacaaaagtgggcagttaacttgaatggtcattattgtcaatgcagaaggtattctgcgcttcactatccatgttcacatattattgcagcttgtggttacgtgagcctgaactactaccaatatatagatgttgtttatacaaatgagcacatcgtaaaagcttactccgcacaatggtggcctcttgggaatgaagcgactattcctccttctaatgacgcatggacacttatccctgacccaacagcaattcgtgcgaaaggtcggcctaaatcaacaaggataaggaatgagatggattgtgtcgaaccccttgagcaccgacaaaaatgcagtagatgtggagccgaagcgcataacaggcgtcgatgtccaatgc

SEQ ID NO: 1212 - DNA, 364 bp, Glycine max
  unsure (1)..(364): unsure at all n locations
agcttcggcactgttaagggtaaagactcttcccgtggccttcagatgtccagtntggtcattcaggcccctaccattctgctccttcttgggatatggacaatctctctgaatattgttggatcaagtggcctcagaataattaagaagggggggttgaattaattattcctaaacctttactaattaaaaatttactcttctaaggattttactatgttgttaaataaatgaagaatagaaaagaaacttaaccaaaagtaaaagcggaaattaaagtgcacagcggaaattaaaagagtagagaagaaggagacaaacacacaagagttttatactagttcagcaacaacctgtgcctaca

SEQ ID NO: 1213 - DNA, 390 bp, Glycine max
agcttattactgcttcttggatggatactctggatacaattagattactgtggaccccaaggatcatgagaagacgaccttcacatgcccttttggtgtctttgcctacagacagatgttgtttggattatgtaatgcacctgccatatttcagatgtgcatgttggccattattgcagatatggtggagttggagcataaagcctaatgggccctcaaactgcttaactttgattaagctacatctagagagaagatgaagttacagttgctagagttagaagaaataaggatgaacgcatatgaatcatccaagatttataagcaaaagatgaaggcgtatcatgacaagaagttactaagacaaaacttccagccaggacaacaagt

SEQ ID NO: 1214 - DNA, 244 bp, Glycine max
tcaacattcaatttcgagcgtctcgatatatgacgggactcaatcagacatccgagtaaaaagttattgtcgtttgcattggctcagagcttcaccattcaatttcgagcgtctcgatatatgacgggactcaatcagacatccgagtaaaaagttattgtcgtttgaattggctcagagcttcaacattcaatttcgagcgtctcgatatattacgggactcaatcagacatccgagtaaaaa

SEQ ID NO: 1215 - DNA, 314 bp, Glycine max
  unsure (1)..(314): unsure at all n locations
agctttgagccaatttttacgacaataactttttactccgatgtctgattgagtcccttcatatatcgagacgctcgaaattgaatgttgaagctctgagccaattcaaacgacaataactttntactcggatgtctgattgagtcccgtaatatatcgagacgctctaaattgaatgttgaacctctgagctaattcaaacgacaataactttatactcggatgtctgattgagtgcccgaacatatcgagacgctctgaaatgaatggtgaacctctgagccaattcaaacgacaataactttttactcgga

SEQ ID NO: 1216 - DNA, 406 bp, Glycine max
agcttgtagaagcaaaaggccagctatggtgttcaagggtggatttgaaaaggcctatgactcaatctcatgggtttttttggattatatgctgcaaagaatgggtttttgccacaaatggagacactggatgtctgcctgtctcaagtcagcaagcatttctattcttatcaatggcagtcctacaaagggaatttgctcctactataggtttgaggcaaggggatcctttagcccccttactctttaatatagttggagaaggcatcacaggattgatgagggaagcagttcataagaacttatatagaagctatatggctggaaagaaaaaggaacccattaatattttgcagtatgcggatgacacaatttttgtgggtgaggctgagtgggagaatgttat

SEQ ID NO: 1217 - DNA, 221 bp, Glycine max
  unsure (1)..(221): unsure at all n locations
tgtgagtatctacatgagatgaagcatagagggttgcaacctaatgttgtaacttatagtacctaattgattcattttgcaaggcangcatgacactggaagcaaataaatttttttgttgacatgatacatgttggtcttcaacccaatgaatntacgtatacatctctaattgatgcaaatcgtaaaatacgtgatctcaatgaagcattttatctgga

SEQ ID NO: 1218 - DNA, 260 bp, Glycine max
tcaacctagaggagacgaaccattccaagtgttggagaagatcaacgacaatgcctacaagattgacttgcctagtgagtataatgtaagtgccactttcaatgtgtctgatctatctctttttgatgcagatggaagagccttggatttgaagacaaatccttttcaaggagggagtgatgaggacataaccaagggcaaggaccatgaagcacttgaaggtcccatgaccagaggcagacttaaacaagcccaacaca

SEQ ID NO: 1219 - DNA, 295 bp, Glycine max
tttgagctagagtgtgatgcctctggtgtaggtgtgggagttgtgttatggtagggtggacaccctattacttaatttagtgagaaacttcatggtgccgctcttaactaccccacatatgataaggagctttatgccttagttagagccctccaaacttgggaacattaccttgtttccaaggagtttgttattcatagtgatcatgaatcacttaagtacattagaggacaatgcaagttaaacaagaggcatgcaaaatgggtagagttccaagagcaatttctatatgtta

SEQ ID NO: 1220 - DNA, 370 bp, Glycine max
  unsure (1)..(370): unsure at all n locations
actctagtctcgctctcaacaactgcaaaatcaagtggaatattgttcctactacaatcttgtccgatgggagttaacaaagtaccatggtatttgccagttaagaatgtcccatctaattgcacaagtggcttgcaatatttgaagccttcaatgcatggattaaagttgtgtgttcatggtttggggattaaggcttgaggtttaggatttagagtttactgatacttgaggtaaagttgtgtgttaggatttacgatacaatgagaaagatatttggactattaatgagatatttaatcaaatggacttattagatataaatagggaaagaaggatatganatattctctactatattatgaccttt

SEQ ID NO: 1221 - DNA, 374 bp, Glycine max
tgtacacatgctaaggtttctccttatcttcaaatctatgtggctgcttcacataaacctcttcatttatgaatccatttataaatgcactcttgacatccatctgatatagtttaatgtctttgtgtgctgcataggctaagagtattctgacagcttcaagtcttgctactggtgcaaaggtttcatcaaagtcaatcccttctttgttgattgtacccatgagcaactagtctagccttattcctaaccacttctcctttttcattgagcttgtttttgaatacctacttagttccaatcaccgactaaatcttatgagggggaacatgattttagaccttgatctaacgaactggctggttcttcttcat

SEQ ID NO: 1222 - DNA, 380 bp, Glycine max
  unsure (1)..(380): unsure at all n locations
agcttatgattccatttcctgggaattcttgtattggatgcttaagtccattggctttccagcccagttctgtacttggatcatggaatgtgtttcttccacttcctttagtgtggcagtcaatggatccatttatggtcacttcaaagggcagcggggtcttagacaaggggatcttctctccccttatctgtttgtgctctgtttggagtacttttccagagatatgagcagcctcaaggaagatgccaattntaaatttcatcccaactgtgcaagtattcagctatctcatttggcttttgcagatgatattatgcttttatctagaggagatatcccttctgtgtcaactaatgttgccaagcttcaacacttct

SEQ ID NO: 1223 - DNA, 398 bp, Glycine max
agcttcacccaaacctatggtattgattactcataaacttttgttcctgttgcaaaacttaacaccattagagtcctcttataattggctgcaaatttagattggccattacagcaacttgacgtaaagaatgtctttttaaatggggacttagaggaggaagtctacatggactcaccttctggttttgaatctcagttcaatcaaaagatttgcaagcttcaaaagtctctctatggcttgaaacagtcacctatagcatggtttgagagatttgcccagtttattaagaagctgggatattctcagtgtcagagtgatcacaccttgcttgtgaaacactcttttgaaggaaagatggttgtattaattgtctatgtggatgatattataattac

SEQ ID NO: 1224 - DNA, 386 bp, Glycine max
  unsure (1)..(386): unsure at all n locations
agcttgaacactgcatccttgttcaataggttgctcaatggtttggtaattntggagaaatccttgatgaacctccgataaaaacctgcatgtccaacaaaactcctgatacccttaacatttactggtggtggtaacttctctatgacatcgatttttgctttgtccacctcaatgccttgggctgaaattttgtggcccaacattatcccttcttgaatcatgaagtgacacttctcccaattcagcaccagattcgcttcaacacatctttgcagctgtcataccctaatttcgtccggggactatcgtttgttgatcttttgatccttgctagtcgacttacgatgttcaaacgccagttacagtgcanaacagatgatcat

SEQ ID NO: 1225 - DNA, 321 bp, Glycine max
ctttgcaagctggaatcatttatcctatctccgacagccaatgggtgagtcccgtccaggtagtcccgaaaaagactggcctcacagtgatcagaaatgagaaggaggagctgattcctactcgggtgcagaacagttggagagtctgcattgactataggaggctgaaccaggttaccaaaaaggaccattttcccctgccattcattgaccagatgcttgaacgcctggcaggtaaatcccactactgtttccttgatggtttttctggttatatgcaaattactattgctcctgaggatcaggaaaagaccacattca

SEQ ID NO: 1226 - DNA, 458 bp, Glycine max
  unsure (1)..(458): unsure at all n locations
agctntactgcctcatcattgctgaagaagtttaataaaccatcactccctactataacaaattgatcggaatttgaaattctatggacattcaatgatggttgcgtggatatgtatggtgggcttttaagatcccgaactcgaaggattcccatcaaagcatcattcagatttttctgcaggagaataaaataagaaaattaaatctatgtttggtacttggtaggacaaagatttattctttgcaatcgtccattcacagacacagtcagtagattgaattttaagggtttataattatcacatttacttgctaaaatatcagtacccaaaatcttatagaaacctattggctgaagtgtaagagagaatactaacctttttcaagtagccaactccaaaagctcgagtaaccttcaatttacctttcacttttcctnctataacgatcttgggat

SEQ ID NO: 1227 - DNA, 306 bp, Glycine max
actcagcttcgtgatcaatttcgagcgtctcgatatattacgggactcagtcagacaaccaagtgaaaagctattgtcgtttgaatttgctcagagcttcgatattccatttcgagcgtctcgatatattacgagactcaatccgaccaccgagtgaaaagttattggcggttgaatttgctcagagcttcggcattcaagttcaagcgtctcgattattacgggactaaatcagacatctgagtaaaaagtattggcgcttgaattgctcagagttcggaatccattttgagcgtctcgatatat

SEQ ID NO: 1228 - DNA, 294 bp, Glycine max
  unsure (1)..(294): unsure at all n locations
ttgagctagagtgtgatgcctctggtgtaggtgtgggagttgtgttatggtagggtggacaccctattacttaatttagtgagaaacttcatggtgccgctcttaactaccccacatatgataaggagctttatgccttagttagagccctccaaacttgggaacattaccttgtttccaaggagtttgttattcatagcgatcatgaatcacttaagtacattagaggacaatgcaangtatacaagaggcatgcaaaatgggtagagttccaagagccatttctatatgtta

SEQ ID NO: 1229 - DNA, 355 bp, Glycine max
  unsure (1)..(355): unsure at all n locations
tataaactntatacaagaatgaagctctgataccacttgttagacaagtggcctcagatatcttaagaagggggggttgaattaagatattccaaattatttcccctaattagaaatctatttcactttttaaccaagttatgaattcccttaatgaaaatcttcttaaatattaattcaaatgaaacaatttgaatatgaatataaagcaataataaataaaggagattaagggaagagaaaatgcaaactcagttttatactggttcggccacacccttgtgcctacgtccagtcctcaagcaacccgcttgagagttcactatcttgtaaatccttttacagttctaacaca

SEQ ID NO: 1230 - DNA, 361 bp, Glycine max
  unsure (1)..(361): unsure at all n locations
tgtaatcaattacacacatactgtaatcgattaccagaggagattttcagaaaatattctcaacagtcacatctttttatttggttcttgaatggctatcaaaggcctatatatatgtgacttgagacacgaatttgcgaagactttttgagaacaaaaaggtcttatcctcttaaagagcaaaattgttttatcctcttacaaattccttggccaaaacacttgtgattcaataaggaattatttgagtgctcaaattgttcaatctatctctntaaagagagatttcttcttctcttcttctttattttgaaaagggattaagagaccgagggtctcttngtgtaaagaaatctgaaca

SEQ ID NO: 1231 - DNA, 274 bp, Glycine max
agcttctcgttcattgccataggtgtggcaagtggtttgcaatcttgcatgttgaacttctttaataagtcatccgcatatttttcttgcgagaaaaatatttgtccaagtctttgcttgacttgcatcttcacatatagtgacggctcacttggacttttgaggaatctatgctcgacgaaggatttgtctattttgttgtccatgctcggggagcttgtttgagaccataaaatgcatttttcaagcgatatactttggcttcttctccctg

SEQ ID NO: 1232 - DNA, 220 bp, Glycine max
tggatctgtgtttcagaggaatttgatgttttcaacgtatcaagagcaattcttgacacgattactgattcgactgatcatggtagagagctagaaatagttcagagaagactaaaagaaaaattggcagataaaaaatttctcgtcgttttggatgacgtttggaacgaaagcaggcctaaatgggaagctgtgcagaatgctcttgtttgtggagctc

SEQ ID NO: 1233 - DNA, 358 bp, Glycine max
  unsure (1)..(358): unsure at all n locations
agctatgagttggtttctggccttagaattaattntgctaagagccaatttggtgcaattggccaatctgaggagtggtgtactcttgcagcagatatcttgaattgtggtcctctgcagttcccatttatatacctagggatgcctataggtgttaaccctanaaggaaggtggtgtgggagcctctaatcacaaaatttgaggccaaactgaacaaatggaaccagagaagtctatctatggctggcagaattactttaattaatgctgccttgacagctttgcctttgttctatatgtccttttttagggcccctacagcaatcattaagaggctcactgctattcaaagacaat

SEQ ID NO: 1234 - DNA, 448 bp, Glycine max
  unsure (1)..(448): unsure at all n locations
agcttgtgataaggagacttttccttccttgtttgtccattaaggaggaagcaatacaagttcctgcaacaaaataaaacttcaatcagaaacaatatcttgtttgcggaacatatacaataaccttcttttactgaatgcacaataaacatttttaagaataaaaaataccaaccaaaaacatttgatgcaccaaccaaggcacttgctgcaacatcagaagcaattccagcactacggaacacagaagttgaataataaactacagcatttattccagccaactgctggaacaagaaaagtgctgccccaacactgacaactgaaacaaggcatantttaaggaagtgctatatactatttcataaaagaatacatttaatcaactaaatagtaaactaaaaaaaagttgtcagtgaaattaaaacatgaacaatgataatattat

SEQ ID NO: 1235 - DNA, 310 bp, Glycine max
taaggattgtcaacattccaatttctcgaggaatgtgaccgataaggttattttctgcaatacgcagaaatcccaacttgttcaacttcccaatctctggaggaatgtggccagaaaatttggcggtacttaagtctagatatgacaggttggacaagtttgctatggaattaggaattgctccacttagttgaagacattgggaaagatcaagagcatgtaaactccttagtgaccacatttcttgagggatggaaccatggaaagaatctaaagaaaaattcacaacatttactttggacatgttacc

SEQ ID NO: 1236 - DNA, 307 bp, Glycine max
  unsure (1)..(307): unsure at all n locations
agctctgataccacttgttatacaagtggcctctgatatcttaagaaggagtggttgaattaagatattacaaactattttcccaattaaaattctactttgattttaatgcaagttccaagttcccttaatgacgaatttctaaatgatgattcaaattaaacaatttgagtgtaaatttaaaacaacaatagataaaagagtttaagggaagagaaagtgcaaacttagttttatactgattcggccatacccttgtgcttacgtncagtccccaagcagctcgcttgagagttccactaacttg

SEQ ID NO: 1237 - DNA, 307 bp, Glycine max
agcttcgacctatgttcatgaattgtgtgccatcacaactgccgttaagaagtggagacaataccttcttggccatcaattcatgatcttgactgatcacagaagtcttaaggagctcatgactcagattgttcaaactccagagcagcaaatgtattttgccaggcttatggggtatgactactccattcaatatcggtccgggagcactaatttggtagctgatgccttatcgcgcttgaaggagggatcagaaggaaccatgttattactatctgtaccttgcctgacatttctagatgaattg

SEQ ID NO: 1238 - DNA, 346 bp, Glycine max
  unsure (1)..(346): unsure at all n locations
tggatttccttttagtagggaatctatccttcctaagatggagccaaacccagtcacccttattaagaactagctcttttattcctttattgcctttagttgaatacacctttgtttggttctctatttggttcttaaccctctcatgcaacttctttacaaactctgacctagattccccttctttatgtataaaagaagtgtctagtgggaggggaatgtgtctagtgggaggggaatgaggtctaactgtgacatcctggaaatatttacctggaattttgtaagcgatatattntaaataaatatatatatgtattattcagtggatatatatatatatact

SEQ ID NO: 1239 - DNA, 293 bp, Glycine max
taaaacaagcttcccgtcagtggtaccttaagtttcatgggataatttcttcatttggttttgatgaaaaccccatggatcaatgcatataccacaaggttagtgggagtaaaatatgctttcttggtttatatgtagatgatattttacttgcaacccacgattcgggtttgctacatgaggtgaaacaatttctcttctaaaattttgacatgaaagatatgggtgatgcatcttatgtcatcggcattaagattcatagagatagatctcgaggtattttaggtctatca

SEQ ID NO: 1240 - DNA, 357 bp, Glycine max
agcttgattgcctattcatcaaagggagaattctcctgagataatatatgagagatgcagcaacaacctcagatttcattcctttcacttcaatggctataatcagtcgtttatatagggagaggcttaacatagacacatcataaaaccaccaatcatggagttgagatggtttctcagaagaaattccattccacaatgcactgttgtctgcttgattttgcttgcaattgcttccaaccacaggccagtggaataaggttggatctgaacaagcctttatagccaaggaatcaatgcatcttgaaactatatggagatcttttgtcaagggctgcacttccttcacatgtttaa

SEQ ID NO: 1241 - DNA, 396 bp, Glycine max
tgttggttacagtgacaacaattgggctggagatgaagatgattggaaaagtaccagtggatttgtgtttttcataggaaacacaaccttcacttggatgtcaaaaaagtagccgatattcactcttttgactcgtgaggcagaatacgtagcagctacttcatgtgtttgtcatgcaatctagcataagaatttattaaaagagttgggcatgtcacaagaagagttgaccaagatctttgtggataataagttagtcattgctctagcaaggaatccagtgttctatgatcgaagcaagcatattgataccccttaccactacataagggagtgcatagcaagaaaggatgtacatgcagaatatgtgaagtctcaagaccaagaagctgacat

SEQ ID NO: 1242 - DNA, 323 bp, Glycine max
  unsure (1)..(323): unsure at all n locations
tcaaccctacgtcctgctcttacatctctatatatagagaatgcttcttccattatcttagcttgngccagcaattctgctctctgtattccagaaggatgagtagagaaataatccccgaaggtagaataaccagcaaattttcctaactcctcatacactttatgtgccacccggggatcataaccggctaatgcaattatgtactaagttatgtcacgcctattttgaacactcagtccatctatttatcacttgctcatttgctaaattcattcgcgtattaactcatgtagatgttaattgtgaagcatcgggataca

SEQ ID NO: 1243 - DNA, 333 bp, Glycine max
tgtaggcctaggatcttcttcatcaatggattcctttgcttcttggaaaatgaatggcaacggaatggagaaggaagagagagagagaggagacgccacttcaaggagaagatgagtctagaagaagctcaccaccataagaggccatggataagagcttgggggaagaaggagatgactgaagggagagagagagaagagcacgaaattttgtgctccaaatgagctttgaaatctgaagtttgatattcaaatgatcaaaagtgaaaaaaaatcacacacatgacctctatttatagcctaagtgtcacacaaaaatggagggaaattcca

SEQ ID NO: 1244 - DNA, 376 bp, Glycine max
  unsure (1)..(376): unsure at all n locations
agcttcatggatntccttctacaattatatcttataaggatgcaatttttctcagcagtttttggagggagatgntaaattggctagaactagtcctaagcatagcacttcttatcatccccaaacggatggtcaaaccgaagttgctaatcggtgcttaaagacctatcttaggtgctttgctggccctaagcccaagacttggtttgaatggttgcattgggctgagttctggtttaacagtaactacaatatctttgctggaatgacaccttttaaacctttatatggacgagatcctccattgttgattaagagctgcaccattccatcaaagttggatgatgtaaatcagttggcccaacaacgagatgat

SEQ ID NO: 1245 - DNA, 314 bp, Glycine max
tcaacctagaggagacgaaccattccaagtgttggagaagatcaacgacaatgcctacaagattgacttgcctagtgagtataatgtaagtgccactttcaatgtgtctgatctatctctttttgatgcagatggaggagccttggatttgaggacaaatccttttcaaggagggagtgatgaggacataaccaatggcaaggaccatgaagcacttgaaggtcccatgaccagaggcagacttaaacaagcccaacacattatagagaacaggctggtcatttggatagctgtcattgatgatgattgaaggc

SEQ ID NO: 1246 - DNA, 287 bp, Glycine max
ttgagaaaactcaactttcataactttggactcaaatgtctgattacggaccataatatatcaagacgctaaaaattgaacacggaagctcgggcccaattcaaactggcataacttttgacttagatgtctgattgtggaccatattccaactgccatgattggtgattctgatgtttgactacggcccataatatatcaagactcttgaaattgattacaaaagctcctcacaaattaaactaccataacttttgattggatgtctgattgtggccgataatata

SEQ ID NO: 1247 - DNA, 384 bp, Glycine max
  unsure (1)..(384): unsure at all n locations
agctattcttcgtgggttgatgggttctgtctcgtaaaatggcatgatcactggatgacatgttctcaattagctcagttgcttcttccggggtcttcagttttatctttccccctgcagaagcatctagcagttgcttggtttgtggtctcagcccatctataaacatattcaattgaattagctcggaaaacccatgggtgggagtttttctcaataaacctttgaacctctccaatgcttcacctagagattcatcagggaactgatgaaatgaagagattgcagctttcccttccacagccttggactttgggaagtatttctttaggaacatttcaacaacttcatcctangttntcagattgttacccttaaatgagt

SEQ ID NO: 1248 - DNA, 272 bp, Glycine max
tggatttccttttagtagggaatctatccttcctaagatggagccaaacccagtcacccttattaagaactagctcttttattcctttattgcctttagttgaatacacctttgtttggttctctatttggttcttaaccctctcatgcaacttctttacaaactctgacctagattccccttctttatgtataaaagaagtgtctagtgggaggggaatgtgtctagtgggaggggaatgatggctaactgcgacatcctggacatttcta

SEQ ID NO: 1249 - DNA, 356 bp, Glycine max
  unsure (1)..(356): unsure at all n locations
tgtgtcacactttcaattgtcgaagctgaatacatagctgcaagaagttgttgtgctcaaagtctttggatgaagcaacaatgatgtaagctccattggagcttgtaggcctaggatcttcttcatcaatggattcctttgcttcttggaagatgaatggcagcggaatggagaaaggaagagagagaggagacgccacttcaaggagaagatgagtctagaagaagctcaccaccataggaggccatggataagagctnggaggaagaaagagatgaatgaagggagagggagagaagaagcacgaaatttgtgctctaaatgagctttgagatccgaagtntaatattcaaatg

SEQ ID NO: 1250 - DNA, 414 bp, Glycine max
  unsure (1)..(414): unsure at all n locations
agcttgttgtcattaaatcttacatgaatggccttttctacagtcaaggttctggagttatgcactctgtatgccttggacaattcaaagtattcaagtaagattctagaatcacactaggagtcaaactttccaagtttatccttggtgtttaagatgaaacgctgacatccaaatgagtggaagtaagagatattgggcttacgtctcttccataattcatagggacttctttaagataggccttatgtaaattttgttctataaataccaggaaacatttacagcttcaacccataaatctttgggagttgagtgatcgttaagcattgttcatgccatttcctgaagagatattnttttcctctcaacaacttcattctgttgtgctgttcttggagtgggaaaaatatg

SEQ ID NO: 1251 - DNA, 357 bp, Glycine max
  unsure (1)..(357): unsure at all n locations
tcaataataacatagaattcccaagtatatgtagatagtttctgcattctaccagacaatttttttttagaaataagcaataggatgcttgttttggcttaacacaacaccaactcccctccctgaagcatcagtttctaatacaaaaagtttattgaaattaggaatagccaagacaggtgcagaagtcatggctatcttaagtttttggaaagcctgggcagtagcttgaccccatttgaaagagtccttcttcaatagaacagtcagaggtgttgcaatggtagcataggtcttaacaaatcttctataataacctgtaagtcctaggaagccccttaatntctttagattcat

SEQ ID NO: 1252 - DNA, 419 bp, Glycine max
  unsure (1)..(419): unsure at all n locations
atggacactgaggtatctaaatggatctttgaaagctggattaaggtacaagaagacagcacatgaggcagcaatcacaggctatgtagatgcagattttgcaggaaatgtagacataagaaagtccttaactggatatgtgtttactttgtttggaaaaacaatcagttggaaagcaaataaacaattagttattgctctttcaacaactaaagtagagtacatggccctaattgaaggagtgaatgaagcaatctggctaanaggaatggtaaatgaacttggaatagcacaaccttgtgtacaattcactatgacagttagagtgctattcatttagcanatcaccaaatttaccatgagaggacaaagcacatagatgtngaaatacacttcatcagagatctgattgaatctga

SEQ ID NO: 1253 - DNA, 389 bp, Glycine max
  unsure (1)..(389): unsure at all n locations
agcttaatanatctatatatgatttanagcaagtctcccatcagtggtaccttaagtttcatgggctaaattcctcatttggttntgatgaaaaccccatggatcaatgcatataccacaaggtaagtgggagtaaaatatattctcttattttatatgtagatgatattttacttacagccaatgatcaagttttgctacataaggtgaaacaatttctctccaagaattttgacgtgaaggatatgggtgatgcatcttatgttatcggcattaagattcatagagattgtagaagcangcttcatgatgatgaatcaagtagttttgatgatgacaaaaagcccacaagaatgatgtcaagattgagtcaacaagttcaagatcaa

SEQ ID NO: 1254 - DNA, 321 bp, Glycine max
  unsure (1)..(321): unsure at all n locations
gcttatgctgcaatattacaatagacctcctctacctcagcagcaaaatcaaccactgtagaacaattatgatctctccagcaacagatacaaccctggatggaagaatcaccctaatctcagatggtctagccctcaaaagcaacaacaacagcctgctccttccttccaaaatgttgttggcccaagcagaccatacattcctccaccaatccaacaacagcaacagcccctgaaacagccaacagttgaggctcctccgcaaccttccctcgaagaacttgtgaggcanatgaccatgcagaacatgcagtttcaaca

SEQ ID NO: 1255 - DNA, 445 bp, Glycine max
  unsure (1)..(445): unsure at all n locations
ctgcagcttattctttntactcttgtgccaagtctttgatgccacatggttgaattattgacagcctccgtaattgctaccatatcctcatctacaatcatgtaaagagatcctcacttttttccacgagccccaacgagattgccttttgttaccttccaagctccatctccaaaagtggtgtgatgcccctcatcatcctaccatcctatagatattaaatttttttttaaggcaggaatatgtctaacattgtgcaatgtccatagggatccactagaggtcttgatgttgatatcactntttccaacaatgtcaagagattntccatctgcaagggaaactttcccaaatcttccagaaatatagttagacaataaatctatagagggagtagtgtggaatgaggcacctaagtccattaatcatgaatcaacgggactat

SEQ ID NO: 1256 - DNA, 358 bp, Glycine max
  unsure (1)..(358): unsure at all n locations
ggacagtggaagagctactttgctaaaatctcttataaagcgcctgtataatcctgcatgagtaagataagatcgcacctctcacacgcaagaggggtaatgcaattgtgaaataacaaaaaattttgcaggatctacttcaatgcccttattggaaataatgtggcctaaaactataccttgctcaaccataaaatgacatttttcataatctagaacaaggttagtttcagtgcatctattcaaaaccttttccagactatccagacaaatatcagaagagtatccatatacagtgaaatcatccataaacacctctatgcaattttctcaaaaatcactatnaatactaatcatg

SEQ ID NO: 1257 - DNA, 463 bp, Glycine max
  unsure (1)..(463): unsure at all n locations
tctggatcttgaatttggtttgccactgggttggatggaaaagtgtcaaacaaacaattttttatttcaggaaaaaattagaggtagggcaggaagttttacttttttattatgtgtggntgaatgaaataaaaaatctttgatttggtttgtgctgaatttgatgagtttggttttctattttttaaaacattttcttgcatttcttagttgtcaaaaatcatttaacacattttaaacaagtcaaacaattatattttaaaaaatcttaacggtcaaaaaattaatcgcaacaaaatgcaataaaagtttaaggattaagattaattaaatntttggttaagaattaaaaatcaaaatataaaaaagttaatggattanaaacgtagttaatcttattntatataatanatacanagaatattttaactattttattgtaataaataatgcatgaaatata

SEQ ID NO: 1258 - DNA, 371 bp, Glycine max
  unsure (1)..(371): unsure at all n locations
tgtctctctatgggtgaaagaataaccctcattaattcagntntaacaacattacccatttacttgctgtctttttttagaatccctaanaaagtggtgcaaaagatagttgctattcagagaaattttctatggggaggtgatattgaggccaacaagatcccttgggtgaaatgggacacagtttgtcttcctaagaacaaaggggggttagggattaaagacttgatcaaatttaatgaggttntgcttggcaaatggcgttgggagttgactaataatcagaaccagctataggcaagaattctattgtctaaatatggtgggtggaatgcattgctctctggtagaaatagtagtgatctctccca

SEQ ID NO: 1259 - DNA, 362 bp, Glycine max
agcttatcaaggttgcttaatatctccaacatatttactgcaattaatccataatatttataattagctgacagtcggatcatgctgatatatatcaataagttaaatttgatagtgatactgttgtatatattaaactacattgagatttggcaaaagcaaaaagctattaaacattgtcttgtgttgcattctcattcaggaaacaggtttcaacttctgtacaaaacagaaatttcttacaataaaagaagacggcttctgttcaaaattgcctcatctgatctgtctgtgtctccattagcatgatttacaggtcattcaagtgacacgtgacagttaggaactcatccttcttacat

SEQ ID NO: 1260 - DNA, 441 bp, Glycine max
  unsure (1)..(441): unsure at all n locations
atctctgagtcacctgcggcatgcaagcttgctcgagataatagctcanacttaggaatccagganagccccatctttaaagttctaattaaggttagattaagaattttaaatgcaaattacattattataagtaatattgaatacctaattaaattatattttttaaggaacctaaataatctaattagatttattctatttaattttaattaatattcattagttaaagttgatcttagttgattggataattaaaattagtttcaagtgagaataaggacttacattntttgtttaagttaaaatcattctanattactatgcttggagaacctgaaataactaattaatacatnttttatgaattaaatanaccacacttatanttctattaaatttgagttaactttttttaagagaaatttgagttactaagta

SEQ ID NO: 1261 - DNA, 404 bp, Glycine max
  unsure (1)..(404): unsure at all n locations
gcttgctaacccatggaagctcctaatatcttccacactntnntgggtgggccattcgtggatggccttgatttcccaaggtccacatggaccccatttctaccaactacaaaacctaagaaaactatattatctacacaaaaggtacacttctctatatttgcatagagggtgtttttcctatggactgaaagaacttacctgagatgtcctaagtgatcatctangctcctattgtacactanaatatcatcaaaataaacaactacaaatctacctatgatatcccttaagacatgatgcataagcctcataaaggtgcttggtgcattagtgagcccaaaaggtggtcttgaaagcgattttcactcatacccttntcatctgatttcggataccacttt

SEQ ID NO: 1262 - DNA, 305 bp, Glycine max
tgattacacaagatgatgacgaaggagatgacaaaaagctccagattaaccctatgacagatcctccgaggtaaagatgtccagactacaactattggctacaaaggtcgaaaatctgaagatgaatgaggaagagtgtattcatgacttccacatgaacattcttgatattgccaatgcttgcactgccttgggagagaagatgacagatgaaaagctggtgagaaagatactcagatccttgccttagagatttgacatgaaagtcactgcaatagaggaggcccatgacatttgcaacatga

SEQ ID NO: 1263 - DNA, 444 bp, Glycine max
  unsure (1)..(444): unsure at all n locations
agcttttngaatttnntttttattttactattttanaattcagaataactattattttccgtcttttaattaatttacaagtgaattttcaatactaaagtaatggttcatacttcttaatctaacaactattntgatacattattattttttattttacgaaaattacaaacaacaaagattaattaaaaattagaagacatataaacaagttgcatagaaaaataatacggtagattntacaaaagtttaaactgtttgacacttcttatttactttcacacataaatacaacaaaaatgtgtattatcttgaaaatgattacaagtatgacaacttaacataagttgtctatcacattaatacaaatcggaatacctaagaagtatataagaaatgataaattaattttcacaagagttcctctcagtgtcaccacaagca

SEQ ID NO: 1264 - DNA, 426 bp, Glycine max
  unsure (1)..(426): unsure at all n locations
ctggcaagggtttgggcagtgtattttgagctctaccagatgggactcaattagcagtgaagaagttggaaggtattggacaagggaagaaagaattcagggccgaagttagcatcattggaagcattcatcatcttcatttggttaggcttaggggattctgtgctgatggaactcataggctccttgcttatgagtacttgtctaatggctccttggataaatggatattcaagaaaaacaaaggtgagtttctgttggattgcgatactangttcaatatagctctgggaacagcacaaggacttgcttaccttcatgaagattgcgactctaagattgttcattgtgacatcaagcccggaaaacgtgcttctggatgaccacttcatgcgcatggttcggatttcgactggctaactcatg

SEQ ID NO: 1265 - DNA, 350 bp, Glycine max
  unsure (1)..(350): unsure at all n locations
agctntgagcaaattcaaacgacaataacttttgaatcggatttccgactttgtctcatagaatatcgagacactcgtaattgaaaacggaagttctgagaaaaatcaaacgacaataagttttaactcggatgtcctattgagccctgtcatatatcgagacgctcgtaattgaagaccgcagctctgacaaaaatcaaacgactataatctgtaactcggatgtgcgatagagacccgtaatatatccggactctcataattgaaaactaaagctcttaacaaatatcaacgactatacaatcttgactcggatgtccgactgtgtcccgcaagatatacagacgctc

SEQ ID NO: 1266 - DNA, 384 bp, Glycine max
tgagttgatctttatccttcataacaaggttcattttgtctgtagtctcgtggcatctcacttctatctcttttaagtgcttattttttacctgaataatgttagttaaattcgagacaagcttatcttgccttcgagcttcttcttccataagctcagatatggttttgacatcgcccatccttcgcagatgttctccatagatactattgatcttgtagtcatctgcccgggcaacccatgcataaaggccagacttcagcccagaattagtaaaccaatccttttttccatgatgatctaattcatatgctctttcaaatgccaatgcattatgtaagcctggccaagttttattgaattccacaagagcagtttcagagt

SEQ ID NO: 1267 - DNA, 346 bp, Glycine max
  unsure (1)..(346): unsure at all n locations
tgtagagaggcattngaggagctgaggaggaggcttaccacctttcccatcatgcaaccattagattgngagcttccatttgaatttatgtgtgatgcctccaattatgcacttggggatgttntgtcgtagagagttgatagactatcacatgtcattgcttacgcctcaccactctggatgcaacccaagtcaactacaccaccaccgaanaagagcttttagctattatttttgcattagataaattcagatcttatttgtttgctcctatattactatttgtactgaccatgcagccttgagatacttgttgaagaaacctaatgctaaacccaaattgatc

SEQ ID NO: 1268 - DNA, 392 bp, Glycine max
  unsure (1)..(392): unsure at all n locations
aactggatgcattggtttacttggaacccagctggccttgaatcagaaatctgtacctgtcgcaagggtttgtggttggtgctcctctgctgaccaccatacagacctttgcccttccatgcagcaacctggagcaattgagcagcctgaagcttatgctgcaaatatttacaatagacctcctcaacctcagcagcaaaatcaaccacagcagagcaattatgacctctccagcaacagatacaaccctggatggaggaatcaccctaacctcagatggtccagccctcagcaacaacaacagcagcctgcttcttccttcaaaatggtgctgggccagcagaccatacatntctccaccaatcaacaacagcaacaaccccagaaacaac

SEQ ID NO: 1269 - DNA, 405 bp, Glycine max
  unsure (1)..(405): unsure at all n locations
aagctcctaatatctcccacactntnntgggtgggccattcttggatggccttgattntctcagggtccacttggaccccatttctaccaactacaaaacctaagaaaactatattatctacacaaaaggtacacttctctatatttgcatagagggtggttttcctaaggactgaaagaacttgtctgagatgtcctaagtgatcatctaggctcctactatacactaaaatatcatcaaaataaacaactacaattctacctatgaaatcccttaagacatgatgcataagcctcataaaggtgcttggtgcattagtgagcccaaaaggcatcactagccattcatacaaaccanacttggtcttngaaagcagtttacactcatcnacccttttatcctga

SEQ ID NO: 1270 - DNA, 418 bp, Glycine max
  unsure (1)..(418): unsure at all n locations
actcagctcttgcccaattcgcttctgatctcgaaaaagctactcaaaattcattatccagaggtccaccattgcgcgagttgcttaaacaattccaatcagcttctcttacccgggaagaaccgataataactatttatactggaaccaatgggtatcttgattccttagaaattggacaggtaaggaaatttcttggtgagttacgtgcctacttaaacaccaataaacctcaactccaagaaatcatatcttctaccaagacattcactggggaagcagaagtcctttttgaggaagctattcaagaacagatggaactctttttactacaggaacaggtagaaaaaagatgattaatcatttaataactttataattcactctcaattcttataatangnatcttttaatatct

SEQ ID NO: 1271 - DNA, 402 bp, Glycine max
  unsure (1)..(402): unsure at all n locations
agctttgcttctgttcaatatataatgactgtagctaactatgcgtggntaatccgatccgatcatcgatggtcggcaagtatgatggtcttaatgatgatcctacacgtattttcgtgtgtatctcacaggcggttttaaaaaacctcgccaattaacttgggttacgggtgtagttatggctgtattgactgcatcttntggtgtaaccggttattccttaccttgtgatcaaattggatatagngcagtcaaaattgtaacaggcgtacccgacgctattcctgtaatangatcagctttggtaagctattacgcggaagtaccagtgcaggacaatctaccttaactcgttgttataggttgcatacttgttgcatacctcttctactgctgtattat

SEQ ID NO: 1272 - DNA, 341 bp, Glycine max
  unsure (1)..(341): unsure at all n locations
cagcagccaatccttgaagcttcctgtttctccctgtgaaataaaagaaagagagaaattaaacctaatnttggtcacgtaaggaaaagtangacaaacttacctaatgcaaaatggcaaggtaaaggtgtgccacatctcttcaatgtggtcatttcatcatctgttagtttacgattcacaccatatggaagaaggcaaaagggcttactataaccatgaataacagcaggcagaagatcagcatcaacaggcaaaggatcacactcccaccaatcaatatatcgaggcccaagccctgttagcaaacagtctgtatcttctgcaagctctgcttcatc

SEQ ID NO: 1273 - DNA, 328 bp, Glycine max
tggttaccccatgttgaatttgcttacaatatagctgttcatagcaccactaattggtctccttttgaagatgtttattggtttaacccactaactcctcttgatcttttgcctaatgtttctgtttttaagcataaagaaggtcaagcaaatgcggactatgtgaagaagcttcatgagagagtcaaagatcaaattgagaggaaaagtataagctatgctaaacaagccaacaaagggagaaagaaggttgtcttcgaacccggagattgcgtgtgggtgcacatgagaaaaaaaaggtttccggaacagaggaaatcatagcttc

SEQ ID NO: 1274 - DNA, 339 bp, Glycine max
  unsure (1)..(339): unsure at all n locations
agctagcaacaaacataatgtcttgtcttgttgctgacagatacaacaaactaccaattatacttctataaacaaaatcatccgctttatcaataccatcgttcattgataacctttcattcacaacaattggagaggccacacgcttgcattgctccatgcaaaacttcaatatcaccaaagcatatttcttttgtgaaatgaagatcccgtcattacattgagaaatctccattctaagaaaatacttaatttcacccaagtcaaccatttcanattcgttgtccatgtcccttatttcacctaagtcagtcattttcccacttcttcacgtaccag

SEQ ID NO: 1275 - DNA, 283 bp, Glycine max
tttgcaaggtgaaatcatttatcctatctccgacagccaatgggtgagtcccgtccaggtagtcccgaagaagaccggcctcacagtgatcagaaatgagaaggaggagttgattcctactcgggtgcagaacagttggagagtctgcattgactataggaggctgaaccaggttaccaaaaaggaccattttcccctgccattcattgaccagatgcttgaacgcctggcaggtaaatcccactactatttccttgatggtttttttggttatatgcaaatt

SEQ ID NO: 1276 - DNA, 287 bp, Glycine max
ttgtgctaatatgttctattgacactctttgtttctgaacttcttctttcacggcaaagtacttcaattccatatgcttagcacccgtagagtacttgtcgttcttagaaaagaatattgttgcggagttatcacaatacattttcagcggcctagcaatactgtcgacaattccaagccctgaaataaagtttcgcagccaattagcctgaattgtagcctcaaaacatgctacaaattcatcttccatggtggatgcagcaacaactgattgttttgcactcttc

SEQ ID NO: 1277 - DNA, 408 bp, Glycine max
agcttggtcataattataaaaagatagatgcttgtccaaaacactgcatgttgtatttgggagatgatgaaaaaagtttggatgcttgtaagcattgtggtacatctaaatggaaaccccacaagaagaagaaaatagctgcaaaggttttacgctactttccattgaaaccaagattgcaaagattgttcacatgtcgtaagactacaaaagatatgagatggcatgttttggaagacaataaagatgggttgttaaagcatccaagagatggagagacatggaagacatttgatttaatccatcctgagttttcttcaaatcctcgaaatgttcgtttaagccttgctactgatggttttaatcctgctaggaccttgagttctacctatagcatctggccagttt

SEQ ID NO: 1278 - DNA, 594 bp, Glycine max
agcttaagccttttatacatgcttagtaaggatcaaagatgttaaaaaaatggattgatctctaagtttctaaaaagcaatgagttcaacacactataattgattacaaagttttgttatcaatcacaaagtgttagaacaaacaacaaatctctcttctacttgaaatttttggcaagttttgacaaattaatcgattacttgtttcaataatcgatcatagaagtcagtttcaaaagaagaaagactttgtagcttaagctaatcgattaccttttattgtaatcgattaaattgtatctagaaataatcaaagttagtttcaaaagaagaaagactttgtagcttaagaagttctctacatgatgaaataatcaattaccacacctgataatcgattattccagaaaatacagaagcatgagaagctctttatttgaaacaagataatagattatcatttcctataatcgaatacaagatttatgaaaatgcataacaaaaaggattttgacgtattaatcgattaccataatctataattagttaaaattggtttacccatcaaaattataaatacccttttatcttatt

SEQ ID NO: 1279 - DNA, 507 bp, Glycine max
  unsure (1)..(507): unsure at all n locations
agctagtaatacattaattgataaaataaaactttggcatttgagattaggtcatgttagtgaacggggattacatgaaattgagaaataaaatctgttaggtggcgataaactagataaacttgaattttgtgatcattgtgtgcttggtaaatcacatagaataagctttggcactggtattcatgttttatctaggccttttgagtatgtgcattttgatttatagggaccatttagagtgaaaattcatggtggaagctcatactttctcaccatcatagatgatttctcaagaagagtatgtctgtatgttttgaaaaataaatcagaagcttttcaaatattcagagagtggaaaactcttattggaaatcaacttggtacaaaactaaaaattttaaggactgacaatggcctgtagtttgtttcaaagcaattcaatgagttttgcaggaaagtaagtatcanaaggcccaaaacaatcccttacacaccacaacaaaa

SEQ ID NO: 1280 - DNA, 284 bp, Glycine max
tctgttatgaatttcgagtgtctcgatatactacgggacacaatcggacatccgagtaaaaagttattgacatttgaatttgctcatagcattcgttgtcaattacgagcgtctagatatattaaaggattcattcggacatccgagtaaaaagttattatctttttattttgctcagagcttctgttttcaatttcgagcatctcgatatattacaggactcaatcggatatccgagtcaaaagttattgtcgtttggatttgctacgagcttccggtttcaa

SEQ ID NO: 1281 - DNA, 278 bp, Glycine max
tgtaatcgattacagcatttgtgtaatcaattaccactaaggaattttcaaaaaataactcccaagagtcacatctattcaaaagatttttgaatggccatcaaaggtctataaataggtgacttgggacacgaaatttcttagagttttcctgaacaaattgtcttatcctctcaataccaaattgtcttataactctcaaaaagaattccttggccaaaacacttgcaaattcaataaggaatcttaagtgatcttcaattttaatatctttctct

SEQ ID NO: 1282 - DNA, 493 bp, Glycine max
agcttggaagccaaggccttgaggtttgtttttatgttgttggattgattttatatccttcattcatatcatggctctgagttggtatcttccttgtcttgtgtgaatcatttttggctgtaaggtttccaagttgggattcgggtgtatgggcctgaccaaagtgtacaatgatcctgttcctaaagaggttggcatctctttgatcaaatacacattcagtaaagggatcactttctttgttactgtagatttttatcgaccccatgccaacaaagttttggtcgaaaaggttaattaccttaacactttgtaacatatttgtttcactttaacaataacaacccataatataatgtaacataacattttaattaactctgaggtggtcaggggcttgcctcaagatcaaattcagattcccccaaagtttggtattgtcaaaatggataatggtaatgtgatagtgaaccggttcccctgaatatgtctg

SEQ ID NO: 1283 - DNA, 434 bp, Glycine max
agcttcttgcaacattatggtcaatgagctgcataatgaggggaaaaagcaattttcctgttataaaaaatatattagccaattttgatgatgctttctgagaattgagaagcttgcctcctaaaagggattgggatcatgctatcattttgaagaaggctcaaattcctaatatttgcccccacatgtatatgcattatcaaaaaaatgagatagagaagattgtgaaggatatgctttgtgctgtaaggcccaacactaaccctttcagtagccctgttatacttgtcaagaagtattgtgtgtggagattttgtatagactatcaggccatagacaagtaaacaccggataaatttccaattcccataatagatgaactactagatgtattgggtgatgcagtgatttttgtaagatgaactactcttttg

SEQ ID NO: 1284 - DNA, 168 bp, Glycine max
tataatatatcgaggcgctcgaaattgaacaacggaagctcttgagaaattcaaatggtcataacttttaactcggagttcaattcatgcgcatcacatatagagacgcttaaaaatgaacaacggaagctctccaaaagttaaaatggtcataagttttcacactga

SEQ ID NO: 1285 - DNA, 282 bp, Glycine max
tgaaattgaacatcagaagctctcgacaaattccaatggtcataacttgtcacaaggaagtccgattctggcgcatcacatatcgagacgctctaaattgaaaaccggaagctctcgagaaagtcaaaaggtcataacttgtctcacggaagtcagattcgggcgcataatatatcgagacgctcgaaattgaacaacgtatggtctcgagaaattcaaatgttcataacttgtcacacgaaagtccgattcaggcgcataatttattgagaagctggaaat

SEQ ID NO: 1286 - DNA, 195 bp, Glycine max
  unsure (1)..(195): unsure at all n locations
tgaaggtaggagaagatgagtggagggagagggagtgaagaggcacgaaattttatgcctcaaatgaggtctgaactttgaagtgtaattctcaaatgatcaaagttacaacaagtgttacacatgcttccatttatagcctangtagcttccttgagaagcttccttgagaaacttccttgagaagcttttttg

SEQ ID NO: 1287 - DNA, 276 bp, Glycine max
tacatcgactgccagaaggtgcataacaaactcgttgaaattagttgcaacttgtaactgtttctcggaggaagaaagaaagaaaaaacggttataacaaacttttttttctgctacggctgctgctgttgcaagttggggcgcctccggaaatagcgcgtttgttggaggaaatccggcgagaaaacgacctatgcaagagcgacgtcgtttcttcttccacgtgctttggagccgatcccgagcttgacgagttcatggtccccccttctttct

SEQ ID NO: 1288 - DNA, 419 bp, Glycine max
agctttactagtgttccaagacatgatgtctgctggagaatgtccaaactatgtaaccttcattggggtactttctgcttgtgttcatttagctcttgtacaagaaggattctactattttgatcagataatgaagaaatttgacgttgagcctggactggagcactacacatgtatggttgcacttttgggtagggctggtttacttgatgaggctgaaaactttatgaagacaacaacacaggtcaaatgggatgttgttgcgtggcgtactttgcttaacgcgtgccacattcatcgaaattacaatttagggaaacaaattacagaaactgtgatacagatggaccctcatgatgtgggaacatatacattgctatcaaacatgcatgccaaggcaaagaaatgggatggagtgg

SEQ ID NO: 1289 - DNA, 288 bp, Glycine max
tgtcgaaaaggcaaagccgttttacaaactgctcaagaaaactgagcccttcctgtgggacgagacatgtgaacgagccttcctggctttcaagaaaaccataactacaccaccgatcctgagtcggcctaggctaggagtacccatactcctatacctttcaataactaacaaagctgttaactcgacccttctgcaagaggaagggaagcattaactccctatctatttcaccaaccgcatacttcatgaggccgagaagtgctaccaaatgatagaaaatatggt

SEQ ID NO: 1290 - DNA, 440 bp, Glycine max
agcttgcagtgattcactctgatgtgtgtggcccatttgaaatcaaatctcatggaggtaacttgtattttgtctcttttatagatgactttacaaagaaaatgtgagtttacctattacaaagaaagagtgaagtatttgtaacatttaaatcattcaagttactagttgaaaaagcaatctggttgttcaatcaagatgcttagaactgatggtggaggagagtacacttcacttgaatttgagaatttctacaaggaagaaggaataattcatgaagtaatggctccatacactcctcaacacaatggaactgctgagagaaagaatagaatagtgcaaaatatggttagatgcatgctgagaaagaagcatcttccatatgatttttgggcaaaggcagtatccacaacttctcacatcttgaatagatgtcctac

SEQ ID NO: 1291 - DNA, 441 bp, Glycine max
  unsure (1)..(441): unsure at all n locations
agcttgaatntgagaataaaaatcataagacattaagtttctcttggcctagaagtcagatgcaaattcagtagaacagataaatatatgatgctctaatttacaaaacgaaataaaaaaaataaattggctttcatgttgattgtaaaccttttgagtttggacacttacacattctggtgaagctgacaaatgcagtatatgtagccgaagacaaggcaggcaaaagaaacattggcaaaactcggattgccctcattttccaattcatatccattgatcttgttgtcataatagcataacctacagcaatgacctgaaagttgaaaccattttaagcaaaatccatttataaaaacaccctcaataatcaataagaatatattaatttgtcagagaaaaaatttaaaatttcagttaaccctccattgtcactcaata

SEQ ID NO: 1292 - DNA, 289 bp, Glycine max
tatcagaacaacattttttttcaaaatgcaacaatgagaaaagaaagcacaaagaggaaattcacagaaccaaatgagattaacatcaattcacattttgtttctaaagaatataagagaaaacacccgattcactcaggcagaggaaaacctctcaaaggtgcataattctcatgcaggcaattgttccatcacaattccaatcactgatatgtcataaatcaatttttgcaagtcatttcccatcaaatcaaagataaattgcataatcatcatggatcattagggc

SEQ ID NO: 1293 - DNA, 407 bp, Glycine max
agctttctccactaagttgcctaatgcctgaaatgtcttttctgatggtagtggtcctagatgcaagaaagaatttctccaagaacaccctcttaaggtcatccctgctgaaaatggacttgggagcaaggtagtgtagccaatcttttgccactccctccaaagaatgaggaaaagcctttagaaagatatgaccttcttggacattagggggtttcatggtggaacaaacaatatggaactccttaagatgcttataaggatcttcacctgcaagaccatgaaacttgggcagcaaatgtattagtccagtcttgagaacatatggaacaccctcatcaggatattgaatgcacaagctctcataagtgaaatcaggtgcaaccatctccctaagagtcctctca

SEQ ID NO: 1294 - DNA, 439 bp, Glycine max
  unsure (1)..(439): unsure at all n locations
agcttctggtgggacatcttgacttgctttccaatctgacattcaccacagattctgccttcttctattttcagattgggaatgcctctaacagcaccttggtcaatgattttcttcatgcctcttaagtgcagatgtccaaatctttgatgccatattttgacttcatcttctttggaggatagacatgtggaggagtaactggtttcttgaggtgtccataggtaacagttgtcctttgatctgctgcccttcattagaacttcactcttctcatttgttaccaagcattctgactttgtgaagtttacattgaatccttcatcacaacaactgactgatgctgatcaagtttgcagtcagtcccttcaccagcaatactttgttcagactangaagtccatcatggactagccttcccatccaataatcttttctt

SEQ ID NO: 1295 - DNA, 304 bp, Glycine max
attacgagtgcctgtatattgatgcgcctgagtcagacattcgagtgaaaagttatgaccatttgaatttctcgagagcttcctatggttaattttgagcgtgtcgatatattatacgcctgaatcgaacctcatggtgaaaagttatgaccatttgaatttcttgagagcatccgttgctcattatcgagcgtctctatatgtgatgcacctgaatcggacctccgagtgaaaagttatgaccatttgaatttctcgagagcttccgttgttcaatttcgagcgtctcgacatattatgcgcc

SEQ ID NO: 1296 - DNA, 402 bp, Glycine max
agctttcaatatattgagacgctcgaaattaaacatcggaagctgtcgagaaattcaaatggtcataacttttttcacggatgtccgattcaagcgtatcacatatacagacactcgaaattgaacaacggaacctctcgagaaattcaaatggttataacttttcacacagatgtctaattaaggtgcatcacatatagagacactcgaaaatgaacaacggaagctttcgagaaattcaaatggtcataacttttcacactgaggtccgattcacgcttataacatatcggggcgcctaaaattgaacaacagaagctcttgtgaaattcaaatggtcataacttttaactcggatgtccgattcaggcgccttacatatagagacgctcaaaaatgaac

SEQ ID NO: 1297 - DNA, 276 bp, Glycine max
tagagccaattcaaacgacaataactttttactcggatgtctgattgagtcccgtcatatatcgagacgctcgaaattgaatgttgaagctcttagccaattcaaacgacaataactttttactcgaatgtctgattgagtcctgtaatataacgagacgctcgaaattgaatgttgaagctctgagccaattcaaacgacaataactttttactcggatgtctgattgagtcccgtcatatatcgagacgctcgaaattgaatggggaatctctg

SEQ ID NO: 1298 - DNA, 418 bp, Glycine max
agcttaaacattcaacttcgagcgtcttgatatattacgagtctcaatcaaacatccgagaaaaaagttattgtcgtttgaatttgctcacaagttcaacattcaattttgagcgtctcgatatatgacgggactcaatcagacatccgagtaaaaagttattgtcgtttgaattaactcagagcttcaacattcaatttcgagcgtctcgatatgtgacgggactgaatcaaacatcccagtacaaagttattgtccgttgaatttgctcaaaggtttcacattcaatttcgaacgtctcgttttattacgggactcaatcagaccatccgagtataaagatattgccgtttgaatttgctcagaacctcaacattcaattttgagcgtctcgatatatgacggggactcaatccta

SEQ ID NO: 1299 - DNA, 378 bp, Glycine max
agcttctggtgggacatcttgacttgctttccaatctgacattcaccacagattctgccttcttctattttcagattgggaatgcctctaatagcacctttgtcaatgatattcttcatgcctcttaagtgcagatatccaaatctttgatgccatattctgacttcatcttctttggaggatagacatgtggaggagtaactggtttcttgaggtgtccataggtagcagttgtcctttgatctgctgcccttcattagaacttcacacttctcatttgtcactaagcattctgactttgtgaaagttacattgaatccttcatcacacagctgactgatgctgatcaagtttgcagtcagtcccttcaccagcagt

SEQ ID NO: 1300 - DNA, 276 bp, Glycine max
ttgagcaaattcaaacgacaataacttattagtcggatgtctgattgagacccgtcatatatcgagacgctcgaaattgaatgttgatgctccgagcaaattcaaacgacaataacttttaactcggatgtttgattgagtcccgtaatatatcgagacgctcggaattgaataccgaagctctaagcaaattcaaacaacaataactatttactcggatgtccgattgagttccagaatatatcgaaacactcgaaattgaatgttgaagctctc

SEQ ID NO: 1301 - DNA, 478 bp, Glycine max
  unsure (1)..(478): unsure at all n locations
agcttaacaaaaggcatgcgaagtgggtggaattcctagagcaattcccttatgttatcaaacataaaaagggaaaaggtaatattgtagccgatgctctttctcggcgtcatgcattactttctatgcttgaaacaaaattgattggtcttgaatgtttgaaaagcatgtatgaaaatgatgaaacttttggagaaatttttaaaaattgtgaaaatttttcagaaaatggtttctttagacatgaaggctttcttttcaaagaaaacaaattgtgtgtgcctaaatgttctactaaaaaattgcttgtttgtgaagcacatgaaggaggtttaatggggcattttggggtccaaaagactctagaaacattacaagaacatttttattggcctcatatgaaaaaagatgtgcagaaatnttgtgaacattgcattgtatgtaaaaaagcaaagtctaatgtaaagcctcatggatt

SEQ ID NO: 1302 - DNA, 290 bp, Glycine max
agcttatgagaattccaagctttataagcaaaaagtaaaaatctatcatgacaaaaagctatcaaaaaggaatttttagtctggtcaataggtattgttatttaattgtcaattaagattgtttctaggtaagcataaatccaagtggtctggaccattcatcatcaaagaagttatgccacatggagcaatgatattggaagacccaaccaccaaaaggacatggaccgtgaatggtagcaagaggataatcactgttgtccagctgcaagaggcttgaaccataaaaa

SEQ ID NO: 1303 - DNA, 500 bp, Glycine max
agctttttattgtaatcttgaaattcaggacaacactctgatttctgaaatttttgggatatttatggtcattgaccagtcccttttccatgacttaaccaaattacccagtgacggtgtaccatttgaaagcacactaaatgacgactggaaatttgatttctctgcccatgatgcccgccagttggtttgcaccaacaatgcagatatgaccggacgtcttcttgtcgggtcattggcttttgaaagccgcatccttcactatttaattgtgcgtattctgcttccacggtcttccaaccttgcccaggtttctgaggaagatctaattatcatgtgggcccttcatacagggcgtcaacttgactgggcacacttagtcagatatcccatgcataaggcattgcgaataaatgctccactaccatatcccacacttgtcactctctttttccgccatttcaaaatccctcttgatctgaacccttatgttccaatca

SEQ ID NO: 1304 - DNA, 276 bp, Glycine max
tccatcaagttatgaccatttgaatttctcgagatcttccgtggttcaatttcgggcgtctccatatgtcatgtgcctgaatcggacctccgtaagaaaatttatgaccatttgaacttctctagagcttccgttgtttaatttcgagcttctcgatatctgatgtgcctgaatcggacatccgagtgaaaagttgggacaatttcaatttctccagagcttccgttgttcaattttgagcgtctcgatatgtgatgttcctgaatcggacctccg

SEQ ID NO: 1305 - DNA, 517 bp, Glycine max
agcttcttcttgtttcttcccccattttaaaacaacatttttcttaattacctcattcaaaggtgcttgcaaggtactaaaattcttcacaaatcgtctatgaaaacttttcacctcagtcacacttctaggtgcaggccactcttggatagccttgaccttttctttatcaacttgaacccctttggaacttactacaaaaccaagaaacacaacatggtctttgcaaaaaaatacatttttcaaggttagcatacaattgttccttcctaagcacacacaacaccgattttaagtgtgcaacatgcaaatcaagggttgtgctataaacaaggatatcatcaaagttcaccaccacaaatttaccaatgaattctctcaagacatggttcattaatctcatgaaaatgcttggagcattagtcaaactgaaaagcataaccaaccattcatataatccatatttagttttgaaagcgggttttcatttctctccttctttaatccttatttgatt

SEQ ID NO: 1306 - DNA, 461 bp, Glycine max
gcttaaggactatgattattcaacatcacagaggtttgtgactactggtggtgatttcggcaacccctgttcgcaaaccgtggcgaattggtctccccattgagaagtatgaggatgcttacaagttggtctactgtccaagtgtgtgcaacgattgcagttatccatgcggtgatattggaatataccaagatgaatatggcaagcgtcttgctctaagttctgaaccatacaaagtgaagttccagcgggcttaattattgaattgataacaaaactaattaaagaataatgaataagtgtaatgaactactttatgcttttgctgcatatatggtaattctcatgttgagttccttgccacggacttgataataaataaacaagttactttctatttttagtctttccaaaatttcttgtttctgttcgtctttgtcattgtttgcatttgggatgca

SEQ ID NO: 1307 - DNA, 271 bp, Glycine max
tggacaatggtagggcaatcttgcaaaaatcctagatgaatttcctataaaaacctacatgtccaagaaaagaacgtacttcctgcatggaagcggggtaaggaagagaagtaataacatatatcttggccttattgacctcaatacttctactagagaccaaatgccctaagactataccttcatggatcataaaatgacatttttcaaagttaagaacaagattagtctcaatgcatcggtcaagaactctagagaggctatccaaaca

SEQ ID NO: 1308 - DNA, 326 bp, Glycine max
agcttgtttcagaggcgtggagtttactatcagataaggtcaaaagactagcatataaccagaacaggagattggaaggatttcacgataatgctcccaacaagaatggttatataaaacttaacaagaatgcaacttccagcatgagaacaggaaataatgatgctcgggcacatccacatccgcatacaccctccattcctcctccacatacaaatgctggtaccttttggactatctgtaataagtgcaagacacattatgaatatctcaggacatatttgaatcaaacccttttatgtcccaattgtaaacaagcttttgtg

SEQ ID NO: 1309 - DNA, 280 bp, Glycine max
tcaaaaaatttgaatggtcataacttttcacacgaatgttccattttgggacataagatatcaagacgcttcaaattgaacaaccgaaactcctgaaaaattccaatggtcataacatttcacacgaatgttccattgggggacataacttatgtatacgctcgaaattgaacaaccttagttctccagaaattcgtaatgtcataacattttactccgatgttccattcgtgggcctattatatggagacgctcgaaattgaacagcgtgatgttaatt

SEQ ID NO: 1310 - DNA, 716 bp, Glycine max
  unsure (1)..(716): unsure at all n locations
agctntgatgcaacatttggagaggttaatgaaacaacgagatgatgcgctccatgagaggttggatcaaatggagaatagagatcatcctgaagaagaaaggaggaaaagaaggaatgatggtgttcctaaacaaaaccgaattgatggtattaaactcaacattcctccatttaaaggaaagaatgatccggaagcctacttggagtgggagatgaaaatagagcatgttttctcatgcaacaactatgaggaggaccaaaaggtgaagcttgccgccacggagttttccgactatgctcttgtgtggtggaagtgattatgcaagttgaagtggacgtttccattgggaaatacaatgataaggtactttgtgatgttgttcctatggaggccagtcacttacttttggggagaccatggcaatttgataaaagagcccatcatgacggttacaccaaccagatctctttcattactttggtgttgcataaaaaatgtacacatgtagtcggctaggttttttgtcccaaccttacccactttttgtttctagccaaattggcttgttccattattttgcccggaaaaatttaccccctttgcaaaaaaatattgctttcaacttatgccttttttttagggatgaactgaacctttttcccgcattgtcggtaaataccccaattaatctttcgcccccttgccaatttttt

SEQ ID NO: 1311 - DNA, 444 bp, Glycine max
agcttataatatatcgataggctcgaaattaaacatcggaaactctcgcgaaattcaaatgggcataaattttcacacggatgtccgacccgggcgcataatatgtcaagagtctcgaaattgaacaacggaagctcttgagaaattcaaatggttataaaatttcacacggatgaccgattcaggcaaatcacatatcgagacgatcagaattgaacaacggaagctcttgagaaattcaaatggtcataacatttatctcgaatgtccaatttaggcgcatcacatatagtgatattcgaaattgaacaacagaagctctcgagaaattcaaatggtcataacttttcacactgaagtccgattcacggttataatatatcgatacgctcgaaattaaacatcggaaactctcgagaaattcaaatggtcatgaacttttca

SEQ ID NO: 1312 - DNA, 417 bp, Glycine max
agcttggttatctccttcttcactacatcaataatcaccgggttgagtcttctctgttgctggcttactggtttagctccatcctctccatttattcgatgcatacatgtggatgggctaataccacgaatgtccgccagggtccagcctatagccttcttatgcttcttgagaactaacaacaacttctcctcttgctcatcagcaagggaggcagatataatcactggaaaactcttgctatcatccaagtaagcgtattttaaattttatggcagaggcttcaattctggtgtggtcaactggacagtggtagaaagagatggtttcttagcctttacctcataaagaaaagcagatgtatgtgtactttttgaaactggttagtcctatctgactctataaaatcaatctcaa

SEQ ID NO: 1313 - DNA, 462 bp, Glycine max
agcttgctaacccatggaagcttgataacccattcttctttccttaagacatgatgcataagcctcataaaggtgcttggtgcattaatgagcccaaaaagcatcactagccattcatacaaaccaaacttggtcttgaaagcggttttccactcatcaccctttttcatcctgatttggtgataaccacttttaagatcaatttttgaaaaggtattggcaccatgcaactcatcaagaaaatcatcaagtctaggaatggggtgcctatactttacagtgatgttgttgatggccctgcaatctgtacacattctccatgtaccatcctttttgggcaccaacaacactggcacaacacatgggcttaggctctcttggacccaacccttctccaacaattctttaacctgagactctatctctttagtctcccgagggttagtcctattggctggccta

SEQ ID NO: 1314 - DNA, 552 bp, Glycine max
tcatgatgatgattcaagtatgaatcaagtagttttgatgatgaaaaaaagcccaaaagaatgatttcaagattcagtcaacaagttcaagatcaagattaatttcatgtttcatgagaagaaatcaagaagattcaagtttcaagagaagtttgatttcaagattcaagagaaggtgaattcaagattcaagagaagaaatcaagaagacttcacaagggaagtattgaaaagatgtttcaagaaacaaacatagcacaattttgtttttcaaaagagtttttctcaaaattttctaagttaccagagtgtttactctctggtaatcgattaccagtttcctgtaattgattaccagtgacaaagtttgatttgaaaagcttttaactgaatttgcaacgttccaattgatttttaaatggtgtgatcgattacaatatattggtaatcaattaccagtgtatcattgaaattcaaattatattgtgaagagtcacatcttttcataaaatgctttgtgtaatcgattacatggttatggtaatcgattat

SEQ ID NO: 1315 - DNA, 365 bp, Glycine max
gtatgggttggatgttgaattccacgtgatcctggtgccgaaatgatgggacagcgggtgaaccaaacgcggaaggtttttttggtgaggtagccatggaaaagcagagcgtttggaatgatttcgtaaatctcacaatgctattgggaaatgctggtaaaaacacgaatgccaagcagatataaatttgaatgaagaatgtataggggcgtgtgaggcaacggtcgaattcgttttggcttaatattgaacgtgctattaatgttaagtgattcgtttgggcacgttcagattgctgtagctgctataattcctctagcaaacaaatgcccagcttgcccctcagtttttcaaactgatttgca

SEQ ID NO: 1316 - DNA, 501 bp, Glycine max
agcttctagtatacgatttatctgaagaaattcattttctatcgcacaacttccaccaccaccaagagcagctaagtactgcaatgcaattttagctgtttctgttttcccagatccactctcgccactgcgaacaaatttctaacaatgattattaacaagcacaccagtgaatgtatcttattactactatgaaaatccaatgatattggtttaggaacatatattaagtgtcatgcacaaaatgtagcccataaatgcagtaaggagctgaccttatgataatggactgatttacttcatctgtaagatacaaaaagaaaaagaaaacctttataaatgtctcattcaagtagaatgcaaagattgcaaagaagggaagagaaagggagaatttcattcacctcttatcaccttgttataaagccgatctgccacagcataaacatgaggactatcaataattctctgcctataagctgagacagaatcatttccata

SEQ ID NO: 1317 - DNA, 435 bp, Glycine max
tgcttctacaattgacatatactttgacaatgttgggggagacatacttgaggcagcccttcttaacatgagaaggcatggacgaattgcagtggccagaatgatctcacagtaagatcttgatgagcctcaaggcataaagaacttagtgaatatcatatacaagcagatcaaagtagaagccttcacagtttatgattactatcacctctatcctaaattcttggatactgttttgccttacattagggaagggaagataacatatgttgaagacataactgagggtcttgagaacggtccaattgcactagaagcaatgttccaaggtcgtagtgctggtaaacaagtcattatacttgctcgtgaataatttagtacaaccttactgtttgatctttcaattcattttgggtgtgttgtaactctcatttg

SEQ ID NO: 1318 - DNA, 470 bp, Glycine max
ctgatggtgtcgagaagaaatcacatgtttggcatcatcaaaaagggggagaatgtgaatgtatgtatacatgattttgatgatgccaaagaaaaatcaaacaaggttgcttcaaatgataagcatttgcttcaagaataattcaagagtgcttcaacaaacaaagccttgtttcaagattcactaaagaccaagccttgccttaaaacaaagtgctttcaagacatgcaaagctctggtaatcaattaccacgaagtgtaatcgattaccacaagacatggttgagaaatagctgttgaaaaaggttttgaatttgaattttcaacatgtaatcgattaccatatgtctgtaatcgattaccagcaacgaaactttggaaattcaaattccaaagtcataacccttcaaattataactgtgtaatcgattacacaaacattgtaattgattaccagtggaaagttttca

SEQ ID NO: 1319 - DNA, 391 bp, Glycine max
agctttcactcggaggtccgattcaggcgcataatatatcgagacgctcgaaattgaacaatggaagctcttgagcaattcaaatggtcataacttttcactctgaggtcggattcaggcgcattgtatattgagaagctcgaaattgaacaatggaacctcttgagcaatttaaatggtcataacttttcactaggaggtccgattcaggcgcataatatatcgagacgctcgaaattgaacaatggaacctcttgagcaatttaaatggtcataacttttcactcggaggtccgatccaggcgcataatatatcgagacactcgaaattgacaatggaagctcttgacaattcaaatgtcataacttttcactctgaggtccgatttag

SEQ ID NO: 1320 - DNA, 389 bp, Glycine max
tcaacatcagaccacttccagggtgctggaactacttcacatggatttgatggggcctatgcaagttgaaagccttggaggaaagaggtatgcctatgttgttgtggatgatttctccagatttacctgggtaaactttatcagagagaaatcagaaacctttgaagtattcaaagagttgagtctaagacttcaaagagagaaagactgtgtcatcaagagaatcaggagtgaccatggcagagaatttgaaaacagcaggttcactgaattctgcacatctgaaggcatcactcatgagttctctgcagccattacaccacaacagaatgggatagttgagaggaaaaacaggaccttgcaagaggctgctcgggtcatgcttcatg

SEQ ID NO: 1321 - DNA, 513 bp, Glycine max
agcttgtgctaaaggaagtaagacatgtgtttgagatgcgtttaaaccttacctcaacatgaaagctagatgaagatgggatgataaaccagttcgatacagatagatggaagcttactagaggaagcatggttgttgcttaaggtaagaaggaaggctcattatacatcatgcagggaaagatatgcaaagggaagacaaatgttgctcaagatgcaaccaaagaattgtggcacaagatattgggtcacttgagtgagaaaggtttgaagtttctagcaaatgatcactttccaaacataaagaggcaaccacttgaatccttgaagattgtcttgcaggtaaataatgcagagtgtctttccaaagattgaatgaactagaaggagaaagcaaatccttgatcttgtccacttagatatttgctcaatgtctaaaaagtcccttggtggtgcccaataccttggtaccttctttaatgattactccaacaagctgtgggtggattcgttg

SEQ ID NO: 1322 - DNA, 525 bp, Glycine max
  unsure (1)..(525): unsure at all n locations
tgtggtggtcattctctacgccattttcatcgctgccgcatgtaaaatgacggtcaaggctcttaagacagcaatgtaaagatgtagggtatgataatagcaaggcaaattgaaatagaatatgtatattgttatttcattgatcctttgcatgatatatataatacatgtacaagaatgttctataccaattctaaggcatgacagacgtgatccataatcagtggcatctgatttattctatgcattataaggtaaataaatatagaatcaaggtaacatangaaagtaaatatatacacagcatatttgcaatcatgtagaagatatttcctaatactccccctcaagttggtgagtgaatatcgtgaagtcccaacttgttgcgcaatgtcacaaattgatctttttccaaagcttttgtaaacacatctgctagctagaattttgttggcacataagaaaagattgatcatcccagcttgtagttttttcccgactatatgacaatcatttccatatgtt

SEQ ID NO: 1323 - DNA, 385 bp, Glycine max
ttcctcgagcacgttcatcatccacactgcttgacaagcaccaagtgatgctgccacatactcaacttcagaggtagacaaggccaccacatcctgcttccttgaactccaagccactggtgcatcatagtacatgaacaaataccctccagtactcttcttctgttctggatctcttttccaatcagaatttgtgtaaccaaacagatctgattcatatgattcaacttcaaaagggaacaacacaccattgtcaattgtccctttaacaaacctaagtattcttttggctgcttgcatgtgtgaaagtctaggtttttgcatgaacctgctaataaacttacttgcaagcagatatcatgtatgctgctgcataagtacctca

SEQ ID NO: 1324 - DNA, 376 bp, Glycine max
ttgcatcagacaaagatgatagcaaatccattttaggatatgtttacactttaaatggtggtgcaataagttggaaaagttccaagcaagctatggtagcagattcaactactgaagcagaatatatagcgacaagtgaacccgctaaagaagctgataggataaaaatgttcatagttgaacttggtgtggttacttcaatagaagagacgggcccattaacgtgcgacaataatggggctattgctcaagcaaaggaaccaagatcacaccaaaagttcaaacatattgtgcgaagggatcacttgattagagagataatacaacgaggtgacgttaagattgaaaatgtttatggaaaggagaatgcaacaga

SEQ ID NO: 1325 - DNA, 464 bp, Glycine max
acactatacaatacctcagcttcactgaatagcttgtgttattgaagaatattcttcttgaatagaacacgttacccaaaaatcagtacgaggcaaataagatattatgtcttgcacatatggagtaccaaaaaatacatgcatgccctaataattacattttgtatagaaatcagtttgtcgaaacacacaaataccccacaagtgggtatcacagtacaaattgaaggataacacatgtggtgatgatgcaacgaaaaacaacaactatttatcaaaggtgtgctaatatctttcaattattccaaggttgcagtgattgttttctaatggacatgataccaaaaaacttaacatggcatgcagctggtagaaaaagtgatggattgctccaacatccccgtgattatccctaatagaagacaattgatcatttgtatcctaaaattgcataggacctatga

SEQ ID NO: 1326 - DNA, 550 bp, Glycine max
agcttgtcagcataagcattgccttcatggtagatatgtaaaattctaaaactaaactttttagttggatctatacaattcacctagcagttgtaaaaagtccagggggctgaaaaaggatgattatataatgcacaatattgaaaatattgttgtatgattgtgctaatcctaattgtattgagaatattgctacatgattgtgctgatcttaattgattctatttgtattaattctgattgtatgtattaattcttattggattttaattttattttgtatcttgatctcttgattattgggatcacttatttttaggatagatagttgtatcagatatgtcaggaaaagctataagagaaatcttagttaggtggttggatgaccttgtatatatatctatcaattgtttttaatagaggcagaacaacaaggaggaggtgaagcaaaagctaaggagaatgaaactcgagatgtcattgaagatcaaggaggaggtgaaaaagcagttcgacgtcgatttcttggcggtggcttgataccccgaat

SEQ ID NO: 1327 - DNA, 527 bp, Glycine max
agcttggataatcctcaccttacaattcagttttctggggttgaattaggtcctaagcctaaattctaacagtaagttaacaaggcttgccagacttccaacaaaatttgtccatcctctacaactttcaagaacacattttctctcaaaatatcaagctgacacatgccacattgttattcaaagtagatttttcattcacaggaatttcaggcacattattgcataaaaagttatagacaccttgatcagttaataaagacattagaagctgctttactgccaaaattaaacgaaagattttcttttttattggtttgaattacagatagtttaacagcttgtggataatatcaaccacaggtttctttttcctgtcatcatggcatagcaaaggccaagtatgagaactgaaatatggaaaacatgttggtaatcaataccttaatacattgatgtattccgaagcaattccttcccacattatttgttggaaaaagaggatcatctatgtgaattggatcaat

SEQ ID NO: 1328 - DNA, 523 bp, Glycine max
agcttgcccagagaaggagtccacagaggaaatgcttaccacctcaaaagactggaaagcggtttctaatgactcctctgcggcctccacataaggcatagaagatgggcagctcaccaagatgtcttcctcgcctgacacgatgaccaaatgcccctccactacgaatttcaacttttggtggagtgtagagggcacaactcccattgagtggatccacggacgccccaacagacagctgtagggggggttaatatccattatttggaaggtgacttgacaggtgtgagggcctatttgtactgggagatcgatctctcccctaacctctcggcgagtgccgtcgaaggcacgaaccaccattgaactcggctttaagtgggaagcattgaatggtaatttctccaaagtgctctttggcatcacgtttaaactggaaccattatcgatgagcactttggctacgatatggtccatacacttgactgataccgtgaaagcctttgtattgccctctccccct

SEQ ID NO: 1329 - DNA, 430 bp, Glycine max
tttgcaagctggaatcatttatcctatctccgatagccaatgggtgagtcccgtccaggtagtcccgaagaagactggcctcacagtgatcagaaatgagaaggaggagttgattcctactcgggtgcagaacagttggagagtctgcattgactataggaggctgaaccatgttaccaaaaaggaccattttcccctgccattcattgaccagatgcttgaacgcctggcaggtaaatcccactactgtttccttgatgatttttctggttatatgcaaattactattgctcctgaggatcaggaaaagaccacattcacctgccccttcggcacttttgcttataagaagatgccttttggcctgtgcaatgcccctggtaccttctagcggtgcatgattaatattttcagtgattttttagaaaat

SEQ ID NO: 1330 - DNA, 237 bp, Glycine max
tgaatcggacatccgtgtgaaaagttataaccatttgaatttctctagagcttccgttgttcaatttcgaacttctcgatatgtgatttgcctgaatcggacatccgtgtgaaaagttataccagttgaatttctcaagagcttccgttgttcaattttgagcgtctcgatatgtgatttgcctgaatccgacatccgtgtgaaaaggtatgccccctgaatttttcacgagctttc

SEQ ID NO: 1331 - DNA, 358 bp, Glycine max
agcttatatatatcgattcgctcaaaattaaacatcagaaactctcaagaaattcaaatagtcataactattcacacggatgtccgattcgggcgcataatatgtcgagaggctcgaaattgaacaacggaagctgttgagaaattcaactggtataactttttacaccgatgtcccattcgggcgcataatatgtcgagaagctcgatattgaacaacgaaagttctttagaaattcaaatggtcataacttttcacacggatgtccgattcaggcttataatatatcgatacgctccaaattaagcatccgaaactctcgcgaaaatcaaatggtcataacttttcacacggatgt

SEQ ID NO: 1332 - DNA, 286 bp, Glycine max
cgaatcagacatccgtgtgaaaagttatgaccatatgaatatctccagagctaccgttgttcaatttccagcgtctcgatatgtgatttgcctgattcggacctccttgtgaagagatctgagcatttacatttgacgagagctttcgttgttgaactttcagcgtctcgatatgagattggcttgaatcggacatccgtttgaaaacttacgaccatttgaatttctccagaactatctggtgagaatttccagcgtctggacatattatgtgcccgaatcggat

SEQ ID NO: 1333 - DNA, 349 bp, Glycine max
agcttataatatatcgatacgctcgaaattaaacatcgggaactctcgagaaattcaatttgtcatcatttttcacacggatgtccgattcgggcgcataatatgtcgagaggctctaaattgaacaacggaagctcttgagaaattcaactggtataacttttcacaccgatgtccgaattaggcaaatcacatatcgagacgctcaaaattgaacaacggaagctcctaaaaaattgaaatggtcataacttttcactctaaagtccaattcatgcgtatcacctatagggacactcggaattgaacaacggaagctctcccgaaattcaaatggtcataacttttc

SEQ ID NO: 1334 - DNA, 345 bp, Glycine max
agcatctcaatatgtgatgtgcctgaatcggacctctgtgagaaaagatatgaccattagaatatgtggacatcttctgaagttcaagtgatagagtgtctcaatatgagatgtgcctaaatccgacctccgagtgaaaatctatgacaatttgaatttctcagaatcttacgctggtcaataaagagcgtccccatatgtgatgtgcctgaatccgactaccctgtgaaaacttatgaccattttgaatttctccaaaagaatttgtccggccatatggagcatccatgatatattagtgcgactgattcccacattcgatggaaaagttatgaacttttaaat

SEQ ID NO: 1335 - DNA, 443 bp, Glycine max
agcttctggtgggacatcttgacttgctttccaatctgacattcaccacagattctgccttcttctattttcagattgggaatgcctctaatagcacctttgtcaatgattttcttcatgcctcttaagtgcagatatccaaatctttgatgccatattctgacttcatcttctttggaggatagacatgtggaggagtaactggtttcttgaggtgtccataggtagcagttgtcctttgatctgctgcccttcattagaacttcacacttctcatttgtcactaagcattctgactttgtgaagtttacattgaatccttcatcacacagctgactgatgctgatcaaagttgcagtcagtcccttcaccaacaggactttgtccagactaagaaagtcatcatggactatacttcccattccagagatcttttctttaaa

SEQ ID NO: 1336 - DNA, 521 bp, Glycine max
  unsure (1)..(521): unsure at all n locations
tcactgaatagcttgtgttattgaagaatattcttcttgaatagaacacgttacccaaaaatcagtacgaggcaaataagatattatgtcttgcacatatggagtaccaaaaaatacatgcatgccctaataattacattttgtatagaaatcagtttgtcgaaacacacaaataccccacaagtgggtatcacagtacaaattgaaggataacacatgtagtgatgatgcaacgaaaaacaacaactatttagcaaaggtgtgctaatatctttcaattattccaaggttgcagtgattgttttctaatggacatgatacaaaaaaacttaacatggcatgcagctggtagaaaaagtgatggattgctccaacatcccgttgattatccctaatagaagacaattgatcatttgtatcctanatttgcataggacctatganacctaaggcttggtcttgcttcagctggaatgaatcatgttggtaacttaagcaccaaccataattcatggcatgtt

SEQ ID NO: 1337 - DNA, 451 bp, Glycine max
tggaacatataaactgaatcctaggcccccttaaggacttaatcaaaatatttgctggctgatcattagaattaatgaactcagtgataatttctttggacagtagcttccccgaataaagtgacagtcaatctctatgtgcttgagcctctcatggaagactgggtttgaagcaatgtgaagagcagcctgattatcgtagtataacttcatttgcaccactctgcagaatttcaactcttcaagaatttgtttacccacataagttcgcatgtaaccatacccatagatctgtattcagcctttgcactagatcgagcaacaacaattcgcttcttgcttttgcaagaaataatatttcctcgaatggagacagacacaatatcctgatgtggatctcctatccatgggatatccaacccagtgtgcatcacagtacccacatatttgt

SEQ ID NO: 1338 - DNA, 483 bp, Glycine max
  unsure (1)..(483): unsure at all n locations
tgcttctatgtccttttcattgctttaattgttgagtaatccttgaaaaattgtcttgttaaaattccattggtttagctttcatttcattttatttggtctttggttattacttgtctctttgtttccttgtttgttggttgccatatagggaattggaaggaggattggtgccatcccttgaagaatttgagttaagaagaaaggggccaaccaccttaagagctattggactaagaagcactccaaattgagtgaatcaccaaagagagaacaaccaccaaaattgaggactgttctgtaattttgtaatttgcaatttacttaccttcattgctttcaagttttgtaacaaaaaggcgtttcattggaagtgtgttgggagcctccaattggttaccaaacttccatttgtgtgtaataattttaggcaatntttccttangatagtgagtgttttgttgggaaccttgaatgtggtca

SEQ ID NO: 1339 - DNA, 521 bp, Glycine max
  unsure (1)..(521): unsure at all n locations
agcttgcccagagaaggagtccacggaggaaatgcttaccacctcaaaagactggaaagcggtttctaatgactcctctacggcttccacataaggcatagaggatgggcagctcaccaagatgtcttcctcgcctgatacgatgaccagatgcccttccactacgaatttcaacttttggtcgagtgttgagggaacaactcctactgagtggatccacgggcgccccaacagacagctgtagggggggttaatatccattatttggaaggtaacttgacaggtgtgagggcctatctgtactgggagatcgatctctcccctaacctcttggcgggtgtcgtcgaaggcacgaaccaccattgaactcggctttaagtgggaagcattgaatggtaatttctccaaagtgctcttatgcatcacgtttaaactggaaccattatcgatgagcacttttgctacgatatggtccatacacttgatngatacgtgcaaagctttattatgccctctcccct

SEQ ID NO: 1340 - DNA, 586 bp, Glycine max
agcttgcataagacccatatatagtttataatttgtcctattgtcttattgaacatgagcaaaaattgcatcccattttgatacaattaatctttctttaatcactttggtttgttgttgtagtctttcattatgaaaaaaatctgaactacatagataacaattagaaaaagtggtgattgtggcaatgatcactttaaaatagtcaataaaaaaaaatcccttaaactcccacatctaattctcttggaccatgaaaaaacatgacagttaaaaataaaacaatttgaatatgtgatccctggactatattaatgatctaatgattaaattaatgttatgattttcttttatgtgtagaaatcaaatataatattaaaaatttataataactcacacactctactcaatcaaactaataagattttttaaaagattaaatattaatgatgataagagaaaattatgtatttctttttatttattctccatgaagataagggatttgataacagacgaaatccccttaatcatacataacatcaacattatatcaaggaaaaaaaaactatatgaatttcaataa

SEQ ID NO: 1341 - DNA, 478 bp, Glycine max
ctaagcttctatgaaggttcgttcctaatttctctacaattgcatcacctctcaatgagctggtgaagaaaaatgtggcatttacctagggtgaaaaacaagagcaagcctttgcttttctcaaagaaaagcttactaaggcacttgttctagctctttctgacttttctaaaacttttgagctagaatgtgaagcctctggagtgggagttggagctgtattgttacaaggtgggcaccctattgcttattttagtgaaaaaattcatagtgccaccctcaactaccccacctatgataaagagctttatgccttaataagagccctccaaacttgggaacattacctttgttccaaggaatacgtcatccatagtgatcatcaatcacttaagtacattagagggccaagcaagttaaacaaaaggcatgcaaaatgggtagagtacctagagcaatttccatatgttatcaaata

SEQ ID NO: 1342 - DNA, 514 bp, Glycine max
ctcagcttgcattcctctcttcccttaaacttcttttatttattgctatttatcttttgctttaaagaagtttattttgaattgtcttttgagtaattcatgttaagggtgcattgttaatccaaaaagaaagagtgatagttcaattggggaatagtctttgcatcttaattcaacccccctttttcttaaggtaactgaggccatttgtcccacatcctattcttgataactcacttctctctaaaaagacaaaatgaggtcacatgaacgtctatatttttacttgaaaacacagtcaatcaaatgcctttttatttttttattttgaaacttattttgaaacttatttgctttgaactttactcgctgttttacgacacccccaccaacgtgcaagacgagtaatctctgattgaacagtcttagaagtcaacactcaagaacgcaagtcgcttgagccaacagaaccatggctttgccccacattccagtgaaagttgaataaccaaca

SEQ ID NO: 1343 - DNA, 372 bp, Glycine max
  unsure (1)..(372): unsure at all n locations
gctttgaaanataataacttgaattttaaaatacccattttctctccccctttggcaacatcaaaaaggccaaagtgcgtgaaacatgaataatttaatcatacacaaagcataatttgtaaaacaaacatataagattctaaaaacatacataaagcataattttaataaaaccaaattgagatgcaaaccacttagtcatatatcacaaaataaccaagtctaagtataaaacataagcatctaagtgccaaataaagacaccaagatcagtcataattaactaagtaccaaatacctaaaacataactaatgttcacagaataaataaataacataatggtgtaaatcattcacaaaacataataaaag

SEQ ID NO: 1344 - DNA, 505 bp, Glycine max
ttgcaatcactaagagactcttttaacaacgatagactaagacttagctttcttattgatctttggtttcttggtcttgatttggacttaaaataaaacttgtgtttcttttgtcttggcatcatcaagaccatcatacacatacattcacaaacatcgctatattgtcgtaacaacccattgtcttttgaaccatggatccctcccactcaagttttggtgttatgcattgtaaatcgcaacgtgtctcatcaatcggatgccctctctcacactaaacgaaaagtctccattagaagtcttgtttcatcgtccatcaaattatagtaaactaaaagcttttggttatctttgttttccttggttcactccatatacaactaacaaacttcagaccaagtccgtaccatgtgtttcttaggttacaatcttactcaaagtgcatatcttttgttatgatctttcagagtctaagttgtcacctcccgcatgttgaatcattgaa

SEQ ID NO: 1345 - DNA, 481 bp, Glycine max
tgcttctacatatgggttctatcgcacagaatggcatgatcactggctgacatattctcaattagctctgttgcttttttggggtcttcagctttatttttccccctgcagaagcatctagcaatttcttggtttgtggtatcagcccatctataaacatattcaattgaattgtcttggaaaacctatgggtgggagttcttctcaataaacctctgaacctctccaatgcttcactcatagattcatcacggaactgatgaaatgaagagattacagctttcccttccgcagtcttggactctgggaagtatttctttagaaacttttcaacaactttttcccaagttttcagactgttacccttaaataagtgaagccacctcatttgctctcctgccaatgagaatgagaatatgctgagtctaatagccttatctggcacaccggcaatcttaacactgttgcatattttaatgaa

SEQ ID NO: 1346 - DNA, 637 bp, Glycine max
gcttgtcttaagttctgagagacaaaaggagtcatgtacttatgaagatctcttaccaagtttatgtagtattttgctaccttttgtcctgtctcatacctatctgctttgtattggatcatccacaggttcccggctctatgagggaaagcagtttctgttgatggattctcagccattcttccaccataagggttgaaatacattactgctttctctaattcaatcatcttcttccaaatccctcccaaccctccttgggtattggtctcttcacatagtcagatttccttttcaagtacttgagagaccaaggttgtctctctagcaaaatctcaactggggttgcaatgtccatgttgtaccaaaacagcacggattgaagccagcttgtttcgatgcattcagattgcttcaaccccaattaaggagacctctcctccatgacagaaaacagagttttggagtcgctgaggaagagagctatgaaggtagcccctcactgtctttatgatcttctgttggagataattctgttcgagacattgttgatcaactaatatggacacttcttcaaatttaagtcttgattcatcacgttgctggagactattaaccccttttgttggtctcaact

SEQ ID NO: 1347 - DNA, 585 bp, Glycine max
  unsure (1)..(585): unsure at all n locations
tgaagtttgcatcttgcttgattctattattgaagaagctaattaagaactctattcaaaatggcttttgttactgtcaactatttgaggttcaaatgaatcaggttccacagatcttttgtcatttgtttcaatagttcatttcatttgtatataacttccgtgtgatttaatcatgatgtgatacatgtgcatttgaataaattcttataagcttgttcaactcatttgaagtttttgtttgtttgaagtccgtgaatcataaaattcatgtttataatactattgtctggctcaatgcagtgcatacagaggactatacattctcaactggatctatcgctactttactgagccccactttgtccattggataagtatgattctctcttattgtgttttatgggtactattttttttgcttctacgcttattataattattaagtaactacactctgcattattcactactatgtcttgtggaaccttttcatcgcatatttttaagttcatacttntaaaattcttcatacctgagatgcatttgtgacgttgttcaaaatgtttttcccttatcatacaa

SEQ ID NO: 1348 - DNA, 464 bp, Glycine max
tctagccaaatggacttaccttgaattaattcctttgatagcccctttgagcctattttcccctttctttgttttgaagctcattacaagccttaagtgaaaaaaccatgatatcaccttacccttaaggaattatggagctttggaattgttttgggaataagctgggaataagtgtgtgtggggggggggggggccatggatccctcccactcaagttttggtgttatgcattgtaaatcgcaacgtgtctcatcaatcggatgccctctctcacactaaacgaaaagtcttcattagaagtcttgtttcatcgtccatcaaattataggtaactaaaagcctttgggtatctttgttttccttgggtcactccatatacaactaacaaacttcagaccaagtccgtaccatgtgtttttaagttacatcttactcaaaggcatatcttttgttatgatctt

SEQ ID NO: 1349 - DNA, 457 bp, Glycine max
  unsure (1)..(457): unsure at all n locations
agcttcacaaggatgtgttatggtacactttttaagaaagagtatattagcaagttatactttgagtatgtagcttttaagataatcggaattataactttctaacttattaaaaaatgaggatactttaataaatctttgattagaatttataataagcaaatattttttaatatacatatatatatatatatatatatatatgaagaattttaattatgatataagattctctaactattgataatttgttttaaagaatattaagatgtaatctacatataaagataaatatagaaggtcgaaagaggtaaactattaagtatattaaatatgtaaataaagataaaaagagaatagtttgaaatagttgatagaaaaaatagttgactagttttagaaataggctgtgaaatgtatgtgtgaaatgcntctccnacgatgagaagagagagag

SEQ ID NO: 1350 - DNA, 407 bp, Glycine max
ttgagccaattcaaacgacaataactttttactcggatgtctgattgagtcccgtaatataacgacacgctcgaaattgaatgttgaagctctgagctaattcaaacgacaataactttttactcggatgtctgattgagtcccgtcatatatcgagacgctcgaaattgaatgttgaagctctgagccaattcaaacgacaataactttttactcggatgtctgattgagtcccgtcatatatcgagacgctcgaaattgaatgttgaagctctgagccaattcaaacgacaataactttttactcggatgtctgattgagtcccgtaatatatcgagacgctcgaaattgaatgttgaagctctgagccaattcaaacgacaataactttttactcggatgtctg

SEQ ID NO: 1351 - DNA, 375 bp, Glycine max
catgcaagcttggttaagaagattcctaaaaaagttagagcttaactacacacacctctctaatagctaagctcaccttcttgagatgagaagctagagcttagctacacacccctataataactaagctcacccctatgccagaaaaaacatgaaaatacaaaaaaagtccttactacaaagactactcaaaaggccccgaaatacaaggctaaaaccttatactactataatggccaaaatacaaggcctaaacgaagaaaaaacctattctaatatttacaaagataagcgggctcatacttagcccatgggctcgaaatctaccctaaggctcatgataaccctaaggcctttccttggattatctggccc

SEQ ID NO: 1352 - DNA, 383 bp, Glycine max
agcttgcttaagaagattcctaaagaagctagagcttagctacacatacctctctaatagctaagctcacctccttgagatgagaagctagagcttagctacacaccccctataatagctaagctcacccccatgacgaaaaacatgaaaataacaaagaaaagtccttattacaaagacaactcaaaattccccgaaatacaaggctaaaaccctatactactagaatggccaaaatacatggcctagacgaaggaaaaacctattctaatatttacaaagataagcgggctcatacttagcccatgggctcgaaatctaccctaaggctcatgagaaccctagggcctttccttggatctctagccaatctaattggagtc

SEQ ID NO: 1353 - DNA, 510 bp, Glycine max
tgtgcggtgaactaacctcctttaacatggaattgtggtgcaattgtgatttgatacaaattgatttaactaagaagggcaggaaaaataagggaaagatcatatttgatgtggacatccccacagatagtgttttcagattatagcttacacagaatgttagcataaatatagttcaaatggctgaaatattttacttcttagaattcattcattatattattactaatttaaggatcctggtgacaaatatgattgttttaaatgacatcaaaagtggatgaatttgaggtgtaaatctatattgtatgtttgacttgaaattggtgagaacgacaagaggggtcatgtgataaattattggcttttcaactattgatagattagttttgcgaattcctgcataagtagattattatattgacgtggtgatttgtttagcagacatttgtcatggaacctgcatttcttccttcacttattattgatatatttaaaagagtttggaaa

SEQ ID NO: 1354 - DNA, 582 bp, Glycine max
  unsure (1)..(582): unsure at all n locations
cttggatcttcttcatcaatggagtcctatgcttcttgaattttaatcacaggggaatggaaaagaagaagagttgagaggagacaccacttcaaggagaagatgagtcaagaagaagctcaccaccatagaaagccatggataagagcttgaaggtagaagaagatgaatggagggagagggagagaaggagcacgaaattttatgcctcaaaagaggtctgaactttgaagtttaattctcaaatgatcaaagttgaaaaaattcacacacatggcctctatttatagcctaagtgtcacacaaaattggagggaaatttgaatttctattcaaatttcacttgaatttgaaattgaatttgtgaagccaaattttggagccaaaatttcactaattatgattagtgaattttagctatggttcagcccactaatccaagatcaagtccaagattctccactaagtgtgcttaggtgtcatgaggcatgntaagcatgaaagacatgcacaaagtgtgactatatgatgtggcaatggggtgtagcaagcaaatgctcacctcccctctcaaatttaatt

SEQ ID NO: 1355 - DNA, 426 bp, Glycine max
  unsure (1)..(426): unsure at all n locations
tgcaaaccaaatgctcaccactattagaggagaaatctttaagttgtttcatataaacctcctcctctaaatcaccattaagaaaagttgttttcacatccatctgttgcaactcaaggtcaaaatgagaaactaatgccaagataatacgaagagaatctttcttagatactggagaaaatgtctttgtgtaatctattccttccttttgagtaaatccctcaacaacaagtcttgccttgtatctctcaatgttgcctaatgaatcccttttggtcttaaatacccatttacatctaatggcctttgccccattangcatctttacaaggttccaaactttgttactctgcatggaattcatctcatccttcatggcatcataccataaatttgactctttacaactcgtggcttgatccaaag

SEQ ID NO: 1356 - DNA, 470 bp, Glycine max
agcttgggacattcttgcaaatacctatgctagttctgataagttgaaaagagtcaagatgcatactttgaagcagcaattcgagctattacagacgaatgagaaggaaggtatagccgaatacctaaatcgtgtgcaaaatctgtcgaatcaagtgatggcttgtggtgaaaccttgaacgatcaagatcttgtagaaaaggttttaagaaccttaagttcaagatttgattatgtggttgctgcaatagaagaatctaaggattttgcataaatgaaattggatgagcttcaatgctctcttgaagcacacaagctaagaataaaagagagggaaacagataggtcatctgaacaggctttacttgctcagagtggaaaaatattccacaatggctcacgcagtagtaaagggaaggctaaacccaaataccctaaattgaaaaaacaagagatgatggtactgttga

SEQ ID NO: 1357 - DNA, 418 bp, Glycine max
agcttttgatactaacaagtgtatgtataccttaatttctcttaacaacaaccatattgcttattgtaggcatggacttaaacaatatcgtaatggttgggcggatggaccaacttatattacacagtgcccaatacagacaggaggcagttatacttatgatttcaatgttactgagcagagaagaacactatggtggcatgcacacattctttggctgaaggccactgtgtatggtgcaataataattatgcctaaagctggaacaccatttcctttcccacagccagctagagaatttgaaattctcctacgtcagattgaatttcaagcgtataatcttaatattggaaggataaaagggtaagaaatatgctataagtaattttttgtgcatgcaatacgtgaatggtggaac

SEQ ID NO: 1358 - DNA, 490 bp, Glycine max
  unsure (1)..(490): unsure at all n locations
agcttatttatttgattaatgaatcatattgattattaattaatgctttatttgtttttttaataagcaaaagtgatgatatatattatacacaaagggtaagcaacctatttacaagtattgaaaactgaaaatactatctccataccttggttacaaaatattaacataacaacaatataaatattaagtaaccaaggaatccaaaaagagaaagttcacctccctgcaagtcactgtaatactactagtgacaatcctacccaatcaccaaaaaaacataaataatgccttaccctcccacatgttgttcccaaaatattaatgctttatttgttgttgatgtatgcaatgcaaggcaattgtgaatcccaatgaatgaatgatttcatgaatgagagcaagctgaatgatcctctgaacagctctgattatgtcccaacctatgaggacaangatggtgactggatgcttgccgcgaatgcccatg

SEQ ID NO: 1359 - DNA, 417 bp, Glycine max
taagctcggcccacaaggtgttccaacatttgatccatgaaatgaaaacgaaaatgatctttacttgtggcttgatttaacttacaataatcaatgcacattctccacctcatcaaaattcttgtggggatcaactcattcttcacattcttgatgactgtcataccccctttctttagtaccacttgtaagggactaacctatgcactattagagataaggtatatcatataggcttcaagaagatctagcatctttttcctcaccacgtccttcataacatgactaagtctcttttcaagatgagctattggtttgaagatttccttatgcataatcttatgcataaaaaatgatggacaaataccttttatattagaaatagtcaagccaatggattccttattctctttcaag

SEQ ID NO: 1360 - DNA, 363 bp, Glycine max
  unsure (1)..(363): unsure at all n locations
ctaagcttaagaattatggcctcatcaaactacttgtttcccgagggaaattctataaatagacctcccatctttaatggagtgggttaccactactggaaaacccgcatgcaaatctttatagaggcaatagatttaaatatctgggaagccatagaacaaggaccttatgttccctctatagtggccggaagtgcaacaatagaaaaacctagagcagattggactgatgaagaaagaagattatttcaatataatttaaaggccaaaaatattattacatctgccctaggaatagatgaatactttaaggtttcaaatngtaaagtgctaggatatgtgggatcactacagtaacacatg

SEQ ID NO: 1361 - DNA, 408 bp, Glycine max
  unsure (1)..(408): unsure at all n locations
agcttaagctccttcaactgcacaaggctcttaatatttgaagagtatccttgtggaaccttcacccgacgaagacactgacaaaaacttatattatccttctttgacaaagtatggcaggatagggacaagtaaattttcttcccatcagaccttggatgcaactgtgatcgtatacccatatcagctagatcttgacgggtattcaagccatccttcgtcttgccttgaatgttaaggagcgtcccaatcacactgtcacaaacatttttctccacatgcataacatcaatacaatgtctaacgtcaagatcacaccagtacggaagatcaaagaanatggacctcttcttccatatgcaactctgactnttatccttcttgtgggtcttcccaaatacagtattc

SEQ ID NO: 1362 - DNA, 402 bp, Glycine max
  unsure (1)..(402): unsure at all n locations
tccatcagtgcataacgtgacttcaaaagtatttgctnttccctttntatattnttatanttttttgggttcgacaagggttgatgcaatcctaccccgcaagggcattggatagaagactccaagacaattgagccagagatgcaagagaaggccctagagttctcatgagccttanggtagatttcgggctcatgggctaagtatgagcccacttatcttagtacatattagattaaggtttcattatttttgggccttgtatttagggctcaataatgtaggtaaggtaccctagaaatgtatgatttttcagcccttgtattttagggcacctagactagttnttgtattangggtagttttgtaatttcacatgcattaagtgaatatttgatgtgt

SEQ ID NO: 1363 - DNA, 364 bp, Glycine max
agctagtgcgctcttggcactgtcatttagttgagaaattctgaaggagacctattccggagatggatttattgatgatgacatacctgttagtaacagcatacttatagctagctgtatagaacaaaagggatgataaaggcttaaactatacataagaatgtataattatattttatatataacttactgaaataatttattttatatgcagatagaacgtaattacggtacaacttataatattattaaagagataaaatatatagtccaaaaggttctgatatacttagacatcttaataatatcaataccttaatgagatccttcatttctctctattatctgttcttaacacatcata

SEQ ID NO: 1364 - DNA, 422 bp, Glycine max
  unsure (1)..(422): unsure at all n locations
cacttctgtagggtttcagggctttccatcagctctgtttaatctgccatatactcagccggtattaggcctcatgagctttctcatattcagcagcttattggatttagcttgngtgacttccctttcagatacttgggtgttccccttttatcatctagattaaatgtatgtcattatgctcccttactttccaagattactggcctgattcagggatggagcaaaaagtatttatcttatgcaggtaagttagagttgatcagagcgcgtattcaacgaattgtgacattttggatggggatttttcctttgccgcaatctgttctggaccggatcaacgctntgtgccgtaattntctgtggngcaaagcggatattggaaaaacaagcccttggttgcttggtcagtagtttgttct

SEQ ID NO: 1365 - DNA, 378 bp, Glycine max
accctgatgaggatgtcccatatgttcttataactggactgattcatttgcttccaaagtttcatggccttgtaggtgaagacccgcacaaacatttgaaagaatttcacattgtctgctccaccatgaaacccccagatgtccaagaggatcacatatttctgaaggcttttcctcactcattatagggagtggcaaacgactggctgtattaccttgctccaaggtccatcacgagctgggatgaccttaagagagtattcttagaaaaatttttccctgcttccaggaccacagccatcaggaaagatatctcaggtattagacaactcagtggagagagcctgtatgagtactgggagagatttaagacactat

SEQ ID NO: 1366 - DNA, 427 bp, Glycine max
  unsure (1)..(427): unsure at all n locations
atgtgttaactctcaagctntntatgattatatctgtgtgaaatataaaaaattcataaaattactaatatttaaggtagtatatgcttatcatttaaggtaaaatatgttnttaatttttatacttttgatcaaatttaattttagtcctttgtaatatgttaaaaatttaaagggatgtcgcgaaaaggatatataaacgaaataatataaattttaacatttatagtcatattaaaattcacatttaatgtcatctaataaatattattaattttcaatactatttagcaagccttcttctcaccacatttaatttaatgtcatctaataaatattattaattttcaatactatttagcaagccttcttctcaccacatttaatgtcgatcaattaacnaattaaaataataaacaattaataa

SEQ ID NO: 1367 - DNA, 330 bp, Glycine max
  unsure (1)..(330): unsure at all n locations
cttctcgatctattatgcgcctgaatcggacctncgagntattagttatgactattaagatatctcaagagcttccggtggttaattgcgtgcgtctcgatatattatgtgcctgaatcggacctctgagctaaaagntatgaccatttgaatttctcgagagcttcctgtgttcaatttcatgcgtctcgatatattatntgcctgaatcggacctccgagttaagagttatgaccatttgaatttcttgagagcttccgatgttcaatttcgagcgtctcgatatattatgtgcctgaatcggacctgcgagtgactatttatgacca

SEQ ID NO: 1368 - DNA, 403 bp, Glycine max
  unsure (1)..(403): unsure at all n locations
agctttcaagaaattcanatggtcctaacttttaactcggaggtccgattgaggcggataatatatcgacacgctccaaattgaacaatggaagctcttgagcaattcaaatggtcataaatagtcactcggaggtccgattcaggcgcataatttatcgagacgctcgaaattgaacaacggatgctctcaagaaattcaaatggtcataacttttaagtcggaggtccgattcaggcacataatatatcgagacgcacganattgaacaacggaagctctcgataaattcaaatggtcataacttttaactcggaagtccgattcaggcgcataatatatcgagacgctcaaattgacatcggaagctctcagaaattaaatggcataacttgtactcgga

SEQ ID NO: 1369 - DNA, 360 bp, Glycine max
  unsure (1)..(360): unsure at all n locations
tgccacaatntccatgaaatgtaaggccatcgtatgagttgtataatgggaagggagcattcccaagtgaattcctttagaanagcaatcaacgatgactaanatagtagtatgtctgcagtacactagtaaaccaacgatgaagtccaaagaaaggtcctccacagccgggacggcactggcagggggcagagcaacctggcgggctttcgggcttcatatttagtgtgctggcaattgatacaagctgcaacaaacgtttgcacatcctttcttaaccctatccaagtgaaatttttgcacacccgtgcaagggtcttcataatacccatgtggccacttgtgggcattgaatgaaac

SEQ ID NO: 1370 - DNA, 274 bp, Glycine max
caaagaaatgaaaagccctcaattgtggtggctattatctctatagtgattcactcaatttggagtgcttcttagtccaatagcgtcttaatgtggttggcctcttgcttcttgactcgacttcttcaagggatggcaccaatccttctttctaattgcttatatggcaactcacaaaccaggaagcatagagacaagtaataacccaagacccaaaagatgaaatgaaagctaaaccaatagatctttaacaagagatattatcaaggattat

SEQ ID NO: 1371 - DNA, 382 bp, Glycine max
  unsure (1)..(382): unsure at all n locations
actaagctggtacaaaccttcactacatcaaccgtaataatcatcctctgactgctatcctgaatcaaacatgaattaggaaagaaggttaacttgcaattcaatacagaaaccaattttgatatagagattaaattgaaattaaaagatggcaagtatagcacatcttctaagtgtaaaaactcagtaaatttgactgttccaaagtgtgtgactatgacttgntgaccagtaggcaggcgaactactatgggatttatttctctatatgtagaataacaagtcaatgaggatgcaacatgaattgtagcaccaaagtccaaaatccatgctgcagcttcanacttgtgaatattacaaacaaaggatagtatattaccta

SEQ ID NO: 1372 - DNA, 419 bp, Glycine max
  unsure (1)..(419): unsure at all n locations
agcttgtgcatgagagcgagaatgctagtggttttgatagttcttggaggaccctaaaatgggagggttagaaattaagattaaaaattgagaaagtggaaatagttaatttaaggggtgaaatgagagaactacagataaaatgagattgtgcatgttgttgttgcgagcgatgacttggagcctggagacggcgtcctcattgacgacagcgtcggcgaccttgatgggatgatacttttctacccatggaacgttgtaggcattgcttgatgatgacaatgacatgcttctgccaacggtgaacaaagggtttcaagtttcagaccagagcggagaataaacgttctaaagcccaaaccctattttgcctaaaccacttcaaaggttcatcacttcttatttcanacggcatgttc

SEQ ID NO: 1373 - DNA, 451 bp, Glycine max
  unsure (1)..(451): unsure at all n locations
cattacatagtttatttgatcttctacacataatatacattgatgtctagcttactatcgccatatagtttggcgaattatatcaaattcaagttagacaacattattttcaatatttgactcattgtattaagttgaatatgacaattctattattatttgtatctaaagataattattataaaattcaatacatttacattacattccctacaagaattataatacataatattctataatattttataatttgatgaccataataatgataaaatgcattacgctagttaactccactgaaaccttntcaatgaaacttatgtctctaacatataatatcatattaaatatgaataattttagtctcatgtacgtatgatataatatggacttaactcataaaatnttgacttttacattanctcacgcttataaaaatttcttgccc

SEQ ID NO: 1374 - DNA, 416 bp, Glycine max
  unsure (1)..(416): unsure at all n locations
ngaaggcatgtaacccaccatcttctcatattagaacactgttaacgtgtccactatcanttttatcatctcgctttccatcattgngggcactacttaagctgccagatccctccacctctgggcgtattctttgaatgattcattatctctcttgcacatgttctgtagctgcattctatctgcggccatattggaattgtaccgatactacctaatgaaggcaaccattaggtccttccaggaatggatccaagaaggttctagattagtataccaggtgacggctgccccagtaagaatttcttggaataaatgcatcaacacattttaatctttcgtgtatgcccccattntcctacagtacatcttcaggtgattcttggggcaagtagtccccttgtacttatcgaaat

SEQ ID NO: 1375 - DNA, 476 bp, Glycine max
  unsure (1)..(476): unsure at all n locations
actcagcttaacattcanattcgagcgtgtcgttatattataggactcagtcagacatccgagtaaaaagttattgacgtttgaatctgctcagagcttcaacactcaatttcgagcgtgtcgctatattacgggactatatcagacatccgagtaaaaagttattgtcgtttggaattgctcagagcttcaacattcaatttcgagcgtctccatatattacgggactcaatcagacatccgagtaaaaagttattgtcgtttgaatttgctcacagcttcaacattcaaattcgagcgtctcgttatattatatgactcagtcagacatccgagacaaaagtattgacgttgaatttgctagagcttaacattcatntcgagcgtgcgctatatacgggacatatatacatccgagtataagttattgtctttgaattgctacagctcaacattaattcagcgtgcgatatata

SEQ ID NO: 1376 - DNA, 431 bp, Glycine max
  unsure (1)..(431): unsure at all n locations
taagaattggaggtcctaatgattccttgaggaggtccaaacattaagcctttgaattgccccaagtattacgtgtaatatcgcttgacgatgtcaaaattcacagacgaaggtagctcttcatcatccatgttcataagaaacaacgctcctcctgagaaagtcttcttcaccataaacgatccttcatagtttggggcccatttacctcggtgatccttttggacatgcgacactntcttcagaacaagatccccctcgctgaacttacacgggcgcactcttcaatcaaaaacgttnttcactctgcactaatatagtctcccatggcttatagtagccaatctcataccctcgataagaattaattggtcaaagcatgcctgggcccactctgcttcttccaatcctaactctgctaagaatcttaa

SEQ ID NO: 1377 - DNA, 265 bp, Glycine max
agcttgagtataggatcttgcccgctgaatacctaggcgcgatgatgaacataggtggagcctgtgagaacgggctataaccttaccgatatcacccacatacaagccgcagacactcctcggctagcactgtgtgcctaaagagagatctatctcacattacttgcgatacactaactgctcgcgggccagaaccctaaacctgtccagttctccgcctatatgtataaaacaacgcgagacgcttgccacccacctcgcccag

SEQ ID NO: 1378 - DNA, 418 bp, Glycine max
  unsure (1)..(418): unsure at all n locations
agcttgtttaccccatgttgagtttgcttacatatagagttgttcatagcgccactaattgttctccttttgaagttgtttaaggttttaacccactaactcctcttggtcttttgcatatgcataatgtttctatttttaagcataaagaaggtcaagcaaaggcgaactatgtgaagaagcttcatgagagagtcaaaaatcaaattgagaggagaaataaaagcttaaacaagccaacaaagggagaaagaaggttgtcttcgaacccgaagattgggtttgggtgcacatgagaaaaggaaggtttccggaacaaaggagatcaaagcttcaaccaaggggagatggaccatttcaagtgcttgaaagaatcaatgacaatgcttacanaagtgagttgcccggtgagtataat

SEQ ID NO: 1379 - DNA, 424 bp, Glycine max
agcttcacaaaagtttatatgacttgaaacatgcaccgatgcagtggtacaagaagtttaatgagtttatgagcaactcaggattcaaaagatgtgacatggaccattgatgctatgttaagaaatatactaatagttatgttattcttgtcatgtatattgatgacatgttgattgcaggatctagtatgacagacattaacaagttgaagcagcagttggcagaaaactttgaaatgaatgatcttggtccagctaaacaaatccttggtatgagaattcttagaaacagatcagaaggaatcttgaagctgtcttatgagaaatatatacacaaattgcttgacagggtttaccttggagattctaagaccaggaatactcctttaggatctcatttgatagtttcaaagaagcaatcttt

SEQ ID NO: 1380 - DNA, 415 bp, Glycine max
  unsure (1)..(415): unsure at all n locations
agcttgtgttttcaggagacgtcttagtaactgcaaaatgagatttcaggccaatccaacactggtaataatcttggtccaagaacggtgattctgaggcccattgactgatacggngtatcaaactcgattcaaacataaaagccattgtgtcagtgatcttgcaaggtcctacatcatttcctcgtgcaatggtagcctgtaaaccaagtaccaacacatacattactagaagattgaatccatcaattcatattttttgcatctttagtagttagtacttaaaccaaatcaacaaatggcacataactaggttttgcacttggagtaaacctcattatagtttccgatattgtaagaatttgttactaacactgctaaaaaatgattcattcctatcattntcatatttatt

SEQ ID NO: 1381 - DNA, 356 bp, Glycine max
agcttataatatatcgaggcgctcgaaattgaacaacggaaggtcttgagaaattcaaatggtcataacttttaactcggatgtccaattcatgcgcatcacatatagagacgctaaaaaatgaacaacggaagctctccacaagttaaaatggtcataagatgtcacaaagatgtccgattcacgcttgtattatatcgagacgctcacaattaaacatcgaaagctctcgagaaattcaaatggtcataacttttcactacgatgtccgattcatgcgcatcacaaatacagacgcttcgagttgaacaacggaagctctggagaaattccaatggtcataactttttacactg

SEQ ID NO: 1382 - DNA, 342 bp, Glycine max
  unsure (1)..(342): unsure at all n locations
ttggagaggttaatgaaacaacgagatgatgcgctccatgagaggttggatcanatggagaatagagaccatatgaattgctcaagagcttccattgttcaatttcgagcgtctagatatataatgcgcctcaatcggacctccgagttaaaagttatgaccatttgaaatgctcaagagcttccattgttcaatttcgagcgtcacgatatattatgcacctgaatcggacctgcgagtgacaacttatgaccatttgaattgctcaagagcttgcattgttcaattttgagcgtcacgatatattatgcacctgaatcggacctgcgagtgacaacttat

SEQ ID NO: 1383 - DNA, 223 bp, Glycine max
gagctctcactcggaggcccgattcaggcgcataatatatctagacgctcgaaattgaacaacggaagctatcgacaaatgcacatggtcaatactgccaactgcgaggacctattaaggcgcattatatatctacacgctcaatattgaacaaaggaagctctttgaatattcaaatggttctaacgttggactcaaatgtccgagctatgcgcataatata

SEQ ID NO: 1384 - DNA, 409 bp, Glycine max
agcttgcctcctaccaaagttcaagcccatgtgcaaaatgtaaggctttgggaacatgcaagcccaatgcccgcaaaccatgattgtcgaatgctttcacggctcgggcctttttgggccttttcgagcattttaaggatcctatcttgcgaagaaaatgctgtgattgttctgaggttggaaacagcttcaacagctatcttgctactatcatcttgggccttgatggccttactagacatgctcttgagaaggacacgccttgtgtagaaacatgctatgataatgggttgaactgctatcataacaatggccaacctccatgcaatgattaagcccattgtaaaagctattaccactgctgaaatggattgtaccactagagccattctatctcccactaaagacc

SEQ ID NO: 1385 - DNA, 289 bp, Glycine max
  unsure (1)..(289): unsure at all n locations
tctcgaatattatgcacctcgaatggacttccgtgtgactagttatgaccattntaattnttcgagagcattcggtgttcaatttcgagcgtctcgatatattatccatctgaatcggacttccgtgtgataagttatgaccatttgaatttctcgagagcttccgttgttcaatttcaagcttctcgatatattatgcacctgaatcagacttccgtgtgaaaagttatgaccatttgaatttctcgacagattccgctgttcaatttcgagcgtctcggtatattat

SEQ ID NO: 1386 - DNA, 396 bp, Glycine max
agcttgccgccacggagttatccgactatgctcttgtgtggtggaacaagctacaaaaggagagagcaagaaatgaagagccaatggttgatacatggacggagatgaaaaagatcatgaggaagcggtatgtgccggctagttactcaagggacttgaaattcaagctccaaaaactaacccaaggcaacaagggggttgaggagtatttcaaggaaatggatgtgctcatgattcaagcaaatattgaagaagatgaggaggtaactatggctcgatttcttaatggtttgactaatgatatccgtgatattgttgagttgcaggagtttgttgaaatggatgatttgctctacaaagcaatccaagtggagcaacaattaaaaaggaacggag

SEQ ID NO: 1387 - DNA, 310 bp, Glycine max
  unsure (1)..(310): unsure at all n locations
tactcaattgaatcaacaacagtcccagaattctgacaagctgccttctcaagctgtccaaaaccccaaaaatgtcagtgccatttcattgaggtcgggaaagcagtgtcaaggacctcaacccgtagcaccttcctcatctgcaaatgaacctgccaaacttcactctattccagaaaaaggtgatgacaaanatctacctaacaatttctgtgcaggtgaatcttcttccacaggtaattctgatttgcagaagcagcacattccccctcttccattccctccaagagcagtttccaacnaaaaaatg

SEQ ID NO: 1388 - DNA, 387 bp, Glycine max
  unsure (1)..(387): unsure at all n locations
agcttncttaagaagattcctaaagaagctagagcttagctacgcatacctctctaatagctaagctcacctcctttagatgagaagctagagcttagctacccacccnctataatagctaagctcacccccatgacaaataacatgagaatacaaaaaaaaagtgcttactacagagactactcagaatgccccgaaatacaaggctaaaaccctatactactagaatggccaaaatacaaggctcagacgaaggagaaacctattctaatatttacaaagataagtgggctaatacttagcccatgggctcgaaatctaccctaaggctcatgagaaccctagggcgttcccttggatctctagcccaatctacttggagtcttc

SEQ ID NO: 1389 - DNA, 408 bp, Glycine max
  unsure (1)..(408): unsure at all n locations
agctntgagcaaattcaaacgacaataacctttntactcggaagtcggattgagtcccgttatatatccagacgctcgaaattgaatgttgaagctctgagcaaattcaaacgacaataacctttttactcagatgtcggatagagccccgtaatatattgagacgctcgaaatggaataccgaagctctgagcaaattcaaacgacaataactttttactcggatgttcgattgagtcccgtaatatatcgaaacgctcgaaattgaatgttgaagctctgagcaaattcaaacgacaataaatttttactcggatgtccgatggagtctcgcaatatatcgagacgctcgaaatggataaccaaagctctgagcaaattcaaacgacaataactttttactcggat

SEQ ID NO: 1390 - DNA, 356 bp, Glycine max
actgtgataataaatcagccatagagatttctaatcttcctgttcaatgtgattgtacaaaacatgaggaaattgacaggcatttcatctaagtgaatattgaagatggtattattgtctttcctttggttaaattataacaacaacttgttgatatgttaaccaaggtatttgcattccaaggtccgcttatatactttattcttagattacgttgggaaatataatgacaattgattgcactcaactttgaaagcggggatgttagcaatccatttaattgttagggatcagctatgactttgaatttaaattataaatgattcacatcccctgatatttattcctttttattt

SEQ ID NO: 1391 - DNA, 438 bp, Glycine max
  unsure (1)..(438): unsure at all n locations
agctntgtgagtgattcttataaatcgatctctagctacaatgaacgattgggctcctcctctcatagctgcggctntgttttggctcttgagcccgggaatgatctttcagttgccggggaagaatgcaccctttcagtttatgaacatgaagaccactgttgcatccatgtttgcgcacactgttatttatggtctgtttctgatgttgttcttcgttggtcttagtatccatctttatatttaagcagcagcaaagggtatttaaagaaaacttatgtgttgctttatcttttaaagtagatcatgtaacaaccttctcttgttgatcaatatgtatgtgctcttttcgaatttccacttgatcaggcttctactaatactttcacgagtgatatgctcgtcgttcattatttaaaagtgacgtgaattactatg

SEQ ID NO: 1392 - DNA, 437 bp, Glycine max
tgaagacaagactatacgaggtatctttcttgggtatagcaatatctctaagggctaccgtgtctacaacttgcaaactaaaaaactcgtcatcagtcgagatgttgaagttgatgagtacgcttcttagaattgggatgaagaaaaaatggagaagaacattcttatacctcgtcaacctactctctaagcaagaaagcctgatggaagtaagacctcagtgtgaaccactcttcactctccaccacaacaacaagatcaagaactatcatcaccagagtatactccaagaggagtaagatctttggtggacatatatgaaacctgtaacttggccatacttaaacttggaagctttgaagaagcgtcaaagcaggaagtatgggtcaaggcaatggaagaagagatacagataatcgagaaaaacaacacatggg

SEQ ID NO: 1393 - DNA, 402 bp, Glycine max
tgaatcggacatccgtgtgaaaagttatgagcatttgaattacttaatatcttccattgttcaatttcgagcatctcgatatattataagcctgaatcggacattcgtgtgaaaagttatgaccatttgaatttctcaagagcttccgttgtttaatttcgagcctctcgacatattatgcgcgttgaatccgtgctatcctgtgtgaacaagttatgaccattttgaatatttcgacagcttctgatgtgtaattctgagcgtattaatatattataagcctgaatcggacctctgtgtgaaaagttatgaccattttaatttccctagaactttcggtttttatattctagcgtgtctatatgtgatgcttcttaatataacatccttgtgaaaagtttt

SEQ ID NO: 1394 - DNA, 380 bp, Glycine max
  unsure (1)..(380): unsure at all n locations
agcttatataaatcgatacgctcgaaattttacatcgaaaactctcgacaaattcaaatggccatatcttttcacacggatgtctgattcgggcgcataatatgtcgagaggctcgaaattgaacaatcgaagctcttgagaaattccaatggtcataagttctcacacggatgtccgattcaggcttataatatatcgatacgcgcaaaattaaacatcggaaactctcgagaaattcaaatggccataacttttcacacggatgtccgattcgggcgcataatatgtcgagaggctcgtaattgaacaacggaagctcttgagaaattcanatggtcataacttttcacacggatgttcgattaaggcgcatcacata

SEQ ID NO: 1395 - DNA, 448 bp, Glycine max
agcttggatttcctttgctccggaaacctcttctttctcatttgaacccaaacccaatctccgggttggaaaacaacctttttgcgccccttgtttgcttgtctagcatagctctcatttctcttttcaatttgggccttgactctttcatggagctttttcccatagtccactttggcttgtccttccttatgcttaaaaactgaaatattaggcattggcaacaaatcaagaagagttagtggattgaaaccataaacaacctcaaaaggagaacaactagcggtgtcatgcacaaccctattataagaaaattcaatatgaggtaagcaaacttcccaatttttaagattttttttaaatggtccttagcaaggtacccaaagtcctattcacaacctctgtttgtccatcccattgagggtgacaagcagtagaaaatagtaac

SEQ ID NO: 1396 - DNA, 369 bp, Glycine max
cctgctgcatgcaagctttgagcaaatacaattacttaactttttactcggatgtctgagtgagtgctggaatatatccaaaagctcgacattgaatgtctaagctctgagcaaattcaaacgacaataactttttactcggatgtctgattgagtcccgtaatacatcgagacgctcgaaatggaataccgaagccctgagcaaattcaaacgacaataactttttactcggatgtctgattgaggccggtaatatatcgaaaagctcgaaattgaatgtagaagctctgagcaaattcacacgaccataactatttactcggatgtctgactgagtcccgaatatatcggaacgctcgaattgaatg

SEQ ID NO: 1397 - DNA, 451 bp, Glycine max
  unsure (1)..(451): unsure at all n locations
agcttcaagaaaaagatggcctcatcatatttcttatttccagaagggaattctatcaatagacctccaatctttaatggagagggttaccactactggaaaacccgaatgcaaatttttatcgaggcaattgatctaaatatctgggaagccattgaaatagggccttatatacccaccacagtagaaagagtttcaatagatggtagttcatcaagtgaaagcataaccatagaaaaacctagagatagatggtctgaagaggatagaaaacgagtacaatacaacctaaaagccaaaaacataataacatctgccctacgaatggatgaatatttcagagtttcaaattgcaagagtgctaacgaaatgtgggacactcttctattaacacatgaaggaactacagatgttaaaagatctangataaatgcactaactcatgagtatg

SEQ ID NO: 1398 - DNA, 379 bp, Glycine max
agcttcaagaaagtcctctccaagagtgactaatgaggctgttcataaggctgtgagtgcttattttctgtagttttctgttcaactgcttaattcagttgagcaagatttgttaggaaatttattgtcttgttcactgttattgatgacatcttttattctcttctcaggctgctgcattgaagggttctgatcatcgtcgcgccacaaatgtcagtgctagattggatgctcaacaaaagaagttcaaccttccaatcctcccaaccaccacaattggatccttccctcagactgttgaactgaggagggtgcgtcgcgcatacaaggctcacaagtaagatatgccttgagttgataggttggcttgtctcttgac

SEQ ID NO: 1399 - DNA, 401 bp, Glycine max
  unsure (1)..(401): unsure at all n locations
tgaaagtgcataancttctaaacaagggatgtctcttattcaatgtcgaatttaaccagctgggctgtaataatatattttcttgatatgataattaattctacgtgcatatcagcgtgtatgccaaattttattaattttttttacttaaaatcccatttacactaataaccgcaataacacatactaattatgtaatgagtacttcaattagcctttttgctttcttaatcaattcaaactattatcctttatccctatttctaaaagaaattctgatagtttttaaagaaaaacttaatttaaaataatcttttgttttataaacttgaaatacaatgcatattttaaaaaatatttatgtgtattatgaactttaattttaatatatgttatatatt

SEQ ID NO: 1400 - DNA, 378 bp, Glycine max
  unsure (1)..(378): unsure at all n locations
agctnttaactcggaggtccgattcaagcgtattatatatcgagacgctcgaaattaaccaacggaagctctcgagaaattcaaatggtcataacttttaactcggaggtccgattcaggcgcataatatatcgagacgctcgaaattgaacaacggaagctctcgagaaattcaaatgatcataacttttcacacggaggtccgattcatgcgcataatatatcgagaccctcgaaatttaacaacggaagctctcgagaaataccaagggtcataacttttcactgggatgtccgattcaggcgcataatacattgagacgctccaaattgaacaacggaagctctccaaaaattcaaatggtcataacttttcac

SEQ ID NO: 1401 - DNA, 395 bp, Glycine max
cggttcttctatttgctattgccgctgcagcattttacacaggctcgttgattaaaagatgtatggacaagaattcgaacattaaaacctacccagatataggtgagcttgcatttggaaagatggaagctatatatcaggtcatgtacacggagcttattgtttaatagggttcttgattctggaaggcgataacttgaataacttgtgccccattgaagaggttcagatagctggcttcgtaattggtgggaagcaactgtttgtgatattggttgcccttatcatcttgcccacagtttggttggacaacttgagtatgctttcttatgtatctgcaagtggagtgtttgcttctgctggaatcatcctatcaatatcatggactggaacat

SEQ ID NO: 1402 - DNA, 383 bp, Glycine max
agtgcactgccaaagcttttattccatcatgtgtttgtgcattgaagaactccaattgaggcacatacatgaaaacctctgatgctcctgtgagcacatattgtggcacttgccagaaaatggaaagtgaacttgacccatcacaattgctacaatcttttattgcaaacttcaacctgaatttctctaccaaccctgctgagaccatggccatgattgcaaggactagaccaattcccatcctttgaagctctgtgagtttggatttcattactttggccacaaaagggtcgagggcgtgcctatagatgaagatgaagaatgccacgcccaaaatgtcgaagctggacatgcttgctggagggattttgaaacttgaaatt

SEQ ID NO: 1403 - DNA, 286 bp, Glycine max
ggctcctccacctgctctaatagcccaaaagagaccttctccctttgcttttctatcaaggatttggccatttgcatcaactattcttgcatctaagacattgtcagctccaaggacatactttcatattatggattcatatgcacctaccgtgaaggctcttcacaccttaacttgtgcaaaggtcttgctggaaaccatgaaccgaacttttctcatatattttgtaatagaccttccccatagtggcacccgcttgaatccaagccgtgctggcttctatatt

SEQ ID NO: 1404 - DNA, 274 bp, Glycine max
agctttataggaagcactatggttaagaggtttggtttcaaaactacttcaagtgaaagagccaaaaatcactgtagtacactatgacagtcaaagtgcaatgagtttgaacaaaaaccaagtgtatcataacaaaacaaagcatgtgaatgtcaagtatcacttcattcaagatatgatcaatagtaaagctattgctattaagaagatatctacaagggagaatgttgcacacatgctcacaaaagttttaccctatgagaaggtcaactat

SEQ ID NO: 1405 - DNA, 332 bp, Glycine max
  unsure (1)..(332): unsure at all n locations
ntaactcggatgtccgattcaggcgcataatatatcgagacttttgatattgaataacagaagctctcgagaaattcgaatggtcataacttttcacacggatgtccgattcgggcgcataatatgtcgagacgctcgatagtgaacaacggaagctttcgagatattctaagtggtcataactttttcactcggaggaccgattcaggcgcataatatatcgagacgctcgaaattgataaacggaagctcccgagaaattcaaatgcgcataacttctaactcagaggtccgattcaggcgcataatatatagagacgctcgaaattgaa

SEQ ID NO: 1406 - DNA, 338 bp, Glycine max
agcttgtagcatatgcaaacggcaataacgttttactcggatgttcgattgagtcacgtaatacatcgaaacgctcgaaattgaaaacagaagctctgtgcaaattcaaacgacaatacattttaactcggatgtccgattgagctccgtaatatatcaagacactcgaaattgagaataaaagctctgaacaaattcaaacgacaataactttttactcggatgtccgaatgagtccagtaatatatctagacactccgaattgagaatagaagagctgagctaatccaacgactttaacttttactcgaatgccgatggcgcccgacgtgtttaca

SEQ ID NO: 1407 - DNA, 417 bp, Glycine max
  unsure (1)..(417): unsure at all n locations
agcttaagctccttcaactacacaaggctcttaatatttgaagagtatcctagtggaaccttcacccgacgaagacactgacaaaaacttatcttctccttcttggacaaagtatggcaggctgggggcatataggttcattccatcactgtctagtccaagtctaagatttcttggctcattcccgaaatccggatacaaaccatcaatcttcttccactgggagcaatcagccggatgacagaccattccatcagaaatccttccatttgcatgtcatgtaaggtcttttgcgtcatcctcgttagcaaagagacgcttannaccttggaataattgaagataccacanaaccttcgctggnggacccttgttggagttntcatcagaaatgctntcctcttaatccttgacttt

SEQ ID NO: 1408 - DNA, 428 bp, Glycine max
tgtcacttgaggacaaccagacagacactcgccctctcgacatctgtccatgacattaaccaatgaggaagtttattgctttgacaccaagagaggggtcatagtaaagtaattaacatcgacgatcaaactttatggatagcagaaacacgatattctgaacaacagtaggtggtggcatttgggttcatgctatctgatagaacaaggactttgaagacatgttctaataatatatttcataatcttgaaactgttgtatttaagctacagcaattggagcttgctagtactcatgctatgttggttactctctagtctactgactactaaggatggagctacatgcaatctatgctatctatatgcagtatatgaagttaacagctcttcataggcaatactatacacatgacttctatgaagca

SEQ ID NO: 1409 - DNA, 355 bp, Glycine max
gaaaattaaccatattgtattttatatttgatgttttataactcttttattaccttctactatatatagagagagagtgaattatactataatgagagttgaataatatgcactcaggataaatcttttcgaatgaaagatttttattaaataaacaagtttatttaaaaacttttgtctagtgactaagataagtattcttaagtacacgtgaattgttgtccaatgatatataacatttatttttcaatgaatatcttgtgtctagaatgtattaatagaaagctttgaaatattttaataagctaaagaacaatggtcaaaatacctcattttatactgattcagtcaatct

SEQ ID NO: 1410 - DNA, 440 bp, Glycine max
  unsure (1)..(440): unsure at all n locations
agcttaagctccttcaactgcacaaggctcttaatatttgaagagtatccttgtagaaccttcacccgacgaagacactgacaaaaacttatcttctccttcttggacaaagtatggcaggctgggggcaagtaaattttcttcccatcagaccttggatgcaactatgatctgatacccatatcagttagatcttgacgggtattcaagccatccttcgtcttgccttgaatgttaaggagcgtcccaatcacactgtcacaaacatttttctccacatgcataacatcaatacaatgtctaacgtcaagatcacaccagtacgaaagatcaaagaaaatggacctcttcttccatatgcaactctgacttttatcctctctttgggtcttcccacatacagngntcaggtgttgaacccgctgatatacctgctcacc

SEQ ID NO: 1411 - DNA, 410 bp, Glycine max
ttaagaaatgtgaactcccttgcattgatttcaaatattgaggtcaatccgcgccctgatgagactaatgaaggaggtataattgctgaaattaagctaaaggagttagaacagaagtcggctgaagtcagtactgagtggagtattgtccctggacgggaggatccactctggtatttatttctgtcaaattgaatatcaattctctttaacaaccgaggaatttttggcccacccaattaatttgtttactttctatttgactttgtgtaggcttcgctccagcctggtggcactgttagttttgaacatcggaatctgcaagggctgaatagatctattaatggttctattacaactagcaacttcttgaatcctcaagtaggtacccttgagctagatcctggagt

SEQ ID NO: 1412 - DNA, 443 bp, Glycine max
  unsure (1)..(443): unsure at all n locations
gaaactcagctttcacgactctgactgggcaggctatcgtgattctagacgttccatcataggtttttccatctaccttggacactctcttatctcttggcggtcgaagaaacaatctactatgtctcgcagctcctccgaagctgaatatagagcttcagcttcaacaacatgcgagcttcaatggctcacctnnntaccttcttcaagaaatcttcatatctcgtttggcccaactcagccatctctttattgcgataaccaatcaacaatccagatagcctctaatcaggtgtttcatgaacgcaccaagcatattgacatagattgtcatatcgttcgagagaaagtaaacaatggtcttatcaagcttcttcctgtctcgtcttccatgcaactcgccgacatttttaccaaagctntatctccatccatctttcaag

SEQ ID NO: 1413 - DNA, 454 bp, Glycine max
  unsure (1)..(454): unsure at all n locations
gctttggagtttccaagagccaattcgtcttcttcttttgttcagacttcttctggcttcaattcatcagtgggctttccttctgtgtccagcatcttgggatgttcccagcctttgatgacagctttccaggttctgctatccagtgatttgaggaaggccaccatccttgctttccagtattcatagttggttccatctaggattggcggtctgttcactggtcctccttctttctccatgttcatcagaatttatctccctagatctcactctgtgatttcgagtgtttgctctgataccaattgaaattctgatactgnggacagatgtcgtaccggatgtcacgacatctcacttcagaacatgcagattagatgcgttcgtctgaacagattacacatgtaaataacacaagaggattgttacccagttcggcgcaacttccctacat

SEQ ID NO: 1414 - DNA, 427 bp, Glycine max
tgaaggcaaactggatgcgttggtcaacttggtaacccagctggtcttgaatagaaaaatatacacctgtcgcaagggtttgtggtttgtgctcctctgctgaccaccatacagacctttgcccttccatgcagcaacctagagcaattgagcagcctgaagcttatgctgcaaaattacaatagacctcctcaacctcagcagcaaaatcaaccacagcagaacaattatgacctttccagcaacagataccaccctggatggaggaatcaccctaacctcagatggtccagccctcagcaacaatagcagcctgcttcttccttccaaaatgctgctggcccaagcagaccatacattcctccaccaatccaacaacagcaacaaccccagaaacagccaacaattgaggcccctccacaacctt

SEQ ID NO: 1415 - DNA, 280 bp, Glycine max
cttagaaattctgtcatgctgagatactttcagttggaccagccttagaggagaaaaaagagaaaccaaagaaagaggataagaagccagaagccaataaaaatccaaaggaggaatatgctcaacttctgaaggtatatgaagcctattataatcaaataattgaacctgttctataaacttgaaaaatcaactggctggtattgtatatgagttgaggatataatgaatcaagagaaatgtgacatttatgaatgacttatatgtaaaaaaggccgct

SEQ ID NO: 1416 - DNA, 448 bp, Glycine max
agcttaataaatctatatatggtttaaaatatgcctcccatatttggtaccttaagtttcatgggattatttcttcatttggttttgatgaaaaccccatggatcaatgcatataccacaaggttagtgggagtaaaatatgttttcttgctttatatgtagatgatattttacttgcacccaatgatcggggtttgctacatgaggtaaaacaatttctctctaagaattttgacataaaggatatgggtgatgcatcttatgtcattggcattaagattcatagagatagacctcaagatattttaggtctatcacaggaaacctatattaacaaaattttagatacatttcgtatgaaagattgttcaccagttgttgatcctattgtgaaaggtgatagggttaatttgaaccaatgcccaaagaatgactttgagagggaaca

SEQ ID NO: 1417 - DNA, 442 bp, Glycine max
  unsure (1)..(442): unsure at all n locations
agcttcaacatcagaccacttccagggtgctggaactacttcacatggatttgatggggcctatgcaggttgaaagccttggaggaaagaggtatgcctatgttgttgtggatgatttctccagatttacctgngtcacctttatcagagagaaatcagaaacctttgaagtattcaaagagttgagtctaagacttcaaagagaaaaagactgtgtcatcaagagaatcaggagtgaccatggcagagaatttgaaaacagcagattcactgaactctgcacatctgaaggcatcactcatgagttctctgcagccattacaccacaacagaatgggatagttgagaggaaaaacaggaccttgcaagaggctgctcgggtcatgcttcatgccaaagaancttcctataatctctgggctgaagccatgaacacagcatg

SEQ ID NO: 1418 - DNA, 428 bp, Glycine max
  unsure (1)..(428): unsure at all n locations
tctcgatatattatgcccctgaatcggacttccatttgaaaagttatgaccatttgaatttctcgagagcttccgttgttcaatttctagcgcttcgatatattatgcgcctgaatcggactttcgtgtgaaaacttatgaccatttgaatatctcaacagcttttgtagtttagtttcaaagctgtctcgattatattaatgcacgcttaatctggactctccgttgtgaaaagttatgaaccatttgaaattctcgagagcgttcgttgttcaatttcgatcgtctccatatattatgcgcctgaatcggacttccgtgtgaatagttatgaccatttgaatttctcgggagctctcgttgttcaactntgaccgtgtccatatattatgctcctgaatcggacttccgtgtgacaagtgatgacc

SEQ ID NO: 1419 - DNA, 433 bp, Glycine max
agcttctccatatattattcccctgaatcgtgacttccgtttgaaaagttatgaccatttgaatttctcgagagcattcgttgttcaatttcgagggtgtcgatgtattatgcgcctgaaccggacttccgtgtaacaagttatgaccatatgaatttctcaagagctttcgttgttcaatttcaagcgtctagatatagtatgcgcctgaatcggacttccgtgtgacaagttttgaccatttgaatttttcgcgagcagtcgtggttcaatttcaaccttctcgatatattatgcgcctaaatcggacttccgtctgaaaaagtatgaccatttgaatttctcgagagcattcgtttgttcaattcaagcgtctcgatgtattttgcgcccgaatcggacttccgttgacaatttatgaccatctgaattt

SEQ ID NO: 1420 - DNA, 424 bp, Glycine max
cgaaggcaaactggatgcgttggtcaacttggtaacccagctgttcttgaatagaaaaatatacacctgtcgcaagggtttgtggtttgtgctcctctgctgaccaccatacagacctttgcccttccatgcagcaacctagagcaattgagcagcctgaagcttatgctgataattacaatagacctcctcaacctcagcagcaaaatcaaccacagcagaacaattatgacctttccagcaacagataccaccctggatggaggaatcaccctaacctcagatggtccagccctcagcaacaatagcagcctgctttttccttccaaaatgctgctggcccaagcagaccatacattcctccaccaatccaacaacagcaacaaccccagaaacagccaacaattgaggcccctccacaacc

SEQ ID NO: 1421 - DNA, 418 bp, Glycine max
acttgatgataaccattctgctacttgtcctcttgcgatctcccattagatttagcacaccggaactgattgttttcacaccaagcgatgtctcatagtttcattatcaacatctacgagccaactttatcgttagcgtgagctggtacgctgaaaaacagaggtgtaggctttgggttcatgctttctgatagaacaagtactttgaagacatgttgtaataatattctgcataatcttgaaactgcattatttaagcttcagcatatgctgcttgctagtactcatgctatgattgggactccttagtctacttactactaatgctggagctatttcccatctatgctctcgatatccaatattggaagtcaggagcttttcacaggctatcctatacacattacttctatgaagc

SEQ ID NO: 1422 - DNA, 363 bp, Glycine max
agcttagagctaattcaaacgacaataactttttactcggatgtttgattgagccccgtaatacatcgagacgctcaaaattgaatgttgaagctcgcagcaaattcaaacgacaataactctttactcggatggctgattgagtcccgtaatatatcgagacgctcgaaattgaatgttgaagctctcagccaattcaaacaacaataactttttactcggatgtgtgattaagtcccgtaatacattgagacgctcaaaattgagatgttgaagctctcagcgaattcaaacgacaataactcttttcctcagatgtctgattgagacccgtaatatattcgagacgatcgaaattagatt

SEQ ID NO: 1423 - DNA, 436 bp, Glycine max
agcttgtgtattagggagagtattttagcatggaaggctaattaaggtgaagtggatcagagagagagatgaaaattcatgtttttttcatttctctcttcgagatcgccagagaagaaatcaactaatggcccattagagtggagatatgtggttaattagaaggaggggaacaaatcaaggatgaggtgacaaggcaattccagcaagtgttttcagaatcaaagttcacacgaccttgtttaccaggtgttgagtttaaacaaattagccaggtagatagctcttttcttattactccttctttggagctggagatcaaggcagcggtttggagttgtgatggtgatacaagtcttggccctgatgggttcaattttcaattctcacggcgtgttgtgaattttaaggcccaagatttgttgtatggtgcatg

SEQ ID NO: 1424 - DNA, 229 bp, Glycine max
agcttataatatatcgatacgctcgaaattaaacatcggagactctcggaaaattcaaatagtcataactattcacacggatgtccgattcatgcttataatatatcgatacgctcgaaattaaacatcggaaactctcgcgaaattcaaatggtcataacttttcacacggagatccgattcgccacataatatgtcgagaagctcgatattgaacaacgaaagctct

SEQ ID NO: 1425 - DNA, 324 bp, Glycine max
  unsure (1)..(324): unsure at all n locations
agctttgatgtttgtgttgaatgcattatatgtaaatagaccaaaagtaagaaattaggtgcatatagagctacagacatcttggaattgatacatacggacatttgtgggccatttcatgcaccttcacgaaatggtcaacaatattntatatcattcatagacgattactccatatatgcatacttgtttcttatacatganatgtcacagtctctggatgtgttcaaaaaatttaaaagtgaagttgataatcaactcaacaaaaaaatcaagagtgtcagatctaactatggtggtgaatactaaggcaaatataacggt

SEQ ID NO: 1426 - DNA, 433 bp, Glycine max
  unsure (1)..(433): unsure at all n locations
cgacactatgatactcagcttaacattcaatntctagcgtctctatatattacgggactcaatcagacatccgtgcttaaagttattgtcgtttgaacttgctcagatcttcggtattcaatttcgagcatctcgatatattacatgactcaatccgacattcgagtaaattgttattgtggtttgactttgctcagaactttaacattcaatttcgagcgtctatatatattacgggactcaatcagacatccgtgtaaaaagttattgtcgtttggaattgctctaagcatcaacattcaatttcgagcgtcccgatatatgacgggactcaatcagacatccgagtaaaaagatattgtcgtttggatttgctcagagcatcagcattcaattccgagcgtctggatatattacgggactcaatcagaca

SEQ ID NO: 1427 - DNA, 390 bp, Glycine max
agctttgagcaaattcaaacgacaataccttttgactcggatgtcggattgagtcacgtaatatctcgagacactcggaattgaataccgaagttatgagcaaattcaatcgacaataaatttttactcggatgtcggattgagtcacgtaatatatcgagacgctcgaaattgaataccgaagctctgagcaaattcaaacgacaataactttttactcggatgtgcgattgagtcccgtaatatatcgagacgctcgaaattgaataccgaagctctgagcaaattgaaacgacaataactttttactcggatgtccgattgagtcacgtaatatgtcgagacgctcgacattgaatatcgaagctctgagcaaattcatacgacaat

SEQ ID NO: 1428 - DNA, 412 bp, Glycine max
agcttcagaattggttaagcatggcagataatgtgatcgatcatctttgtaatgagtttgagggcacgtacaggttcaccgattgggacaccattcttttctccacttttcttgtatgaaccctctgttctggagatcccgggtcctggtttacaagcggagtacatgcaatcttggacatagaaagccgtgtagtaattgacgccaatgaaatccaatcctctcttgagtttctctttttcgtagctggaaaatttgggcaagaggcttccaagaacgttctccatctctgtagggtactttccgaatatgattgggtccaagaacctgcattataataaagtgttactctgggggagttgagtgaacaatagaaaatgctattattaagggagaactagtattaactata

SEQ ID NO: 1429 - DNA, 428 bp, Glycine max
  unsure (1)..(428): unsure at all n locations
cctgcatctggacaagcaaatgaagaagttgcccatgattattgttcaggctagacacatggaaaggaggacaattaaacctcataaaagatatggtcatgcatatctgatctcctatgctttaatagttggaaagaagattgaagttcaagaggaacctcactcttatgatgaggtcataagcaacaaggacaattcaaaatggattgaagctatggaagaagaaatgtcttttctagaaaagaattgtcctanagggcagtaaattgttggatgcagatggctattcaagaggaaagaaggttttgaaggagttcanagtgtaaggttcanagctaggctagtagcctgtgggttactcacaaggaaggagtcagatttgtagaaatcttctcacctatggtanaacatagttcaataagaagtcc

SEQ ID NO: 1430 - DNA, 315 bp, Glycine max
  unsure (1)..(315): unsure at all n locations
ggctggtccaatagattttatataacaacttgaatagtggctatatctagaagttggcaccaaattaactggatttttgttcagataggctatatgttgttgaagtgccattntcatttattcttgtaaattgcaggtgatagcagcaacaaaccgtgcagatattcttgaccctgcccttatgcgttctggtcgattagatcgtaaaattgagtttccacacccaagtgaagaagcaagagctcgaattctacacgtttggtgtctttaaacttcatctgctgacttgtttatcatacagaacatctactgact

SEQ ID NO: 1431 - DNA, 405 bp, Glycine max
  unsure (1)..(405): unsure at all n locations
tcgtggatgcttactccagatacaactagattaggatgcaatctccaaaggaggcgaagatgacatttatcactaaagataccaacttatgctaaagggctatgccctttcagcctaacaaatgtagacgctacataccaatgactgatggaccgagtctttaaacaacaaataagacaaaacatcaaggtatatgtggacaacgttggcggtaagtctcgaagcatagtccaacatgtggcagatctgcaagaagtcttcaaggaactttacaagtatgacatgcgcctcaaccctgaanaatgtactttcggtgtaggcagaggcaagttcctcgacttcatgatcactcaccaagggattgaagccaaccctaacaaatgccctaccatactatagatgcac

SEQ ID NO: 1432 - DNA, 327 bp, Glycine max
  unsure (1)..(327): unsure at all n locations
agcttatcctcacttgcanatttgataactattataatctcagcgtttcaacatcaaaatgatatgtaaatggtttagactcatcttccatgtgatcagagagatatgaaaggcatttaanaacaagctctagatgcaagtgtgaattgtcttctacaaagaaaggaaggatcttctggctaatctcaatccaactacaccctggattcttctttaatccaagctctttcatctttgatctcaccacacgtacttcatcccacttatgtgcagaagcatacatatttgacaagagaatatatggtgatgaatcatcacgatccttat

SEQ ID NO: 1433 - DNA, 466 bp, Glycine max
  unsure (1)..(466): unsure at all n locations
ctggaactacttcacatggactngatggggcctatgcaagttgaaagccttggaggaaagaggtatgcctatgtttgtgtggatgatttctccagatttacctgggtcaactttatcagagagaaatcagacacctttgaagtattcaaggagttgagtctaagacttcaaagagaaaaagactgtgtcatcaagagaatcaggagtgaccatggcagagagtttgaaaacaacaagtttactgaattctgcacatctgaaggcatcactcatgagttctctgcaaccattacaccacaacanaatgacatagttgaaaggaaaaacaggactttgcaagaagctgctagggtcatgcttcatgccaaagaacttccctataatctctgggctgaagccatgaacacagcatgctacatccacaacagagtcacacttagaagagggactccaaccacactgtatg

SEQ ID NO: 1434 - DNA, 428 bp, Glycine max
  unsure (1)..(428): unsure at all n locations
atcttgtcatgaatcctcgccataaaattacatagacctgccaattctaaatgaaaaatgtaataaatccaatgctaacaaaaaatagaatagcaacacacactcaaatgacacatgcaataacatttcaatgaataacaaaataacataaaaacaatgatactattcgttgaactactaagccaatacatgcaacaacctgaaccaaaaaagaaaagccaaattagcaaatagcagagaagcagaaacaaaaattatatctctgaacaaataatattgcaaccatcaacaaacaaatagaaaggccgaaaacaaacacaaaaaagttcagctgttggaaaacagaataccaacccatccttataccacacatgcaataagatntncatcaatgccaacataccacanaaagtattacactatcaatc

SEQ ID NO: 1435 - DNA, 434 bp, Glycine max
  unsure (1)..(434): unsure at all n locations
gcttatagttattggagggagaataaaatatattcattatcaattgtacctttcaagtaacgaagaattctttntgcggcttttagatgaggagaggtaagagcctccgtaaagcgacacacaactcccaccgtatatagaatatcgggccttgtattggttagataccttaaactgcccacaagactcttgaaaaccgtggagtctaccttctgtccttcatcaaactttgatgacttcaagccaccttccataggtgtgttcacgggattgcaatcaagcatattaaatttcttcaacacttcttttgtgtagctttcttgtgagacaaagataccattctccatttgcttcacttccattcccaaggaatatgacatgagtcccatatctgtcatatcaaattcacgagacatagactccttgaagtcttc

SEQ ID NO: 1436 - DNA, 284 bp, Glycine max
  unsure (1)..(284): unsure at all n locations
ttcatcttacagacagcacaagaaagtttatacggataaccactctggtatttccacccgtcaacgtgactcaaatgtcagtatgacagatcttgtgaagggtggccgacaaaagcgaggctctngctcctacgtatcctccaatgaggaactcagacctacgtagntcttgataacttgtgagacttgaaaagtctccacccgaagatgctgacatcttcggaaagggcgcagatgaccacacttggcctcatgctcgtcaatcacacttggggtcactgaat

SEQ ID NO: 1437 - DNA, 437 bp, Glycine max
  unsure (1)..(437): unsure at all n locations
acattntcgtgaatgtgacaatctattccttagtggattgattcaccttaacagcccanaaaatcatataagcataattagatgcaacaactcactcatctccaatcttcatatgattgcaccaaatgaaagcccaaacactgatgagaatgttatctcacattcatccaacatttccataaagaactccaagatggaaattggtaaatcatatataagttacaatctttaattgcataattattatatcttgtccttaaatcattcaatgagattgcatagccctttaattcctagttttttttataaggctactcaagtggtagatcctctcttaattntttttatttaaaaattatgtgatgcgtaaatattcatgtttctcatttaagttgacaatcttatgtaataaaaagaagacacaaattctcttcata

SEQ ID NO: 1438 - DNA, 411 bp, Glycine max
  unsure (1)..(411): unsure at all n locations
ctcagcttcacatcagaccacttccagggtgctggatctacttcacatggacttgatggggccgatgcaagttgaaagccttggaggaaagatgtatgcctatgttgttgaggatgatttctccagatatacctgcgtcaactatatcagagaaaaatcagacaccttcgaagtattcaaagagctgagtctaagacttcaaagagaataagactatgtcatcaagagaatcaggagtgaccatggcgcagagtttgaaaacagcacgtttactgaattctgacatctgaaggcacactcatgagttctctgagccattacccacaacagaatggatatttgataggaaaaacatgactntgcaagagactgctanggtcatgcttcatgccacagaacttctctataatc

SEQ ID NO: 1439 - DNA, 425 bp, Glycine max
  unsure (1)..(425): unsure at all n locations
atctccaatgctatgtaccttntactcataccccttcttggtgtagcttctgctcatctttcaacaatctcttaccaagatgttgtccaactatgggaaaatctcaagttcaatcttgtctcagtgactctatgttctagccttatagtgttccttgtcaccttttacttcatgagccgtccaaggggtgtttacttggtggattttgcgtgctacaagccagagccagattgcacttgcacaagggagattttcatgcacaggtctgtggaaactggtgtgttttcggaggagaacttggcctttcagaagaagatacttgagaggtctggtttgggacaaaagacttacttgcccccagcaatcttgagtatccctccaaacccttgtatggctgaagcaaggaaagaagctgagcaagtgat

SEQ ID NO: 1440 - DNA, 319 bp, Glycine max
  unsure (1)..(319): unsure at all n locations
agggtatgcgaaatattcgactntgcgcgatgccgtgaggttntatgagaggatgaggtgtgatgaggttatgcccgtggtgtatgattttacctacttgttgcagctgtcgggggagaatttggacctcaggagggggagggagattcatgggatggtgataactaatgggtttcagtccaatttgtttgccatgactgctgttgtgaatttgtatgccaagtgtatgcagatcgaggatgcatacaagatgttcgagagaatgccgcagagggacttggtttcctggaacactgtggttgcgggttatgcacagaac

SEQ ID NO: 1441 - DNA, 465 bp, Glycine max
  unsure (1)..(465): unsure at all n locations
atatttatacatgataaaattccaagtagtgtatacaacaatagttaagcaatcacaatcctttttaactcaaatcaaatacaaaatcatgtaatgaataataagttatgttgctttacactgggtgtcaataacattaacaattggtccatcctttataatagttctttgcaattcacaaacacgtgttacaccagaggagcttgnacttcgattgaaggctctccttccaagaacactatttcctactgcactcttgccattgccagtacgtccgactaaaactagtgtcctaacttcattagacgaggatgtttttgccattgatagtaacaaatttatgttacagctgcaaggaaaatatatcataaataanaatttagcaatagaataaattatacacacacacacatatatatatgaacatataatgtaattacaactaataaacatttaanaaacaaa

SEQ ID NO: 1442 - DNA, 470 bp, Glycine max
  unsure (1)..(470): unsure at all n locations
agctaccatgttcacctcatgctcaactgcctctatcttaaaacaggccctgtggtcatttggatgcttaattgtgtaaaatagattgaaggtaaccttttgatcatctacactcatttataggttaccatttccaatgtccactacatacttagcctcaacgtgaaaggatggcctaagatcaatggaatttcagcatcttcctctatatccatgatcacaaaatccacaaggaatgtgaattgacgaaccttgaccaacacatcctccaccacatcgtaagatcttgtaattgaatgattagcaagctgcaatgtcattctggttggtgcaatctctaagttcctgatccttctacacataaataggggcattagatngatgctagccctcaaatcgattagttcttttccaactgatacaacacctattgagcacgggatactcatactccctggatctttgtcctt

SEQ ID NO: 1443 - DNA, 419 bp, Glycine max
actaagcgtggaaaattaacatatcataccattcttcgacttttattgattatttgcataattactttcgatgagttttgacaatctattgtagaatatttttataggacctagattcttgctgtaatatttcaacataaacatcaatttatatatgtacataataatacttgaacaataattttaactcctcaacagaattgtacattaaagtgtttcaagattttgcaccactacacctaatttaaattatatttaatttcattattgttgtgataatctctttcatttttaaaccatgatattgatacgaaattgtattcgtccaaaacaataacaaatctctattaaagaccataaacacatgtaatataaatatatgtcttcaacataatttatttcatgtgcaataatgaatc

SEQ ID NO: 1444 - DNA, 453 bp, Glycine max
tttagatgatgcagatgggtttgtatctacctcatgcactcctctaatgactatggcatcatttctggcgctaaactgctgggagttggaggccatcttctcaattaaatttctggcttcagcaagagtcatgtctccaagggctccaccactggcagcatctatcatacttctctccatattactgagtccttcataaaaatattggagaagaagttgttctgaaatttgatggtgagggcaactggcacatagtttcttgaatctctcccagtactcatacaggctctctccactgagttgtctaatacctgagatatccttcctgatggctgtggtcctggaagcagggaaaaattattctaagaatactctcttaaggtcatcccagctcgtgatggaccttggagcaaggtaatacagccagtcctttgccactccctctaatgaatg

SEQ ID NO: 1445 - DNA, 472 bp, Glycine max
  unsure (1)..(472): unsure at all n locations
atccttagagtcacctgcggctgcagcttgcgtgatccttgaagttnttctatcatcatagtttctaaatctttggtttccttgattgtcacaacaatgtgcacaaatttgggatctaacgagcatagtatcttctccataattcttacatcttttaacttctcaccatttctttctagttgatttgaaactacgggaattcttgaaaaataatcagaaatggactccgactctttcatatgtaaggattcaaactcacctcttaagagtttggagacacaccttatttactttgtcttctcctttgtgagaggtttgaagcttatctcatgcctccttagcgaatgttgcatcagaaatcttctcgagcgcatcatcatctaatgcttgaaagatgaagaagagagctttcttgtctctctttcttgaatcctttaaagtcccttttgtgcttgggataatgaagtctcat

SEQ ID NO: 1446 - DNA, 420 bp, Glycine max
  unsure (1)..(420): unsure at all n locations
ggtctgccaattaggtgtcaattcatctatatgatcactaacagaaagaaaccactctatctctcgtcgccacattgctttcttctctgaacgcaggggctctaatctccaaagttggccaaagagggtagctgcaaattcagcaaagaaatgaacaacaacaatcaaagtcaagaatagcaaatgaataaaattcaccacaccaattaataaaaaataaaaacacagtaactgcttcaagtgtgcattttgcataccacatagattggttatggcatttgagatagccaaggctgtagcgaccccatttccacaacctgacatatcttctccaagtaacaattttgcaaacctctccttcatcatctcaatctctacaagtgagaatgaanatcanatctcatcatactgatatcatca

SEQ ID NO: 1447 - DNA, 461 bp, Glycine max
  unsure (1)..(461): unsure at all n locations
gcgcaacaaatattatattgttgcgtgatcagtgtaaatcactatctttgatcccaccaaataagatcgaaatttctcaagtgcaaacacaattgccagcaattctttctcagtggtggcatagataatctgggcatcattccaaactttgctagcataatagatggtatgaaacattctgcccttccgctgccctgccctagcatagcacctactgcataatcacttgcatcacacatcaattcaaactcttgtccccagtctggtgctataatcacataagcagaaaccaatttggctttgagagtgttaaaggcttctaagcattcttcattgaatacaaacacaacctccttgttcaacagattgcttacgggtttagaaantttggagaagtttttaatgaatcgccaataatatccagcatgacccataaagctgcgtatgccctttacattaac

SEQ ID NO: 1448 - DNA, 377 bp, Glycine max
aacttctccttcctcaggtgtacccaaacccaatcacctggttcaagcatgactatctttctgcttttggtggcttgccttgcataactcgcatttttcttttcaatttgagccatcacttgctcatgcagcttcttcacattctcagctttagcttgtgcgtccttatgcttaaacatagcaatgttaggcatatgcaacaaatcaagaggagtcaaaggactaaatccatacactatctcaaatggtgaacaattaagtgtgctatggacagcccgattataagcaaactcaacatgaggcagacatgcttcccaagatttaagaattttctttaaaacagtcctaagtagtgtgcctaaagtcctattgactac

SEQ ID NO: 1449 - DNA, 392 bp, Glycine max
  unsure (1)..(392): unsure at all n locations
actggatgcgttggtcaactgggtaacccagctggccttgaatcatatatctgtacctgtcgcaagggtttgtggtttgtgctcctctgctgaccaccatacagaccttngcccttccatgcagcaacctggagcaattgagcagcctaaagcttatgcagcaaatatatacaatagacctcctcaacctcagcagcaaaatcaaccacagcagagcaattatgacctttccagcaacagatacaaccctggatggaggaatcaccctaacctcagatggtccagccctcagcaacaacaacagcagcctgctccttccttccaaaatgctgctggcccaagcagaccatacattcctccaccaatccaacaatagcaacaaccccagaaac

SEQ ID NO: 1450 - DNA, 311 bp, Glycine max
aatcatccggatctgagatgggcaagtcctctacaacaacaatagactgtcccttatttccaaaatgttgctggtccaagcaagccatatgttcctcctccaatgcatcagtggtagtaacaacaacaacaaagacaacaagcaactgaggccccttcttaaccttccttagaggagttagtgaggcaaatgaccatctagaatatgcaatttcagcaagaaacaagagcctccattcaaggtctgacaaatcagatgggtcagatggctactcaattgaaccaagcttagttccaaaattctgacaaatt

SEQ ID NO: 1451 - DNA, 352 bp, Glycine max
  unsure (1)..(352): unsure at all n locations
acatgcttttttgggtgtcatgctacaaaggagagagcaagaaatgaagagtcaatggttgatacatgggcggaaatgaaaaagatcatgaggaagtggtatgtgctggctagttactcaagggacttgaaattaaaagctccagaactaaccctatgaaacaaacgggttgaggagtatttcaaggaaatggatgtgcttatgattcaagcaaagattgaagaagatgaggaggtaactatggctcgatttcttaatggtttgactaatgatatccgcgatattgttgagttgcacgagtttgttgaaatggatgattngcttcacaaagcaatccaagtagagcaacaat

SEQ ID NO: 1452 - DNA, 359 bp, Glycine max
agcttcttagtttcagatgatgcagatgggtttgtagctacctcatgcactcctctaatgactatggcatcatttctggcgctaaattgctgggagttggaagccatcttctcaattaaatttctggcttcagcaggagtcatgtctccaagggctccaccactggcagcatctatcatacttctctccatattactgagtccttcataaaaatattggagaagaagctgctctgaaatctgatggtgggggcaactggcacatagtttcttaaatctctcccagtactcatacaggctctctccactgagttgtctaatacctgagatatccttcctgatggctgtggtcctggaagc

SEQ ID NO: 1453 - DNA, 363 bp, Glycine max
ctcacactgatgtccgattcggggacatattatatcgagactctctatattgaacaacggaagctctcgggagaatcgaatggtcataacttttcacacgaatgttcgattctgggacataactcatctagacgctcgaaattgaacaacggaagctctcgagaaattccaatggtcataagttttcacacggatgttcgattcgggaacataatatatctagacgctcgaaattgaacaacggaagctctcgagagattcgagtggtcataacttttcacacgaatgttcgattccgggacataatatatcgagacgctcgaaatggaacaacggaagctgtcgagaaattcgtatggtcat

SEQ ID NO: 1454 - DNA, 311 bp, Glycine max
agcttttttatctagttagatctaaattatcaggtacatgagcataagagacacaaccaaaaactctaaaatgttgaactgatggcttgattcttctccaggcttctttgggtgttatgtccttcaccgctagcgtggaactggggtttaatacatgcacaacccaatatactgtttctggccaaaaagtgttaggcactttcttttcaatgctgcgaaccaaattcatgactgtgcgattctttcattctgcaacaccattttgatgcggcgaatatgtagctattaatcggctgtgcgctccatgcaca

SEQ ID NO: 1455 - DNA, 349 bp, Glycine max
  unsure (1)..(349): unsure at all n locations
agcttttaccaaagagttntactctctggtaaacgattaccagtttactgtaatcgattaccagtagcaaaatttgttttcaaaagctttcaaattgaatttacaacgttccaattaatttcaaaatggtgtaatcgattacaagattttggtaatcgattaccagtgtgtttgaacgttgaaattcaaattcaattgtgaagagtcacatcctttcacaaaaatgctttgtgtaatcgattacaatgatttggtaatcgattaccagtgataagttttgaataaaaatcaaaagatgtaactcttccaatggttntcaagtttttctaaaggttataactcttctaat

SEQ ID NO: 1456 - DNA, 484 bp, Glycine max
  unsure (1)..(484): unsure at all n locations
tgtaccctacacagaatataaggataattgtgtattttaaaatgagaaaaaatacttttttttgtattttatatatttttctttaattaaaatttcaattttaattaattcatgtaataaatgctagtatgatatataaatattgcttatattaaatattagtatgatatataacttaatttagtaaatttcaattntgatttgacaataacaccaaagatttttttgtaaagaattacatataaattttatcttttaaaaatggctaattaccatttttttttgtgtttcttcgtgcaagtattttttttgtaataccaaacatgtttcatatgtaaaaatttgtgaagtaaatnttacatttacttatntatatatgtcttctgagaataaaacatacaattaagaaatttaattaatattctgcattatacactgaaaatatttttaatttcttattacattcttngnctnttatatattc

SEQ ID NO: 1457 - DNA, 463 bp, Glycine max
  unsure (1)..(463): unsure at all n locations
agcttgtcacttgatgtcaaccagtctgctatttgttctcttgtcatcttccattatatttagcaatttggaaatttattgcttttacaccaagtgatgtttcatagtttagttattaacatctacgatcaaactttatggttagcataaactggaacgctgaacaacagtaggtgttggctttgggttcatgctttctgatagaacaagtactttgaagacatgttttaataatatttttcataattttgaaactgttttatttaagcttcagcagttgttgcttgctagtactcatgctatgttggttactctctagtctacttactactaatgttggagctntttcccatctatgctctctatatccagtatttgaagttaagagctcttcanaggcaatcctatacacattacttctatgaagcaactgtcggagctggtcttccaatttgtagcactt

SEQ ID NO: 1458 - DNA, 483 bp, Glycine max
  unsure (1)..(483): unsure at all n locations
cactcaagctntacacgaatgtccgattcgggcgcataacaaattgaacaatgaaagctctcttgaatttcagatggtcatagactttaacacataagtctgattctggcacatcacatatagagaagctcaaagttgaacaatagaaactctcaagaaataaaaatagtcataacttttaactcggacgtctaattcaggcgcataatacatcgagacgctcgaaattgaacaacgaaagctctcgagaaattcaaatggtcataacttttcacacggaattccgattcatgcggatagtatatcgagacgctcgaaattaaacgtcggaagctgtcgaaaaattcaaatggtcataccttttcacatggatgtccaattcggatgcatcatatatcgaacaacggaagctctcgacaaattcaaatggtcataactnttaccacggaggtcagaatcacgcgcataatatattgagacgct

SEQ ID NO: 1459 - DNA, 352 bp, Glycine max
tgacaacttatgactatttgaatttcacgagagcttccgttgttcaatttcgagtttcactatatgtgatgcgccaaaattggacattcgaattaaatgttatgaccatttgaatttctcaagagcttccggtgttcaattctgagcgtctcgatatgtgatttgcctgaatcggacatccgtgtgaaaagttatgaccatttgaatttctcaagagctatcgttgttcaatgtcgagcctctcgacatattatgcgcctcaatcggacatccgcgtgaaaagttatgaccatttgaatttctcgagagtttccgatggtgaatttcgagcgtgtcaatatattataagcct

SEQ ID NO: 1460 - DNA, 343 bp, Glycine max
tatgattccatgtgctgcgaattcttggattggatgtttatgtccattggcttccccagcccagttctgtacttggatcatggagtgtgtttcttccacttcctttagtgtggcagacaatggatccatttatggtcacttcacaggacagcggggtcttagacaagaggatcctctctccccttatctgtttgtgctctgtttggagtacttttccagagatatgagcagcctcaatgatgatgccaattttaaatttcatcccaactatgcaggtattcagctatctcatttggcttttgcagatgatattatgcttctatctagatgagatatccattct

SEQ ID NO: 1461 - DNA, 469 bp, Glycine max
  unsure (1)..(469): unsure at all n locations
tatatccatggcctcctatggtggtgagtttcttctaaactcatcttctccttgaagtggngtctcctctctctctcttccttctccattccgctgccattcatcttccaagaagcaaaggaatccattgatgaagaagatcctaggcctacaagctccaatggagcttacatcatgtggtatcaagagcatctccatctaggtgatgttcttttgcttcctctatctttttgttcggtgaattctctntaattccttgttcttcatcttattctccatgtatatcctccattgtcttgtggtttggtgctgttaagagtagattcaaaaaaaataaaccaattaaatcttagatctacacttgttcttgcatttctatggttcanattntgtagatctactcttgaatcangtttttgtgtngattntaggatctatncattttcattcataatattcttgtgctgat

SEQ ID NO: 1462 - DNA, 292 bp, Glycine max
agctctacatgtctcatgacacctaagcacacttagtggataatcttggacttgatcttgttttagtgagttgaaccatagctgatattcactaatcataatgagtgaaatatttggctccaaagatggctccacaaattaaaattcaagttcaagtgaagattgaatacaaaatcttacttgctatctatattgcgggacacttacgctatatataaaagctctgcgtgtgcatgttctcaactcttgacattcgagaaattacacttccaggcttagaccttatttgagg

SEQ ID NO: 1463 - DNA, 277 bp, Glycine max
  unsure (1)..(277): unsure at all n locations
gatcttccgttgttcaatttcgaccttctcgacatattatgcgcccgaattggacattcgtgtgaaaagttatgactatttgaatttcctgagagtttccgatgtttaatttcgagcgtatcgatatattataagcttgaatcggacatccgcgtgaaaagctatgaccacttgaatttctccagagctttcgntggtgaatttcgagcgtctccatatgtgattcgcccgaatcggacatccgtgtgaaaagttattcccgtttaatttttcacaa

SEQ ID NO: 1464 - DNA, 217 bp, Glycine max
attcaaatagtcataactattcatacggatgtcccattccggcgcataatatgtcgagaggctcgtaaatgaacaacggaagctcttgagataatcaactggtattacctttcacaccgatggtccatttacgccgaacacatattatgaagctccaaaatgcaccaccggagcttctccgaaatttcaaagggcataaattttttcaccgatggcc

SEQ ID NO: 1465 - DNA, 365 bp, Glycine max
  unsure (1)..(365): unsure at all n locations
gtactatcttcatgcgattcctttntctccctcctctaatattatctcacaaatcccaacggttaagggatgctcaattgaatttcgaacaacatatccaaattttactacaatccaatggttaacgaatccaagatcgtatttttaccaagacagttttgggtttctgcgggaaaataaaatgctacaatgcgaagggttttatactaagctcagacatgattttgaaattcccaacggtgagaatggtcggaattgggttttgaaccgggtgcttaaatttcacgatgatccaacggtgaatgagtccgagatcatcattcttctgagacatgtttagtggtctacgggaaaagagaggttga

SEQ ID NO: 1466 - DNA, 387 bp, Glycine max
agcttattcatggatattgtaggacgtttacttggtatgccacgaagcattgtctcggatcgtgatcccttattcgtgagtaaattctggaaggagctcttttctctcagtgggacaaagctctgcctcagctccgcttgtcacccacaattcgatgagcaaaccgaggttgcaaaccgcatcatcgaacaatatttgagagcatttgttcatcaaaacccttcgcaatgggggcactatttgctgtgggccgaatggtcctacaatacatcttgccactcagccaccggcgtcacgccgtttgaagtaaccttcagcaggaaaccacccaatttccctcattatgtcacaggaactgccaaggtcgacgctgttgacgatatgctc

SEQ ID NO: 1467 - DNA, 374 bp, Glycine max
  unsure (1)..(374): unsure at all n locations
agcttctggtgggacatcttgacttgctgtttaatctgacattcattacacattctgccttcttctattatcagattgggaatgcctctaacagcacctttgtcaatgattatattcatgcctcttgagtgcagatgtacaaatgtttgatgccataatcagacttcatcttctttggaggatagacatgtggaggagtaactgggttcttgagatgtccatangtagcagatgtgctttgatctgctgcccttcattagaactatactcttgtcatttgtcaccaagcattctgactttgtgaagtgtacattgaattcttcatcacacagctgactgatgctgataaagtatgcagacactcccttcaccaa

SEQ ID NO: 1468 - DNA, 396 bp, Glycine max
agcttaacaaggctctctgtggcttataaaacatgccccaagacagtggtttgacaggttgaaatctacttttcttcagtttggctttgtgggaagcaaatgtgattcttatctgttcatctacacacatcagaagcatactgtccatcttttagtctctgtgaatgatatcatcatcacaagcaattctatctctcttattcaacagctaacttccaaactaaacactgccttctctcttaagcagctaggtcatttggattattttttgggactagagatcaaataccttgctaataattctatactagggactcaaagcaaatatatttgtgatttacttcacaaactcaaatggctgaagcacattctatttcctctcccatggtttctaac

SEQ ID NO: 1469 - DNA, 388 bp, Glycine max
  unsure (1)..(388): unsure at all n locations
agcttcttgtgattcacaaagctactccaccctgtagttaacaagtgccggcgcggcgtgcccctataaatgtgcctaaatttccatgtctcaccatgaacatccttggcaaggatgttctgaacgggagggtccgcggaatattccaaccgaggaaaaattgtctcagcacaatatctgggaacagaaaagcccccaccattgttggcatcaaactgtgtcaaggttttggcaaaagaaggggatttatctttattttcagatccattgatgcctacaacagcatcatcctcaaaatcaccctcgtttctggtcaaatgaacaagcctaagctntacataaacctcatcagtttcaagatcagccatgtattagatagctccaactt

SEQ ID NO: 1470 - DNA, 438 bp, Glycine max
tctcatttatctccaccatccggtccaacttccgcttgaactctgggttttcaacatcaagaacggctgggataatccgatcagtcgtgcggtttgtctgcataaataatccagacattgaagcttgagtaactggttgtaatatacgagttcatcattagatgcttgttgatcgactttattagtgatagtttctaatgctaactcgaggctccattactttcattatatcatgttctgttactaaattgactatgtaattgagaatggataaaaacaaatattgattatacaaaataacaatggaggaatggtgattatagaaaaatgcaaacacaaactaacctcgataatgacatgcatgtcaaattcttttgtgttaagtccaatgccttcgtagaaagctgtacgttggcaatcatcgagatacattgtgac

SEQ ID NO: 1471 - DNA, 434 bp, Glycine max
  unsure (1)..(434): unsure at all n locations
tcatgagagagtcaaagatcaaattgagaggaaaaataatagctatgctaaacaagccaacaaagggagaaagaagttgtcttcaaacccggagattgggtttgggtgcacatgagaaaagaaaggtttccggaacaaaggaaatcaaaacttcaaccaaggggagatggaccatttcaagtgcttgaaagaatcaatgacaatgcttacaaagttgagctgcccggtgagtataatgttagttccaccttcaatgtctctgacttatctctttttgatgcagatggagaatccgatttgaggataaatccttctcaagagggagagaatgatgaggacatgaccaaaagcaagggccaggatccacttgaaggacttggaggacctatgancagggctagagcaaggaaagccaatgaagctcttcaacaagt

SEQ ID NO: 1472 - DNA, 444 bp, Glycine max
  unsure (1)..(444): unsure at all n locations
ctcaagcttggcgagagttaaacaagaacactntntggccaatatggaactccttcctaagaatcctagagtcatgaatcctcttcactttctctttgtagatcttggatttctcataggcttctaagcgaatctcttcaagttcttgcaattgaagcttcctttccatacccgcttcatcaaatgccatgttacaacccttcaccgcccaataagtgcagtactcaatctccaccggaagatggcatgccttaccaaaaaccaccatatagggagacatccccaaaggtgttaggtaagctatcttgtgggcccataaagcatccaaaagtagcttgctccaatccttcctattaggatgcactaccttctacaacacttgcttgatctctctattaaaaacctccacttgcccattagtttggggatgataagctatagcaa

SEQ ID NO: 1473 - DNA, 436 bp, Glycine max
  unsure (1)..(436): unsure at all n locations
agtaagatactattgctgtggagttgacgtacaggttctcactgctgttntgtgtctggatatgtgtttaggtgtgaaatatggaggtaaagctgcagacacgtgggcagtaggagttactttatactgtatgatattgggtgaatacccttttcttggagacacacttcaagatacatatgacaaagtaagaaatacacactcagacatatatgacaaagtaagaaaaacatgcatgtttttattataattacaacaaaaatgtcattctgttttcaaaagttctcactttactaagtttcgtaactttttcacccggatattatactctgattggcattcatattttctggtgcctatatcacaatcttagcttgctattttcttcctgatccagatagtcaataatcctttagtactccccaacgatatgaat

SEQ ID NO: 1474 - DNA, 442 bp, Glycine max
  unsure (1)..(442): unsure at all n locations
tgagggaanacttgatgccttggtgaacctagtaactcagcttgccataaatcagaaatctgcatctgcacctgttattgttgcaagagtttgtggtctatgttcttttgctgatcaccatacagatctctatcattctttgtagcaatctggagtcaatgagcaacctgaagcctatgctgcaaacatttataatggaccccctcagcagcaaaaccaacaacaacagaataattatgatctttcaagcaacagatacaatccaagttggaggaatcatccaaatctgagatgggcaaatcctccacaacaacagcaacaacagcctgtccctcccttccagaatgctgctggtccaagcaggccatatgttcctcctccaatgtagcaacagcagcaacaacaacaacaaagacaacaagcaattgaggccccttctcaa

SEQ ID NO: 1475 - DNA, 433 bp, Glycine max
tccttaagaagattcctaaagaagcttgagcttagctacacatacctctctaatagctaagctcacctccttgagatgagaagctagagcttagctacaccccccctataatagctaagctcacccccatgacaaaaaacatgaaaatacaaaaaaaagtccttactacaaagactactcaaaatgccccaaaatacaaggctaaaaccctatactactagaatggccaaaatacaaggcccagacgaaggaaacacctattctaatatttacaaagataagcgggctcatacttagcccatgggctcgaaatctaccctaaggctcatgagaaccctagggccttcccttggatctctagccaatctacttggagtcttctacccaatgcccttgcaggtaggattgcatcattccctccaccttggaaaga

SEQ ID NO: 1476 - DNA, 443 bp, Glycine max
  unsure (1)..(443): unsure at all n locations
ntaagaganattcccttcttcttcttatcattctcctcatgttgattcaatctcttcaattccattcatgttcctgtaactttccaaacaaggtagcaagagacatgttagtaagatttcttgattcaataatggtcattacctttggttgccattccctacttatgcatcttaacactttattgacaagatcttcatttggaaatatttttcctaaagatgcaagatgatttattatgtaggtaaatctcttttgcatgtcttgtatagtttcatttggattcattctaaataactcatattcatgagttaaagtatttatcctagatctttttacatttgttgtcccttcatgggttacttgtaaggtatcccacatatctttctcatgtttgcaatttgacaccctanagtattcatctattcctaatgcagatgtaatg

SEQ ID NO: 1477 - DNA, 450 bp, Glycine max
tccaatgagagaaatgggtctaatttatcaagctcctatgggccatcaacttttggaacaagtgtagtaaaggaggggttggccgcctttgggattacaccatgttcataaaagtcagcaaaaaccttcaacacatcatcctttagtcttggccaattttttttaaagaacttaagttaaagccattcgaagccagacttttgttactatcacaatctcatattgcttctctaatctcactctcctcaaaccttcaaacaagcatatcactctccacatcagttttatgtttgaacgactctttaactctccaaccttggtctaatcctccttcatcttgaaatctccttttaaagaaacacttcacattctctttaaccactcttggatccttctcccacttaccatttaccaataaaccacttattggaattttcatccttctccatt

SEQ ID NO: 1478 - DNA, 442 bp, Glycine max
tactgcgacgagtgcgcttcttgtaaagaatacggtatccgcactcacggcactgtataacgtcaccgggcttcagcgtattctccattccacaatctgcaacagatacaaacacaaaatcacatttcactcttaaaaccctaaaccctaaacacacacttttaacattggcaaaaaaggtaaacgaaaaacgcaattaggtcaaaaagagctgtgattagataagaaacctccgcatatgtagctgactggctcaggctgaggatccatcgctggttccagcgaggtgtaaaggaagaaggttctaggctttagcctttagctttctgctcaacgaagaaaatgtaaagtggctcagaatcagaggctctaaaacgaaggattgggcttcatcttcagcttttatgggcccaaattcgcaacttacatgtccaaaaccgag

SEQ ID NO: 1479 - DNA, 441 bp, Glycine max
  unsure (1)..(441): unsure at all n locations
tccatcacttttgacgactgttaagtgagattccttagcattggcctgataccttgcacataagtaagcacttagcatgacatatggtctatttttaattaagtagaggagtgatccaatcatacctctatatcttaactcatccactgatttacctttctcatctaagtcaaggtaagttaaagttgccattggagtagatgcttctttgcattnttccatgccaaatttcttaattagttttgtacaatatttcgtttgatttaggaaggttccatgtttcatttgcttgacttggagtccaagaaagaagttcaactctcccgtcatagacatctcaaattccttctgcatacaactagaaatttccttacacaaaatntcattagtagcaccaaatataatatcattaacatatattttaacaattagcaactcact

SEQ ID NO: 1480 - DNA, 455 bp, Glycine max
actaagcttctatccaaggttcgttcctaatttctctacaattgcatcacctctcaatgagctagtgaagaagaatgtggcatttaactggggtgaaaaacaagagcaagcctttgctttgcttaaagaaaagcttactaaggcacctgttctagctcttcctaacttttctaaaacttttgagctagaatgtgatgcctctggagtgggagttggagctgttttgttgcaaggtgggcaccctattgcttattttagtgaaaaacttcatggtgcgacccttaactaccccacctatgataaagagctttatgccttaataagagcactccgaacttgggaacattaccttgtttccaaggaatttgtcattcatagtgatcaacaatcacttaagttcattagagggcaaagcaagttaaacaaaaggcatgcaaaatgggtagagtacctag

SEQ ID NO: 1481 - DNA, 442 bp, Glycine max
  unsure (1)..(442): unsure at all n locations
ttaaatcaataaatcaatatcaatatattatataaaacaaagttattgattgtgtctgttacttaagacacatgacaaacgctgatgcagttaggcctcgcgtaattaaatattatttcccattgaagaaacaaaataaaattcaaaataagaaatcaatcaaacaccaagtaattctatcacacaataactctaaatttatttgttatattcataataacatgctattgtttaattatgtaaactgaaactgattgacgggaaaagaagaatgatagtttagataactcagaaccaacttaaataaacaattttaatgaccaagggcttaaaggatgaaaatatccaacatcttttaatattgtatgtacctttcagtagaatttttatattgatgaatgctaacaaaactcattntttaacttgatggaatccttactat

SEQ ID NO: 1482 - DNA, 442 bp, Glycine max
tcgtggcactttgccaagaccttttaaaggactgtcggctcataactctggatctcaatggcaaccaattattagaaggttttttgccagaatctttgtccaattgcattgatctggaggttttagatcttggaaacaatcaaataaaggatgtgtttccccattggcttcaaactctaccagaattgaaagtattggttgtgcgagccaacaagttgtacggtcccattgccggtttaaagatcaagcatggatttccctgtttagtcatctttgatgtctcttccaacaacttcagcggcccaataccaaaagcctacatacaaaaatttgaagcgatgaagaacgttgttatagataccgatcagcagtacatggaaatttctatttttgaatataataacatgtacagtgattctgtgattataacaacaaaagcaat

SEQ ID NO: 1483 - DNA, 444 bp, Glycine max
actcagctaataattatttggtaaaaaaaacatctacaatcagtcaaggagataagaaaaacatcatcctaaaaagtattatatcctaatatgtcccttccaacccttcaatccttgtttgatggaccatcaacggtattccaagtagctgattcataaaaaaagaaagcataatgaataccatttttatcttaaattgaaaaggctaagagattagttaaaaagataatatattttattgttgaacctgtgatgggggcggaagtggctataagaccctagacaatcccaaatcgatcattgataaccactgcaaaattaagattaattattacaaaaacagaggcaaatttaaagtatagataaaagaccaacaaatatgtcataagggttatcaaacaaaaaacttgaataggctatcgtattggagaaatagttagcatt

SEQ ID NO: 1484 - DNA, 338 bp, Glycine max
actcagcttaacatcagaccacttgcgggtgcaggaactacttcacatggacttgatggggcctatgcaagttgaaagcctttgaggaaagaagtatgcctatggtgatgtggatgattgctccaaatttacctgggtcaactttatcatagagaaatcacacacctttgaagtattcaaggaggtgagtctaagacttcgaagagaaaaagactgtgtcgtcaagagaatcaagagtgaccatggctgagagtttgaaaacagcaagtctactgaattctgcacatcttaaggcatcactcatgagttctctgcagacattacaccacaacagaatg

SEQ ID NO: 1485 - DNA, 399 bp, Glycine max
  unsure (1)..(399): unsure at all n locations
actatagaaactcagcttaacattcaattntgagggtctcgatagattacgggactcaatcagacatccgagaaaaaagttattgtcgtttgaatttgctcagagcatcaacattcaatttcgagcgtgtcgatatattacgggactcagtcagacatccgagttaaaagttattgtcggtcgaatttgctccgacgatcaacattcaatttcgagcgtactgatataatacgggactcaatcagacatcctagtaaaaagtggttgtcgtttgaatttgctcagagcttcaccattcaattttgagcgtctagatgtattacgggactcaatcagacatccgagtaaaaagttattgtccggtgaattagctcagagctttcacattcagtttcgagc

SEQ ID NO: 1486 - DNA, 434 bp, Glycine max
  unsure (1)..(434): unsure at all n locations
tgtcaaagagggaagcaagttagaaactctnttcaaagcaagaacattgtttctacttcgaaaccccttgaactacttcacactgatttatttggtccctctagaactatgagtttgggttgtaattactatggcttagttatagtagatgattactcaacgttcacatggactttgtttttgaaaacaaaaaatgaagcttttgatgcttttcgcanacttgccaaggtgattcaaaatgaaataggtcttaacattgtttcacttagaagtgatcatgaaggtgaatttcaaaatgagtcttttgaaatattttgtgaagaaaatggaatttaccacaatttttctgccccaagaacaccccaacaaaatggtgttgtggagaggagaaatagatcccttgaagaaggtgcaagaacccttctaaatgaaac

SEQ ID NO: 1487 - DNA, 425 bp, Glycine max
tgtgttctcccttgtagaactactaactgcagtaacagttgcggcccaactatccggtggtgatgactatagaatcaatgccttcacctcatcctcaaatttaatctgcacagattccaattgggcaagaatagtattaaactcattaatatgatcagtgacagagataccttgtcccatcttgaggatgaaaacccggcgcgtcaagtatactttgttggctgctgacggcttctcgtacgtatctgataatgccttcattaagcctgcagtagtcttctcgttcacgatgttgaacgcgaggtgcttggctaatgtcgatctgatcacgccaagagcttgtcgatctagcaagatccattcttatggcttcatgtcctctggcttaacccctgataagggctgatacagcttcttgtgatata

SEQ ID NO: 1488 - DNA, 417 bp, Glycine max
  unsure (1)..(417): unsure at all n locations
tagcttcaccataaaaaatggtgtcatccgctttctgttcgatgctgatcggcacataattagcaccaaccagatagcctttgaatagattattctcctcagccctgctcataacccaatcaaaccttctgcgagagataaacaagaggcgactaaggatccccttggcgaatgcccttttgagggataaaatcagaattcggacttcattcccaaaacagaaatagaggcggatatgacacatcctttcatccacttaacccagtgcggactataacctgttctccccagcatataaaacanaatagctccagataccgaatcatatgccttttcaaagtcaaccttgaacactangcatgatcgattgcttctcttatcggcatcaataaccctatttgctatgactacactatg

SEQ ID NO: 1489 - DNA, 438 bp, Glycine max
  unsure (1)..(438): unsure at all n locations
ntgcacgaagttacttggtaaaactatggcacatgttttcgggtagaattgagacttgtgaatgtaatgcaatttctgtaatgatattgataagtagggcctattagagtaggaaggccattatagcatgtttgcccgagtaccagtatattgagttattttctctaaccaacatgtattatgcattttgttaggatggacccaaagaggtccaaaagaaggatgtttaagtggctcaaagattataaaagataatgttttttatttataaattatagttctttatttaatttatattaaaataacatgatgttgagacttggataattattatccattgattaaatgtcccttagattatatatgtatattcatctttacctattatcatttattaatgaaatatcaagtttatcttattctctgtatagctgtatg

SEQ ID NO: 1490 - DNA, 436 bp, Glycine max
  unsure (1)..(436): unsure at all n locations
agctattgttgaataaatcgactcccatattgatccgcactaccaatgataataaaataatcaaatttaattcttcagggtgacagcatataatgaccaatagcaaacaatatacctgaattcaacaacatgacccgcaatttcagagagctcaaaacactttgttttattggttttaaactcttccaacagagaagaagcaaaactttcatcaatgttcccagtatctgcatgccaaggtcccatgaccccggccaaattcctcattccagaagcaaaacgcatattcagttcattgtgcctaacaggacttgcagatccaactggngaagtggatacaacagagtttgccattggacttcctgggtaagacatcccgacaccatatgcaggatttccataataaccatgaggagtggagctgcctgattaccac

SEQ ID NO: 1491 - DNA, 417 bp, Glycine max
  unsure (1)..(417): unsure at all n locations
agcttatgctgcanatatttacaatagacctcctcaacctcagcagcaaaatcaaccacagcagagcaattatgacctttccagcaacagatacaaccctggatggaggaatcaccctaacctcagatggtccagccctctgcaacaacaacaaaagcctgctccttccttccaaaatgctgctggcccaagcagaccatacattcctccaccaatccaacaacagcaacaaccccagaaacagccaacagttgaggcccctccacaaccttccctcgaagaacttgtgaggcaaatgactatgcagaacatgcagtttcagcaagagaccagagcctccattcagagcttaaccaatcagatgggacaattagctacccaattgaatcaacaacagtcccagaattctgacaagct

SEQ ID NO: 1492 - DNA, 461 bp, Glycine max
  unsure (1)..(461): unsure at all n locations
tgttgatttcttcaggatgatcaacacaatattgcatttgctgcttcaattttggcctgcagatttcacaaataatacatttactatgcttatttggtaggtttaaattttcatttttttaagggaggtataattttttattaaaagtcattgtatttttttagaattttattttatgtgaggtcaacttaagttttttattttacacaaatgtaatttattttattgccatattatccaattcattaatttgatttagcaacacactgaatttctataagtgttaatatttagcaacatattctctagcacatcttttatatcacacattctattatagattaaaatttattacaaactaaaaaattaacagagaaataactcattaaataagaagtgagactaacaaaaattgtgattnntaataaattctaatcaatctttaataatatatttaaatg

SEQ ID NO: 1493 - DNA, 400 bp, Glycine max
tgaatcggacatccgtgtgaaaagttatgaccatttgaatttctcaagagcttccgtagttcaatttcgagcttctcgacatattatgcgcccgaatcggacatacgtgtgaaaagttatgaccatttgaatatctcgagagcttccgatgatgaatttcgagcgtatcgatatattatacgcctgaatcggacatccgtgtgaaaagttatgaccatttgaatgtctcaagagcttccattgatcaatttctagactctcgacatattatgcgcccgaatcggacattcgtgtgaaaagttatgaccatgtgaatttctcgagagctttcgttgtgcattatgagcggttctatattttatacgccacaatctgacattccagtgaaaaggtattaaca

SEQ ID NO: 1494 - DNA, 380 bp, Glycine max
  unsure (1)..(380): unsure at all n locations
agcttgccgccacggagtttttcgactatgctcttgtgtggnggaacaagctacaaaaggagagagcaagaaatgaagagccaatggttgatacatggacggagatganaaagatcatgaggaagcggtatgtgccggctagttactcaagggacttgaaattcaagctccaaaaactaacccaaggcaacaagggggttgaggagtatttcaaggaaatggatgtgctcatgattcaagcaaatattgaagaagatgaggaggtaactatggctcgatttcttaatggtttgactaatgatatccgtgatattgttgagctgcangagtttgttgaaatggatgatttgcttcacaaagcaatccaagtggagcaacaa

SEQ ID NO: 1495 - DNA, 458 bp, Glycine max
  unsure (1)..(458): unsure at all n locations
ngagaagttgcatcaacaagctgaccagataatgcataacattatcaatgagcatagagaggctaagtcaagtgccacaggagaccagggagaggaggaagttcttttagatgtgctcttgaagaaggagtttggcttaagtgatgaaagtatcaaggctgtgatctgggtaaggatagacattttccaccaattttattgcatgatagaaaaatggagaaaagtatgctttactgccttcacactttagtttcaaaaactattttgtattttctaaaatgattagtaatcattttgtcattcaaaatttaataggttttgcaaattgctttgaatataagtgtttaaaaagaaaagaaaaatataaacagttaaggacatattttctcatcctctttctgtaagtgctttattcaagtatctagaaggcaaacttttaaaaattagaaatgtgatat

SEQ ID NO: 1496 - DNA, 354 bp, Glycine max
agcttgaaattgaacaacggaagctctcgatttaatcgagtggtcataaattttcacacagatgtccgattcggggaaataatatatcgagacgcacgatattgaacaacggaagctctcgagaaatttgaatggtcattacatttcactcggatgttcgatccggcgacataatttatcgagacgctcgaaattgaacaaccgaagctcttgacaaattataatggtcgtaacttttcacgcgaatgttcgaattcgggacataactcatctagacgctcgaaattgaacaacggaagctctcgacaaatttgaatggtcataatgtttcacacggatgtccgatctcggaac

SEQ ID NO: 1497 - DNA, 451 bp, Glycine max
  unsure (1)..(451): unsure at all n locations
agcttcgacaccctaatgttgttcaatttcttggagctgttactgacagaaagcctcttatgttaattactgagtatctgagaggagtatgtgaatgcatataactagacacctaggttctgatgctctgaacttatgcaatcttatgctntaagattaaactctactaaatctctatttcatgcccatttttagggtgatcttcataagtacctcaaggacaaaggtgcacttagntccttcaacagccatcaatttggcttggatattgctaggtatggtgtgtcataccttaagtttcctttatntttctttntaaaatttttataaagagaacaaacagaaaaccacanaacangagaatcattaacccatagatctcttcaacctctccatanatctggtatatanatataaaccactcctaaataattctcacacgtcagttact

SEQ ID NO: 1498 - DNA, 448 bp, Glycine max
  unsure (1)..(448): unsure at all n locations
agctngaaggggtgtaacccatcattctctatagtagaacagccggaacgngtctactatcattattatcatctccctctccatcattggagatgctacttgagctgctaggtcccttcacctctgggcatattccttgaacaactcatgctccttcttgcacatgttttgcaattgcactctatctagagccatgtccgagttgtattgatactgcctgatgaaggcagccattaagtcttgttaagaatggactcgggaaggttccagaatagtataccaggtgacgactgccccaataagagtttcctggaagaaatgcatcaacaatttttcatttttcgagtatgcccccattntccctactgtacatttcaggtgattcttggggcatgtagtccccttgacttatcaanatctgcaccttgaacttcggagggataacgat

SEQ ID NO: 1499 - DNA, 394 bp, Glycine max
tgcgggagtttgtgatagcgattatgacgttgatgttgatgatagaaaagcactaccggatttgtattgtttatgggcgaatgagttattacatggagatctaagaagcaaggcattgtgacactttctacttgtgaagccaagaatgtagctgcaacttcttgcacatgtcatgccatttggctaataagaatgttggaggaacttcagttgttgcataaggaaagcacaaagatctatgttgataatagatctgcataagagcttgccaagaatccggtgttccatgaacgaagtaagcatatagatacaaggcgatcattcattagagagtgcaataccacgacagaacgagaactgacttatgtgaaaactcacgatcaagttgcggata

SEQ ID NO: 1500 - DNA, 366 bp, Glycine max
  unsure (1)..(366): unsure at all n locations
agcttgtgcctcttcacatctgaaatatgaatgtagcatatagatccaaagacccttaggtgttntgctgatggcttcttccccgtccaagcttcaattggagtcttgtcttttacagacttagttggacatctgttgagtatgtaaacagcagtgtagactgcttcagcccagaatgtcttaggtagtcccttctccttgagcatcgatctagccatttccataattttgaaattctttctctcggacactccattntgttgaggagaatatgcgactgtaagttgtcgctcaatgccttcatcctcacaaaatctttcaaactcgcgagaggtgtactctntgccgcgatcacttcttagtact

SEQ ID NO: 1501 - DNA, 461 bp, Glycine max
tgtaatcgattacacacatactgtaatcgattaccagaggatgtttttataagacattctcaacagtcacatctttgtatctggttcttaagtggccatcataggcttatatatatgtgactagagacacgaatttgaaaaaagtttttcagaacaaaaaaggtcttatcctcttaaaaagcaaaatcgttttatcctcttacaaattccttgtccaaaacacttgtgattcaataaggaattatttgagtgctcaaattgttcaatttatctctttcaagagagatgtcttcttctcttcttcttcattctgaaaagggattaagagaccgatggtctcttgttgtgaaaggattctaaacacaaaggaaggattgtccttgcgtgtttagaatttgtaaaaggactttacaagataatggaactctcaagcgggtgcttgtggactggacgtacgcaca

SEQ ID NO: 1502 - DNA, 468 bp, Glycine max
  unsure (1)..(468): unsure at all n locations
ntaggcaaattcaaacgacaataactttttactcggatgtctaattgagtcccgtaatatatcgagacgctcgaaattgaatgttgaacctatgagccaattcaaacgacaataactttttactcggatgtctgattgagtcccataatatatcgagacgctcgaaattgaatgttgaacctctgagccaattcaaacgacaataactttttactcggatgtccgattcagtggtgtaatatatcgggacgctcgaaattgaatgttgaacttctgagccaattcaaacgacaataactttttactcggatgtatgattgagtcccgaaatatatcgagacgctcgaaattgaatgttgaacctctgagccaattcaaacgacaataactctttactcggatgtccgattcattgacgtaatatatcgcgacgctcgaagatgaatgtcgaacctatgagccaattca

SEQ ID NO: 1503 - DNA, 395 bp, Glycine max
  unsure (1)..(395): unsure at all n locations
atcctcagagacacctgaggcatgcaagcttcaacattcaaattcgagcgtctcgttatattatattatctagtcagacatccgagaaaaaagttattgacgtttgaatttgctcagagcttcaacattcaatttcgagcgtgtcgctatattacgggactatatcagacatccgagtaaaaagatattgtcgtttgaatttgctcagagcttcaacattcaatttcgagcgtgtcgatatattacgggactcaatcagacatccgagtaaaatgttattgtcgnttgaacttgctcagagcttcaacattcaagttcgagcgtctcgtatattatacgactcaatcacacatccgagtaaaaagttattgtcatttgaatttgctctgagcttc

SEQ ID NO: 1504 - DNA, 439 bp, Glycine max
  unsure (1)..(439): unsure at all n locations
acccgggattcttagagtcacctgccgcatgcaagcttatggtaatcangagttagttcctctctcttaaggaaaaactcaacattattntcattggatttacataatgaanaattgtcctaatgataaggttgatcacttcaaggctcatctagttactaatggtttcactcacgtttatggtgatagcttttcacttgtcaccaagatgccatttgtttgtctcttccttgccatgactcccatgtgttattgggctctatttaaactagacgttaanaatgtctttctacacaacgaacatggagagaaaatttatatggaacacctcattgtttttaggaggagtctaatttgggttataaacttcattgctctctttatgggttaaagcagtcttcctgtgcttggttccaagggttagtattggtattcaact

SEQ ID NO: 1505 - DNA, 300 bp, Glycine max
cacatactgtgatccatcaccataggattctatcaggaaacattctccacagtcagatcgatatatctggctgttatgtggccatcaaaggcttatatatatgtgactagagacacgagcttgcaataagctatacagaacagaataggtcttatcctgttaaaaagcgatgtcgttctattctcttacgaattccttgcccaaaacacttgagattcagtaaggagttatatgagcgctcaccattgacatggtatctctttcaagagagaagtcgtcatctcttcttcttcactctga

SEQ ID NO: 1506 - DNA, 363 bp, Glycine max
  unsure (1)..(363): unsure at all n locations
agctntggccaaaccccagcagcagttgttttcttagagacttgtcttagcaccttgtctttgagactgaggataattacactgtgtgccttttgcagtagtgctttcttatccccatcagccatcatcttttcaagtttggcttctccatcaagtgcttccaccaggccctgctgaacaagaagagctctcatcttcaatcgccataacccanaatcattntgccctgtgaatttttcaacctcatacttggccgagtccatttcttgaatcgaactcaaaaatcgctccacgctcaccgcaccaatttggtgtgccaagatcagaatttagttcacaaaagagtgagtttcttgtatgaac

SEQ ID NO: 1507 - DNA, 492 bp, Glycine max
  unsure (1)..(492): unsure at all n locations
gcattacggacctatgaaactcagcttagcagcttattgccataattcacaaacctagattccaaataacagcaactcanagtagttattagatagcatggaatatatttcatttttataaaaaataaatactatttaagagaaagttaaggatacaaatataagaggataagatatcacccctaacagagcaaaacaaatgtagttatttgatttagtacataattacatcactgtaagtgatgtatattcacttacgttttagcagcctgcctgcccttaccaattgcagcaccgaaatatctctagaacaattaccaaatgaacaaatcattacaaaaataccacatggaacttccaaaaaggaatatcaattgcatgtgtaattataaagaagtctggaagttgctatcaaatgacaaaaagtagctcacatagganacaccggaaggttcaaccatgtacaactgtggtccatccctgtcataacct

SEQ ID NO: 1508 - DNA, 358 bp, Glycine max
  unsure (1)..(358): unsure at all n locations
agccttctacttattaattatcataatttagtttanaaataaccaagtagagaataatatataaattatatatttttatggaattatttntgtgaaataaatttataagttatagattcaaatgtatgtctcttttcgtatattaaaaaaataatatctatctatactattataattcanaattaatttgattattcaatatacaaattcaataagtattntatcaattatttgaactatcaattaagtaaactaacacatantttgaaattactaatattattatttttctattntactcctannatttaaactcantttttttatggtcttcgtattaatcctataatatagaatc

SEQ ID NO: 1509 - DNA, 455 bp, Glycine max
gagtttctgatgaattcttttaccactgattgatgtctatgggatctaagtttcagaaagacccattctccaacttcaaaacacaagtccctcctcttcttgttagcataccttgtcatttgttcctgagctatgagcaagacgtgagttgagttgaatcaaagcctcatctctttcactcgactccaatgccgcagcagcaaccttagtctcattatacagaaatctcaacaatgcaagaggttgcctcccatataccacctccaacggagtcatcccaatagacacatgataggaagtgttgtgccaaactcaggccaagggacccacaatgaccaagtctatggatgatcataagcagagcaccgtagataactatccagacacctggctaccacctgcgtttgaccatctgtgtccggatgatatgctgaactcattgtcagcttattacc

SEQ ID NO: 1510 - DNA, 465 bp, Glycine max
cctgagattgagagaaaatgattattaaacacaaaatggaagtactaagtatttattacctatacttaatagaaaatacttataacactacaaaataaccataaattggaagagtttgatacaatttacacaagttttatacacaaaagttagtcgtattcatcgactaacaggtggaagaatgcgttgaataatagcactatagttaccttccacaacaattatgtcactatggatgtacaagttcttcttggttaacatatccttcaaaaatttggcatagaagggcatttgctgaagtgcttctccaaaaggcaaggtaatttccagtttcttgaagataccaagaaatctagccaaatgtcactctttatcttttcatgagggtaccaattgataaggtacctccttgcattcaataggaggagcctctttcttcttttctatgttagcctcactcttacc

SEQ ID NO: 1511 - DNA, 460 bp, Glycine max
gcttaatggctcaatgagcaaggggaaatgatagtcaatcaacatgtaaacatacccttttctataggagactactatgatgacgttttatatgatataatccttatggatgcagggaacattttgttgggtagaccatggcaatttaacaagaaagacatccacaatggtctcaccaatgaaataaccctcacccatgtaagcaaaaagctcaaacttgttcccttgacaccttcacaagtggttggggatcaagtacaaataaaactcaaatgggatgaggaaaataataaaataaagactagaagaacaacctttaatggttaaggaggagtgtaaggaggtaggtgtctcctccaataggttagctaagaagaaaagtcattctgcaataaagacaaacattaaagacactttccttcttagacaacctccacatattctcctttgtaaaggacac

SEQ ID NO: 1512 - DNA, 379 bp, Glycine max
  unsure (1)..(379): unsure at all n locations
agcttctggtgggacatcttgacttgctntccaatctgacattcaccacagattctgccttcttctattntcagattgngaatgcctctaacagcacctttgtcaatgattntcttcatgcctcttaagtgcagatgtccaaatctttgatgccatattctgacttcatcttctttggaggatagacatgtggaggagtaactggtttcttgaggtgtccataggtaacagttgtcctttgatctgctgcccttcattagaacttcactcttctcatttgtcaccaagcattctgactttgtgaagtttacattgaatccttcatcacacagctgactgatgttgatcaaagttgcagtcagtcccttcaccagcagta

SEQ ID NO: 1513 - DNA, 393 bp, Glycine max
  unsure (1)..(393): unsure at all n locations
agctaagtctatgatgtacttcccttcggtctgtatgactatagatatgaactgcgacgctgtcaacttnttagaatgacaaatcaagggatacaaatcacttttgcccgtggttattgaatatttatctgattttcagtgtccatgccccctacatctcattttacagatagtatataaccttttttttttctttttatcacattctgcatatgtaccatagaagatgatttcctgtgtatgatcaacgaccctgcaacaatttaaaaaccccttactgtacttgtttttaaataggagcatttaatgattgctacttttctactaacacacttatttaaatcagtttttacaacatgattaattttaaataaacttactgcttcatatcat

SEQ ID NO: 1514 - DNA, 406 bp, Glycine max
cgcgactatgaattggaaggctcttgaggcaattcaccattgttaactgcctcacaatagatctgctggcatgaaaaaaaatagagtacgcatttcactaggaaaacttcagcatgcactgcagcattctatagacaaatctcgtacaaacgtaagttattaagcttatatatctcacattgagcattccttgactatatgaatgtccaaagagaaaaacatatgccaaagggtgtatatcattttactcacttcatgtttgcctgtgtcaatgccattgcaagatgctagaaagaagtacgagttagggtcccttgctaatgaactctgtattctggatacaggctcagcaacagttctgaattccagtgttccaacaccagttgaagctattaaaggagtaaag

SEQ ID NO: 1515 - DNA, 431 bp, Glycine max
  unsure (1)..(431): unsure at all n locations
agcttctggtgggacatcttgacttgctntccaatctgacattcaccacagattctgccttcttctattntcagattgggaatgcctctaacagcacctttgtcaatgattntcttcatgcctcttaagtgcagatgtccaaatctttgatgccatattctgacttcatcttctttggaggatagacatgtggaggagtaactggtttcttgaggtgtccataggtaacagntgtcctttgatctgctgcccttcattagaacttcactcttctcatttgtcaccaagcattctgactttgtgaagtttacattgaatccttcatcacacagctgactgatgctgatcaagtttgcagtcagtcccttcaccagcagtactttgttcagactangaangtcatcatgaactagctttccatgccaatgatc

SEQ ID NO: 1516 - DNA, 260 bp, Glycine max
  unsure (1)..(260): unsure at all n locations
agctnttcaatcaatctttggctagctacattagtgcaactacccncatcaataatcaaagagcatattttccccatgatcatgcacctagtatgaaaagagttcttcctttgagtttcatctctatcctttcatgcactccccattaacctcctaaccatcanaagattaccttccaggggttgtgcatcacattcactttcactctcactagaagaactagaagagctagaagaagatgcactagtgatatccccatt

SEQ ID NO: 1517 - DNA, 346 bp, Glycine max
agcttctatgttcaatatcgagcgtttcaattaattatgtgcctgaatcggacatccgagtgaaaagttacgaccatctgaatttcttgagaacttctatttttcaagctcaagcgcctttatatatcatgggcctcaatcgtatatccatctcaaaagttatggtcgtctgaattggacaagagctttcgtgttgaatttcgagcgtctcgatatattgtggacctgaatcggacatccgagtaatattttatgaccatatgaatttccctacaacttacagtattatataaggagcgtctctgtatatcatgggactcaatgcgacattcatgttaaaagttat

SEQ ID NO: 1518 - DNA, 259 bp, Glycine max
  unsure (1)..(259): unsure at all n locations
cccttcaagtaacgaagaattctttttgcagcttttatatgagaagaggtaggagcctccgtanagcgacacacaactcccaccgcatatagaatatcgggccttgtattggttagataccttanactccccacaagactcttgaagaccgtggagtctaccttctctccttcatcanactttgataacttcaagccaccttccatatgtgtgttcacgggattgcaatcaagcatattaaatttcttcaacacttctt

SEQ ID NO: 1519 - DNA, 459 bp, Glycine max
tgcttctacaacctaagcacacttagtggagaatcctggacttgatcttggattagtgggctaaaccatagctaaatttcactaatcataattagtgaaattttggctccaaatttggctccacaaattcaaattcaagtgaaatttgaatagaaattcaaatttccctccaattttgtgtgacacttaagctataaatggaggccttgtgtgtgcagtttttcaacttgatcatttgagaattacacttcaaagttcatacctcatttgaggcttgaaatttcgtgctccttctctccttctccctccactcatcttctcctaccttcaagctcttatccatggcttcctatggtggtgagcttgttcttgactcatcttctcctttaaagtgacatttccaatcatctttcttacttctccattctgctgccattgatcttcaagaagtaaaggact

SEQ ID NO: 1520 - DNA, 462 bp, Glycine max
tacttatcttatagtttaggtgctttatctgttattggttctattgcttgatgctttgtctggtttaataataccgcttatcctagtgagttttacgggcccactgggccagaagcttctcaagctcaagcatttacttttctagttagagaccaacgtcttggggctaatgtaggatctgctcaaggacctacaggtttaggtaaatatctaatgcgttccccgacaggagaagttatttttgggggagaaactatgcgcttttgggatttgcgtgctccttggttagaacctctaaggggtccgaatggtttagacttgagtagactgaaaaaagatatacaatcttggcaagaacgccgttctgcggaatatatgactcatgctcctttatgttccttaaattccgtgggtggcgtagctacagagattaatgcaggcaattatgtttctactagaaga

SEQ ID NO: 1521 - DNA, 407 bp, Glycine max
  unsure (1)..(407): unsure at all n locations
agcttggtctaaaattcctcgaaaattagctttntatgattatatcggaaataatccagcaaaaggggggttatttagagcacgttcaatggacaatggagatggaatagccgtcggttggttaggacatcctgtctttagagataaagaggggcatgaactttntgtacgtcgtatgcctactttntttgaaacatttccggttgttttggtagatggggatggaattgttagggccgatgttccttttcgaagggcagaatctaaatatagtgtggaacaagtaggtgtaattggtgagttctatggtggcgagcttaatggagtcagttatagcgatcccgctactgtgaaaaatatgctagacgtgctcaattgggtgaaatttttgaataaaatcgtgctac

SEQ ID NO: 1522 - DNA, 399 bp, Glycine max
agcttgttcatatagtttcaacctgaggttctttaaagacttagtaaaaatatcagccaagtgctacgagatctatctttatgtgtttagtatgttcatggaagactaaattagatgcaatgtgaagagagcaacttgattttcacaaataagcttagtgtcttgagtgtctccaaactttaattgttggagaagttgcctaagccatgtaatttcgcatgcaacttctgtcatggtatagtattcaacttcagcgctggatctcgcaactatatttttgcttttgcttctccatgagatcaaattccctccaagcagaacacaatagcctgaggtagaactcctgtccaatcagcactagagtaacaaacaattttgacattgtcttcgtcttcatat

SEQ ID NO: 1523 - DNA, 471 bp, Glycine max
  unsure (1)..(471): unsure at all n locations
tcaagaaaaagatggcctcagcanattccttatttccagaagggaattctatcaatagacctccaatctttaatggagagggttaccactactggaaaacccgaatgcaaatttttatcgaggcaatagatctaaatatctgggaagccattgaaatagggccttatatacccaccacagtagaaagagtttcaatagatggtagttcatcaagtgaaagcataaccatagaaaaacctagagatagatggtctgaagaggatagaaaacgagtacaatacaacctaaaagccaaaaacataataacatctgccctaggaatggatgaatatttcagagtttcaaattgcaagagtgctaaggaaatgtgggacactcttcgattaacacatgaaggaactacagatgttaaaagatctangataaatgcactaactcatgagtatngaatatttagaatgaatacaaatg

SEQ ID NO: 1524 - DNA, 459 bp, Glycine max
  unsure (1)..(459): unsure at all n locations
tctggtgggacatcttgacttgctntccaatctgacattcatcacagattctgccttcttctattttcagattgggaatgcctctaacagcacctttgtcaatgattttcttcatgcctcttaagtgcagatgtccaaatctttgatgccatattctgacttcatcttctttggaggatagacatgtggaggagtagctggtttcttgaggtgtccataggtagcagttgtcctttgatctgctgcccttcattagaacttcactcttctcatttgtcaccaagcattctgactttgtgaggtttacattgaatccttcatcacacagctgactgatgctgatcaagtttgcagtcagtcccttcaccaccagtactttgtccagactatgaagttcatcatgaactagctttcccattccaatgatctntcctttatagccatctccaaatgtcacat

SEQ ID NO: 1525 - DNA, 373 bp, Glycine max
agcttgtaaggcttggatcttcttcatcaatagagtcatttgcttcttgaagatcaatggcagtagaatggagaaggaggaacggtgattggagatgccactttgttagtcatcttatacgactaacttttgtatagaaaacttttacaaaatgtatatattttccccaatttatggttatttttgtaggattctaaataaattttgctttgtttttatctgtgctcagtagaagccttgtgtatggaattaatgtcaatttctcttcaatttcaggcaaaaaggagttattttgaagaagtgctaaagttaatgtctcgctaagcgagctcaatgcgcttagcgagtgtcatcctctaaccaagtcatcaat

SEQ ID NO: 1526 - DNA, 418 bp, Glycine max
  unsure (1)..(418): unsure at all n locations
agctttgagaaaattgaattgacaataactttatacacggatgtccggttgagtattgtaatatatcgagacgctccaaattgaaaacggaagctcgtaagaaattcaaacgacaataactttttactccgatgtccgattgaatcgggtaatatatcgagacgctcaaaattgagactagaagctctgagcaaattgaaatgacaataactttatacacggatgttcggttgagtcccgtaatatatcgagacgctccaaattganaacggaaactcttagaaaattcaaacgacaataactttttactcggatgcccgacatagtgtcataatttatcaagagatgctccatattgaatacggaagctcgtatcanattcaaaccgacaataactcttgactcggatgtatgattg

SEQ ID NO: 1527 - DNA, 394 bp, Glycine max
  unsure (1)..(394): unsure at all n locations
ccttggatcttcttcatcaatggactcctttngcttttgaagatcaatggcagcaaattggagaaggaggaaaggtgattggagatgccacttcaaggagaagatgagtcgagaacaagtttatcaccatatgaagccatagataagagcttgaagattggagaaggtgagtggacggagatggagagaaggggcaaaacatttatgccaaatgaggtctgaactttgaagtgtaatttctcaaatgatcaaagttgaaaaaatacacacataaggcctctatttataacctaagtatcacacaaaattggagggcaatttgactttctattcaaatntcacttgaatttgtggaacccaaattggagccaaaatttcactaattatgattagt

SEQ ID NO: 1528 - DNA, 436 bp, Glycine max
  unsure (1)..(436): unsure at all n locations
agcttcgaatgggcattgtttcatcctagtctccattgattactttactaaatgggttgaaactgcttcatatgctaatgtaactaggaatgtggtggttagattcataaaaaatgagataatttgcatatatgggttgcccagcaaaatcatcgctaacaatgccatcaacctaaataacacgatgatgaaggagttgtgtgaggattttaagattcaacaccataattcgacaccttaccaacccaagattatcaatgtagttgaggccaccaataagaatatcaagaagatcattcaaaagatgatagtgatgtacaaggactatcataagatgttgtcgttctcattgcatggntatcaaacttctgtgtgcacttttactggggcaaacccaatttcgttggtgtatgggatggaagctctccaccctttc

SEQ ID NO: 1529 - DNA, 442 bp, Glycine max
  unsure (1)..(442): unsure at all n locations
agcttattcgaagccccttgaattgattgtctgttcatgcatcctcaaccattgagttcggagccccatgaattgattgcctagcgctgttcgtgcatcctccatcatcaaatcttattcggaacctgatgagttgattgccattcatgcatcctccaccattgagtccggagccttacgaattgactgccaagctctgtttataaatcatctatcatcaaatcttattcgaagccccatgaattgattgccattcatgcatcctccaccattgagtccggagcgccccgaattgactgcctagcgctgttcgtgcatcctccagcatcttattcggagccccaggaattgattgtcgtttatgcatcctacaccattgagtccagagccnncacaattgattgcctagctatattcgtgcatcccacatcatcaaatctta

SEQ ID NO: 1530 - DNA, 445 bp, Glycine max
agcttgcacacaagattctccttggctggcacttcaaaaccttctggttgggtcttatagatgtcttcctctaaatccccatgcaagaatgcagttttaacatctagctgctccaagtaaagattctctgcagcaacaatactcaaaataactctgatggtagtcatctttacaactggaaaggagtctctgtgatatcaattccctgtttctactgaaaccctttcaccacaagtctcgccttgtatcttcttctaccgtcagattcttcctttagcctacagacccacctattttgtaacgctttctttccttctggcaatttagttaaagaccacgtcttattcttctgaagggatgtcatcttatctttcatcgctagcttccactcaatagtgtcattcccctgcatagcctcactgaaacattctggctcaccaacatc

SEQ ID NO: 1531 - DNA, 406 bp, Glycine max
  unsure (1)..(406): unsure at all n locations
tccagatatagcatacatagttagggtattatgcagatatttaagcaatccaagaatggatcattggaaagaaaccaaaagagttatgaggtatttgaagagaacaaagtattatatgctcacatacaaaaggtcaggtcagttggagatcactgggtattctgacttagattntgcagaatacctagatagtttgagatccacttcaggttacattttcatgttagtcggtggtgcggtttcttggcgcagtgccaggcaaacccttactacttcatccactatggcgacaaaatatgtggcatgctatgaggcatcaaatcatggaatatgattgagaaattttgtcacaggttntcaaattgtggaatgaattgaaagaccacttaagttatattgcgacaat

SEQ ID NO: 1532 - DNA, 383 bp, Glycine max
agcttgttggtgagagcaatgtcaagaatgtcaccaacttcagccctaatagttgggcctggaaactgaccgttgattcccatcagaacgtgttccaagcaatctggttttctgatcatgtactccacatcaaacttgtagggtctcactattcctccgattgacaattctaccaaacccaaccatattatgcacccaacaaaaagagctttcaagctcattcttaattaattttgatcagagaaagcctaattagcaatataacaggaaggtatcaagtagtaaaacgaagctattgatgaacaaattgaaagaatatgtatagaggatcgaggatttggattggtggtaccattgccttatatatataagagagagagaga

SEQ ID NO: 1533 - DNA, 345 bp, Glycine max
  unsure (1)..(345): unsure at all n locations
agcttgcttcttttggtgcatagaatgcatgcaaaaaaaaaatagtaagtgtcatgaatctctgacataagcttcaaccaattaacattgtttgtatgacaactgttgtagttggacagcaatcacacagtttgtccaccatggtatgctttatgttcctattggttatagttttagtatgctttatgttcctattggttatagctttggtgctggaatgttcaatttggagtccacaaaaggaggaactccatatggtgttggagttnttgctggagatggtacaagacaagcaagtgaaatggagctggagcttgcacagtatcatggcaagtatatatgaaa

SEQ ID NO: 1534 - DNA, 424 bp, Glycine max
gctcgaagacaagactatacgaggtatcttccttgggtataacaatatctctaagggctaccgtgtctacaacttgcaaactaagaaactcgtcatcagtcgagatgttgaagttgatgagtatgcttcttggaattgggatgaagaaaaagtgaagaagaacgttcttatacccgctcaactacctcaagaagaagctgaggaagaagacccaggtgaaccaccttcacctgcaccataacaacaagatcaaaaactatcatcaccagagtctactccaagactagtaagatctttggtggacatatatgagatcagtaacttggccatacttgaacttggaagctttgaagaagcgtcgaagcatgaagtatgggtcacggcaatggaagaagagatacagatgatcgatacaacaacacat

SEQ ID NO: 1535 - DNA, 439 bp, Glycine max
  unsure (1)..(439): unsure at all n locations
tcaatagcatagcctcgtaagaggacatccaaagntgtcatattgagatgattctctctgtgaagtttgtcagaaagggaaacaagtaaaaagttcttttaaagaaaataaatgttatttccacttcgaggccattaaagcttctacaccttgacttgcttgaaccaaccaggattgcatccctttttggatgcaaatatggtctggtcataatggaatattacactagatggacttgggttaggttcctaacccacaagaatgagtcctttgataccttntataaatnttgtaaaaagattcaaaataaaaaaggcattngtatctctntaatcataagtgatcacagggaagagtttgaaaatgatatntttgaatgaaaagaatggtattcaccatatattttccactganagaataccaaactagaatggagtta

SEQ ID NO: 1536 - DNA, 331 bp, Glycine max
  unsure (1)..(331): unsure at all n locations
taacagactcaggaatgtcanaggttgatgcaatntcacctctcagttaccaaagccagacgctcaataccatcaaaatcagcatgttcaatagccaatattcccgcatcagctaagagctcctctggaaaattgcaaatcaactgtctgttaacaaaacagctgataccatgacctattatcttctgcaccttttctctcattatctctttctctgctgtttcaatttgagcaactctagccatagaatcaacacgaacacgtgcaccatatatcttcactttgtctgtgtccatggcaatgtttgccaccagtatctttgcattctcta

SEQ ID NO: 1537 - DNA, 338 bp, Glycine max
  unsure (1)..(338): unsure at all n locations
agctntgagcaaattcaaacgacattaactttttactcggatgtctgattcagtcccgtaatatatcgagacgcttgaatttgaatgccgaagctctgagcaaattcaaacgacaataactttttagtcggatgtctgatcgagctccgtactatatcgagacgctcgaaatggaataccgaagctctgagcaaattcaaacgacaataaccttttactcggatgtctgattgagacccgtaatatatcgagacgctcgaaatggaattctgaagctctgagcaaattcaaacgacaataacatttacctcagatgtttgattgagctctgaatatat

SEQ ID NO: 1538 - DNA, 432 bp, Glycine max
  unsure (1)..(432): unsure at all n locations
ctgtgtatcattatgggtttagagggccacaaaaagccaccaatgaaggaagaaatagatactttgattcgaagcatatttatttattgaagataatccggacaaaacctttgcacttttcctcacctttttaaattaattactattagaattactattttttattatctaatattatacgagattacgagcttataattactattggctcaaactattgtcaagttatttttttaatccacatttgatattatcttatatatatggntcaactcttaaaaaanaaattgtgtgtactcaactcttgcatatagagatttagtatttcacagggaacaanaattctatattaatatagaaatatataacagaaataaaatatccaaatgtataaagtagcaatttaatcaaatattatcatttcacaaagat

SEQ ID NO: 1539 - DNA, 285 bp, Glycine max
  unsure (1)..(285): unsure at all n locations
agctntagctttgtccccaaggcttcatgtatactggtccaaaatcgcgaagtgaacctcggatccctgtcagatacaatactagaaggaattccatgcaaccttattacttccttgatgtacaactccactagcttctccattctatacttcatattcactgggataaaatgagcagatttggtgagtcgatctactataacccacacagcatcatgtccacgactagtcttgggttaactagatacaaaatccatagatatgctctcccatttccattctgga

SEQ ID NO: 1540 - DNA, 220 bp, Glycine max
  unsure (1)..(220): unsure at all n locations
actaagctttaaataagggcccaaacactgaanagtcgtccatgaatatctcttaatacatttctccaccatgtctgacaaaatggccagcatgcacctctgaaatgcggctggtgcattacataacccaaatggcatctgtctataggcaaagacaccaaaagggcatgtaaaggccatcttctcccgatccttggggtccaccgagatctggttataa

SEQ ID NO: 1541 - DNA, 471 bp, Glycine max
tggaaatgaacaacggaagctctcgagaaaaaaaaatggttataacttatcactcggacgtccgattcaggcgcataaaatatcgagacgctcgaaattgaacaacgaatgctcttgagaaattcaaatggtcataacttgtcacacggaagtccgattcaggcgcataatatatcgagaagctcgaaattgaacaacggaagctcttgagaaactcaaatggtcataacttgtcacacggaagtccgattcaggcgcataatatattgagatgctcgaaattgaacaacaaatgctctcgagaaattcaaatggtcataacttgtcacacggaagtccgattcaggcgcataacatatcgagacgctcgaatatgaacaaccaaagctctcgagaaattcaaatggtcataacttatcacacggacgtccgattcaggcgcataatatatcgagacgctcgaaattgaac

SEQ ID NO: 1542 - DNA, 384 bp, Glycine max
agcttctcgatatattatgcgcctcaatcgtaccttcgtgtgttaagttatgaccatttgagttctggcgtgcttccgtttttcaatttcaagcttctcgatatattatgcgcctgaatcggacttccgtttgaaaagttaggaccatttgaatttctagagagcatttgttgttcaatttcgagcgtgtcgatgtattatgcgcctgaatcggacttccgtgtgacacgttatgaccatatgaatttctagagagctttcgctgttcaatttcgagcatctagatatattatacgcctgaatcggacttccgtgtgacgagttataaccatttgaatctctcgagagcatccgtgtttcatttcaaccttcttgatatattat

SEQ ID NO: 1543 - DNA, 385 bp, Glycine max
aaattggtccaaaacaaaacgtgagccccatagacagcatccaatagatgtcataccttttctgttacatatcgtggtagtgcaattgatgccagattgcacacagcagtctcagttggacttgaatattcaattatctcagtacacaaagctgacgatttaattggacccaaattctggtgattgcttttcctattgcaagtatgctagtagttgtaacaaaaatgctggaattactcatcgggtgagaacaataaatacaaaatctcatgaggaaagtcaaagacatctaagaacaccaccttataaagcatgtacgggggtgcggcttctatctgtgacttcagaatttcgaaccagaggctctgtgcctggacaaccttca

SEQ ID NO: 1544 - DNA, 465 bp, Glycine max
  unsure (1)..(465): unsure at all n locations
ctaagctatgcacccctntnttcaatattaatcaacctgaaatcacacacaatcacaagcaatcaactacactcaatgcaaagaaaacaaaattaaaaataaatgactgggtttcctcccagcaagcacttgtttaacgtcattagcttgacgcatcgctctgttatcctagatcaatcttggttctctctttcagaaccttctcatccaactccttcacctgtaagcacacatcctggtccagcagttctcttccttcattaaatagatcaaagctgatttgttggttttcaagactcatttctaactttttcttccctatgtccaccacacagcttgcaatagacataaatggacgttccataatgacaggaatatttgcatcttcctcaatgttcattacaataaaatcagtaggaaaaataagatgttntactcgaaccanaacgtcttcaatcactccat

SEQ ID NO: 1545 - DNA, 441 bp, Glycine max
  unsure (1)..(441): unsure at all n locations
agcttgctaacccatggaagctcctaatatctcccacacttttttaggtgggccattcttggatggccttgattttctcagggtccacttggaccccatttctaccaactacaaaccctaagaaaactatattatctacacaaaaagtacacttctctatatttgcatagagggtgtttttcctaaggactgaaagaacttgcctgagatgtcctaagtgatcatctaggctcctactgtatactaaaatatcatcaaaataaacaactacaaatatacctatgaaatcccttaagacatgatgcataagcctcataaaggtgcttggtgcattagtgagcccaaaaggcatcactagccattcatacaaaccaaacttggtcttgaaagcggttntccactcatcaccctttttcatcttgatgtggtgatacccacttt

SEQ ID NO: 1546 - DNA, 292 bp, Glycine max
  unsure (1)..(292): unsure at all n locations
tctatagaaaggtcattcctaatttctctacaattgcatcacctctcaatgagctagtgaagaagaatgtggcatttacctggggtgaaaaacaagagcaagcctttgctttgctcaaagaaaagcttactaaggcacctgttctagctcttcctgacttttctaaaacttttgagctagaatgtgatgcctctggagtgggagttggagctgttttgttgcaaggtgggcaccctattgcttattttagtgaanaacttcatggtgccacccttaactaccccacctatga

SEQ ID NO: 1547 - DNA, 452 bp, Glycine max
  unsure (1)..(452): unsure at all n locations
tcaattataagaacttgaggagatatgcttagaagcctatgagaactccaagatttacaaggagaaactgaagaggtttcatgactctaagattcttaagaaggagatccatattggccaaaaagtgatcttgtataactctcgcttcaagcttaattttggtaaacttcgatctatatgggatggacctttttttattactaatgttntccccatggcacaattgagattaaaaatgaagttattagcaaagtcttcaaagtgaacggtcaccaactcaagctttttcatgagagccccaagtggtggagcagtttgtggcggacctctctttgatcttgccaactttatgtgatgatgtcccttgaatggaactngangagtttccatccccttcttttgtatgttgtcacttttgttgcctttcattgcatgctcacattgagaacaat

SEQ ID NO: 1548 - DNA, 455 bp, Glycine max
  unsure (1)..(455): unsure at all n locations
ntgatgatgttgagaagaaatcacatgtttgtcatcatcattaagggagagaatgtgaatgtatgtacacatgattttgatgatgtcaaaagaagaatcaaacaaggctcatttgcatcaagattaatacaagattgtttcaacaaacaaagccttgattcaagatttcttcaagatcaagccttgcctcaaaatgaaagatttcaagtcatccaaggcacatgtaatcgattaccaagacacatgtagtcgattaccaatggtttgaaagtgtgtaatcgattacacatcatatgtaatcgattaccagagactttgaacgttgggaattcaaatattaaatgaagagtcacaattgttcaagaaaaataactgtgtaatcgattacactaatgttgtaatcaattaccagagagggatttcaaggaatatcgccaacaatcacatcttatcat

SEQ ID NO: 1549 - DNA, 450 bp, Glycine max
  unsure (1)..(450): unsure at all n locations
agctntaaacttcattgcatccagccactttctcttttcttcattatccatggcctctctaaatcactcaggttctccatcatctgttaggatcacatactcattaggagaatacctcttagaaggttgtctctccctgttggactttctgagttgaacttgaggtggttcggtggcatcaccaagattttcatcttgtgacatgtcatgctcctcttcatcatcatcatcaacatgaacatctacctcatctccaggttgttggacactaacatcattcttaactttagtattcagattctgaataggcgattgaactggttgaaaatcagccacaccattgtcttccttgggtgtaaacttatccaccttatcaatgtcttcaatggtttggtcttccatgaatttcacatcatggcttctaacaagcttcttctcaataggatcata

SEQ ID NO: 1550 - DNA, 362 bp, Glycine max
atgagccaattcaaacgacaataactttttactcggatatctgattgagtcccgtaatatatcgagaccctcgaaattgaatgttgaagctcttagcaaattcaaacgtcaataagtatttactcggatgtctgattgtgtcccgtcatatatcgagacactcgaaattgaatgttgaagctctgagccaattcagacgacaataactttttactcggatgtctgattgagtcccgtaatatatcgagacactcgaaattgaatgttgaacctctgagccaattgaaacgacaataactttttactccgatgtctgattgagtcccgtcatatattgagacgctcgaaattgaatgttgagc

SEQ ID NO: 1551 - DNA, 412 bp, Glycine max
  unsure (1)..(412): unsure at all n locations
agcttanacattcaatttctaggctctcgatatattacgggacttaatcaagcatccaagaaaaaatttattgtcgtttgaatttgctcagagattcaacattcaatttcgagcgtctcgatatattacgggactcaatcagacatccgagtaaaaagttattgtcgtttgaattggctccgagcttcaacattcaatttcgagcgtctcgatatgttacgagactcaatcagacatccgagtaaaaagctattgtcgtttgaatttgctcagagattcaacattgaatttcgagggtctcgatatcttacgggactcaatcagacatccgagtgaatagttattgtcgtttgaattggctcagagcttcaacattcaagttcgagggtctcgatatattacgggactcaat

SEQ ID NO: 1552 - DNA, 429 bp, Glycine max
tgagattgaacaacagaagctctcgatatattcaaatggtcataacttgtcacacgaagtccgattcaggcgcataatatatcgagaagcttgaaattgaacaacagaagctctcgagaaattcaaatggtcataacttgtcacacggaagtccgattcaggcgcataatatatcgagacgctcgaaattgaacaacggatgcactcaagaaattcaaatggtcataacttatcacacggaagttcgattcagacgcataatatatcgagaagctcgaaattgaacaacggaagctgtcgataaattcaaatggtcataacttatcacacggaagtccgattcaggtgcataatatatcgagaagcttggaattgaacaacggaagccgtcgagaaattcaaatggtcataacttatgacacagatgtc

SEQ ID NO: 1553 - DNA, 396 bp, Glycine max
agcttgaaattgaacaacttaagctctcgatatactcaaatggtcataacttatcacacgaacgtccgattcacgcgcataatatatcgagacactccaaattgaacaacgtagggtcttgagaaattcaaatgttcataacttgtcacacgaaagttcaattcaggcacataatacatcgagaagctcaaaattgagcaacgaatgctctcgtgaaattcacatggtcataacttgtcacacggaagtctgattcatgcgcataatatatcgagacgctcgaaattgaacaaccaaagctctcgagatattcaaatggtcataacgtgttacacggaagtccgattctgggccataatatatcgagaagctgaaattgacaacgacgctctctag

SEQ ID NO: 1554 - DNA, 377 bp, Glycine max
  unsure (1)..(377): unsure at all n locations
agcttagcagncacttgttgtcctccatcgttatcctgatcaccgtgaaagtcctcaacaaccactctgtcatgcaccttatacagagcatcctgagccggagacacataattgcctccaccctcaacagcattagtctcatcactgagaccataaatagtaacaacgcgctcttcgcaccccggcacagtctcaccaatcctaatcttagccttagtctccaccctcagttgcttaacaatctcacctcccctaccaataacactgccaatctttcgacccgggcacacataacgatacacggtatcctccgaatcaatcacaaactgctctctatcatcaccatgattcctccttttaattggcccattatcatg

SEQ ID NO: 1555 - DNA, 378 bp, Glycine max
agctttggccaaaccccagcagcagttgtttccttagagacttgccttagcaccttgtctttgagactgaggataattacactgtgtgccttttgcagtagtgctttcttatccccatcagccatcatcttttcaagtttggcttctccatcaagtgcttccaccaggccctgctgaacaagaagagctctcatcttcaatcgccataacccaaaatcattttgccctgtgaatttttcaacctcatacttggccgagtccatttcttgaatcgaactcaaaaatcgctccacgctcaccgcaccaatttgttgtgccaagatcagattttagttcacaaaagaatgagtttcttgtatgaacaagaataagcaaaat

SEQ ID NO: 1556 - DNA, 449 bp, Glycine max
  unsure (1)..(449): unsure at all n locations
tgcacacaagcaagtcccatttgattaagatcagtaccaaatattgcagatttcttctccccagtagcacgaagcttcgacacagcattcttgaaagtattgtaagattcagtgtagttctccaacacgtagtacatgactcccatctgagcttcaataccagctattgtgttttgctgaccagaggcttcattaagtatctctagtgccttgtgaagtaacttaagtgcctgttctagctcattcattgactcataaatggctgagacattcataaaaccactagcaacctcctctggagggaccccaggcatgggattctcatagatnntaagtgcactctcacaatatgattttgattcccttatcttccatgtcctgcaatacaagtcagcaaggcgtacaaagactgatcccacagaaggatgattctcacctttgtgagtcct

SEQ ID NO: 1557 - DNA, 432 bp, Glycine max
  unsure (1)..(432): unsure at all n locations
agcttttgcctcanaacgcattgtttccaacatccaaggctctggtaatcgattaccagaagagaattttgaagcaaagggtttaaaaagggttttgaatttgaattttgagtcatgtaatcgattactagatgtttataatcgattaccagtaatgacactttagaaaacactttggaaagacatgacccttcaaaatataattgtgtaattgattaccagaaatctgtaatcgattaccagtgaataattttagaaaaatctttttgaaaagacacatctcttcaaaccattttgaaaaggcacgaagggcctatatatatgtgtgtctgacttagaaaagcaagagagagatattctaagagaacataattgccaaattctctctcaacaactcctgggcaaacacttganaatctattgataattcat

SEQ ID NO: 1558 - DNA, 354 bp, Glycine max
  unsure (1)..(354): unsure at all n locations
agcttacagctttgtcgagctattctgctattgcacagatatgtatatctatatccaaacgcgatatataggaacatgaaatacaacttagcaggattaacttaagtataataacatgttcttttacttttatataattagaaattattttgtacatcgattaataattacttataaatacagataaaatataccaaaatatagatttgaaaagcattttaagaaaatactagcttatttactaaacatatgtgagaagatccataattacatgagaagagtatttntcactctcaagaacatgaagagacggacttattaaatagataaacaagttttaatatatctatgttg

SEQ ID NO: 1559 - DNA, 461 bp, Glycine max
  unsure (1)..(461): unsure at all n locations
gactcttcggctggccgattgctgaatcataatcagctgccggaataagtaggcaccaccattcaataccattatagagaatcaaataatatatatatcatcagaataaaattaaatattttttattgataggaattgtatatgagtattaagaaatttataagacttccgcaccatacttaactaagttataagaaaacctattggatgctttttttttggtgataggaaatctgatgttgaagtttagatgaaaaaaagtaaaactttctcatattatcggctaggaaatttaatggtttaaattgtaataaatgacgacatacaagaacataaataataaaaaacattgcaaaaattatatcatacgctgagataattaaatntgttgagataactaatanaacatagattattccaaaatacacacattgctaagaatattatatgctaatagaaaa

SEQ ID NO: 1560 - DNA, 345 bp, Glycine max
agctttcgttttcaattacgagcgactcgatatcctacgggactcaatcggacatccgagtgaaaagttattgtcgtttgaatttactcagagcttccgttttaaattacgagcgtctcgatattctacgggacacaatcggacattcgagtcaaaagttattgtcgtttgaatttgcttagagctttagttctcattttcgagcgtcttgatatattacagggctcgatcagacatccgagttaaaagctattgctgttagagttttctcagagcatttggtttgaattacgagcgcctcgatatcctacgggacacaatcggacatccgagataaatgtattg

SEQ ID NO: 1561 - DNA, 394 bp, Glycine max
tggatttcctgttgtatggaatctttccttcctaagatggagccaaacccagtccccctcattaagaactagctcatttcttcctctattgcccttaattgaatacacctttgtttggttctctatttgggtcttaaccctctcatgcaacttctttacaaactctgacctagattccccttctttatgtataaaagaagtgtcaagtgggaggggaatgatgtctaagggtgttaagggattgaacccatagacaacctcaaaaggggattgcttggtggttctatgaacccctctattgaggcaaattctacatgaggaagatactcatcccaagacttatggttgccttttagaagagcccttataagagtggatgaagacctattcacta

SEQ ID NO: 1562 - DNA, 352 bp, Glycine max
agctttgagataattcaaacgacattaaattttttcttggatctccgattgtgtcctgcagtatatcgacatgcttgaaattaaaagcagacgctatgagcaaaatcaaacgacaataatttttaattcggatgtccgattgagtcgtgtaatatatcgagacgctcgaaactgaaaacagaagctctgtgcaaattcaaacgacaataactttttactcggatgttcgattgtgtcccgtggtatatcgagacgctcgtaactgagaacatatgctcgtagcaaattcaaatgacacataactttaactcagatgccgattgattcccgtaatatatcgagacactcaaaa

SEQ ID NO: 1563 - DNA, 222 bp, Glycine max
  unsure (1)..(222): unsure at all n locations
agcttgctaacccatggaagctcctaatatctcccacactntntggggtgggccattcttggatggccttgattttctcagggtccacttggaccccatttcttccaactacaaaacctaagaagactatattatctacacaaaaggtacacttctctatatttgcatagagggtgtttttgttggatcgagtggcctcaaaataattaagaaggggggggg

SEQ ID NO: 1564 - DNA, 436 bp, Glycine max
  unsure (1)..(436): unsure at all n locations
tatcttccttgtgataacaatatctctaagggctaccgggtctacaactcgctaactaagaaactcgtcatcagtcgagatgttgaagttgatgagtatgcttcttggaattgggatgaagaacaagtgaagaagaacgttcttatacccgctcaactacctcaagaagaagctgatgaagaagacccangtgaaccaccttcaccttcaccataacaacaagatcaaaaactatcatcaccagagtctactccaagacaagtaagatctttggtggacatatatgaaatcagtaacttggccatacttgaactttggaagcttgaagaagcgtcaaagcaggaagtatgggtcaaggcaatggaagaagagatacagatgatcgaaaaaaacaacacatgggagttagtaaatcgtccccatgggaaagatgtca

SEQ ID NO: 1565 - DNA, 359 bp, Glycine max
  unsure (1)..(359): unsure at all n locations
actcagcttaacatcagaccacttgcaggtgctggaactacttcacatggacttgatggtgcctatgcaagttgaaagccttggaggagagaggtatgcctatgttgttgtggatgatttctccagatgtacctgagtcaactttatcagagagacatcagacacctttgaagtattctaagagttgagtctaagacttcaaagagagaaagactgtgtcagcaagagaatcangagtgaccatggcagagagttcgaatacggcaagtttactgaattctgcacatctgaaggcatcactcatgagttctctgcagccatcacaccacaacaaaatggcatagttgataggaaaaaca

SEQ ID NO: 1566 - DNA, 484 bp, Glycine max
  unsure (1)..(484): unsure at all n locations
cctatcagactcagcttacacatcgatccctcaactgtagccttattcttgactatattcttgaaggagtgtaaaaacctaacattaatatgaataagtatttctttaaaaatgactatatatataatacaatggtgtataaatgattactcatttatacctctcgaaaggatacatccaatgatattggactggaccaccaagtcttgcctcataaggtaaatgaactggaaaatgctccattgaatcaaagaagcttggtgggaaatattgttctaacttacacaacaacacaggtatgttattntccataactcttagttgttcaacatttaatgttgtcgaagttagttctttgaaaaattggctaagttcaacaagtgacttccaaatagggtttggtaatgagtcaaatgcaatnggaaagcaaccgtgcatgaaaacatgacaataatgactnttcattccattgaagtttcccttg

SEQ ID NO: 1567 - DNA, 420 bp, Glycine max
  unsure (1)..(420): unsure at all n locations
ttgtataaactcacatgtcgtatcacttctgattttatcttattagaataaattccattntgtattatatatacgtntttctctgaaattttaaaagaataatagtggctgtacattggtagcgataaaataatgccgataacaatcataacaaaatgtaaaatatactactttaaagtcttacaaaaataaatgagcaacaaaaaccttatcaactaattaacaatattaaggacatatttttttaaaatattaacaagcttattaaaaatgtagaaataagcttcatgataaatcaagattgattcaagggagtttgatgataacaaagatgatgacaaacaactcanaagtcaagatcacttcatgataacaaagatgatgacattcaagattaagttcaagaatgagtcaagaaca

SEQ ID NO: 1568 - DNA, 400 bp, Glycine max
  unsure (1)..(400): unsure at all n locations
agctctggtaccgcttgttaaacaagtggcctcaattatcttaagaaagggggttgaattaaaatacaaaaactatccccttaattaaaaatttaacttttttatattaaaaatgcaacccttattatgagttactctaagaacaattcaaaacaaacttctttaaagcgaaatataaacaataataaataaaagaagtttaagggaagagagaatacaaactcaatttttatactgggtcagtcacgccctatgcctacgtccagtccccaagcaacatgcttgagatttccactatcttgtataaagccttttacaaagtgtgaaccacacagtagcaacccttcccttgtgtcaaataaccttacaacttaagagaacctnggcctttaaacagatc

SEQ ID NO: 1569 - DNA, 382 bp, Glycine max
  unsure (1)..(382): unsure at all n locations
gtattataagttataacctcaaaaaatggggtatatgtaacatgaattatattctcctgttctttaaaagcttgaaatcaacgtagtaaataaaatttacctgaggaatgcaaagacttgcaatagtgagaccagatattaaatctcctctaaattatttaaggttgtaacttcttccccaactaagtattgggaatatggcttcaataccgagcctgatcttccttgatctanngtgatctttgaagggtcttacaggatcatcacaaaagaacgtttcttttatagtgtcttggaattcctcgaagaggttctgtctcggaggaattgccatttgtgggcttgtggtgcctgaccaaatgaagaagatggcatacttctg

SEQ ID NO: 1570 - DNA, 424 bp, Glycine max
  unsure (1)..(424): unsure at all n locations
cagcttaagaataatggcctcaacaaacttcttattcccaaaaggatattcaataaataggcctcctatgtttaatggagagggttaccactactggaaaacccgaatgcaaattttcattgaggcaatagacttaaacatttgggaagccatagaagttggaccttatgtacccaccatggtggctggaaatacaacaatagagaaacctagagaagagtggtttgaagatgaaagaatattagtgcagtacaatttaaaggctaaaaacatcattacttctgccttaggaatggatgaaatatttanggtctgaaattgtaagagtgccaaggatatgtgggatactctacaagttacacatgatggaacaattgatgttaaacgatctangataaatactntaactcatgagtatgaatta

SEQ ID NO: 1571 - DNA, 362 bp, Glycine max
  unsure (1)..(362): unsure at all n locations
cagctttggaatgcagattagctctattggctctctggttgcattctttgaaccttngatgtattatctgatatgttatcgaagatattcttggttactaacttactctccctttatatctcaattntttatgtgtgcacgtgagctgatgagcatgccaatgactgattactattgtttgaattttacttgattgagatataggaggtgaagatgtcgaccccggcaaggaagagactgatgagggattttaaaagaatgcaacaagatcctcctgctggcatcagtggggctccccaagacaataatattatgctttggaatgctgctatctttgggtgtgtaggagtatataaatcatg

SEQ ID NO: 1572 - DNA, 395 bp, Glycine max
tatatatattataaataaacatctatcaatcaatgtctacaaagtacatatattaatgtctgaaatcgatcacaaagactaaaattatgaattttataaaatagggagacacaatgtcttaattaaaaatgagagactaaaattataaatctttttaaagtggaagatgaaatatctcaattaaaaagtgagagaactaaaatcatatatttgaaaaaataggggaacaaaaagtatattctagtctaattatctttgtgtatgaatttggatttgaaattgtgtataagtgaatatagatttgggttaatcactttagtgcttgaatttggatctgggttagacaatatgtctacgaccatttaattaaacaagttagcaagtaattttggatc

SEQ ID NO: 1573 - DNA, 358 bp, Glycine max
ctgagaatgcgaatttagctctattgtctctctggtgcatttcttgaacctttgatgtattatctgatatggtatcgaagattttcttgattactaacttactctccctttatatctcaattctttatgcgtgcacgtgagctgatgaacatgccaatgactgattactattgtttgaatattacttgattgagatataggaggtgaagatgtcgaccccggtaaagaagagactgatgagggatcttacaagatagcaacaagatcctcctgctggcatcagtggagctccccagaacaatgatattatgcttcggaatgctgttatctatgggtgtgtaggagtatataaatcatg

SEQ ID NO: 1574 - DNA, 305 bp, Glycine max
  unsure (1)..(305): unsure at all n locations
agctttcgttntcaattacgagcgactcgatatcctacgggactcattcggacatctgagtgaaaagttatcgtcgtttgaatttactcagagcttccgttttaaattaccagcgtcttgatatactacgggacacaatcggacatccgagtcaaaagtaattgtcgttcgaatctgctcatagctctcctcccatttacgagcgccttgatatattacagggctcgatcggacatccgagctaaaagttattgtcgttagacttatctcagacgctgcgttcccaatttcgagcgtctcgatat

SEQ ID NO: 1575 - DNA, 328 bp, Glycine max
  unsure (1)..(328): unsure at all n locations
cttctccttctacggagaaaccaagaagctntacaagaatacagtgctgaagtatggcaattagtgccactctcattttgaactcatctaaaccttgtccagacttctttgaaagccttttcacagctaacgctttcccatctataagtgtgccctgaaagttatcttctgccatagttagaaagattntaaggaaaacagaagtttgtgaagttttcttagtcaccttgtataccggcccacatccaccttcttcgagcttatattttgttgagaagtttttagtcacattagctaagactgttggcaagtcaatgtcttctgttcg

SEQ ID NO: 1576 - DNA, 402 bp, Glycine max
agcttgtgctcgaggccttgacctcataattgtttcatcactgtgtttgatccattctgagagtttccagggcttctgccacttccatttaaactgtagcagccattgatgatgacttctcttccacttccaaagtattccggcttgtcctatagctgctagcctcttcgttgacaactctccaatgggtatcatctggatataaacccattaaaacttattgagaaataaacactatcatcatcatcatcagggaaatagaatctagcaaacatacctttcgtgcttcatctaaaaatgtagctgactccctgcctgaccaattaacaactccaggagtgaatttgagttgctttggtgcacgaagcgacattggagataacggaccactcatctcatccg

SEQ ID NO: 1577 - DNA, 330 bp, Glycine max
  unsure (1)..(330): unsure at all n locations
agctgttgtgagtaataaacccaaacatttcagtgtcattgtacatctcaaaagcttcttccaaatccttcaacttctcgtcttccccagctgcctccataagtttcacaaaatctatcaaactcaaaaacacatcaccatcagaatccaactcctcaatcaactgttcagcatctttggtcaacaactcaccaccaatcatgcctagccggttcctaaactcacatggagaaatcttaccatccccatcctcatcanaatacttaagaacacgctcaaactctgtgttcaccctcataactatagaaaatacacgcataaatattgatg

SEQ ID NO: 1578 - DNA, 447 bp, Glycine max
ctcagcttaacatcagaccacttcagggtgctggaactacttcacatggacttgatggtgcctatgcaagttgaaagccttggaggaaagaggtatgcctatgttgttgtggatgatttctccagatttacctgggtcaactttatcagagagaaatcagacacctttgaagtattcaaagagttgagtctaagacttcaaagagaaaaagactgtgtcatcaagagaattaggagtgaccatggccgagagtttgaaacggcaagttactgaatttgacatctgaggcatcactcatgagttcttgcaccatccacccaacaaatggatagtgaaggaaaacggacttgaagaactgcaggcatcttatgccaaaattcctatatttgctgagcatacaccatgcttttcacaagccactaagaggctcacccctgttaattgaag

SEQ ID NO: 1579 - DNA, 387 bp, Glycine max
  unsure (1)..(387): unsure at all n locations
cgcttgcacccagaagagctacaagtcaagctcaaaacacagatagcaaacctcctcaactctagagttccatcaccaaacatctgccaccattctccaggttgcataactnttctagtgtcctttgcctcttccatagacaaaaaccctctagcaaaatcaaactcaacaagttgcaaaataattntttttcctttctacaacatccttgaccaatcttctcatacacatgtgcaacccttctttcacctgagggtcatcatgtctaanactaggtttataatgcaaatgaggattactataatacgcagttgtatgcaaaggcttgtgaagctaatgatctcacctctcattgataattntctaaacaggctcatagatacatca

SEQ ID NO: 1580 - DNA, 394 bp, Glycine max
agcttgcacacaagattctgcttggctggcacttcaaaaccttctggttgggtcttatagatgtcttcctctaaatccccatgcaagaatgcagttataacatgtagctgctccaagaaaagattctctgccgcaacgatactcaaaataactctgatggtagtcatctttacaactggaaaggagtctctgagatatcaattccctgtttctactgaaaccctctcaccacaaggctcgccttgtatcttcttctaccgtcagattcttactttatcctacagacccacctattttgtaacgctatctttccttctggcaatctatttaaagaccacgtcttattcttctgaagggatgtcatcttatctttcatcgctagcttccactcaat

SEQ ID NO: 1581 - DNA, 354 bp, Glycine max
  unsure (1)..(354): unsure at all n locations
tctgcttcttccttcgagcagcaggcgtgagctccactggtctcaatggggagaagctggtgggaggggaaaacccaactggccgcatggggggtntcagagggatccgtttcccactcgcattacccggcgtggaaatcaacggtgacgacacccccaaaccaccagcctggttctgattaagactcaatccctgagcttgcaaatgagcctggagttgagcatgagctgcagctgctgcttgggcctgngcctgggcctgggccttggactgagcttggacaatagcatgggcctgggacagtggaaactgtccttgataaccaacaggaatctgggcctgtccttgggact

SEQ ID NO: 1582 - DNA, 374 bp, Glycine max
  unsure (1)..(374): unsure at all n locations
agcttttggaaggatcaagaagtgccttatgaatcctcccgtgcttatgccaccagtacctggaaggcctctcatnttgtacatggggtgtatgctggggcaacatgatgaatccggaaagaaagagcgcgctatttactacctaagtaagaagttcacgacctgtgaaatgaattactccttgctcaaaagaatgtgttgtgctttagtatgggcatcccatcgcctaagacagtacatgctgagccatactacctggttgatatccaagatggacccggttaagtacatctttgaaaagccagctctcacgggacgaatcgcccggtggcatgtcctgctatccgagtttgatatagtctacgtcacccaaa

SEQ ID NO: 1583 - DNA, 454 bp, Glycine max
  unsure (1)..(454): unsure at all n locations
atactatagcgaaagattctaccttctggtgagacttcttctatcccatacactaaagaatatggagttgcctcattcgaggtgcgtactaatgcacgatagccatgtggtgcaaagggaagcatgtcatgtcaatccttcttgatattcttgtttgctgcttctaccaccccattcattttttggcgatatggcacagaattgcgatgttgtatcttgaagctatcgcacaattctttcatcatattgttggtcaaatgggtcccattattagtaataatgtggcttggcagacatatcaatagatcaaatctcctttgatgaatctgaccactacattccttggtacactatcataagatgctacttcaatccattagtgaaataatcaatgggactacgatgaaaccatgccctattcaatggcttaggttcaattgacanatcacatcta

SEQ ID NO: 1584 - DNA, 434 bp, Glycine max
  unsure (1)..(434): unsure at all n locations
gtgtgcattgttngagtttagtattggagtacatttattgaattgcatagttactttattatttgtcactttgaattgaattcatagaatgtggattatgtttgttgacacttgacttatttgcattaattttttaatggattgagtatcataatattttacactaaaaattatttattttcaagatcacattctttctatagaaaatacaaaacataaataccgaataattcatcttatgtgagtcatcttatgtgagcagacgagaatgctaatctaaagtttgagaaaatgactaccacttattggtctttcaattcttataacatatgtgttgattaataagtaaatgtgcattattngagtaaagcaagttctttagtgtgcattactagactatntatcactttgaactaaattccatatattaactg

SEQ ID NO: 1585 - DNA, 445 bp, Glycine max
  unsure (1)..(445): unsure at all n locations
agcttaggctacaagttgaaggtgtatgaattaatagttctttagtcttttactattctaaagttgtaaaaattacctaaataatgctagattaaatgtcattttagttgatcattcatagctgtgtaagtttgatactttaagtttcttgcaatttataagttgttttaagaacttgtggcatttgccccttcacatactgagagaatgactaaagagcctttctgctctgccttttctctttcttaacacaaaatgatgttcaaccttcatatacggcaggtttgcaatcttgtctggtccaaaaatgtcaatgaactagtaagcacgcatggctattcccagaaccagataattgtttggagatacctctccatgtcaaaggtacactatatctactgtgataagccgaatctctcttatttttacttaattntaacatgtc

SEQ ID NO: 1586 - DNA, 445 bp, Glycine max; identical to SEQ ID NO: 1530

SEQ ID NO: 1587 - DNA, 439 bp, Glycine max
  unsure (1)..(439): unsure at all n locations
ctcagcttgtcaagttccatactgcctgcanatgtagcccaaggcaagaacccaacttgttgcacctttcgcttcctcattatttcatagaaagctgttctcatgactgaaatactggttttttcagctgaggctataacaccgtgagcaacagctcaaatcttttcagcagatactgctgccttcatgatgccagatgttttggctcctgaagtcgcaatccctggagccacaactttataatggccagatgcaaaagccagcactttctgcatctggctgagactgattatgagtgaagttggaattttgaaagtgataaccttcaccagtgttgatgcagggactactntggtcagagatgaagctccaanaactgctgtcgcccagactctactgcaccataggttatctgtaataaccacttttctcactatga

SEQ ID NO: 1588 - DNA, 400 bp, Glycine max
  unsure (1)..(400): unsure at all n locations
gtntactaagaatgttgatggagtcccgtaatatatccagccgttcgaaatagaatgtagaagctgtgagcaaattcaaacgacaatatttgtttactcggatgtctgattgagtcccgtaatatatcgagacgctcgaaattgaatgttgaacctctgagccaattcaaacgacaataactttttactcggatgtctgattgagtcccgcaatatatcgagatgcttggaattgaatgttgaagctctgagacaattcaaacgacaataactctttactcggatgtctgattgagttccgtaatatatcgagacgctcanaatcgaatgttgaatgtctgagccaattaaacgacaataactttttactcggatgtcctattcagtgacgtattatatt

SEQ ID NO: 1589 - DNA, 480 bp, Glycine max
  unsure (1)..(480): unsure at all n locations
gctttacagctggaatcatctaccccatttctgacagccagtgggtgagtccagtccaagtggttcctaagaaggcagacctcacaatgatcaagaatgagagggatgagcttatccccacaagagtgcagaacagctggcgagtccgcattgattataggaggctgaaccaggcaaccagaaaagatcattgtcccctgccattcattgatcaaatgcttgagcacttggcaagtaagtctcattactggtttcttgatgggttttcttgttatttacaaattcatattgctcctgaggatcaagataataccacattcacctgtccctttggcacttttgcctatangagggatgcccttggcctatgcaatgcccccggtaccttctagcgatgtatgcttagcattttcagtgactttttagagagttgcatagaggtgttgatggatgaatctactggttatggatcctcttttg

SEQ ID NO: 1590 - DNA, 448 bp, Glycine max
agcttagcccatcatcaatattgatttcaagaaacaaaaaagcaagtagatatatcagtgaactgagccagaccaaggaaaaatacatcaaagaaaataaataatctagtatagctaattttataatcagataaagcatctgagacctgctgccatgtggtatcaacaggaggctgccgccgagcatcgccagcatcaaaatccagtacaccataatccctcaaccgaatctacacagcaataactaaaatcagaagtctttttgaggattaaatgcatggcattatctataagacacatttttcaaattgagacaaacccgaaggaaggcacggattctttgcaaattcccaacaccaccaccaagagcagcctaccattagataaaaaagcaagcagaaattaagtgttgataacaaatacaaattcatgcttgctctcttatatg

SEQ ID NO: 1591 - DNA, 397 bp, Glycine max
  unsure (1)..(397): unsure at all n locations
agcttcgtgaaaacctgcggtaaatgagatgcattttcaatcttcattttctagttctagctatctaattctcgtttacataccttgatctttttacctggtgctaataattatagagtaaatagttaatttaatccttaatttatatcacgttattttagtctttaaaattaaagaaaacttaaaacaattggttgactagtttgactttttattaattttagagacttaaatgacaataaagtataaattcaaagactaattatctaaaaaaaaactatctatttaataattacatgaagataaagaagacacattttcaacttttttaaaaaaataaatatacattctctctctctatatatacttaaaaagtctttnggcattaaaaatatat

SEQ ID NO: 1592 - DNA, 451 bp, Glycine max
agcttgtcattcattcaggatagaccagtgagcctcacgttcaaagggaagctagtatttgaggtgaacaggtatggcttcactgatggtggagcttgggttgatgggaacctaaactaatgcaatcctaccccgcaagggcattggatagaaaactccaagtagattaagccagagatgcaagagaaggccctaggattcttatgagccttagggtagatttcgggcccatgggctaagtatgagcccacttatctttgtaaatattagattaaggtttcattatttttgggccttgtatttagagctccataatgtaggtagggtaccctagaaatataggatttttcagcccttgtattctagggcacctagactagtctttgtattaggggtagttttggaatctcacatgcactaagtggatatttgatgtgtgtggctggagata

SEQ ID NO: 1593 - DNA, 458 bp, Glycine max
  unsure (1)..(458): unsure at all n locations
ctcagctttgacttagctngtaaaaaaaaaaaaaaccaaatgcacctgaatatttggtcttcagtgaggtgctgcttcaaactctttgttagctcactagatgattctgagtcacgaccaaatggcttttcaacaataacccttgtccatccatcttttgaagaagctttaagactagcgcatctcaccacatccacaaatatgtttggaggtattgacaaataaaacaatctgttngatagctttccaccctagaaaaggccattgtcaaatatatctaagcatagtttcaagagcaattattcgtataaatttaattctgggaaatataagatgccttaaattttatgattgataatatcacccttttgtagcactacggttttaattntcaaatcaccatctgctctaaaggtttttgcactctattctacacagaagaaagatctcctaaactt

SEQ ID NO: 1594 - DNA, 482 bp, Glycine max
  unsure (1)..(482): unsure at all n locations
tcggtgtacctgaagatgctattaggctcagcctgttttcattttctttatctagggaggccaagagatggttgcattcattctagggcaacagtttaaagactagggataaggttgttgagaagtttctaaaaaaatatttcccagagtctaaaactgcaaagggaaaagctgcaatttcttcattccattagtttcccgatgaatctttgagtgaggcattaganagattccatagcttgctgcggaaaactcccactcatggtttttcagagcctatacagctgaacatcttcattgatgggttacgaccgctgtcaaagcagttactcgacgcttctgcaggaggaaaaattaagttgaagacacctgaagaagccattgacttaattgaaaatatggtttctagtgaaccacacaatttgcatgagagagttcatattcctaccaataagagnttattggagcattcattacaagat

SEQ ID NO: 1595 - DNA, 450 bp, Glycine max
  unsure (1)..(450): unsure at all n locations
agctnttggaaggatcaagaagtgccttatgaatcctcccgtgcttatgccaccagtacctggaaggcctctcattttgtacatgacaatcttggacgagtcaatggggtgtatgctggggcaacatgacgaatccggaaagaaagagcgcgatgtttactacctaagtaagaagttcacgacctgtgaaatgaattactccttgctcgaaagaacgtgttgtgctttagtatggacatcccatcgcctaagacagtacatgctgagccatactacctggttgatatccaagatggacccggttaagtacatctttgaaaagccagctctcacgggacgaatcgcccggtggcaagtcttgctatccgagtttgatatagtttacgtcacccanaaggcgataaaaggaagcgccttagcagattatntggctcaatagcctcttaacga

SEQ ID NO: 1596 - DNA, 455 bp, Glycine max
  unsure (1)..(455): unsure at all n locations
tctcaagatacacttaatgttatgcagcatgtccattctactaaagtgttaattcacaagttaaaagatgatggttggcaagctctgctgaaagatgtggtattgttttgtgagcaacatgacatttatattcctgatttcaatggtacctatgtagcacatcatgggcgctctcgatatcaaaaagatcatatcacaatagaacatcatttcagagtgaacacaatttttattgcagttgataagcaattgcaggagttaaatgctatgtttagtgagcaaacaatggaagttttaactntaatctgtgttntagttcctaagatatttttatacaacttttcaatgttgatgatatatgcactattgtgaacaaattttatcctttaattttagtaaacacgagaagatagttagaaatttaacttcacttttattttgggtgctctactcat

SEQ ID NO: 1597 - DNA, 259 bp, Glycine max
  unsure (1)..(259): unsure at all n locations
ataatatatcgaggcgctcganantgaacaacggaaggtcttgagaaattcaaatggtcataactnttaactcggatgtccaattcatgcgcatcacatatagagacgctaaaaaatgaacaacggaagctctccagaagttaaaatggtcataagttttcacaaagatgtccgattcaggcttgtattatatcgagacgcttcaaattaaacatcgaaagctctcgagaaattcaatgggcataacttttacttggat

SEQ ID NO: 1598 - DNA, 319 bp, Glycine max
  unsure (1)..(319): unsure at all n locations
tgggatgaggaactatataacagtaccaaggttttagtttaaggagtctttnttcggagaggagaataattctaggattttagaattccagtttttattactgttcatgcacactgtccacgtataataaaatccattntctgcaaatgatctctaatccatacattttttaatactatggactttctttattttcttttgatatactctgtgctttaacgacttaaagtcaatatgaatttgcttatcaattatttttggatttgtacattacttatacgaaattttataagtatcttgttctagttagtatttcact

SEQ ID NO: 1599 - DNA, 269 bp, Glycine max
  unsure (1)..(269): unsure at all n locations
agcttcaaggctaagtcttcatgttgctccccttatctctagcanaaattgagccgacgggtgaagttgctaaatacaacgcatgattagtggccaaagggttactgcaaaaatatgttctggattaccatgaagtctttgttctagttgcaagaattgaactaattaaacttatggttgcaatcgctagctaacggggctggtcattggatcaactaaatgtgaaattatcattcttttatgggcccttataaaaagtctatgtatat

SEQ ID NO: 1600 - DNA, 578 bp, Glycine max
agcttctacttcatagtctaccaaattcatatgatctattcatcatcaacattattgtcagtcgtctaacctttgatgatgttgccagaactattcctaaagaagaatccaaacaaaagaataagaaagataggcaggaaaattccaagcatgcaaaggctttaatgatgacgaaggtagatcaatgtaatgtggctctaatgggagttaaaatcatggcagatcaaagtctcgaagaagaaagaacctcaaatactataattgtggcaggagatgacacttaaagaaagattgttggcataaaaagagtggaggagataaactatagagaatcgagctctcaaggttgtgttgctagcacctcaaataatatggaagccatgtgtagtgaaacaccaattggttttagaggtggaagacaacttcatgattgttggatattagatttaggtgcagcttggcacatgactccatgttgagattgtttttacacttatgaacttatcttggaaggatatgtgttcatggaaaatgatcatgcccttggaattgctggggttggtactggtcaaataaaa

SEQ ID NO: 1601 - DNA, 483 bp, Glycine max
agctttgacttgagtcatcaagagactataaatatgtgaccatggcatgagtttcaaaaaaaaaaaaaacaatcaatcatctttgaatcatctatcttttacatcatcttctttcaacatccttcaatcaatctttcaacatctcttaatattttcttttatctctttcaacactttcaacagaactttctaattgatttctcttcatctttctaaaagtttttggtcaacactgtcccttccaagaaaagttctttgataaaaaacttatgttattcatcttgatgtaagctccatttgagcttgtaggcccaggatcttcttcataaatggattcctttgcttcttggtagatgaatggcagcaaaatggagaaggaagggagagaggagacgccacttcaaggagaagatgagtctagaagaagctcaccaccataggaggccatggataagagcttggaggaagaaagagatgaatgaa

SEQ ID NO: 1602 - DNA, 405 bp, Glycine max
agcttgtagcaaatgcaaacggcaataacgttttactcggatgttcgattgagtcacgtaatacatcgaaacgctcgaaattgaaaacagaagctctgtgcaaattcaaacgacaatacattttaactcggatgtccgattgagtcccgtaatatatcaagacactcgaaattgagaataaaagctctgaacaaattcaaacgacaataactttttactcggatgtccgattgagtccagtaatatatctagacactcgaaattgagaatagaagagctgagcaaattcaaacgacaataactttttactcggatgtccgatggagtcccgagcgtttcgatatattatgcgcctaaattggacatccggagttataggtatgacaattttaattgctccaaagc

SEQ ID NO: 1603 - DNA, 562 bp, Glycine max
agctttagtcaaacagaataatccgaaaatgtcaaagaattgggtgttgaaaaagcataacaacactttctgtgattggtttaaagatacaatctttgcagatgagaatgcttcaaaaagattaagaaagctagcagatgggcctaaaagaaatgttataatctggcaaggatacgacataaacaggtattcattttacacaaaagcacaagatgacaaaagtacaatgcagaacagcggggtcaccctaagggctgaatctcaacactttgcaagtgtcaatgatgccaatccctatgtagcttccatccattactttgggttcattgatgaaattcgggagcttaattatgtgaaatttacagtatgtgttttcaaatgtaaatgggttgacagcaacaccggtgtgcacaccgatgatataggatttacgctggtagatctaaagaaacttggttaccacaatgaccctttcatcatggcaaaacaagcttgacaagtattttacgtgcaagacccttgtgatgaaaggtggtgcgtggttctacaaggcaaaacagtt

SEQ ID NO: 1604 - DNA, 581 bp, Glycine max
agcttattgaacgtgatgatgtgctatcctgtttgtagagtaatacttagcaaactcttgattattcatattttttttagcttgaaggctatagagaaagccatagttagctctgatcttggtatgactccaaataatgatggagaattgatacgactgagcatcccacagttgacatctgataggaggaaggtattctccagttccattgatgctgcagtgtctaagtttattttttctctgtcaattacattcttgttctcattgactgaaagtaatattcttaattggttttcatttcttatttaactattaacaaaatcgcatagaatcacctcttctacagtcatgacccatgagaaaactgatctctacagtgacttaatatgttgtttgccatgattccaatagttttagttatcaatttattttgtttatgagattgtaccgttttatataaaggtcctatatgcataaattttaatgaatatttgaaggtctaaatgaatatgttgatttcttgaaggcatctgaataacttaaggtctgtttggtttttttccccaaagaaaagtgttttt

SEQ ID NO: 1605 - DNA, 489 bp, Glycine max
agcttatagttccagcaacgacaaaagctaattaagatagcaccaatattgctggaatggatagtttcaatatttttcatatgtaatcctttatgtagatgttggggtgaatgcacactaagatggaagagactcgctaatatgcccaacgttcctactgcaatataatgagaagctatactgaaacaaaaagataaaaaccttccacgcctcacacagatttactgattgtatccttctggtcaatccataaggatccactactacaaaagcaattatttaagtcacgagacctacgacggttgtgcaaaaccgccttaatataaggcacagtggcaattttgtaattaaggggagaaattttattttttaagtcgcacgttctaaggcggttacgaataaccgacttagaatgagttgttattgtaagacaacgacggtcttacggtaagcccgtcgttgttcctcacctggcccgtacttgacttt

SEQ ID NO: 1606 - DNA, 177 bp, Glycine max
gtaaccatgtaatttcacttgcagctgcagccatggcacggtatttagcttcaacactggatctagcaactgcattttacttcttgcttctccatgaaatcaagtcacctccaacaagaacacattagccagaggtagatcttttatctgatgatgatcctgcccaattagcattag

SEQ ID NO: 1607 - DNA, 552 bp, Glycine max
agcttgtggtgtctcagcattataatagtctttcttttgacactttatatgagttggccaagtgtttgaacactgatatggtgcctctgatagttaactggctaccaaaagttcttgcttttgctcttcatcaaactgatgaccagcagttaatttttgccgtgcagttttaccatgcacagactggttctgacaagcaggaaatatttgcggctgctttacctgctcttctagatgaacttgtatgctttacagattgtggggattcagaagagataaatagaaggtaatttgtgtagatttctggaacttgattttaatttgattcctgagtggaaaactttcacacctggatattaatttttggaattcacgtgtttgtcttggaaactatgttgctggcacctcagatttagctatattaatgattatatacgtaatttgtttttatttattcactcatcattgattaacagaatttgatttggttactggccattggataaccaatatatttgaatctcacatttctttctttcatgggacttgtat

SEQ ID NO: 1608 - DNA, 493 bp, Glycine max
agcttccattaccgcaaccatctatctaggtttgtaagttaataggaattttatttggattctaagtttgttgttccataaattactattattgttcataaaaaatatgtgcattgtgagtgaaccctaatttcccgtttgagattccataccatgattaatacggatagtttggattagttgtggtatggattcttgaattgtccgttcggacagtttgggaactctcttttttttacttcattcatagtgttagtgtttagctctactgagctttaaaagattggctaagattttgttaaaacataagcacttagacaatgaaggaaagctggagttgctgcacatgatgtccaacgttatgtcaaggaatgagatcgggctgcacaatgtacaaggcaagataaaatgtcaaatgaagaattgaagttgcacgatccacgatgtcggataacatgtcctgacatcctgccccgagaatactggagttgct

SEQ ID NO: 1609 - DNA, 561 bp, Glycine max
agcttctagccttcaactaagtaaaatacatgctagatgcatcaaactccaactattgtgttgtaggtgccataaaatgcgaaaaataatccagacaataatacaatagaatccaaggctttttgccagatgggtagagaagagccaaataactttaagtgaaatgtggctggcataacaaatgagagcattgcacataaggtgctccctacaaatgaggcaaatacagaaaattctggcacaaatgaagctatgactgccaatccaaccaccacaatcgcccggctaacgtatatgcacatattttctagtcccattgaatcattattgtttctgaggatgattttgagtttcccttccacaatctcattaattgggtgaaacatgactgggagtgtgaatgcaagccccacacataatcctacctgtcaaatgtagcaaaaacttgaagataatggaattctggcaaaataaacgtagtattctgcaaagtgtactatcctagtagacatggctaaggacaaagtaaaatacaccccaacatatattatgcagtgcaca

SEQ ID NO: 1610 - DNA, 545 bp, Glycine max
agcttgtcaaaaagggaagcaagttagaaactcttttcaaagcaagaacattgtttctacttcgaaaccccttgaactacttcacactgatttatttggtccctctaaaactatgagtttgggttgtaattactatggcttagttatagtagatgattactcaacgttcacatggactttgtttttgaaaacaaaaaatgaagcttttgatgcttttcgcaaacttgccaaggtgattcaaaatgaaataggtcttaacattgtttcacttagaagtgatcatgaaggtgaatttcaaaatgagtcttttgaaatattttgtgaagaaaatggaatttaccacaatttttctgccccaagaacaccccaacaaaatggtgttgtggagaggagaaatatatcccttgaagaaggtgccagaacccttctaaatgaaacaaagttaccctagtacttttgggctgatgctgtacatactatttggtacaccttgaacagagtacttattagacctattttggagaaaactccttatgaattgtata

SEQ ID NO: 1611 - DNA, 496 bp, Glycine max
cttaaaggaagtgaacaaatagtatttgtctaaatgtctctgattgatcggcatatctggtccccaaatcttggaaaactgccaagaccccggtaccttcagcataccttgtattatagggaacaggaagtttgacaatgccatgctaaatttaggagcttctgttaatattatgcctctggctatttttaattctctatctctaagtcctctgcagtcaactgatggggggattcatttagctaatagaagtgccgcctatcctgctggttgtaaaaaagatgtcttatttagagatggtgagctgattctgcctcttgaattttatattctgaatatggaggagggattttttaaaggatcagttcctatcattctaagcagaccttttattaaaactgctacaactaagatcgacgtatatgcccgcacactatctatggagtttggtgatacaactgttcatttaatattcttgatgctatgaaacacccat

SEQ ID NO: 1612 - DNA, 451 bp, Glycine max
agcttgacataatgaaatcgctttttacttttttatataaaattacactaaaaataaaatatatttattaatgtatacttatttgctgttgaaaaagagtattttagcttattataactttaatttttttaaatataccatataaaacatgtgtgtatatattaatatactctataaatattcgctgatttattttttaaaagaaaattttaaaaaggtataatttcatttttttaaatacattcaaaatgtaaattgttcaaattttccttcttttataaaacgagtacatgtgcattacctaatctcaataaaaaaataatatttctttatttaataaataagaaagactaataagagaataccaaagcaaaaattagattttttttcaattggaatttgttattcgaaatgagaatcttctaccaaaagatacacttttttggtactt

SEQ ID NO: 1613 - DNA, 369 bp, Glycine max
agcttacgttgttcaatttcgaccatcttgttttattatgcgcctgaatctgacatccgagttaaaagttatgaccatttcaatttcacgagcgcttacattgctcaatttctagcggctctatatattatgcgcctgaatctgacatgcgagtttaaagttatgaccatttgaatttctcgagagattccgatattcaatttcgagcgtttctatatattatgcgcctgaatctgaccatggagtgaaaacttatgaccatttgaatttctcgagagaatccgttgatcaattacgagcatctcgatatattatgcgcctgaatcgaacctccgagtttgaagtgatgaccatttgaatctctcaaga

SEQ ID NO: 1614 - DNA, 578 bp, Glycine max
agctttatgcaagtcaattttcaggaggcatcttagagaggatcttttccgggcatatttgcgcaaaatctcttgaactaggaagatgttgtccatcatctttctgttcttaatgaaagcagtttgagtttccccaataatagtctcaagcactggggctatgcggttggccagaattttagatacaatcttgtataacaaattacagcaagatatgggtctaaaatggttaacctgggaggcctgatcatgcttaggaataagcgcaataatagcatggttgagttgctttagaatttttccagttgtaaagaattcattaaccgctgcaaagatatcatcaccaatgatattccaagccttcttgaagaataaaacattgaaaccatctggcccaggagctttattattatccatcacagaaataacgttccaaacctcttgcttataagtaggacaaagtaaggccacaaagcaatcgatgggaaccttatgacccctgttgcagatcaaaatggatggagtttgggtcagctcatgaacactaaacaaattcctaaagtgattcacaaaagcag

SEQ ID NO: 1615 - DNA, 522 bp, Glycine max
agctttgatggtgtcgagaagaaatcacatgtttgtaatcatcaaaaagggggaaaatgtgaatgtatgtatactttggaaattcaaattcaaaagtcataacccttcaaattataactgtgtaatcgattacacaaacattgtaatcgattaccagtggaaagttttcagaaaatctgccagcagtcacatcttttcattagatttgtgaatggccatcaaaggcctataaataggtgacttgggcacgaattttaaaaagagagttttgcttggcaaaaatgtcttatcctctcaaaagacaatgagagagattctaaaagaacttcattgtcaaatgctctctcaaaagaaatccttgaccaaacacttgcaaaatctataaggattcctacatgatctttattggaatattcttctcttgaagaaagaattcttcttccattcttcttattcaatgagattggttaagagactgtgagtctcttgttgtaaaggattcctgaacacaaaggatgggtt

SEQ ID NO: 1616 - DNA, 554 bp, Glycine max
agcttttcgttgtctctctgcctgctccttccaaaccgtctttgcaatcgtctatgccactgtagtctcgcccttgtggcttatgtcctttaaaagatatttcccctattgttcttgcgcctccatatgagcttcaatctgatgtagtttgtattgttccagcaagtcaccctatggtgactcgtgctaaagctggtatctacaaacctcgtcactttgcagatataactacttatcggccatcttctcttttacatgcattactcaccacttctgagccaaaaggttttaaatctgctaccaagcatcctggctggcttgctgcaatgaatgaagaactcacgtccttacactccaacaagacttgggaacttgttcttcgaccacctaacactaacattgttggctcccaatgggtatttgttagtcggtgaaaacgactaacttttgtgtataaaacttgtataaattgtatcacactcttccaatttatggttattttggagtgttataaggaatttctattaagtataagtaataaatacttagtattt

SEQ ID NO: 1617 - DNA, 469 bp, Glycine max
agcttggaagcatttggttcagagatagaaactatgccagctgagttcaatgttagacaagtggcctcaaatatcttaagaagggggggttgaattaagatatcacaaactatttccccaattcaaattctatttcactttctattcaagttacaaattccctttataatgaacttcttaaatattgattcaaatagaacaatctgaatataaatataaaacaataataaataaaagagtttaagggaagagaaagtgcaaacttagatttatactggttcggccacacccttgtgcctacgtccagtccccaagcaacccgcttgagagttccactatcttgtaaaatccttttacaagttctaaacacacaaggacaatcattcctttgtgtttagaattcttttacaataagagaccctcggtctcttaatcccttagagaattagaaagagaaaaagaatgaatc

SEQ ID NO: 1618 - DNA, 575 bp, Glycine max
agcttggggaatagcattaactggtaatcttgacacatgcattggtacaacagtactactgtggccacaatgcaacaatcatgtggtactcgtactgacatgacctaacacgctagcaccatggtttcacaagacggcaagatgccaatcgtacttatactttgatgtgagttttcaccatggatagcatctagttgtaatggacaaaagcaaatggcttcagccgttatcaatgttataaaagaataaaagattatgttttgttttgatcaagagtgaaataaaagtgaaagaaacaggagagaaagatccaaatgtataaggatagaaataaagagagaaatagagaaatttgtcttcaattgtttagatgggtacaatattaaaagtgaaaaataacaaacgatatgagtttctatcggttggattgattattaccataataaaaatgaatcttacttgaaaaaattttattttgtttcattaagcaccttataatttattgaacttaagttttgataaaacgctaatataaatttttttatactatcaatttaattaaaaattattttaat

SEQ ID NO: 1619 - DNA, 417 bp, Glycine max
agcttgaaattgcacaacggaagcactcgagatattctaatgggcataacttttcactcggatgtccgattctcgggccataatctccatctaagatggcttcgaaatatgaaacattctggaaagcctctccgagaaaattccgatatgggtcaataaccttttcacacggatgtccaaatttaggacataatatatcgagacactcgaaattgcacaacggaagcactcgagaaatttgaatggtcataacttttcacacggatgtccgaatttgggacataatatatcgagacgctcgaaattgcgccacggaagcccctcagaaattcgaatggtcattaactttttcacacgaatgtttggattccggacataacttatttagacgctcgaaattgacaacggaagctctcg

SEQ ID NO: 1620 - DNA, 602 bp, Glycine max
agcttcaacatcagaccacttccagggtgctggtactacttcacatggacttgatggggcctatgcaagttgaaagccttggaggaaagaggtatgcctatgttgttgtggatgatttctccagatttacctgggtcaactttatcagagagaaatcagacacctttgaagtattcaaagagttgagtctaagacttcaaagagaaaaagactgtgtcatcaagagaattaggagtgaccatggcagagagtttgaaaacggcaagtttactgaattctgcacatctgaaggcatcactcatgagttctctgcagccatcacaccacaacaaaatggcatagttgaaaggaaaaacaggactttgcaagaagctgccagggtcatgcttcatgccaaagaactttcctataatctctgggctgaagccatgaacacagcatgctatattcacaacagagtcacactttgaagagggactccaaccacactgtatgaaatctggaagggaggaacccactgtcaagcactttcacatttttggaaagtcatgttactttttggcgattgaaaccaaggagaaagatggatcccaaaagtgatg

SEQ ID NO: 1621 - DNA, 444 bp, Glycine max
agcttgttaatcatcttgacaagaaaaatgtttttacacatggacggtttaataaagagtgactaaatcctcactatataatgtgtgtgtatgaaaaataaatttcacactttattattgtagaatttcaaaccaaaagatatagtgcatttaatacatgaaaattaaatttttatcactaaagttgaagtggtttaaatgcaaatggacaattgaattttacgagctagataaagactatttgaatggatacattgaaaattattttgtttcaatttttaatagaacttatttattttagttggtgaaaatcttcactataaatagaaaagagaattagtggagaaaattactttgttcagagaaaagcgtatttgtgtgaatgttatcattttttgtaactattgaatgtggtactaggatttgttgagtaatacacaattt

SEQ ID NO: 1622 - DNA, 629 bp, Glycine max
agcttaagctcctttaactgcacaagactcttaatatttgaagagtatccttgtggaaccttaacccgacaaagacactgacaaaaacttatcttctcctttttggacaaagtatggcaagctggggcaagtaaattttcttcccatcagaccttggatgcaattgtgatcgtatccccatatcagctagatcttgacgggtattcaagccatccttcgtcttgccttgaatgttaaggagcgtcccaatcacactgtcacaaacatttttctccacatgcataacatcaatagaatgtctaacgtctagatcagaccagtacggaagatcaaagaaaatggacctcttcttccatatgcaactattacttttatccttcttttggatctttccaaaaacattattcaggtgttgaacccgctgatatacttgttcaccaatcaacagtattggcgcaatatcatgctcttggattccattaaaagcttttttcagtcgtctgtaaagatgattgggtgttaaaaaacggaaatgcctactgtagactatttttttttcctgttttaattggttgtagcttttggtttcttcacagatgggggatgcatgaagaacctttaacattgta

SEQ ID NO: 1623 - DNA, 584 bp, Glycine max
agcttgatgattcaacgtttcttctatggcgacaacaagtcgagccaattatcaaatcccaccgtcttcagcaatttgtagctaatccacagattctgctccgcttcctttctaaagaagatcgttaggctggaattgagaatccagcgtatgaatcttgggagaaacaagatcaggtgctcctcacatggcttcaattgaccttttctacattgattttatctcgagtgttataggatgcacacattcctatgaagtttgggagtgcattcatgagtatttttacaaacaaactatcaccacagcaaggcaacttcgcactgaattttgagcaacgactcttgcgggtaagtcaatgcacgagttcctgttgcagatttgcgcaatcgcagattctcttgcctctgttggaagtccaattatgcttcaggagcatatcgattccattcttgaaggtccctcactgaattatcatccgccattattgaaagcaagttttaacccccgcggagtaacttgaaccaatggttgccaccactgcagcatacaccaccataccaaaaatcaactcgtcataccgaaaa

SEQ ID NO: 1624 - DNA, 597 bp, Glycine max
agcttctcactcctttgacattcattggaggagggagtttctcaattgcatcaatctttgccttgtccgcctctattccccttactgaaattttatgccccagcactattccttcttgaaccatgaaatgggatttctcccagttgagaactagattggactcttcacatatttgtaatactctttcaaggtttgataggcaccccttaaaagatggcccaaaaatagagaaatcgtccatgaaaacttcaatgcatttttccaccatatcaaaaaagattgccatcatacaccgctgaaatgtagctggggcattgcatagaccaaaaggcatgcaccaatatccgaatacacctatagggcaggtgaaagcaatcttttcttgatctttgggatctacaacaatctaattatagtcagaatacccatccagaaaacaataataagattgccctgcgagtcgttcaagcatctggtccataaaggaagcaaataatggtccttccgaatggcatcattcaacttccgatagtcaatgcacaatctccaacccgtgataatccttgtggatattaactcatatttatcaatttttat

SEQ ID NO: 1625 - DNA, 418 bp, Glycine max
  unsure (1)..(418): unsure at all n locations
atttggtctgtgcactatatttgacattgtggcattgagagattangcctaatacttagaaatagtccaaaaggtgattgttatcttttataaaattgacttatatttatttaaaaaaacattgtttatcatcataaaaataaaatttactaacttagatcttaaggagtttataacaaataacgcacagtatttaactaactcacttaaattccttgatgttgaatttaagtatagtcgataatataaaattttagataacttttctattactaatagatgttaaaataattaaataatattgaatttaatattatacttaaattttatcttcttttttattaaaccatcttgtaataattatatattgtctttaaaaaagntactanattaatcttatttttatctactcttatta

SEQ ID NO: 1626 - DNA, 391 bp, Glycine max
cgtatggttaaagtctcatgaatgtcacgtgctcatgctacaattgttaggcgtggctatacgagacatcttgcccaacatagtcatgataacgataactcgcctatgctttctcttacatgctatatgtagcaaagccattgatccaataatgtttgatgagttggaaaatgacgccgaaattatactgtgccagtcggagatgtattttccccctgggttctttgacgtcatgatccacttgattgtgcatctagttagagaaatcaactgttgcggacctgtttatctatggcggatgtacccacttgagcgatacatgaagatcttattagggtgtacaaagaatctatatcgtccacaagcatctattgttgagaggtacattgca

SEQ ID NO: 1627 - DNA, 419 bp, Glycine max
  unsure (1)..(419): unsure at all n locations
agcttcgcaacanattctactctccgatcctcaacatcgacaagctgtggtccctggtcccgcaagaagtgaaggacaacgcctccaaggagaacaaggcgccgctcatcgacgtcacgcagttcgggtactttaaggttctcggaaagggcgttttgccgcagaaccagcccgttgtggtcaaggccaagcttatttccaagatcgctgagaagaagatcaaagaggctggcggcgccgttgttctcaccgcttgaatttgacggtatcacttttttgaacgatttangttttgttctgatacgttttgttttggattatgttgntgnttagtctctgctatatttcangagtaaattgaaggtttattattttaatttgcgcgaataactatgccagcctgatgacattagaatcta

SEQ ID NO: 1628 - DNA, 489 bp, Glycine max
  unsure (1)..(489): unsure at all n locations
tccatcaatctatctctctaaccatcaaggccgatatatgtatggatatcctactcaaggcgtcagccactacattggctgtgccggggtggcaactaagctcaaaatcataatctttaagaaactctaaccatctcttttgacgcatgttcagctctttctgactaaacaagtacttaaggctcttatgatcactaaacacctcaaacttggagccaaacaggtaatgcctccacatcttaagggcaaaaactacagcagctaactccaagtcgtgagtgggataattcctctcatgagtctttagttgtctagaagcataggctattacttggccattatgcatcaacactcctcctatacccatctttgatgcatcacaatacacctcanatggttccctcgggttaggaaaaactagcactagagcggtcgtcaatctttccttaagggtcgtgaaactatgctcacactaggtgtcccacccat

SEQ ID NO: 1629 - DNA, 487 bp, Glycine max
  unsure (1)..(487): unsure at all n locations
tagatgaagatgaatccgtggccacctcatggactcctctaaggacaatagcatcatttcttgcactgaattgttgggagttggaagccatcttctcaatcaaattcctagcctcagcaggggtcatatcaccaagagctccaccattgacagcatcaatcatactcctctccatgttgctaagtccctcatagaaatattgaagaaggagttgctcagaaatctggtggtgaggacagcttgcacacaatttcttgaatcttccacaatactcatacaagctctctccactaagttgcctgatgcctgaaatgtcttttttgatggcagtggtcctagatgtagggaagaatttctccaagaacaccctcttaaggtcatcccagctganaatggacctgngagcaaggtagtatatccaatcttttgtcacttccttcaaagaatgangaacagcctttagaaagatatgatcttcttggacatc

SEQ ID NO: 1630 - DNA, 452 bp, Glycine max
  unsure (1)..(452): unsure at all n locations
agcttgcttctacagtaagtgttgatagtcaattagcacttagtcttaggaaaaaggtaactgtgttttaaaatttgcagatacgaaaaaccaacttgcagacatcttcacaaaaccactaaccaaagattctttctacaccattagaagataattaggacttctagatgcaagtgacttagacaaatgatttatgttttgatgacttatttgttatttatgcacatatgcttctattataatgtgaggataatttattatcttgtttgatttctataagcttctctcttttcttgtttaattattatattttttttaacccttgtatttggctatgttnttatgacatttgaatacttagtatttcttttattatttgattagtatgactggacatgatgattatatttacttgcttttgggtgttatggtatgaagtttaaacttatttt

SEQ ID NO: 1631 - DNA, 436 bp, Glycine max
  unsure (1)..(436): unsure at all n locations
agcttgacaagagggtctgtntaactaacaataataataataactttattttatcaaatcttatcttatccagattttattccatccagattttattccgtctagattttatttcgtccagattttattttatccatcttatcttatcttgtccagattttattttatttcgtttatgggcttggacttaaaatagatttgtaagctttgtggctaagaacctcatccatacattttttaatagtatgctctttttattttcttttgatatactttgtgttttaacgacttgaattcaatatgattttgtttatcaattatttttggatttgtacattacttatatgaaattttataagtttatttttttagttagatttcactaggttttaaaataataaattaattaaaggcgtctttaaacaaacttttaaat

SEQ ID NO: 1632 - DNA, 404 bp, Glycine max
agcttcagaattcaatttcgagcgtctcaatagattacgggactcaatcagacatccgagcaaaacattattgtcgtttgaattagctcagagcttcagaattcaatttcgatcgtctcgatatattacgggtctcaatcagacatctgagtaaaaaagttattatcgttcgaatttgctgagagcttcaacattcaatttcgagcgtctcgatgttttatgggacttaatcagacatccgagtaaaaagttattgccgtttgaatttgctgagagcttcaacattcaatttcgagcatctcgatatattacgggactcaatcagacatccgagtaaaaagttatcgtcgtttgaatttgtcagagcttcaacattcatttggagcgatacatatatacggact

SEQ ID NO: 1633 - DNA, 361 bp, Glycine max
agcttaataaatctatatatggtttaattcatgcttctcgtcagtggtaccttaagtttcatgggataatttcttcatttggctttgatgaaaaccccatggatcaatgcatataccacaaggttagtgggagtaaaatatgctttcttggtttatatgtagatgatattttacttgcagccaatgatcggggtttgctacatgaggtgaaacaatttctctctaagaattttgacatgaaggatatgggtgatgcatcttatgtcatcggcattaagattcatagagatagatctcgaggtattttgggtctatcacaggaaacctatattaacaaaattctagagagatttcggatgaa

SEQ ID NO: 1634 - DNA, 357 bp, Glycine max
  unsure (1)..(357): unsure at all n locations
ctgtagaggaatccatcggagttgtgtttggtcgacatcccatcatacccgaatcagataatatgtccaaagtatactttctttgcgacaaatggattcccttagaggaacgcgcgatttccaggccaaggaagtactttaagtttccaagatccttgatcctaaaagcttgatcaagcaatgtgagcatctcctgtatttcagtgttgctgttgcctgttaaaataatgtcgtccacatatactaagagtatcgtggtgactgaaccattaaagcggagaanaagggaatggtctgagtgagactgttggaacccatgcattggtaggatacccgatagcttcacgaaccattgac

SEQ ID NO: 1635 - DNA, 388 bp, Glycine max
  unsure (1)..(388): unsure at all n locations
agcttctatagaaggttcgttcctaatttctctacaattgcatcacctctcaatgagctggtgaagaagaatgtggcatttacctgnggtgaaaaacaagagcaagcctttgctttgctcaaagaaaagcttactaaggcacctgttctagctcttcctgacttttctaaaacttttgagctagaatgtgatgcctctggagtgggagttggagctgtattgttacaaggtgggcaccctattgcttattttagtgaaaaacttcatagtgccaccctcaactaccccacctatgataaagagctttatgccttaataagagccctccaaacttgggaacattatcctctgttcaaagaatttgtcattcatagtgatcatcaatcac

SEQ ID NO: 1636 - DNA, 408 bp, Glycine max
  unsure (1)..(408): unsure at all n locations
ntngacggactataccaagctctaggaaccagggacggagaaagatctatatatatgcttgctaatggtagagagaggaagactagagatttggatcaagtaaagtgtgttaaggatgaagaaggcaaagtcttagtgcatgaaaaagatatcaaggaaaggtggaaggcgtatttccacaacttatttaatgatggatatggatatgactctagcagtctagacacaagagaagaggaccggaactataagtactatcgtcggattcagaaacaggaagtaaaggaagcgttgaaaagaatgagtaatggtaaggcggtggggccagacaacatacctattgaagtgtggaaaactcttggagatagaggtcttgagtggctcaccgaactctctaacgaaattatg

SEQ ID NO: 1637 - DNA, 372 bp, Glycine max
  unsure (1)..(372): unsure at all n locations
tgcagcttcgttgtcaatttcgagcgtctggatatattatgtcccaaaattggacatccgtgtgaaaagttatgaccattcgaatttctcgagagcttccgtagttcaatttcgagcgtctcgatatattatctccccgaatcggacatctgtgttaaaagttatgaccattttaatttctcgaatgcttccgtttttcaatttcgagcatctcgatatattatgtccagaaatcaaacatcagtgtgaaaagttatgaccattcgaatttctcgatagcttccgctggtcaatttcgagcgtcttgatatattatgtccccgaatcggacatctgtgtgaaaagttatgaccattcgaatntcttgagagc

SEQ ID NO: 1638 - DNA, 288 bp, Glycine max
  unsure (1)..(288): unsure at all n locations
agcttcttggcaatcctcattccagcgatcagtttggttnttgcgtaagagcttgaacaacggctcacaaatggcggtgagctgcgatatgaatctggcaatataattcaagcgtcccaggaaacctcggacttgcctctctgtacggngttctggcatctcaaggatagccttcaccttttcggngtctacctctatccctttctggcttacaatgaaaccaagcaatttcccttatttgaccccaaaagtacacttggcggngttcaaccttaattgatatttctt

SEQ ID NO: 1639 - DNA, 477 bp, Glycine max
  unsure (1)..(477): unsure at all n locations
tcatgcaagaattattaatcttcttggccaactaataaccattgtgaggnggaggcatatgacgaaagttaagaatctttntatttgacttccaatttaggtaaacaaaatgggtagtcaaagttatgaaacccttagtattaatagatgtccataaatcagaagttaaacagatcctgccaggaatagcacacaacagttctttactgatggttttcttcctctcatatattctcaacatattagtcttaaaagtatttctagaaattggttaattgaggacacaaataacttatcaaagcctgaaactctggatacttaacaaaaatgaagggcaaattacgcctaatcattagattacacaacaattcgcgtgccatcattngatctatctctttggccttaaactttccttgcatgtctaagatcatttgactcatatcttcanagttttttatctcacatctgccattatga

SEQ ID NO: 1640 - DNA, 325 bp, Glycine max
caatttcgagcgtctcgatatcttatgcgcctgaatctgacctccgagtgaaaagtgatgagcatctgaatttctcgagagcttccggtgttcaattgcgagtgcctggagataatatacgcctgaatcagacctccgagtgaaacattatgaccattttaatttctcgagagcttccgctgctcaatttccagcgtctctatatgtgatgcgcctcaatctgacctccgcgagaaaagtcatgaccatttgaatgtctcgagagctctcgttgttcaatttcgagcggtttgatgtatcatgcgcctgaatgcgacctccgagt

SEQ ID NO: 1641 - DNA, 396 bp, Glycine max
actcagcttacagttccgtcactttggataatacacaaagaaggctgttcgatgttagaagacaatctcaacaggttagggatacagtggtggaaatgcaatctaaaattggtagtaatcgagtgacgtgcatggagttacaagtagaacttgagaaagaaaggtatttagtctgtaataatgtgtacaaaatttttcttcgaatgatttggtacacagaagttgtgaaccttcttgtctttctatatctaggtttgccaagaaaagagtggaagaggatctggaggtcgctaggagaaagtttacgcgccttatagagcagaatgagggctcttcagtaactgaaaagcttcaagaggaacttgaagagtacagggacattatcaagtgcagtat

SEQ ID NO: 1642 - DNA, 315 bp, Glycine max
  unsure (1)..(315): unsure at all n locations
agctngaagacaagactatacgaggtatctttcttgggtatagcaatatctctaagggctaccgtgtctacaacttgcaaactaagaaactcgtcatcagtcgagatgttgaagttgatgaatatgcttcatggaattgggatgaagaaaaagtggagaagaacgttcttatactcgttcaactacctcaagaagaagatgaggaaganaacccaggtgaaccaccttcacctccatcacaacaacaagaagagatggagtatccatacagaannaattgcaccagtagctcgtcttaataagacaaagctcaac

SEQ ID NO: 1643 - DNA, 404 bp, Glycine max
  unsure (1)..(404): unsure at all n locations
ttgattcaagatntcttcaagatcaagccttgcctcataacgaaaggtttcaagtcatccaaggcacatgtaatcgattaccaatacgtgtaattgattaccaatgatttgaaagtgtgtaatcgattactagagactctgaatgttgggaattcaaattttaaatgaagagtcacagctgttcaagataaataactatgtaatcgattacactaatgctgtaatcgattagtggagaggattttcaaggaatatcgccaatagtcacatcttatcatttggattttgaatggccatcaaaggcctatatatatgtgtgacttgtgacaaaattggaagagagttntgctggtccagaatgtcttatcctctcacaagaaaatgagagagattccaagagaact

SEQ ID NO: 1644 - DNA, 408 bp, Glycine max
  unsure (1)..(408): unsure at all n locations
agcttaatcttaatgatcaatcattaattcacgagacatcttctgtttgtctcctgatcatgcactgcagaaaatctagaagttgctgcaagaggttcaaaataaatggngaaagctataatgaactggccatccaccttgtcctcaggctccttttcttcattttcattagcaggactgtccttgtttccttctgctgcatcttcctctcctacaggcttctcatcagcaagaaccttttcagtttcattcaccacttcctcagtcaccctatgaaattaacatcaaaaggaacaaataattaataactgccaattaaaaacatgagactcttggatgaaaattctaatctgaacttcattattattaanattaagaattaanantatgaatacaaacaattactta

SEQ ID NO: 1645 - DNA, 413 bp, Glycine max
  unsure (1)..(413): unsure at all n locations
agcttaactctcaaattccncttcatcccattctcttttgatataggcattccttcattagggacaacaacctcagcaccaggtttgacaatatctgtcaatgggatcatgagactccttccgtccaaggtggtgagatccaacgttttaccagtaagggcctcaagaagggttatctcttggttgatcaccaaatcattaccatcccttctataaagagcatgcggcttctcatctatcacaaaaatgagatctgctgggatgacaccaggctcacggttacctttctctgggaaggtaatttttgttcctttcttccagccaggttttatctcgatagtcaaaatctcctccacatccccacatttgctgaaatggaattgcatgtgtcaaatattgtcaaaaaacacaaa

SEQ ID NO: 1646 - DNA, 343 bp, Glycine max
agcttgcttaagtccgtatattgaattctttattgtgcacaccacgtgttcttttccttcaactgagaatcccattgggctggtccatgtacacattctcctctaaatctccattaagaaagatatttttcacatgcatttgatgtagctctaagtcataataggctactagcgccatgataattctgaaggaatcctttcgtgacactgcgaaaaatgtctctttataatcaacatcatctgtctgagtaaaagtcttagtaacaacagttggcctagtaatgttcaaggttgccatgagagtcacatttagtcttacagacccatgtacaaccaactctat

SEQ ID NO: 1647 - DNA, 255 bp, Glycine max
  unsure (1)..(255): unsure at all n locations
tctcgatatattatgcacctgaatcagacttccgtttganaagttatgaccatttgaatttctcgagagcttctgctgttcaatttcaagcttctcgatatattatgcgcctgaattggacttccgtgtgacaagttatgaccatattaatttctcgagagcattcgctcttcaatttcgagtgtctcgatatattatgcgtctgaatcggacttgcgcgtgataagatatgaccatttgaatgtctcgagagct

SEQ ID NO: 1648 - DNA, 433 bp, Glycine max
cattgacaggacatgcctattatattcttgttaaacagagctcatacatctgtgagcattattaagctcgatgcaagatctttcatatgccccctagatccttcttaccaattgaagttttgaacaacatggattgagaaggtataatcatgaagaggagatacttaattcactacagagcaaaatggtgtaccataagatgatttttttttttcacgcaattatgaaaactactaaataacaaactagaagaataaaatgaaggcaaatagtacacagtacacacccatcttgccgtgattcgctccctgagttcaaattttggttcaatggggcgtcttcctgtgacaagttcaacaagcaaaactccaaatgaatacacgtcactcttttcagttagttgataagttttcacgtattcagggtccaagta

SEQ ID NO: 1649 - DNA, 366 bp, Glycine max
  unsure (1)..(366): unsure at all n locations
ntatagaaattcaaatggtcatgactcttcacacgaatgtccgattcggtgaaataataaatcgagacattcgaaatataacaacgaaagctctcaagaaattcaaatggtcataacctttcacgcggatgtctgattccgacacataacatatcgagacgctcgaaattgaacaatggaaactttcaagaaattcaaatgatcataacatttcacacggatgtccgattaaggcgcataatatatcgagacgctcgatattgaacaatggtcgatattgaacaatggtagctctcgagagactcacatggtcataacttttcactcgaatgtgcgattcggagacataatatatcgagacgctcg

SEQ ID NO: 1650 - DNA, 372 bp, Glycine max
  unsure (1)..(372): unsure at all n locations
agcttattctcgatttgttgctntggatttatcttganaaaatcgctgcttgagaagtgcctgttagtgttttataagatggttagtaagggactgttgcctgacgtcaagaattgcaatagggttcttagattgcttagggatagggataataacatcgacgttgcgagggaggtttataatgtgatggtggagtgtggaatttgccctaccgttgttacttataacacaatgttggattccttttgcaagacagggatggttcangaagctctgcagcttttgtttcagatgcaggcgatggtgtgttcgcccaacgatgtcacgtataatgttntggtgaatggtttgtctcacagtggggagatggag

SEQ ID NO: 1651 - DNA, 429 bp, Glycine max
  unsure (1)..(429): unsure at all n locations
agctataagtgaggccttgngagaggatntgtccaaaccctccaacaccagtacttgtagtaataaagctgacactactactactaaggcaaggataagatgcagcatcgaccaaagctttctgaagaacaaatctgtaaagggtaccacggaacttcttgaacagcatgtgtggaggccccagagagggttgccagagcgtgcagtggcaattcttaaagcctggttatttgagcattttcttcatccgtatgtttgtctctatctatgtctcttattaataattttcttgctccgtgactctcttttctgcattctaaagagacatttggattgaattgtggcctttttttgctgttgttgaatttcttttcagttaccctacagacactgataaacacatgctggctagtcaaacaggtctttcac

SEQ ID NO: 1652 - DNA, 277 bp, Glycine max
  unsure (1)..(277): unsure at all n locations
ttctctttcccatgtcaactatgcagcttgcggtcaacatgaacggccttcccaagattacaaggatgtcagtatcttcagagatatccataaccacaaagtctgctgggaagataaaatgttntaccctgaccaacacttcaatcactccacatgacctggtaatggagcggtcagctaattgcaaagtcattcgagtgggcataatctccaactctcccagccttctgcacatggagagtggcatcaaattaatagtggcttccagatcaatcat

SEQ ID NO: 1653 - DNA, 337 bp, Glycine max
  unsure (1)..(337): unsure at all n locations
agaacgcatgaacganaatgcttttcatggtgctccgaanaagggttgaggatggagaatcgcactaagaaatcactacgcatggctccaaactcgtgggtggaggacgcatgaacgaaaacgcaattcatggggctccgaaaaagggttgaggatggagaatcacactaagcaatcactacgcatggctccaaactcgtgggtggaggacgcatgaacaaaaacgcatttcatggggctccgaanaagggttgagaatggagaattacactaagcaatcactacgcatggctccaaactcgtgggtggagggcgcatgaacgaaaacgcaattcat

SEQ ID NO: 1654 - DNA, 400 bp, Glycine max
  unsure (1)..(400): unsure at all n locations
agcttatggagtagataaacaaaagcttgttgaggagattactcgtgcctatgcccaccaaatatatattgatggattnttcaatggtgatcctcatccaggtactctctctctctctccctctacgtttgtgcttatgtatgcatgtgcatatgatgtaacacttccgattgttccatgtgctcatgaactattttggctctcttactggaatcatcataggaaattttcttgtgagcaaggaatctccacatcgtcctattttacttgactttggccttacaaagaaactatcaagcaccattaagcaagcacttgcaaagatgtttttggcttctgctgaggtntggtttggcttttgtgcttttcatgattatgtggatactaataacatcatata

SEQ ID NO: 1655 - DNA, 382 bp, Glycine max
  unsure (1)..(382): unsure at all n locations
tatagaatatataatataagaacagtgactattgaagagtctatacatgtttcctttgatgagcctaatgccattcttgcaaggaaggattatttagatgatatttcagattccttagaagatacacatattcatggaaatgactctaaagaaaaagatgaacgaagcaatgaggattctcaagataatggggctagaggaaataatgaacttccaagagaatggaaagcctcaagagatcatccnctcgacaacattattggtgatatatcagaaggggtcacaactagacattctcttatagatttatgcaagaatatggctcttgtatctatgattgaacctaacaatatgggagaagtcatagtagatgataactgga

SEQ ID NO: 1656 - DNA, 252 bp, Glycine max
tcccggcaacattgtttgtattaatgaattcaacattatccttgaatatcagtaaacgtttttgcttctctgcagcatccttatataccttcccatatttcttcatccactgctcatgtctttcggacatggatgcctcatggaggttgcgggacattacttgggaagtgcacattgagagaaggagcacaagagctaaaatgtgctgctttttgcccatggaacccatgtcttttctcaacaatgtatcaa

SEQ ID NO: 1657 - DNA, 312 bp, Glycine max
  unsure (1)..(312): unsure at all n locations
acactatgatactcagcttaccactgtccggttactccttgcccttgttgctcttcataactggcaccttcaacaattggatgtaaacaatgctttccttcatggngatcttaacgaagaggtttatatgaagcttcctccaggacttattgtggataatcccaaccttgtttgtcgcctttagcattccttatatgggctcaaacaagccagtcgctaatggttcacacggctctcgtcatttcttctctcccacagattccgacgatcttcagcagatcactcgtttatatatactctgataatgaccat

SEQ ID NO: 1658 - DNA, 451 bp, Glycine max
  unsure (1)..(451): unsure at all n locations
agcttgtaattttcttattgcctttgcttgttattacatggttnttatagaattcctaatatggaataatcctaggaatattacaataaccgttttattgataagaattgctcagcaggatcacaattccaagcaaggcgatctgggaaaggatttgcagaagcttctgttttggcaggattcttcaaacgaagtcgtgaaggtaagtgggcctcttcaccttacgtttgggctttacttcgttatgcaccccctgttttgtaattcccacctccgagctcatctaagagctcatctattgtgggaattgngaactggtcttggaccatgacagcattgagggccctgtagtccatacagaaccttcagctcccatcatgtttccttacaaggaggacgagtgaggagaaagggcttgtactangttggatcaatcctttttgaagcatga

SEQ ID NO: 1659 - DNA, 428 bp, Glycine max
  unsure (1)..(428): unsure at all n locations
gctatgctgcntatattacaatagaacttccttcacctcagcagcanaatcaaccacagcagaacaattatgacctctccagcaacaaatacaaccctggatggaggaatcaccctaatctcagatggtctagccctcagcaataacaacagcagcctgctccttccttccaaaatgttgctggcccaagcagaccatacattcctccaccaatccaacaacagcaacagcccctgaaacagccaacagttgaggctcctccacaaccttccctcgaagaacttgtgaggcaaatgactatgcagaacatgcagtttcaacaagagaccagagcttccatttagagcttgactaatcagatgggacaattagctacacaattgaatcaacaacagtcccagaattctgacaagctaccttctcaagct

SEQ ID NO: 1660 - DNA, 297 bp, Glycine max
acagcagaataattatgaccgttcgagctactgatacgggccatgatggaggaattatcctaaactaagatggactagttctttacaacaacatcaacctgtccctccgttccagaatgttgctagtacaagcaagccttatgttcctcctacaatgcagcaacaacagctgtctcctcatagactacaggcaactgaggctcctactcaaccttacttataagagtgagcgaggcaagtgaccatccataatatgcaattttagcgagagacatgagcctccgttcagagactgac

SEQ ID NO: 1661 - DNA, 398 bp, Glycine max
  unsure (1)..(398): unsure at all n locations
agctnttcaaagccaatttcatcagagaagtcaggtactctacttgactcgccatcgtcgtcatggtcaaaatggccaatggcaagtggcgaatgtgcaccaactacacgtatcttaacaagctagttgatggagcgtccgagttccaagtactgagcttcctggatgcctacacatgatacaattagatccggatgcatgccctacatgaagagaaaatgacattcatctttgaagatgccaacttctgttatagggtcatgccctttggcctataacatgtaagcactacatactagagagtgatggaccatantattcaatagcaaattggatgaaatgtcgaggtctgcgtcaatgacatggtcatcaaatcacataccactagcccacatgtg

SEQ ID NO: 1662 - DNA, 429 bp, Glycine max
tatacagatatacatattttccagcaacatcttgatggctctattcaatacaacatacatcacatggaaatattagattacagccagacacaatgcatagatgctactgtgttgggtgctttgctacattgccacatgattttctggtacaagaactgtttggaggggatcaaattcaataaagaatgtccgaatcttcatcggagcaagttcaaccaccaacttcgtaggatcaacaggtcctcctctcaccaccttcggctcttcagaggagccttctaccttccaatctagcttcctcttttccatttgagctctttcttgattagcagacaaactcatctctgtcactttattgatctgaaaagattgagtagtcaaaaggaaactatacatgagtacatgatgtgtgaaaaatactaacttgga

SEQ ID NO: 1663 - DNA, 180 bp, Glycine max
  unsure (1)..(180): unsure at all n locations
gaggttntgattgatcaaaaagaagaanctacttcataccgatatgcccttaggcacggcaatacataacatagaaatcacanctcgaaagggtggaccaatagctagagcagcaggtgctgtagcgaaactaattgcaaaagaggggaaatcggccacattagaattaccttctgggga

SEQ ID NO: 1664 - DNA, 440 bp, Glycine max
  unsure (1)..(440): unsure at all n locations
cttgtgtgtaaagagtcacaacttanaattcttttttcaagtctaaagagtcacaactctttagaaaaataattttgtaatcaattacaccattttaataatcaattatcagtaaggaattttcaaaaataactcccaacagtcacatctattcaaatgtttttgaatggccatcaaaggcttatatataggtgacttgggacacaaaatttctcaagagtttttactgcacaaagagtctcatcctctcaaaaactaaattatcttatcctctaaaacattctttggccaaacacttgcaaattcaataaggaatcttgagtgatcttcaattgttatatctttatcttanaagagagaattcttcttcttcctcttcttattcaaagagattgattaagggaccgagagtctcttgaagttgtaaaaattcttgacac

SEQ ID NO: 1665 - DNA, 357 bp, Glycine max
  unsure (1)..(357): unsure at all n locations
gctacacaaatccngtctaatagctaagctcacccccatgcgcaaaaatacatgaaaataaaaaaaaagctcctactacaaagactacccaaaatgccctgaaatacaaggcttaaaccctataatacaagaatggccaaaatacaaggcctaaaagaaggaaaaacctattctaatatttacaaagataagtgggctcatacttagcccatgggctcgaaatctaccctaaggctcatgagaaccctagggccttcccttggatctctggcccaatttacttagagtcttctatccaatgcccttacaaggtagaattgcatcagtagggtcggtgctgcttaccctcaacgatca

SEQ ID NO: 1666 - DNA, 329 bp, Glycine max
  unsure (1)..(329): unsure at all n locations
taatatcaccaggaactatcacattaacaaaatcacagcctctaagatttcgacanattattaggtagccttgaagcattatgtttttatgattctaatctaccattctctntatatataatacataactatattttttaatttgtaatttatttataatattcaattatgttatgtaaaaaaatagttaaaataattaacattataatgattttagactatctaataatttctagtaagattttaatgtataacanacctggaagcacagaaggctaccacataatccgtcccagaacaagtgaaaatactagttggatcatcataag

SEQ ID NO: 1667 - DNA, 400 bp, Glycine max
  unsure (1)..(400): unsure at all n locations
acttaagtgattattttataattttaatagataaatgactaaattatcagttaanaataaaagttaaagaaccaaatgagtaatntaatcaaataattgtgatgtttgacaacactcacaagacttatatattgtaattntgataattcattaagatataatggataatattaattcttctcactttttgcattaaaacattctcactaattatttaatcttttctttttaacataaaaggcaaaacctcgctagatagagagagaggacttaaatttgtgttgataaaatttactgtgaagcttattaaaatatttataaaaatcataaatcattttaacaagcttaacaaaatacatactcattattactataatcaaataagtttcatacaaactcc

SEQ ID NO: 1668 - DNA, 372 bp, Glycine max
  unsure (1)..(372): unsure at all n locations
agcttccacttgantaatcttaaccattgttttttttcaaataatatctcatcaatttggtgactagcccatccatttgtgtagttttctcggcaggatctggtcttgaggtatctatgtccaaaaaacaccaccaggggaagtttcacttatggcattttctaatctttcaattccaattaaatggaaaaatagtttggttgatagcttatcatattagttgaaatgcttagtttgcaggaattcttccttgtttctattnttgaacctaatgatctgcgttggcagatgctgtgattcccatcacttgcttcatactggtgtgtttggttgcactacaacactatggaacacatagggtgggattctttt

SEQ ID NO: 1669 - DNA, 269 bp, Glycine max
ataataaccggaagtgcaacgatataaggacctagagcagattggactgaggaagacagaagattactacaatataatttaaaggccaaaaatattattacatctgccttaggaatagatgaatactttagggtttcaaattgtaaaagtgctaaggatatgtgggatacaatacaagtaacacatgaaggcacaacagatgttaaaagatctacggataacactctaacttcgtgatatgaacttttacgatgaatgtaataaaagta

SEQ ID NO: 1670 - DNA, 206 bp, Glycine max
  unsure (1)..(206): unsure at all n locations
cttttttcctcgcagcaaatcaaccacngcttaacaattatgacctcttcagctacagataccaccctggatggaggaatcaccctaatcttaaatggtccagccctcagcaacaacaacagcaggctgcttctttctttcaaaatgctgctggcccaagcagaccatacattcctccaccaatccaacaacagcaacaaccccag

SEQ ID NO: 1671 - DNA, 352 bp, Glycine max
  unsure (1)..(352): unsure at all n locations
agcttttatacggagtttaaagataaatacatatatatttatagaaaagtcaaacttctctctttttaaaatgcatatcccttaaanatgcttgagaaataataatgttattaaatagttatagttatgaaaaattattaaggacaaaatttagataccaattgttaagtgcttttagagatttatttgaataatttggcataataaaatttatattaaatattactcttttcggttctatttataagactcaattacttaatttagttagattaaggagagtgattagtttagttgataataagaaatatgttcaagatcatattcttttttctaaaactaccattgtcta

SEQ ID NO: 1672 - DNA, 316 bp, Glycine max
  unsure (1)..(316): unsure at all n locations
agctngaagaccccataaggctcctattgtttatggtgcagcaactatcttcattatcttccagtaatctccctcctaagaatgctgtcacacacctgattggccctctatggcccactagaactgccagacacgtgtgtngaccatcttgttctctagcccaaaccctgctcgttgagtcagccgagccactcactacatatttggccacacttgccagacacaacactgcatgcgtgtgcccttggatggagccaccgtattgtaactgccccgcanaccaacccttgtgccagtagtgtatgtagccatcagt

SEQ ID NO: 1673 - DNA, 471 bp, Glycine max
  unsure (1)..(471): unsure at all n locations
cgcgctntcatatctaatattacaacttggtctaagaactctattacctatcttgtcctgacaacaggttgggatttttgagatagccccatccaagcagtcattgcagtctttctcagacaagtcaggggtgcactctgccataccatatatggtctgaaaacttgaagcagttacattatccgtggcatacttacgacgagagtcacccgatgcggctacacctttgaggtttctcattaagttcgccagagcttgactgaacttatccggttccgttacattgtttatgttcatcaaggattggctaggttcaatttccatgatgccaaatatcgagcggggtgagtagcgcaacatgcatttgctagtgttcaaccacagaagtgcctctttctggtttggacaaaactgtttaattgtgactctggaatcattgaggcaactgcggcactcatgtggctcaacatc

SEQ ID NO: 1674 - DNA, 448 bp, Glycine max
  unsure (1)..(448): unsure at all n locations
acctgtctgagcaatcttatgttctggttctcaccttcatatcctctngaccttctcccattacctgcaagcaaacattgtgttctggagtaggcttgtcttccacagacaagtcgaaatcaatttttgggtcttcaaaacctaactccagctttctcttccccatgtcaactatgcagcttgcggtcaacatgaacggccttcccaagattacaaggatgtcagtatcttcagagatatccataaccacaaagtctgctgggaagataaaatgttttaccctgaccaacacttcaatcactccacatgacctggtgatggagcggtcagctaattgcaaagtcattcgagtgggcataatctncaactactccagccttctgcacatggagagtggcatcaaattaatgttggctcccagatcaatcatagcctcttccacatttac

SEQ ID NO: 1675 - DNA, 326 bp, Glycine max
  unsure (1)..(326): unsure at all n locations
tcaccattagtgacgggaaccttactctttcttatggaggccactataacctgacacatgcgagtgagggggctaccaccgggcttctgaatccgatacagactcgtaccggataagaagctcaccacagcaattgccatggccactgctggaaagacaaatccccacccccaacttacagtagtaaggacccacaccaccaaagaagcagcaacgcgaccaccactatttattgacaagcagaaccactngaagaaagagctcttgtgctcnctctcagcttcatcagcatcacaaattgagtgcaccaaagaagagacacaagc

SEQ ID NO: 1676 - DNA, 465 bp, Glycine max
  unsure (1)..(465): unsure at all n locations
actaagctttacctttagtttaacccttagaacttcccggccaaattgttatatataaagcaatgttgatgttcaaaggacactttacatgcctttntaatcaactgacctacgcttagcaagttctggtcaatgttaggtacataaagaacatctgatattaatttgatacctgaacacgttgaaattgcaacagttccttttccttttataggaatatagccaccattcccaattctgacctttgagacattagttggcttcaaatccttgaataaagtcttatcatatgtcatgtggttcgtacaaccactatcaatcaaccaactttcacttgattcactactcaaggttgataatttttctttttatccttacctttgatatggatgattgcactattttcgctgcttgctggctggatcttctagaanaaatgctttntgctttcatcaacttcatgat

SEQ ID NO: 1677 - DNA, 624 bp, Glycine max
  unsure (1)..(624): unsure at all n locations
ttctccactaagttgcctgatgcctgaaatgtcttttctgatggcagcggtcctagatgcagggaagaatttctccatgaacaccctcttaaggtcattccagctgaaaatggacctaggagcaaggtagtatagccaatcttttgtcactccctctagagaatgaggaaaatcctttagaaagatatgatcttcctggacattagggggcttcatggtggaacaaaaaatatggaactccttaagatgcttataaggatcttcacctgcaagaccacgaaacttgggcagcaaatgtattagtccagtcttgagaacatatggaacaccctcatcaggatattgaatgcacaagctttcataagtgaaatcaagtgcatccatctctctaagagtcctttcacgaggtggaggttgagccatgttctcagtatgaaaattagcagcggaatgttcaaaatcacaatattcagaatcaccctcaacagaatgctcaaaatgcacataatgaccaggatgcacactatgcctaactaatctatgaaagggtctatctattntatgatcaaagggttgtaaatcacctagattgcccctagtcatgcactatatgcagcaaatagt

SEQ ID NO: 1678 - DNA, 563 bp, Glycine max
  unsure (1)..(563): unsure at all n locations
tcttatccaaggcaattcttggtggtgaagctccttcttccttggcttattccctagtggatggtgcctcccctatcctcttctcctttgccttccgctgcatctccatggtgaaaaatcaccattgaaggacctcattgaagctcaaagatccagcctccatagaagctccacaagcaagcttccatcacttttcacacagaggtcagattcgggcacataatatgtcgagatgctcggaattgaaccacggaagctctcgagtaattcaaatggtcataacttttcacacagatgtccgattcgggcgcataatatgtcgagtagctcgaaattgaacaacggaagctgtcgagaaattcaaatgggcatactttttcacacctgcctcacattcnggcacataatatgttgagatgctcggaagtgaaccacgaaagctctcgagaaactcaaatggtcataacttttcacacggatgtccgattcaggcgtatcacatatacagacgctcgaaattgaacaacgaaagctctcgagaaatacaaatggtcataactttt

SEQ ID NO: 1679 - DNA, 402 bp, Glycine max
agcttgaatcggacctgagtgtgaaaagttatgaccatttgaatttctcgaaagctttcgttgttcaatgtcgagcatctcgacatattatgcgctcgaatcgaacatccgagtgaaaagatatgaccatttgagtttctcgagagcttccgtggttcaattccgagcatctcgacatattatgtgcccgaatctgaccttcgtgtgaaaagttatgaccatttgaatttctcgagagcttccgatgtttaatttcgagcgtctcaatatattgaaagcctgaatcggacctcagtgtgaaaagttatgaccatttgtatttctcgaaagccttccttggttaaattccgagcatctcgacaatatatgtgcccgaatctgcctttgggtgaaaagtatgac

SEQ ID NO: 1680 - DNA, 599 bp, Glycine max
  unsure (1)..(599): unsure at all n locations
taagaatatggaattgaacaaagttaacaaaaatggtagcatgcagcaagcttcatgtgcttaggatacagtagaacatgaaagtttgtattagagtcaagttgcgaactcaactcatttctagacttttttttttctgaattctcatttagtgtcaactatccctactctaattttatttattatgttttaatatttaatgttctatacttttgtagatttaatttattgttttaaatatactatagcaatgtgtgtgcgcacacgaatttatgcatttttaggtttggtgtatattttttatcaacaattattaatatacctcctctaattgtttactttttttttaatcccaaattcaaaagctagcctccataattctatattgggttatccgattttaacctttgcaatcatattttattgtattctcaatgtcccttggtccatatgtctctcaattgaacacgagagtaagaatgtgttattctcgtaaagttatgatcattgattcttttatacttgagtgaaagagtaaacacaaatatgtcanatatcacatattggtatgcatggtcacacatatttcatgttctact

SEQ ID NO: 1681 - DNA, 359 bp, Glycine max
tccattgttcaatttcgagcgtctcgatatattatgcgcctgaatctgactttggagttgaaagttatgaccatttgaatttctcgagagcttccgttgttgaattaggagcgtatcgatatattatgtgccggaatcggacatccgagttaaaagttatgaccgtttgaatttcttattagcttccgttgttcaatgtcgaccatctcgatgtattatgcgcctgaatctgacatccgagttaaaagggatgaccatttgaatttcacgagcgcttccattgtgcaatttatagcgtctctatatattatgcgcgtgagtctgacattcgagtttaaagtgatgaccatctgaatttg

SEQ ID NO: 1682 - DNA, 344 bp, Glycine max
agcttataagaaattcaaatggtcataacttttaactcggatgtccgactctggcgcataatatatcgagacgctcgaaattgagcaacggaagcagttgagaaattcagatggtcataacttttcacacggacgtcaaattcaggcgcataatatctagagacgctaaaaattgaacaacggatgccttcgaggaatacaaatggtgatagcttttaactccgatgttaaagtcatgcgcataatatattgagacgctcgaaattgaacaacggaggctctccataaattcaaatggtcatgacttttcactcggaggtcagaatcgaggacataatttatgg

SEQ ID NO: 1683 - DNA, 582 bp, Glycine max
agcttgttactggtttgcttctctgcaatggggttgtataaatgatgaaatgcttatagaaggcttttcttgcttttttgtccttgatacataattaggttggcaagaatcttcatgttctcagtcagatagagggtgttgacctagatatgtacaaagatgttgtgcttcccagagtactggagcaggtctaattgctttattgtttctatttctaatcatcaaagacatggttaactttctaaccataaaaaaaaacgattccttttcctcaattatcatgggcaggttgtgaattgcaaagatgagttagctcagttctacttgatggattgtataattcaagtcttccctgatgagtatcacttgcaaactcttgatgttttgttgggtgcttacccccaacttcaagtcagtgaacttgcacatttttttgtattacttctggaggatgccttaatgtatatatgttttttctcactccgaaacatgaaaattcaggttagtgaacttgcacagttttgttttactaatataataatattatattttattgggaaaaagcccaaattaaatattgaa

SEQ ID NO: 1684 - DNA, 398 bp, Glycine max
agcttcatgtagctttttctagaagcttcattaagaggcttcctccagaagcttcctcgtggcttctttgagaagctttctcaagaggcttctttgagaagctagatccttatctatccacacccctctattaactaaattaacttccttaaaaataattaccgatgaaaataacgcaacaaatattcaaacatcaaacataattactaatagtatatagatatatatatatcagggtgttacaactctcccacccttttagaaatttcgtcctcgaaatttaccttactcaaacaaggatgggtgagcttctcacatctgactttctaattcccatgtggcatcttctcctgatgcacctccccagatcaccttgaccaacagaatctctttccctc

SEQ ID NO: 1685 - DNA, 303 bp, Glycine max
agcttgaaggcaaactggatgcattggttaacttggtaacccacctggccttgaatcagaaatctgtacctgtcccaagggtttgtggtttgtgctcctttgctgaccaccatacagacctttgcccttccatgcagcaacctggagcaattgagcaccctgaagcttatgctgcaaatatttacaatagacctcctcaacctcagcagctaaatcaaccacaacagagcaattatgacctcttcagcaacagatacaacccttggatggaggaaataccctaacctcagatggtccagccct

SEQ ID NO: 1686 - DNA, 663 bp, Glycine max
  unsure (1)..(663): unsure at all n locations
tgaaggtaggagaagatgagtggagggagagggagtgaagaggcacgaaattttatgcctcaaatgaggtctgaactttgaagtgtaattctcaaatgatcaaagttacaacaagtgttacacatgcttccatttatagcctaggtagcttccttgagaagcttccttgagaaacttccttgagaagcttctttgagaagcttccttgagaagctagagcttagctacaaacacccctcaaataactaagctcgcctccttgagaaaattcctagagaagctagagcttagctacacacacccctctaatagctaagctcacctccttgagatgagaagctagagcttagctacacacactttctataatagctaagtcgtcatattcccacatggnttcttcttctccaattntcaacaaatatattcaagggaaatgaaacaccggaaagcataccgggtcatcaagtatttaaaattaaaacagagtgatccgagtatcgaacttagggaacttgcttattagacaaagttttattaacgagtaaggcattgttggaacacacattgacaattgatgggtaaaaacagaaataaactaattctatggtaagaataataaatgcaagtaagttaaagttgacaacaacaggtaaaaagtgt

SEQ ID NO: 1687 - DNA, 557 bp, Glycine max
  unsure (1)..(557): unsure at all n locations
ttggagtttccaagtgccaattcgtcttcttctttagtccagtcttcttctggcttcaattcattagagggctttccttctgtgtccagcatcttgggatgttcccagcctttgatgacagctttccaggttctgctatccagtgatttgaggaaggccaccatccttgctttccagtattcatagttggttccatccagaataggtggtctgttcactggtcctccttctttctccatgttcatcagaatttatctccctagatctcactcagtgatttcgagtgccagctctgataccaattgaaattctgatactggggacagatgtcgtacaggatgtcacgacatcacgcttcagaacatgcagattatagttgacagtgtggacagtttaaacaagaagataacacaagagattngttaacccagttcggtgcaaccttacctacatctgggggctaccaagccagggaggaaatccactaaaatagtgttagttcaaggtctaacagccactgtttacaaccttctcacctaaccactacccgtgcgatc

SEQ ID NO: 1688 - DNA, 440 bp, Glycine max
agctttaagactattcacataagttaacaagaagcaataaaggatcaactgtgaaaatgaattgcattcccatacctagatcttctccacaattccttcgaatttatatatgcttagatgcatgcaagaaaggattcaaggctaactgcaaaccttttattggtcttgatggttgtttcgtaaaagggtactatggcggtcatttgcttgcaacagtgggacaagatgcaaacaatgccttttttgtgattgcatatgcggcagtaaatattgaagataaagataactggaagtggttcctcactttgttacctgaagacataggagactacaagcaatatggctggaatttcatgtcagacatccaaaaggtgccattaaatataaaaagttgatttcatgcctgcatgggataattttgttgtcatgctagcaatatg

SEQ ID NO: 1689 - DNA, 709 bp, Glycine max
  unsure (1)..(709): unsure at all n locations
ttgagccaaaatcctgactcaccataaaccttgacccagggtgagaatgtcaatccttaccctcggaagcaaaaaaggaatagaagggaaatttccaatcaaagaaaaagagaaggaaaatttccaatgaaagcaaaaaaagaaaggaagggaaatttccaatcaaagaaaaaaagaaggaaaattccccaatcaaagagtgggagaaagcaaaaagaaaagaaaggaaattcccaatcaaagaatgggagaaagtaaaaaaggaagaagaagaaggaaagaaagccctgatcggggatcgaaggaaaaaacagaagaaatatgcagagaggtctttggaccggacaatatctgaacaatacagaattgtcaccaaatgaacaaaaaagaaggaaaggaaaccacgacctaaaatggtcttctccctttaattaccaaccaaaatcccgtgcgctagcgaccctttttttttctcgccccgcactagacaaaaaaaaacggaaaaaagaaaaaaagccagaaaaatcaaaagccaaaaacacacaaaagccgaaaaacccaccaaaagaacccattcccaagggaagccctattgatccatgatcacgcatgtaatntttgatttgataggaagtaatttgcanagtcaagtcatgacatatctatggntcngaattangatgaaacacttacctgtgcgagattgata

SEQ ID NO: 1690 - DNA, 409 bp, Glycine max
agcttgccttgccccttgatatatttgagggactcatggtcactatgaatgacaaattccttgggataaaggtagtgatggcatgttttcaaagcccgtactaacgcatacaactccttatcataaattgaatagttaaaggtaggaccacttaacttttcactaaaataagcaattggatggccttcttgcatcaacacagccccaatcccaacattagaagcatcacactcaatttcaaaagatttttgaaagtttggcaacgcaagtatgggggcattagttagcttttgcttaaaaacattgaaagcttcttcttgtttctctccccatttgaaaccaacatttttcttgagcacttcattgagaggtgctgcccatgtgctaaaatccctctattaaaacttgc

SEQ ID NO: 1691 - DNA, 584 bp, Glycine max
  unsure (1)..(584): unsure at all n locations
ttttgagagattaaatttaccttatagagagtattttgtgaatttgactgcataacaaattaaaagtaaaacaataaatattttaatgatatgagacacttaaagaattaaaattaatcaaaatatttaacaagaataaaagtgtattttattaatgttaggagtaattttacaaaaatgcgttaatttttttatcttaataaattagttaattgggtcttaaaaattcagcaagagtaaaaataataataattnatacttcttccttctctttttctatttataagacatttcttaaaaagactatttgtacttttatataatacttttttcaaaaaaaattattaattattttttaacccanatatatttattcattttctcctgaacgccatanagtaactaaatacattcttttttcttctctcgtaaaaaccacacaacatgactgaaacatattaattccttacgcaaaaattaagatttgctctgcattatatatttgagtgtagattttagtgaacatatccaattttgggacgaacacatcatacgtcaagaattataaaaaaaataatgtattt

SEQ ID NO: 1692 - DNA, 552 bp, Glycine max
agcttccattttcaattgcgagcatctcgatatattacgggactcaatcgtacattcgagtaaaaagttattgttgtttgaatatgctcacatcttcagtattcaatttcgagcgtctcaatatattaagggacttaatcggacatccgagttaaaagttattgtcgtttgcatttgctacgagcttccgttttcaattacgagcgtctcgatatattacgggactcaatgcaacctccgacttcaaagttattgtcatttgaatttgctacgggctttcgttttaaatttctagtgtcttgatatattacgggacttaatcgaacattctagttaaaagttattgtcgtcagcatttgctcagagctttcgtttcaaagacgagtgtttcgatatgttacgggactcatccgaattaaaaagtattggcgtttgaatttgctacgagcttttgtattcaacttaaagcgtcttgattatgttacgggactcaatcgaacatccgagtaaaaggtatattgggttggatttgctacaagcttccattttcaa

SEQ ID NO: 1693 - DNA, 640 bp, Glycine max
  unsure (1)..(640): unsure at all n locations
ttaattcaagatcaagaaactaagatcaagagtcagataaagacttagtttatttgttaaaagaatctcacattggttaataaggtttggcctcaaaagcttgattttaaaatgattatataaagctttaaaagatgttttaccagcacaaaaataagtttttttgcactggtaatcgattaccaagtattgtaatcggttaccagagacaaattacataaaaatatttctagaaggattttgaaatttgaatttcaaatgttgtaatcgattaccacttgtctgtaattgattatcagtgacaaaacttcataagttaactttgaaaagtcatgaccttcaaaacataactgtgtaatcgattatcaagacattgtaatcgattaccagtgagagaatttttgtaaaatattctgaaaagtcacatctcttcaaaagtttttgaaaagccaccaaggacatataaatatgtgacttgtctatgaaaatatntagagttttctgatgcaatcctacccccacaagggcattagatagaagactccaagtagatcgggctagagatgcaagagaagccctatggttctcatgagccttanggtagaattcaagcccatgggctaagtatgactccacttta

SEQ ID NO: 1694 - DNA, 649 bp, Glycine max
tgaagtgtccagttgtgatttttgttttccagttataattataaatttgactttattttctaactatctaaattcttattttatattatcagatagtctttttggggatagacaacatccatgcgatgagagagagctttgttcggctccgagaatacatggacactcatggaagaacgtcatcagatggaatgtcctcttttttggttagtccgtgaatgttaaaacaaaatgtaattatcatttttcaggtagtgtaaatttatttggttcctatatagacctgcacaatatttatgttttagtccttacaccttaaaattaaaaactacttgttttagtcccaatacatacactttttaagtcgcttaatccctatagcttctgcgtgacagggattaaaacgggttaaaaaatgtatgtgtagggactacaacgagtagcttctaggtgtaggaactaaaacatacatatggtgcataggtataaggacccaatgagtaattaaatcatttatttttaatagtatatatttgatatttgaagagtgatactactattagctgtataatgacacttgtagattagatatttaatctttcttcatgatgcttaatatatatcttaatattatttaatacttttttct

SEQ ID NO: 1695 - DNA, 583 bp, Glycine max
tatgaccattcgaatttctcaagagtttccgttgttcaatttcgagcgtgtagatgagttatgtccccgaatcggacatctgtgtgaaaagttatgaccattcgattttctcgagagcttccgttgttcaatttcgagcgtctcgatatattatgaccccgaatcggacatctgtgtgaaaacgtatgaccattcgattttctcgagagcttccgttgttcaatttcgagcgtctagatgagttatgtccccgaatcggacattcgagtgaaaacttatgaccattcgaatttctcgagagcttccgttgttcaatttcgagcgtctcgatatattatgtccccgaatcgggcatccgagtgaaaagttatgaccatgcgattttctcgagagcttccgctgttcaatttcgagcgtctcgatatattatgtccccgaatcggacattcgtgtgaaaacttatgaccattcggatttctcgagagctcttcttgttcaatatcgagcgtgtagatgagttatgtcctcgaatcggacatctgtgtgaaaagttatgaccttctattttatcgagagcttccgc

SEQ ID NO: 1696 - DNA, 362 bp, Glycine max
agctttgatgcaacatttggagaggttaatgaaacaacgagatgatgcgctccatgagaggttggatcaaatggagaatagagatcataatgaagaagaaaggaggagaagagggaatgatagtgttcctaaacaaaaccgaattgatggtattaaactcaacattcctccatttaaaggaaagaatgatccggaagcctacgttgagtgggagatgaaaatagagcatgttttctcatgcaacaactatgaggaggaccagaaggtgaagcttgccgccacggagttttccgactatgctcttgtgtggtggaacaagcttccaaaggagagagccagaaatgaagagccaatggttgata

SEQ ID NO: 1697 - DNA, 605 bp, Glycine max
  unsure (1)..(605): unsure at all n locations
tggccatattcctaattctcctctcctttaactaaacatcttgttaatatttgggttattgtatatttcttaatactcataaaattctggctcaagtttcaattctcactttcacggaggtaagatcctaaattccaaatcaatttatggattatttgattttaattgaatcattgtgcttatacaaacacccactcatattatgggttaataatttgattcatttttacgggtgttgtaagtagattatggatgcaaggaaggtgttctatgaaatgcctgaaagaactattgtttcttagaactcggttatgactgcttgtgttgagagtctttcattgngtgatgggattgagtatttttttaggatgtggggttgtgcgtttgagcctaatgagacttccatggttgtgttgttgctctctacttgtgttcttcaagctccatccatttctatttcttttttattaattactaataatactatatatgctattgtaattgtattaataatgagtcattaataatactatatantgtatggctactatatatggctattactngtagttgaattcaatgacttattttctgatctccgatgc

SEQ ID NO: 1698 - DNA, 675 bp, Glycine max
tggccatattcctaattctcctctcctttaactaaacatcttgttaatatttgggttattgtatatttcttaatactcataaaattctggctcaagtttcaattctcactttcacggaggtaagatcctaaattccaaatcaatttatggattatttgattttaattgaatcattgtgcttatacaaacacccactcatattatgggttaataatttgattcatttttacgggtgttgtaagtggattatggatgcaaggaaggtgttctatgaaatgcctgaaagaactattgtttcttagaactcggttatgactgcttgtgttgagagtctttcattgggtgatgggattgagtatttttttaggatgtggggttgtgggtttgagcctaatgagacttccatggttgtgttgttgctctctacttgtgttcttcaagctccatccatttctatttcttttttattatttactaataatactatatatgctattgtaattgtatttaataatgagtcattaataatactatatatgttattgctatattatattgctattacttgtagttgaattcaatgacttatttctgatctccgatgcttatcataatggtagagatacaatgtatttgtcctataaacctttggttatattactctatggattttaa

SEQ ID NO: 1699 - DNA, 722 bp, Glycine max
  unsure (1)..(722): unsure at all n locations
tgataagaaagaagaaagtattatgcaataacaagataaattaggtgtggctagtaaagaaaataaactatgaaagtaagcaagaaattaaagtgaaagaaatgtaaactaggcggatcctaagagtgtttggatgacctcatttaaggtttccaacaaaatactcactatcctaaagaaaaattgcctaaaagtattacacacaaatggaagtagggtgacctattggaggctcccaacttacttccaatgaaaggcctttttgttataaaatttgaaagcaatgaaggtaagtaaattctcaattaaaaaaattacaaaaaggttctcaatttttggtgattgttctctctttggtgattcactcaatttggagtgcttcttagtccaatagctcttaaggttgttttccccttgcttcttgactcaaattcttcaagggatgacaccaatcctcctttccaattccctatatggcaactcacaaacaaggaaacaaagagacaagcaataaccaaagacccaaaaaatgaaatgaaagctaaaccaatagagttttaacaagacaaattttcaggaatttttcaacaattaaagcacataaaagaaagctaggactcanagagaaacttagaatgactctagagtagagtanaanaaacccaaattaaaaagactcangaaacctcctagttttggaacttgtttttcacactaatttt

SEQ ID NO: 1700 - DNA, 529 bp, Glycine max
agcttataataacatggccatcattcacaaactttgtatacatgcatctattagcatcactactagaaaaaccatcaacaagtaaagtctcattaaacttttcatgccattgtttaggaacttgttttaaaccatatagggatttcaaaagtttgcacattttgttctcttgaccatccaccacacaccccttaggttgagtcatatatatctcttccgctaaatcaccattcaagaaagttgtcttaacacccatctgatgaatcactaacttatggattgtagctaaggctatcaaaatcctaatggaggaaatccttgtaataggtgcaaaggtataaaaaaaatctatgttaggtttctaagtaaaccctttagcaatcaaccttgctatgtatttatctataaaatcatcacgattatacttcctcttaaagatccatttacatccaataagatttgcaccctcaaatagatatactaaattccatgtattattctttttaataaaatcaatttcaatcctaat

SEQ ID NO: 1701 - DNA, 584 bp, Glycine max
  unsure (1)..(584): unsure at all n locations
ttgaataaattgaaacgacaaaaactttatacacggatgtctggttgagtcccgtaatatatcgagacgctccaaactgtaaacggaagttcgtaggaaattcaaacaacaatatctttttactcggatgtctgattgaatcgggtaatctatcttgacgctcaaaattgagactagaagctctgagcaaattgaaacgatattaactttatacacggatgtccggttgaatcctgtaatatatcgagacgctccaaattgaaaatggaagctcttataaaattcaaacgacaataactttatactcggatgtccggcagagtctcgtaatatatcgagatgctccaaattgaagacggatgctcgtatcaaattcaaacgacgataactttntactcggatgtccgattgagtcccgtgatatatcgagacactcacaatttagatccaaagctctgagcaaatttaaacgacaataactttctacacggatgttcagttgagtcccgtgatatatcgagacgcttgaaattgaaaaagaagctcgtaccaaatccaacgacaataagttttactccgatgtc

SEQ ID NO: 1702 - DNA, 397 bp, Glycine max
agcttctagtctcaattttgagcgtctcgatatattacccgattcaatcggacatccgagtaaaaagttattgtcgtttgaatttcctacgagcttctgttttcaatttggagcgtctcgatatattacaggactcagccggacatccttgtataaagttattgtcaattcaattttcttagagcttcggatcaaaaatttgagcgtctcgatatattacgggactcattcagacatccgagtaaaaagttattgtcggttgaatttgatacgagctttcgtttttaatttggagcatctctcgataaaatacgacactctgtcgggcatccgagtaaaagttattggcgtgtgaattttctaagagtttccgttttcaatttgggagcgtctgata

SEQ ID NO: 1703 - DNA, 363 bp, Glycine max
agcttgtacgcgatgccatatggctattacttgcaaatgcctattctgaagccaagactactgcatggttgaatgaattgtgcatgcctcgggtaactgcaataacttcttcgctgcttgacgattgttttgtggaggcatccaatgctctaatgtcacaaccaattactaaaggagcctatatatatgtatgtacaaaaaaaatgtacttattatgcaaaatatatttttcctcaagcaattctttatatggaaatgtctaagcaacatgagttaaattattagctacaagttaccttatctaatgcccatatgctgaaatgagcgcgatattcttcttgttgaatgcctccattttcaact

SEQ ID NO: 1704 - DNA, 414 bp, Glycine max
agcttgaaagtgtgtaaccaaccattttctcattgtagaacaccggtaacgtgtatactatcattgtgatcatctttttctctgtcattgaaggtgccacttgagctgtcaagtccctccacctctgggcgtattccttgaatgactcatgctcttttttacacatgttttgtagttgcgttctatccggagccgtatcataattgtactgatattgcctaacgaaggcaaccattaagtccttccaagaatagactcgggaaagttccaagttagtgtcataccctaatttcgtccggggattattacttgacgacatgcaacctttgattggccgtttcaagatacttggccccctttgttgcacaatatgtaagtcttgagacccaccggagtcaaaaagaaccagggtta

SEQ ID NO: 1705 - DNA, 524 bp, Glycine max
agcttatgcagcaaatatatacaatagacctcctcaacctcagcagcaaaatcaaccacagcagagcaattatgacctttccagcaacagatacaaccctggatggaggaatcaccctaacctcagatggtccagccctcagcaacaacaacagcagcctgctccttccttccaaaatgctgctggcccaagcaaaccatacattcctccaccaatccaacaacagcaacaaccccagaaacagccaatagttgaggcccctccacaaccttccctcgaagaacttgtgaggcaaatgactatgcagaacatgcagtttcagcaagagaccagagcctccattcagagcttaaccaatcagatgggacaattggctacccaattgaatcaacaacagtcccagaattctgacaagctgccttctcaagctgtccaaaatcccaaaaatgttagtgccatttcattgaggtcgggaaagcaatgtcaaagacctcaacccgtaacactgtcctcatctgcaaatg

SEQ ID NO: 1706 - DNA, 661 bp, Glycine max
  unsure (1)..(661): unsure at all n locations
tgggtggaaactacaggtaatcagatatgacaatatgtgacaaatttaataagttctatgaagatgcggacatagaacaatagttgacagcaccttattctccttaacaaaatggcaccgtagaaaggaagaataggactattatggagatggctaggtgtttgcttcatgaaaaagaattgccaaagagattttgggcggaagccgcaaatattgcagttttcatgcttaacagactgccaacaaaagctttgcaaaagaagacaccatttgaagcatggtatggctataaacctgagttgctcaatctgaagatatttggttgtttgtgctttttcttacattcctcgggttaagaaggacaaactatacaagaaagcagaagctgtaacctttgtaggctatagcttaatttcaaaggcctacatgatctatttgccacatcatgacaaagtaattgttagcaagaatatgagattcttggagctggatagttggaactgggaagatgacaagaagattgaatntcagaaggagaatgagaacatagacaaagaacctgccagaggaacaagatcactttttgatatctatcanaggtgtaatgtttctctcatggaacctgcacgatatgaggaggctacaccaataaaaaatggat

SEQ ID NO: 1707 - DNA, 338 bp, Glycine max
agctttcagaaaatgtcaatgtcgagcatatactatttttcttccatgtttcagttgtatgtagcttgtatcttcttcacagatagggcatgcatgatggtccttaacactgtatccactcaaattcttgtatgccgaaaagccattaatgggaaaaaatagcattgcatgcaacttggatgcctcattttgatacccatcaaacatgacaatccctttgtcccataactttgtcaagtctttaatcaagggactaagataaacatcaatgtcttttcctaagtgtcttgggcccaatattatcataaacaatatcatgtattttcgcttcatgcaca

SEQ ID NO: 1708 - DNA, 592 bp, Glycine max
tgctacattgatgcatcttggctacggaatcttcgatttgggcacttaaattttggaggcttaagtttgctatcaaaggagaagatggtaagaggactaccctatattaatcaccctgatcaactctgttaaggatgtttacttggcaagaaatttagaatgatttttccaaaggagtcaaactcaagagctaagaagccacccgagctaatacatgttaacgtctgtgggccaatcaagccccaagctcactacgtaaaaataaatatttcctctttttcattgattatttttcaagagaaacatgggtctatttcttatagcaaaaatcataagtcttttccaccttcaagaagttcaaagctgcagtagataaagaaaattggtgagagatcaaagccataaggactgatcgaggaggagaattcacttgcaaaaagttcaagagtttgtgaagagaatgaattagacgtcccctgacagtctaagacccccaatagatagtgtggcagaagataaaatagacgatccttgatatggcttgaacatgctcaaaagcagaactgccaaagaatttaggcaaagctttgca

SEQ ID NO: 1709 - DNA, 367 bp, Glycine max
agcttgaaggcaaactggatgcattggttaacttggtaacccagctggccttgaatcagaaatctgtacctgtcgcaagggtttgtggtttgtgctcctctgctgaccaccatacagacctttgcccttccatgcagcaacctggagcaattgagcagcctgaagcttatgctgcaaatatttacaatagacctcctcaacctcagcagcaaaatcaaccacagcagagcaattatgacctctccagcaacagatacaaccctggatggaggaatcaccctaacctcagatggtccagccctcagcaacaacaacagcagcctgctttttccttccaaaatgttgctggcccaaacagaccatacat

SEQ ID NO: 1710 - DNA, 654 bp, Glycine max
tttgtgtgggatacccagtgtgagtatagtttccaaacccttaaggaaaagttgacgaccactcccatgctagttttgcctaacctgagagaagcctttgaggtgtattgtgatgcatcaaagatgggtttaggaggagtgttgatgcaaaatggccaagtagtgacctatgcttctagacaacttaagactcatgagatgaattatcctaccaatgatctagaattggctgctgttggatttcccctgtggttactttttgttccacttttttcttcatacaaatatattcaagggaaatctggtttgtcgaaaagtgcaccagatcgtcaagtatttaaaaattaaaacggatgaattcgagtatcgaactcagggaaactagtctaagatcgggttaaattcagaaataatgcattgttgaaagaaacattgataattgatggtttaaaatagaattaaactgggtctaggataaaaacagtaaaaatgcaagtaagtaaaattgacagcagtaggtagaagtgttgggtctttcaaacagacaagctgatgcatatagggatgtttctctaatcgatcatgcttttatgttctatgatgtagcataaattactaaacctcgatccctaattgactgaatcaatccagctt

SEQ ID NO: 1711 - DNA, 503 bp, Glycine max
agcttatggtagattagagtgaagttcatcctgatcccgagaggtataggagacttgtaagaaagctcatttatttcaccattacaagacctgatatctcttttgttgttggagtagttagtcaattcatgcagaattctcatgttgatcattggaatgttgtcatgcatattcttagatatattaaaagagctcctgtacaaggattgttgtatgaagacaagggtaatacacaactatcaggatattgtgatgcagattgagctggttgtcctatggataggagatctacatcaggttattgtgtcttcattggagggaatattatttcttggaagagcaagaagcaagttgttgttgcttggtccagtgcagaagttgaatatcgatccatggcaatggttaaatgtgagctcatgtggattaaacacattctccaagaattgaaattctgtgaaagtgtgcaaatgaagttattctgtgataatcaagctgctctttac

SEQ ID NO: 1712 - DNA, 696 bp, Glycine max
tcacagcaaatgatagaatgtctatagttttatcatttgacaatttattgttattatatgtcttatccttcatatatatagactcttttttttcatctttttcaactgtgaatttttacataattcataaattttatttgataccttgcatagcattgcatttagcaaatacaatttaacatgcttggtttataagtattgacacaaaaaaggcttatgaaaataccttgtattgcatgttgctagggcttattaaaaatatcaaataattttacatgtgtctgtgaaatcagacttattaatgatgcgataaattatgtaactatcatgtctctcgttgatgttgctaaaaaaattgtttaggaagtatatggattaaaagtgcattcttcaaaaagtttaaagatcgagaacataattaacccattaaattattatcaataaaataaccttaaatttaaaatacaaacataggtacatgtaatttatattatcaattattgataaaaaaaaatataataatgtttatgtgaacaaaatatttttttgaccaaaaaataaacgcatgtgttttatattcaaaatcattttacagtttaatatttaatgtgtataaaacagtataattgtagcaagctgaaaatagtttatgaacatatatataagtgttatcataagtctggcaaacatgtttac

SEQ ID NO: 1713 - DNA, 469 bp, Glycine max
agcttgtgtgcagtaatataaaatgtgtccacacacagtcacttgttgctatccagtgtattgttagccttttttttcacattttttttttgcttactcccttttactttctttttctcttttttgttttctattttatcttgtaaaacacaagatgctctagttttaatttaactaatttttaaactagtcaaaataacttataacctactgctcttaaaatgatttgcaaaatacactgtttcacttttgattaagaattacaaaattcacacacaaaaagatgacaatggaacaaattttatactatctctatattgtaattaaaattaatattataaagatttgatagttatattaagttgttcataaattatttttttttatcaatcattcaattcaattttgaataaaactataataatggtttaaatcttgaaaaaataatataaaatttttagaattaaaa

SEQ ID NO: 1714 - DNA, 470 bp, Glycine max
agcttgacgaaatctagatggcgatgcctcagcaacagcttgtacttgtttctcgggcacagcaaagcatacagaatgctcactactagcctacataaatactgaaaatgattaatgccatttcttatatatcagcgtggacaactagaaaaattgaaaaaagttataaatgcacctgagatatcatgataacattagctccaacatcttttactgcaccaaaaatagcactggccgtacctggaacaccagacattccagttctgcaaaaaagcatcaaagaaaaatttattggaatctacaacttggacaattaatattggttaaagaaaaccttaaattaaatagaaatccctcggcaggaaaaaatgccaactattcatcatgtaacacaacttgcatttatgactcaccccttgacgtttacaaatgccaaagttgcctatggatgcaaaatctttgacaaaatt

SEQ ID NO: 1715 - DNA, 439 bp, Glycine max
agcttctaaactttgtacaagaatgaagctctgataccacttgttagacaagtggcctcagatatcttaagaagggggggttgaattaagatattccaaacttttcttctaattaaaaatctatcttactttttacttaagttatgaattcccttaatgacaatcttcttaaatattaattcaaatgaagcaacttgaattatgaatataaagcaataataaataaaggagattaagggaagagaaaatgcaaactcagttttatactggttcggccacacccttgtgcctacgttcagtccccaagcaacccgcttgagagttccactaacttgtaaattccttttacaagttctaaacacacaaagacaacccttcctttgggtttagagattctttacaacaagaaactcacagtctcttaatcccttagagaatg

SEQ ID NO: 1716 - DNA, 485 bp, Glycine max
agctttaaactctatttttaattctatttttctctctaaatgtatattacaatgcatatatttgtaaataattaatgagctcaaatatttaaaatgtattttttttacataaatcttataaaataagtgttagaaacacattttttaacattatccttaacacatttaatggattgaaattgtttaaaaattacaaaatcatttcatggagtcattaaataagatgaatcacacaatttttttataattttaagaaatttcaatcaagaggatgtgtatttaaaagaatgagtgaaaatatgttactaatatttctcatcttgtaatattttgagtctgattctttctaattggatagggaaatacacattatttttgtgggagccacaataatattttcttcgtcccgttataaataatgtttaaggtttttttaaaccgattaaaaaaacaagtattttaaagtgttttgtgtatttcaaatg

SEQ ID NO: 1717 - DNA, 590 bp, Glycine max
  unsure (1)..(590): unsure at all n locations
ttgaatgcactattcaatggagttgacaagaacatcttcagactgatcaacacttgcacagtggccaaagatgtatgggagatcctgaaaatcactcatgaaggaacctccaaagtgaagatgtccagattgcaactcttggctacaaaattcgaaaatctgaagatgaaggaggaagagtgtattcatgacttccacatgaacattcttgaaattgccaatgcttgcactgccttgggagagaggataactgatgaaaagctggtgagaaagatcctcagatccttgcctaagagatttgacatgaaagtcactgcaatagaggaggcccaagacatttgcaacatgagagtggatgaactcattggttcccttcaaacctttgagctaagactctcggatggggctgaaaagaagagcaaaaacttggcattcatgtccaatgatgaaggagaagaagatgagtatgacctgnatactgatgaaggtctgacaaaagcagttgtgctcccgggaaagcagttcaacaaagtgatgagcagaatggacaggaggcagaagcccatgtncagaacatccctttcgacatc

SEQ ID NO: 1718 - DNA, 581 bp, Glycine max
  unsure (1)..(581): unsure at all n locations
tcttatccaaggctcatcttggtggtgaagctccttcctccatggcttattccataatggatggcgcctcctctcacctcttttcctttgtcttccgctgcatctccatggtggaaaatcaccattaaaggaccccattgaagctcaaagatccagcctccatagaagccccacaagcaagcttccatcaccttgccctaatccatttggtgaaatagtcaatggcgattagtaggaattagattgctcctggggcttttggcagtggtcctagtatgcctattccctataaggcaaaaggccaaggggaactcaagctatggaggatgtcangaggggtgtgtggaatgtctacaaactcttggcatcgcctgaacctccttatgaagtcaagggtgtcggccaataatagccggcgcgcaccacttangttgctagggagcgacccctgatatggaggtcacagattccttcatgtagctcttgcatgagatagtctacttgttggttttttaggcatttaagcaatgatgtgttcaaccctcttttgaatagctcaccatcaaggatggcgttgtatc

SEQ ID NO: 1719 - DNA, 406 bp, Glycine max
ttttgtctctcttattaggcaatggttggccctctctctctctattgtgaaatcctcatcttttattcttttctacttttgcagcaacaacaaatttaatcatcttttcaccgacgagcttgtccctttcaataccaaccccgacaagatgctcgacctccaacacaccaccaccttcctcccctgcaccaagatcaaagcctctgctgattcctctgtcaccgctgactctgacctctgcattttcactactggcgcccgccagatcactgatgagtcacgcctcaacctcctctagaggaacctctccctcttcggcaccaccattctgactctcgttcgttactcccccaacgctattctcctcatcatttccaaccctggcgacattctcacctacacacat

SEQ ID NO: 1720 - DNA, 441 bp, Glycine max
agcttgctaacccatggaagctcctaatatctcccacactttttggggtgggccattcgtggatggccttgatttcccagggtccacatggaccccatttctaccaactacaaaacctaagaaaactatattatctacacaaaaggtacacttctctatatttgcatagagggtgtttttcctatggactgaaagaacttacctgagatgtcctaagtgatcatctaggctcctattgtacactaaaatatcatcaaaataaacaactacaaatctacctatgaaatcccttaagacatgatgcataagccttataaaggtgcttggtgcattactgagcccaaaaagttggtcttgaaagcgaattttcactcatcaccctttttcatcctgatttcgggataaccacttttaagaacaatttttgaaaaaatattggca

SEQ ID NO: 1721 - DNA, 381 bp, Glycine max
agcttgcttctacacttctccttgaagtggggtctccaatcacctttcctctgtctccattccactaccactgatcttcaagaagcaaaggactccattgatgaaggatatccaaggcctacaagttctacatggagctacattatgtggtatcagagtatcttcatctaggtgatcttttgcttactctatcttttgttcgggcaattcactttaatttctttttgttcatcgtcttctccatgtatctcctccattgtctagtggtttggtgttggttaaattacattcaaaaaaataaaatgatcaaaacttagatctacacttgttcttgcatttccatggggtccaacccatgcctcatcaattaaggaatgcttt

SEQ ID NO: 1722 - DNA, 519 bp, Glycine max
ttgagcaaattcaaacgacaataactctttactcggatgtctgattgagtcctgtaatatatcgagacgctcgaaatggaataccgaagctctgagcaaatttaaacgacgataacctttttactcggatgtctgattgagtcccgtaatatatcgagatgctagaaattgaatgttgaagctctgatcaaattcaaacgacgatgactttttactcggatgtccgattgaggctcgttatatatcgagacgctcgaaatggaatatcgaagctctgagcaaattcaaacgataataactttctactcggatgtccgattgagtcccgtaatatatcggaacgcttgaaattgaatgttgaagctctgagccaattctaacggcggtaagtttttactcggatgtctgattgagtcccgtaatatatcgagatgctcgaaatggaatgttgaaactctgagcaaattcaaacgacaataatcttttactcggatgtctgatggaggcccgcaatatatc

SEQ ID NO: 1723 - DNA, 451 bp, Glycine max
agcttctacattcaatttcgagcttttcgatatattacgggactcaatcggacatccgagtaaaaagttattgtagtttgaatttgctcagggcttcggtattccatttcgagcgtctcgatatattacgggactcaatcggacatccgagtaaaaagttattgtcgtttgaatttgctcagagcttcggcattccatttcgagcatttcgatatattacgggactcaatcagacatccgagtaaaaagttattgtcgtttcaatttgctcagggcttcggtattccatttcgagcgtctcgatgtattacgggactcaatcagacatccgagtaaaaagttattgtcgtttgaatttgctcacagcttctacattccatttcgagcttttcgatatattacgggactcaatcagacatccgagtaaaaagttattggcctttgaatttgc

SEQ ID NO: 1724 - DNA, 618 bp, Glycine max
  unsure (1)..(618): unsure at all n locations
ttgctggtaaaggtcttgaatgaagctcacgtagcccaagacatctccgtagaaggctttgggggaatcgtcaataacatcaaagccaacaactacctcaccttcgctgaagaggaaatccccgccgaggggagaggacataaccaggctttacatgtgtcagtcaaatgcatggaacacgttatggccaaagtactcatcgataacggctctagcttgaacgcgatgcccaaaagcacattggagaaattgccatttaactcttcccatctaaggccaagttccatggtggtctgtgccttcgacgacagccgccgagaggtaaggggagagatcgacctcccagtacagatagggcctcatacctgccacgttacattccaagcgatggatatcaacccagcctatagctgtcttttggggcgtccatggatccactcagtgggagttgtcccctccacactccaccaaaagctgaagtttgtagtggaaggacatatggtcatagtatcacgtgaggaagacgtcctgntaagttgcccttcctctatgccatacgtggaagccgcggaggagtcattataaacgactntccaatcttttgaggtagtaagcatc

SEQ ID NO: 1725 - DNA, 486 bp, Glycine max
  unsure (1)..(486): unsure at all n locations
ttagaggtgctagtggaagtagaaagaagttgattgtaccctttaattaaatcttctctagatttgaatattacctcttcaccatcagagttgacagtgttatcaggctaaggatgtatcaaccattagacataggttggtttcttcctcattgtccttatcagacaatgaattatccaagtcctcccaagtgttcatgaggcttttagatgcaatcctaccccgcaagggcattggatagaagactccaagtttattgggccagagatccaagggaaggccctanggttctcatgagccttanggtagatttcgagcccatgggctaagtatgagcccgcttatctttgtaaatattagaatagatttttcctttgcttcgcgcccttgtatttggccattctagtaatatagggctttaaccctgtatttcggggcattttgagtagtctttgtaacaacgacttttnttgtttttcatgtttt

SEQ ID NO: 1726 - DNA, 565 bp, Glycine max
agcttttggtacaaaagaagaagaagaataacttcaaagagatttcaaggcttgtaaatgattgtaagagattgttagaaagattgattaaaaatgcaaaacaaagccttacttttatagactcttcatgtatggtcaagaaagccattcagaagagttataacttttagaaaaacttaaaacccatttgaaagggtcaaaacctttttgaagagttacatctttagatttttcagaaacaaacattggtaatcgattaccaaataagtgtaattgattacacaaagattttgagtgaaacaatgtgactcttcacatttaaatttgaatttcaacgttcaaggacactggtaatcaattaccaaatcattgtaatcgattacagccttttgaaaatatttggaacgttgtaaattcagtttgaaaactttttcaaactcattttgctactggtaatcgattacaacaatatggtaatcgattaccagaagagtaaaactcttttgtaaaggtttttgtcaaaactcatgtactattcaaaagttttgaaaaccttttaatactt

SEQ ID NO: 1727 - DNA, 565 bp, Glycine max
ggctcaaacacgctatgaccaactcaaccttattgaaggtaaacgcttgatggccatgtgccatgggcgcctatatcaacaaagaatgaagaatgtgttcgacaagaaagtgcgcttgcccaagttccacgaaagggaccttgtgctgaaaaagatgtcccacgctgttaaagaataatcgagggaagtgggcctccaactaccaaggacctttcattgtgaaatgggctttttccggaggggccttggtgcttgccaacatgaatggcgaggagctacctttacccgtgaactctgatgttgtcaagcgatactatgcttagaatctggggcaattaaggatatcattgcatgttcttttatttttatgtgttcttcttgggttcccccaaggattcccgtctgctgtatatttctcgtcacagtctttttaaaaagaagagaacaagagtttgaggcttcaatcctcactttgggctttaaaccatgtgcagtttgtgataacctgagcctttttccttagtccatgggatgccccaagcgcttaattaaaactgaacctgac

SEQ ID NO: 1728 - DNA, 716 bp, Glycine max
ctattaactatgttttttcttattaataaaaatccagacagcattaatgattttataataattcaatgcaccatatttaattaacttagttaaatatccttgacaatttctaagctacttaatttcacttcctggacaataattcatattatccaatttatactatctataaggtaaaaattacaaatacatgaaagtttgaaagcaccgtaggatttgttaataaaaaaacatgaagcaagtgggttcgaagggaacttcatgaatccttataattttgttttaatcagcataggtatacgtatattaatataaatgaaagacaaaaatgggtgccccaaccattttccgtataatgtagattcatggagaaaatttaacaatcaatatattttctgacatacttttttaatattgattaaaattataaattaaatttatagatcttgatttattttaactagtattttaaatttgcaatttattgaataaatttttatttatatataataataataatgtaaagttaccaaccaattagatatttttaacatttaataaaatattattaattaaaaacttggaaaaaaaaaaatttaaaaatttataaattatatttttgaatttattactaaaaaatttcaaataggggatattaggtaattttttttaaaaattaaaatgaatacgggggttaaaaataaaggattttttaa

SEQ ID NO: 1729 - DNA, 548 bp, Glycine max
  unsure (1)..(548): unsure at all n locations
tatatactatatgatgaactaagttntatatagctcttaggtgtaataactatttaaatagccaaagccaagcgctaaatataattaaacttatattccgtccaagcttaaaaacagctatttatatacaagatatatctttaaaataacaaccagtcacatggatattgtcaaataattgaaaacagtgtgtgggcctgttattatcaaatcacttgtaaaacttaattatatgaagagcacttaatgattgataaactatttactattaatatcagataaaaattattggatagagattattttcttccttcgacatgtttaatcatcatttgttttaaaaaccccctgatttataatttaattaaaaataatgtttgtcctgagggctacttccatcaaaagtggaaactatttttttatacttgccctttactcctcatcaatcataatctgtgatttttaagatataaccctcctccgttgacatccaatttagcatattaaagaaaaatggtgcgccattatacaacattgataaataagtt

SEQ ID NO: 1730 - DNA, 455 bp, Glycine max
agcttaaaagaatcagaggggctcaaacacgctatgacttactcaaccttattgaagggaaacgcttgatggccatgtgccatgggcgcctatatcaacaaagaatgaagaatgtgttcgacaagaaggtgcgcttgcgcaagttccaccaaggggaccttgtgctgaaaaagatgtcccacgctgttaaagataatcgagggaagtgggcctcgaactacgaaagacctttcattgtgaaatgggctttttccggaggggccttggtgcttgccaacatgaatggcgaggagctacctttacccgtgaactctgatgttggcaagcgatactatgcttagaatctggggcaattaaagatatcattgcatgttcttttatttttatggggtcttcttgggttcccccagggattcccgtctgctgtatatttctcgtcacaagtcttttaaaaa

SEQ ID NO: 1731 - DNA, 400 bp, Glycine max
atactgaaacttttgcccctattactcatctaaaagcaatacacattttactatcccttggtgctcatcatgggatgatggtgtatcaaatggatgtaaaaatcatatttctcaatggactaattaaggaagaagtctatgtggaacaacccctggagtttgagaattctatctaccttcatcatgttttcaagcttaaaaaggaccttgtatggtttaaaacaaactccttgagcttggtatgaaaagctaagtttggttataactgaaaatggctttaaaagaggaaaagtagatactactttgttgcccaaaaattatggtaatcaattcctaatcggctagatatatgtggatgatatcatatttgatgctcctaatgactctttatgccagcttt

SEQ ID NO: 1732 - DNA, 687 bp, Glycine max
gcttcccaagtttttaagttattcctcaaaactgtcctaagcaaagttcccaaagtcctattaacaacttccgtttgcccatcggtttgggggtgacaagtggttgaaaataacaatttaatgcccaacttgctccacaaagtcctccaaaaacgcaaatcatcaagcctaagtataggatgcctatatttaatggtgatgttattaagggctctacaatcagaacaaatgtgccatgtcccatcctttttagggaccaaaatcactgggacagcacaaggactcatactatctcttacccaacctttgctaatgaattcatccacttgtctttgaatctctttggtttcttttgaattacttctataggctggcctattgggcaaagaagctcccggaatgagatcaatttgatgctcaattccccctcaaggaggtagtccacttggcacatttggtggaaacatgtcatgaaaatcctgcaaaagaattttaacactagaaagcacttaaaatcatcaaaagtgttaggggcaaaatctgatttttgcataacaagatatagaacgactgtttaacaccaaacaaccctcttgacctcactttttgtgggttaatacctctccctcactctaagggttccccctttcttttggaccctctttttccctcccagtggttccctca

SEQ ID NO: 1733 - DNA, 437 bp, Glycine max
agcttgaaccaagatcaatctcaatggtcttgtttctaatgagaccatccctttttttcagataagctctttctgcctctcccacttctcgcttggcacaagcacaatgatccaaccaaatccccaacacttgcttggaaatggggtccaaatggtccctgatgatctcctccatgcgttccactccgccattttccgtcagaacgcgaaccattatggctgtaggagaagaaacagtgcggatgtaaagggaagaagaaaagtatggttgaacctctggaactctctccagagtctgcctatgtttgtctagttgagtgtcctcatagaaagttttgaggtcatctggccaaagcacatggtctttccggggaggccaatcaagaatgagaagtagcattgttggactactggggatcatttcaaacacaaaattt

SEQ ID NO: 1734 - DNA, 505 bp, Glycine max
tcctatacatatgatagagagggttcacatcaataatgtggttctatcatatgctaaaagttttacgattccatgcaaccatatacatctaggatacatgtgggcatgtgcatttgagttttgcttaaaataaccttattttctatccagaagtcccatatgtgtaatactattatcccaaagaaaaattataatttttgctatattagattactaatagaaactttcttattaactattatgaataaatcaatatggagattatagtgtttatctattttttaattttcaaaatcctttatgttgaatagaatgaatgaatggctatagaataattagccatatgaaaaacccaatgtactatgacagaaattcctaagaatgatatcatgactttacctagccattgaaccaatttgcccaattaatgaacatggagatgtacccacatgtagaggtatacatgcatcaccattatttcatttttaatttattgtgcaaaaat

SEQ ID NO: 1735 - DNA, 395 bp, Glycine max
aaggtctatgactcagtctcatgggtttttttggattatatgctgcaaagaatgggtttctgccacaaatggagacactggatgtctgcctgtctcagtcaataagcatttctattcttatcaatggcagtcctaccaaggaatttgctcctactagaggtttgaagcaaggtgatcctttagcccccttactctttaatataattggagaaggcatcacaggattgatgaacgaagcagttcagaagaacttatatagaagctatatgggtggaaagaaaaaggaacccattaatattttgcagtatgcggatgacacaatttttgtgggtgaggcttattgggaaaatgttattgcttttaaagctatgctcaagggatttgaattggcctca

SEQ ID NO: 1736 - DNA, 516 bp, Glycine max
agcttcaaaaaaaagatggcctcggcaaactccttatttccagaagggaattctatcaatagacctccaatcattaatggagagggttaccactactggaaaacccgaatgcaaatttttattgaggcaatagacctaaatatttgggaagccatagaaatagggccttatatacccaccacagtagaaagagttacaatagatggcagttcatcaagtgaaagtataacaattgaaaaacctggagataaatggtctgaagaggatagaaaacgagtacaatacaatttaaaagccaaaaacataataacatctgccctgggaatggatgaatatttcagtgtttcaaattgtaagagtgctaaggaaatgtgggacactctttgattaacacatgaaggaactacagatgttaaaagatctaagataaatgcactaactcataagtatgaactaattagaatgaatgtcaatgaaaatattcaaagcatgcaaaagagatttacacatatagta

SEQ ID NO: 1737 - DNA, 408 bp, Glycine max
caatagaaactatatgacttggagaattctatgccacttcaaccttttgaacaacaagtgaaggacctcaagataacccaagctgacctttgggaaaagctactatgcaggagtctattgtgaggcagaaatcaagatgcatatggatcaaagagggggacaacaacacatcctattttcatagagttattaatttgaggaggaggataaatgctttgaggggggtgcagattggtgacacctgggtggaaaatcctaacattataaaggctgaaacccttcatcattttcagaacaggttcaatgagcctcacttgagcagacctaacttggatggggtttcatttaaaagtctgacttctactcagagagaaactatgattgaacccttttatagaggaagagata

SEQ ID NO: 1738 - DNA, 445 bp, Glycine max
agcttatgcttttaatttagcccatttaaatataagtatgagcaacctttctttttcagaagccaagcttgaacttcaagtgttcaacttggctagatagacttgtttgcacctttactgataaatgactaatcagaaaattaaattcacatagaggaatacaatcattatactaatgtataggtgacagacacaccttacttttgcatttaaccttgtagactgcctctctgaatgatgagacaaagctgttattaattctgatctgccaataaaaaggcaggggaaataaaaagtattagctgtgaaatatagaggtgagaataagaacagaaccaacctgtgcatgatgaagatctggctcaatgtgtttcctaaataatggaaaaatgctatcaataaggtaatccagtgaacaagaatctccaatgtcatagcgaacttt

SEQ ID NO: 1739 - DNA, 213 bp, Glycine max
tctcagcttcaccttaggagacggaccattccaagtgttggagaagatcaacgactatgcctacaagattgacttgcctagtgagtattatgtaagtgccactttcaatgtgtctgacctatctctttttgatgcagatggcggagcctttgatttgaggacaaatcctttttcagaaagggggagggatgaagacataacccaggaccatga

SEQ ID NO: 1740 - DNA, 416 bp, Glycine max
agctttgagctaattcaaacgacaataatgttttgctcggatgcccgactgagacccgtaatacatcgagacgctcgaaattgaatgttgaagctctcagcaaattcaaacgacaataactttttactcggatgtctgattgagtcccataatacatcgagacgctcgaaattgaatgttgaagctctcagctaattcaaacgacaataacttttttactcatatgtctgattgagtcccgcaatatatcgagatgatcgaaattgaattctgaacctctaagctaattcaaacgacaataatcttttggctcggaagtctgattgagtccccgtttctattgagacgctcaaaatagaattcttaacctcctagctaattaaacgacaataacttttttctcggatgtctgattg

SEQ ID NO: 1741 - DNA, 433 bp, Glycine max
  unsure (1)..(433): unsure at all n locations
tctgtggtgcacaagaattctattatttaaatattcaatttcccaaacaaaaatttgggcatcataggtctttcatatcaaattatttctttaatcaatctatagcttttggaaagctcttcaagagctccaaanatatttacataatctacataaacaacagttatgaaaaatctattttttcatattttcatgaaaaatacatggacaaataagatcatttctatatccttcctttagcaagtactcactaagtcaattgtaccatgtgcgacttgattgccttagtattattctctagaatatgcattattgggtcaattatatccttcaggaagttttatgcaaatatcattatcaagagagtcgtataagtaaattgtacaacataaaaacatccattagatctaaactaagtcctccatgggctact

SEQ ID NO: 1742 - DNA, 394 bp, Glycine max
agcttaagctccttcaactgcacaagctcttaatatttgaagagtatccttgtggaaccttcacctgacgaagacactgacaaaaacttatcttctccttcttggacaaaatatggcaggctgggggcaagtaaattttcttcccatcataccttggatgcaaatgtgattgtatacccatatcaggtagatcttgacgggtattcaagccatccttcgtcttgccttgaatgttaaagagcgtcccaaccacactgtcacaaacatttttctccacatgcataacatcaatacaatgtctaacgtcaagatcacaccaagtcggaagatcaaagaaaaaggacctcttcttccatatgcaactctgacttttatcctttttttggggccttcc

SEQ ID NO: 1743 - DNA, 432 bp, Glycine max
taaaggtgtgtagcccaccatcttttcatagtagaatactgtttatgtgtctactattattgtcatcatttgtttttccatcattgaggtgccacttgagctgccaggtctctccacctttgggcgtattcttttgaaggattcgtgccccctttttgcacatgttttgtagttgcatcctatccgaagccattatactgacactgcctaacgaaggcaaccattaggtccttccaagaatggactcgggaaggttccaagttagtgtaccaagtaacagctaccccagtaagactttcttggaaggaatgtatcaacaattcctcatcttttgcatatgcccccatctttcaataatacatctttagatggttctcggggcaagtagtccccttgtacttgtcaaagaccagcaccttgaacttgggaggg

SEQ ID NO: 1744 - DNA, 457 bp, Glycine max
tcaacatcagaccactttcagggtgctggaactacttttatttttttgatggggcctatgcacgttgaaagccttgtaggaaagaggtatgcctatgttcgtgtggatgattttctccagacttacctgggtcaactttatcagagagaaattagaaacctttgaagtattcaaagagttgagtctaagacttcaaagagagaaagattgtgtcgtcaacaaaatcacgagtgaccatggcacagagttagaaacaacaggttcactgaattctgcacattctgaaggcatcactcatgagttctctgcggccattacaccacaacagaatggcatagttgagaggaaaaacaagactttgcaagaggctgctatggtcatgctttatgccaaagaacttcctaatatcttctggctgaagccatgaacacagcatgctacatcccaaccgagtccc

SEQ ID NO: 1745 - DNA, 255 bp, Glycine max
tgctggaactacttcacatttatttgatggagcctatgcacgttgaaagcctctgaggaaagaggaatgcctatgttgctgtggatgatttctccagatttacctgtgtcaactttatcacacagaaagtccaatcctttgaagtattctacgagatgagtctgagacttcaaagagagaaagattgtgtcttcaagagaatcacgagtgaccatggtagagagtttgaaaacagcatgttcactggatgctgca

SEQ ID NO: 1746 - DNA, 589 bp, Glycine max
agcttatagggagccatgccaatggtaaagtgaaaactattgttataagttaactctatcaatggaagaaaactctcccaacttcccttcttctccaagacacacgccctcaaaaggtcctccaatgactgaatggtccgttcagtttgtccatcaatctaaggatggtaagctaaacttaatctaagcttggttcccaatgctctgttcaagctctcccaaaatctagaggtgaatctaggatctctatcagatactatgctagatggcacaccatgtaatctgacagcctcacatatatacaaggaggtcaacttctccaaggaaaatctgatattaatgggaatgaagtgagcagactttgtcaatctatcaacaataacccagatagaatctaaacctctaggggttctaggtagtcctaccacaaaatccatggaaatactgtcccactttcactggggtatctctaaaggttgtaacttccctgaaagtctctgatggtctatcttagccttctgacagactaggcatgcatacacaaactcactaacctcttcttttatgttgggccaccaaaacatcggct

SEQ ID NO: 1747 - DNA, 414 bp, Glycine max
agctttgagccaattctaacgacaataactttttacttggatgtccgaatgagtctagtaatatatcgacacgctcgaaattgaatgttgaagctctaaacctattcaaacaacaataacgttttactcggatgtccgattcagtgacgtaatatattgggatgctcgaaattgaatgttgaacctctgagccaattcaaacgacaataactttttactcggatgtctgattgagttccctcatatatcgagacgctcgaaattgaattttgaacctctgagccaatttaaacgaaaataacgttttactcgaatgtctgattgagtccccgaatatattgaggacgctcgaaattgaatgttgaaactctgagccaattcatacgacaattactttttactcggatgattgat

SEQ ID NO: 1748 - DNA, 509 bp, Glycine max
aaactttcctttcttattaatcactttgaatgttatatcacaaaataaattatatttaaacatttaaggcaaagctattccgagtaatgggagagttgaccttttggtatattcttcaaactacaaaatatgtttggaacaaagaaatcttttcttgaacttggatataaatatagcactaaggaatataccaaatctgagatacttctcaatactagtttgtaaaagctaaatttctaacatactccatattttaatttctagttttcagcaaggtatttttgttgcttttaaagtgtaaatcggtttgaaaatctttttaatatttagttctaatcaagtttattattagatattattcaatcaaaactaattaaacacacaacacaaacttgagaagcaaggaaaggatattgaacatgagaatttttttattgattcacctataaccctgggctatacattcagtcattacaacttaattataggatcttctacgtggaaaaaaa

SEQ ID NO: 1749 - DNA, 516 bp, Glycine max
agcttcaagaattatggcctcatcaaaatacttgtttcccgtaggaaattctataaataaacctcccatctttaatggagtgggttaccactactggaaaacccgcatgcaaatctttatagaggcaatagatttaaatatttgggaagccatagaacaaggaccttatgttccctctataataaccggaagtgcaacaatagaaaaacctaaaacaaattggactgaggaagaaagaagattagtacaatataatttaaaggccaaaaatattattacatctgccttaggtatagatgaatactttatggtttcaaattgtaaaagtgctaaggatatgtgggatacactacaagtaacacatgaaggcacaacagatgttaaaagatctaggataaacactttaacgcgtgagtatgaactttttaagatgaaatgtaatgaaaatatacaagacatgcaaaagagggtcacacacataggtaatcatcttgcatctttaagaaaaaccttttc

SEQ ID NO: 1750 - DNA, 404 bp, Glycine max
agcttttgagcaaattaaatggtcataacttcttactcggaggtccgattgaggcgcataatatattgagacgcttcaaattgaaaaatggaagctcttgaaaaaatcaaatgggcataacttgtgacttcggagtcgaattcacgcccataatatatcgagacgctccaaattgaacaatggaagctcttgaacaattcaaatgggcataacttttaactcggaaggtccgattgaggcgcataatatatcgaaacgcctcaaattgaacaatggaagcttttgagctatacaaatggttattacttttcactcggaaatccgattcaggcacataatatatccaaacgctccaaattgaacaccggaagctttttgaacaattcaaatggtcataactttta

SEQ ID NO: 1751 - DNA, 538 bp, Glycine max
ttaaaatttgaattaaaacgttcaataactgctagttaatcgatttaccatcccaggtgtaatcaattacacaatttaaaatttgaattcaaatttctaatagctgttttaaatagtttcaactgctggtaattgattacaatacttatgtaatcaattacatgctttcaaaagtattcaaaatcattttaaaagcatttcaggaagcattttggccactagtaatcgattacatcctctggtaatcgattaccagagagtaaatctcttgtaaaaacattttaacttatattctttggccaaacctcttgttgtctcaacttggaattcccttcctaagtctctagagattatcttgatcatatatcttgaatttcttggattcttgtgttgaattaaacttgagaagcgcagcatgatcctcttgaattaaacttgagaagcacatggtccttttgcatcatcaaaaacataaaatggcctttgtttctacaaaattatctttgatttggtatatagagctcttgcgttggacaaa

SEQ ID NO: 1752 - DNA, 556 bp, Glycine max
  unsure (1)..(556): unsure at all n locations
agcttgtataaccatgtctagatatgaagttattgaaacaatcaagaatgttcttttaatgaatattggggctcttataccaatattgagaaggaaataataacattatattctctaacaccttttgacacacttttttatttggtgaaattgatgtaagtctcactaaatgagactcatttcttatttggcgcatctccttttaaactagtggaattcaaataaattttaaccaatatcagaagagagtctattagaaagagaattataattatgttacacgaggctgaagtgccctgaatagcagactgataaaagacaagaaattttgtttgcaggtacttactccttcgtactcactccaaggaggctttccccgtgaacatttcaataattgtacaacccanactcccaatattaacagcgaaagccaggtcagagctgttatctttttgcacaaccgcttgaaaaagctgcatgtatgaggaataagtgtctatagagaacgcatgagacatcgcggagttatagagttataaaccttaatagatatacc

SEQ ID NO: 1753 - DNA, 469 bp, Glycine max
  unsure (1)..(469): unsure at all n locations
agctattcctctagtngctctgatagggtttcctagtcattatatagaaagagaatggattggagcctcaattatattgtctctgtgcgaggggcatttctttctctacaaacattattttgcacatcccaacggtgggaatatgcggaaatgagttccgaatgtggtgaccaaattctatgatgctccaatggttaatgaatatgggatcatacttttacttacacaagtttgggtgtatgcatgttttgggagaggaagaagcgataactaanttgagaggaagaaagagcgcatagacgtatccgatgtgtcaaaactgacctaatgtgtccatttataactatgagaccgagtctactatatatnctatctgttgctataattaattactncataaaaagagagctctattatactctctatcaaatacataaatataacatcctcttatgttctaaaaacacat

SEQ ID NO: 1754 - DNA, 431 bp, Glycine max
  unsure (1)..(431): unsure at all n locations
ataactttcactcggaggtccgtattangcgcataatatatcgagatgctcgagattgaacaacgaaagctctcgagaaatttaaatggtcataactatcaacttcgaggtccgattcaggcgcatactatatcgagattcacgaaattgaacaacggacgctctcgagaaattcaaatgatcataacttttctcacggatgtcatgattaggcgcataatatatcgagacgctcgaaattgaacaacggaagctctctaaaaattcaaatggtcattacttttcactgagaggtccgattcatgcgcataatatatcgagacgctcgaaattgaacattggaagctcttgagcaattcacaatggcattacttttcactcggaggtccgaatcatgcgcatactatatcgagacgctcgaaattaacaac

SEQ ID NO: 1755 - DNA, 182 bp, Glycine max
gccactgcaactgaattcttacatgattacccgaagtagcttgtgtgcacttcacagatggagcatgcatgaggacccttgacactgtcaccgtatggattcccataggcgggactgccattattggttccaatcagcatggctcgcatcataaacgtctcattgcgaaacgcatctaacac

SEQ ID NO: 1756 - DNA, 458 bp, Glycine max
  unsure (1)..(458): unsure at all n locations
taataagtccatctatggattgaaacaagcctnccgccaatggtatttaaaatttcatgaggtcatttcttcatttagctntgaagagaatgtcatggatcactgtatataccagaaggtcagtgggagtaagatttgtttccttgtattatacgtagatgacattctgcttgcgactaatgataagggtatgctatatgaggtgaaacaatttctctcaaagaaacttgatatgaaggatatgggagaggcatcttatgtcataggcataaagatccatagagaaagatctcgaggcattntaggcttgtctcaagaaacctatatcaacaaagttntagagagattaatatgaaagattgtcaccaagtgtagctcccattgtgaagggtgacanacttgctttgagtcaatgccccaaaaatgattttgagcgggaacacatganaaatattcca

SEQ ID NO: 1757 - DNA, 371 bp, Glycine max
agcgtctcgttgtcgaagttcgagcgtctcgatatatcatgcgctttaaacggacctgcgagatgagagctatgaccatttgaatttctcgaaagcttgcggcgttgaagttcaagcgtctcgatatattatgcagcgtgaatcggatgtacgcagggagaagttgggaccatatggatttttagagtgcttccgttggtcaatatcgagcggctcgagatattatgcgcctgaatcggacctccgagatagaagtcatgaccatttgaattcctcgagatgtctcgttgttcaatttagagcgtctggacatattatgcacttgactcggacctccgagtgaacagtttgaccatttgaatgctcaagag

SEQ ID NO: 1758 - DNA, 294 bp, Glycine max
agctttaactcggaggtccgattcaagcgcatatatatatcgagacgctcgaaattaaccaacggaagctctcgagaaattcacatggacataactcttaactcggaggtccgattcatgcgcataatatatcgagacgctcgaaattgaacaacggaagctctcgagaaattcaaatggtcataactttgcacacggaggtctgattcaggcgcataatatatcgagacgctcaaaatttaacaacggaagctctcgagaaataccaatggtcataacttttcactgggatgt

SEQ ID NO: 1759 - DNA, 419 bp, Glycine max
gtacagcagatgccactctactccaaattcttgaaggatatgttaacaaggaaacataagtacattcaccaggaaaacattgtagtggaaggaaattgtagcgttgtgattcaaaagatccttccacctaagcataaagaccctgggagtgtaactattccttgttcaattggagaagtcattgtgggaaaggctcttattgacttgggagccagtataaatttaatgccactctccatgtgtagaaggttgggagagttggagatcatgcccactaaaatgactttacaactggctaaccgctccattactagaccatatgcagtaattgaagatgcgttggtcagagtgaaacattttatcttcctggtagactttgtggtaatgaatatctgtgaagatactgacattgctgtata

SEQ ID NO: 1760 - DNA, 490 bp, Glycine max
agtcacctgcggcatgcaagcttcattctacacctgaaaaagaggatgagatagttgcacaaaggagaaagcttcctaacaaaaattttcatgcaggtggaccttcttctagtaattctaacttaccgcagcctcctatccctcttccattcccacctagagcaattctagacaaaaaaatggaagaagtggaaaaggagatcttggagaccttcaggaaagtagaggtgaacatacctctgctagatgccatcaagaagattctaagatgtgccaagtttctaaaggagttgtgcacccacaaaaggaagctcaagggcaatgaaaggattagcatgggcagaaacgtgtcagcattgataggtaaatctgttcctcacattcttgagaaatgtaaggacccaggtactttctgtataccttgcattattgggaacagtaaatttgagaatgccatgctagatctaggagcatcagttagtgtcatgcc

SEQ ID NO: 1761 - DNA, 244 bp, Glycine max
agcttgtaggccttggatcttcttcatcaatggagtcctttgcttcttgaagatcaatgacaatggaatggagaaggaggaaaggtgattggagactccacttcaaggagaagataagttgagaacaagctcaccaccataggaagccatggataagagcttgaaggtaagagaagatgagtagagggagagaagagggagaatgaggtcttaactttgaagtctaatttctcaaatcatcaaa

SEQ ID NO: 1762 - DNA, 459 bp, Glycine max
  unsure (1)..(459): unsure at all n locations
gacaacgatcagaagacaaccttttcctgtaagatataattgaaacttattgagtcttacatcctgggtttgaaagatgagatatatcatgtgactaaattatcattcatctcgatcaatacattgataagcaacccttcaattcatgttataccttaaagttgaattcttcatctttaaccttatcgtaaatttgggattcatttcacaccttatctttgcaaagccgaaaaaattattttattcttgatccgtaaaaagaatactctctaaatcattttaaacaatcaccttttttacctttatctgtatgtttaattttttgtctattcttttcaaatattatattctttatcaatctaaaaattaatgttcaatattctattaaatgagaatgtcaataattaaaaataactctatattggaacttaaattgattntataaatctacgtgctcta

SEQ ID NO: 1763 - DNA, 259 bp, Glycine max
agcttctccggtcaatgtcagaccgtaccgataccctcattatcagaaacaagaaattgagaatcaggttgatggcatgttgcagcgaggcttcatacaaccaagcacaagcccgttttcctcacccgtgttgtttgtcaagaagcacgataggtcttggcgcttatgcgtcgactaccgtgctttaaatgctttgacggcgcatgatcagtttccaagtgcgactgtggatgaactcttggacgaatatgaggcgcca

SEQ ID NO: 1764 - DNA, 394 bp, Glycine max
  unsure (1)..(394): unsure at all n locations
ctacgccnaacatgagaccacttccagggtgctggaactacttcacatggattcgatggggcctatgcaagttgagagccttggaggaaagaggtatgcctatgttgatgtggatgatttctccacatttacctgtgtggactatatcagagagagatcataaacctttgaagtattcagagagttgaaactaagactttaaagagagacagactgtgtcatcaatagaatcacgagtgaccatggctgagaataagaatacagcatggtcactgaattctgctcatctgaaggcatcactcatgaggtctctgcagccattacaccacaacagaatgggatagttgagatgaaaaacacgaccttgcaagaggctgttctggtcatgcttcat

SEQ ID NO: 1765 - DNA, 364 bp, Glycine max
  unsure (1)..(364): unsure at all n locations
tgtctattactcccaatagacgtcctcctggtgttgcaaccttcttcaacccaatagacatggctntgctgtcagctgtgaagcaaggtacttttgtagttcaagcagcaggaaatactggaccatcaccaacaagcatgttctccttcagtccatggatctatactgttggtgctgcctctcatgaccgggtttatagcaactccatatntcttggaaataatgtgaccatacctggagttggtcttgcacgtaagtttttgtttctcaattcctggtaaatggttaaccttataagaatttattntagactaactcaccagagggggggtaatgttactgactttaatgattggactttctc

SEQ ID NO: 1766 - DNA, 205 bp, Glycine max
  unsure (1)..(205): unsure at all n locations
agctttntccaagttaataaaaaccatatgtaagtctctntctttgctttggtaactatccatcaatccctgttaaagataaatgacttctgttgtagactttcttggtataaaccaaattgattctttgcaattcttatttcttatctatgaccaatcacttgttctcataatttcatagtgtggtaattaacgttgaaagtga

SEQ ID NO: 1767 - DNA, 463 bp, Glycine max
  unsure (1)..(463): unsure at all n locations
agcttgatggtgttgagaagaaatcacatgtttgtcatcatcaaaaagggggagaatgtgaatgtatgtatacatgattntgatgatgtcaaaagaagaatcaaacaaggctcattntgtttaaagattaatacaagattgtttcaacaaacaaagccttgattcaagatttcttcaagatcaagccttgcctcacaatgaaaggtttcaagtcattcaaggcacatgtaatcgattaccaatacatgtaatcgattactaatggtttgaaagtgtgtaatcaattacacatcatatgtaatcgattaccagagacaatgaacgttgggaattcaaatnttaaatgaaggttcacaattgttcaagaaaaacaactgtgtaatcgattacactaattctgtaatcgattactagagaggattttcaaggaatatcgccaacagtcacatcttatcatttggat

SEQ ID NO: 1768 - DNA, 478 bp, Glycine max
  unsure (1)..(478): unsure at all n locations
gcatgcaagctntctgctcatagaacannatttnttcttcctctcttaattctccaacatctgaattcaatttctcaaaagtgtgcctaaattctctcttcagggcactgtaagagtgcttcagcctctctttaagctccccttgcttcctactgttgtattttggcatagaccaaatctgtccagtaacaacttcctcttctcttttcactttgtattggccaagtagcccactcaattggccatcatatgagcatttttgctcccacgcatcagcaataaaatcagcagatcctggaacttcaagatctttatcatacggtatatcgccagtcacaaagttcaaatagggagcatcaatatcttcatcataagcatctttgatacgccggtaaagtctacccaggaatttcttcgacctgtaagactggtgccgctctttccccatganatcagggtacaattttggtttcagatg

SEQ ID NO: 1769 - DNA, 455 bp, Glycine max
acacattttaattttatagggataaaaaatatatacaaaattttacatagataagatttaaacattttaatatttattggaatataaaaacatattttagtgcaatatatatgactggattatgaaagaaacagcaaagagaatattaaaaacatctaatataaaagcaacttttccaactaagaatatatataagtgaatattggatgtaatatttaatttcttaaaatcaaatcaaattaactcttgtgatgatcggaacaaaaaggaagttggcatgaatgcagccttctggcgtactacctgtaatattgtggtaagcgcttctgtacttgatcgtatcaattattctttataaataaaaaaaacaatcgaagttagtatcgacgcgtatattttgaaagttgaagacgtgtttggataaattgtgaaaccgacggtgaccttacacttga

SEQ ID NO: 1770 - DNA, 430 bp, Glycine max
agcttgtatattctgtttgtggtaggctggaactatagttcttacacaaccatggcatgatttgcactgcagaatagatggacctgctgcatatgatgttcttattaattttgagcagcgatggagaaaagcaactaagtggaaagagtttgcgatccttttcaaaaatatcctctcaatggcatggcgatgctttaataagaatagaacgcatctgaaaggataaattggattattatactactctaggggatgaccctgtagtatgggtttctagtgaagctgatcctgataatagcatgttcaggatggacaatgcaatcttagttttgagtgacgtcacttgcttgctatattttcttgattgtggagataaatactttcattacattgtattccaacccttacagatcttacactccgttgactc

SEQ ID NO: 1771 - DNA, 454 bp, Glycine max
agctgccttgtcccttgatatatttgagggactcatgatcactatgaatgacaaattccttgggataaaggtagtgttgccatgttttcaaagcccatactaaggcatacaactccttatcataagttgaatagttaagggtaggaccacttaacttttcactaaaataagcaattggatgaccttcttgcatcaatacagccccaatcccaacatttgaagcatcacactaaatttcaaaagatttttgaaagtttggcaacgcaagtatggcggaattagttagcttttgcttaagaacattggaagcatcttcttgtttctctccccatttgaaaccaacatctttcttgagcacttcattgagaggtgctgccaatgtgctaaaatccttcacaaatcgtctataaaaacttgctaagccatgaaaactcctcacctcggtcacggactt

SEQ ID NO: 1772 - DNA, 462 bp, Glycine max
  unsure (1)..(462): unsure at all n locations
ntgcataccccaaggatccattaggaaattacttgtgaaagagagccatgagggtgggctcatgggccactttgggatagacaaaacccttgtcttactcaaagaaaagttttattggccccatatgaagaaagatgtccataagcattgcactaggtgtgtggcttgtttacaagccaagtctagggtgatgcctcatgggctatacacacccttacccatcccatctgcaccttgggtagacattagtatggactttgtccttgggcttcctataacccaaagaggtgtagactctatctttgtggtggtggataggtttagcaagatggcacactttataccatgccacaaggtggatgatgcttcccacatctcacaactctntttcagggaagttgtgagactacatggtatgcctatgaccatcgtgtcagatagagatgctaagttccttagcca

SEQ ID NO: 1773 - DNA, 408 bp, Glycine max
  unsure (1)..(408): unsure at all n locations
ngagctngcaaaagaatgctacaagaatgctctcgcaattatgcacacaagagctcatgaaggtgtggcacgcatttatcatcagaaaaatcaaagaaaagctgcatatgatgagatgaccaagctaattgagaaggcagagagcaatgcctcagcatatgagaaaagatcacaatactgtgaccgtgagatggctaacgctgatcttgatgttgtaacataacttgatcctttaaagacctacccatatagatacagggcagcaggtactctccctagtagctcactctactatctgccatttgagcttatcaagtaaccatgttcaatttaaccatctgtagttagattactacttaacaagtttggcatcagcattgaaattaatcagatagtgtgcgggatctg

SEQ ID NO: 1774 - DNA, 482 bp, Glycine max
  unsure (1)..(482): unsure at all n locations
tcttaagtcacctgcangctgcagctntatagaactccnttaaaaaatcacttcggaatttaagtttgattatgcacaccatgctgataaaattntatttaaaacaagttcatcagtttatcttaaaaaaattaatatacaatgtaccgttgaaaatagaaacaattatcaaaagtctattttttctaatttggtgggtatggtaaacataacactcatgattgaaaattagatagatgaaaacatcattccatcatattaatggtgcaggtatatcaaatgttacaccaattagaaagcattatgaatatgattagtaaatgtgtgattatacatttaaattattttttaacatcacaagtgactgcttcagaaatcagaattgatgatantttactagaaaacaaaaaggaacttgagacattattaataactatccagtgttattacaaaagcatatatgttattatcaatcaattacc

SEQ ID NO: 1775 - DNA, 448 bp, Glycine max
agcttgttctgaactatagctatcgaatggccaacatatattgagatgctatgagcatgtcgactacatagagtagtatatagatgtgggaaccatcctccaccttactatgataaacacatgagtcacagggactttcgatgtcccatgagagacaatgaaatcattaaatctcttgtaccactgccttagtgagtgcttcaacccataaagagatctctttaatctacagacataattttcctttcctttcacttaaaaaccttcaggttgtagcattagaatgtcttcctctagtcttccatggagagaggcagttatgacatcgagttgctctaactccaagtccttagttgccactagggccagcagaacacgtatgaaggtgtgttgactaccagatgtgctttataacatacgtgctgtataaaagatgacttcttcagtc

SEQ ID NO: 1776 - DNA, 463 bp, Glycine max
  unsure (1)..(463): unsure at all n locations
tcaagaataatggcctcaacaaacttcttatttccagaaggaaattcaatcaatagacctccaatctttaatggaaagggttaccactactggaaaacccgaatgcaaatttttattgaggcaattgacttaaacatttgggaatccataaaaatagggccttatatacccaccacagtagaaagaaccacaatagatgaaagcacaacaagtggaagcacaacaatagaaaaacctagagatagatggtctaaaaaggatggaagacgagtacaatataatttaaaagccaaaaacataattacatctaccctaggaatggatgaatatttcagggtttcaaattgtaagagtgctaaggaaatgtgggacactctacaagtaacacatgatggcacaacagatgttaaaagatctaggataaacacattaactcatgaatatgaactatntangatgaatg

SEQ ID NO: 1777 - DNA, 472 bp, Glycine max
  unsure (1)..(472): unsure at all n locations
tactaagcttaacatcagaccacttccagggtgctggaactacttcacatggatttgatggngcctatgcaagttgaaagccttggagggaagaggtatgcctatgttgttgtggatgatttctccagatttacctgngtcaattttatcagagagaaatcagacacctttgaagtattcaaggagttgagtctaagacttcaaagagaaaaagactgtgtcatcaagagaatcangagtgactatggcagagagtttgaaaacagcaagtttactgaattctgcacatctgaaggcatcactcatgagttctctgcagccattacaccacaacanaatggcatagttgaaaggaaaaacaggactctgcangaggctgctanggtcatgcttcatgccaaagaactgccctataatctctgggctgaagccatgaacacagcatgctacattcacaacagagtcacactca

SEQ ID NO: 1778 - DNA, 491 bp, Glycine max
  unsure (1)..(491): unsure at all n locations
atcttaagcacctgagctgcagctatgctgaaacattacaatagacctcttcaacctcaacagcaaaataagccacaacagaacaagtatgacctctccagcaacaggtataatcccgggtggaggaatcatcccaaccttagatggtcgagtccttcacaacaacaacaacaacaatagccttattttcataatgctgctggcccaagcagaccatacgttcctccaccagtccagcagcaacaacaacaacagcagcaacagcaacagtcccaaaaacaacaaacagttgaggctcctccacaaccttcccttgaagaacttgtgaggcaaatgactatgcaaaacatgcagtttcaacaagagaccagagcctacattcagagcttaactaatcaaatgggacaattggctacacagctaaatcaacaacaatcccagaattctgacagattaccttctcaatctgtccagaatcccaaanatatgag

SEQ ID NO: 1779 - DNA, 413 bp, Glycine max
  unsure (1)..(413): unsure at all n locations
ctagataatggacacacatgaacagcgctaggcaatgacattcatggtgctccatacaaaggtggagagtggaggatcgccttgagggtcctctcttaggcaatcatgaaactcagctccaaactctaaagtggaggacacatgaacagccctaagcaataacattcatgtggctctggaaaaggatgagaatggaggattgccttgagggtcctctcttangcaatcatggaacacaactccaaactcgaaagtgggggacacatgaacagccctaagcaataacattcatgtggctccggaacaggatgagaatggaggattgccttgagggtcctctcttacgcaatcatgaaacacagctccaaactcgaaaatggatgacacatgaatgacaatgcaattcattcatg

SEQ ID NO: 1780 - DNA, 361 bp, Glycine max
agcttctggtgggacatcttgacttgctttccaatctgacattcaccacagattctgccttcttctattttcagattgggaatgcctctaacagcacctttgtcaatgatattcttcatgcctcttaagtgcagatgtccaaatctttgatgccatattttgacttcatcttctttggaggatggacatgtggaggagtaactggtttcttgaggtgtccataggtagcagttgtcctttgatctgttgcccttcattagaacttcattcttctcatttgtcaccaagcattctgactttgtgaagtctacattgaatccttcatcacacaactgactgatgctgatcaagtttgctgtca

SEQ ID NO: 1781 - DNA, 343 bp, Glycine max
agctttgagcaaattcaaacgacaataacgtttactcggatgttcgattgtgtcccgtagaatatcgcgacgctcaaaattgaaaatagaagctctgagcaacttcaaacgacaataaatttttactcggatctccgattgtgtcccataatatatcgagacgctcgaaattgaaaacagaagctctgagcatattggaacgaccttaacttttttctcggatgtacgattgtgtcccttagtatatcaagacgctcgcatttgacttcggaagctcttagcatactcaaacgacaatattctttacctcggatgtccgatagagtcctgcaatatattaaga

SEQ ID NO: 1782 - DNA, 458 bp, Glycine max
  unsure (1)..(458): unsure at all n locations
tctaaactntatacaagaatgaagctctgataccacttgttagacaagtggcctcagatatcttaagaagggggggttgaattaagatattacaaactatttccccaattaaaattctatttcactttctattcaagttacaaattcccttaataatgaacttcttaaatattgattcaaatagaacaatttgaatataaatataaaacaataataaataaaggagtttaagggaagagaaagtgcaaactcagatttatactggttcggccacacccttgtgcctacgtccagtccccaagcaacccgcttgagagttccactatcttgtaaaatccttttacaagttctaaacacacaaggacaatccttcctttgtgtttagaattcttttacaacaagagaccctcggtctcttaatcccttagagaattagaaagagaagaagaatgaatctc

SEQ ID NO: 1783 - DNA, 408 bp, Glycine max
  unsure (1)..(408): unsure at all n locations
gttgacggactataccaagctctaggtaaccaggacggagaatgatctatatataggcttgctaagggtagagagaggaagactagagatttggatcaagtaaagtgtgttaaggatgaagaaggcaaagtcttagtgcatgaaaaagatatcaaggaaaggtggaaggcgtatttccacaacttatttaatgatggatatggatatgactctagcagtctatacacaagagaagaggaccggaactataagtactatcgccggattcagaaacaggaagttaaggaagcgttgaaaagaatgagtaatggtaaggcggtggngccagacaacatacctattgaagtgtggaaaactcttggagatagaggtcttgagtggctcaccgaactctttaacgaaattatg

SEQ ID NO: 1784 - DNA, 378 bp, Glycine max
gcttggccatattagacttaataatttgattgttcgagtataacattacaaggaaatgtttttaaagaaatcataacattgatctggtactacaaaaaaattagagattcaactttcttcactaataattaacaactaagatttattgataaaaaaatgatatattattctagaagtattcatagatcaatcaaatgtattgataaaaaacatagatcaatcaaattttatgaagattggaaaaactcaatatggaaaagtgaaaaaagaaatatgtagtattaaacatatttatttaaaagcatgtaagccaagtctaattacattaataaaaaattaacataaaaaaatgtatcccaaacattcagtttggaaaat

SEQ ID NO: 1785 - DNA, 472 bp, Glycine max
  unsure (1)..(472): unsure at all n locations
tatggatgatgaagacgcaagttttgtgtatcatatttcatacacagatgacagttctgtatgcttaccaacccatccaggatgcttctgcataataacagcaaaagcagtcatctgttctaagataatgaaatcaatcatggaagtatggttggctacaaaaacctgctcaacaaatgaagggaaactcaaattagtaataaatagcatttactctttctagaatatgcaaataaggataatacaacattaaacaaacctgctttggtctcctgctaggcctgggtccatgatacttaacaaccccagtccaagatgcaacaaagaaactgcacatcatctctaccaaagacctctgaaggaaatgaacaatntacaacacacattgatgaacaaaaggagaatgtgccaaagttaatattagaaaccaagaattgatatgagatagaaaagaaagaactttactgaatag

SEQ ID NO: 1786 - DNA, 446 bp, Glycine max
  unsure (1)..(446): unsure at all n locations
ctacgctcgctacccatggagttcctaatatctccacacttttgggtgggccattcttggatggccttgattttctcagggtccacttggacctgatttctaccaactacaaaccctaagaaaactatattatctacactaaaagtacacttgtctatatttgcatagagggtgtttttcctaagaactgaaagaacttgcctgatgtttagccttccatagacatcacaaatagaagaacaaacaaaattgcacatgagagagaagaacatacttgaagatatgaattatatacaaagaacaagtaagagaaaacgagagagaagagnttgatctaaaacttgcactagaagtttctaaaaatgggttctttttacacaaatgactgtaactaactaactaactaactaactctgaanatatactcagtagaaaacattatactc

SEQ ID NO: 1787 - DNA, 364 bp, Glycine max
agcttatgcaggcagagttcgagatgagtatgattggaacattgatgccttacttggactttaaatcaagcaaagcagatgaaggaatatacatacatcaaaccacgtatgtgatggaactgctcatgaagttcgagatggacaatacaatgtcaatgaagacctctactcatccaaccattgtgcttggattggacaatgtgtctaagcaggtgagtgaaactgcatatccaggaatgataagatctcttcgatatctatctacttccagaactaacattatgctcatcgtatgagaggcaacctaactgctccatggcatttgatagaagactccaagacgattatgccatagatgcatgag

SEQ ID NO: 1788 - DNA, 476 bp, Glycine max
  unsure (1)..(476): unsure at all n locations
agcttggctttaaaaagttcaccttaagatccgtaacaacttcaaagcacctcataattgcctttaatgtgaggacgttcattaaagttggttttcctaggaagagggtatcatccgcaaattgaaggatagataaagaaaagtccccttctcctaagggaataccttcaaaaaagatattgtttcaccgcttctcacatcaagtcaccaagaccctctgccaccatgatgaaaaagaagagggctatggaatccccttggtagagacctcttttacccttaaattcttccgtaggacttccatttatcaaaatagacttataagtgaatttcacgcaacatctaacccacttaatccatattncactaaagtttattctattcataatatagttaaaaaaacgtcacctagtgggcgcttctcacctaatccactctcaataagatgtcctgactattttcatacactctatcaa

SEQ ID NO: 1789 - DNA, 438 bp, Glycine max
gcatctgtgtgcaatacataattcttggtacaccacaacacaatggtgtatcataaaggcgtaatataactttaatggatatggttatgagtatgttaatcaattagactttacctgtatctttatggatgtatgccttgaaaactgccatgtattttgtgaagagggatgctagttagacagcttctaagacgacttatgaactgtggacaaataggatacctagtataaggcatcttcatgtttggggttgccatgcagaaataatgatttataatccacaagagagaaaattggatgcaagaacaatcagtggatatttcattggttatacagaacagtttaaagggtatatgttctattgttataatcatagtatgagaattgcaaaactggaaatgcaaggttcattggaaatgatgaaatcagagggagtac

SEQ ID NO: 1790 - DNA, 456 bp, Glycine max
  unsure (1)..(456): unsure at all n locations
tataganatcaaacacgataataaattatcctcacattataatagaaacatatgtgcataaataacaaataagtcataagtcatcaaaacacaaatcatttgtctaagtaacttgcatctagaagttctaattctcttctaatggtgtagaaagagtctttggttagtggttttgtaaagatgtctgcaagttggtttttagtgtctataaattttttaaaacacaatcacctttttcctaagactaagcgctaattgactatcaacacttaccaagatgagtttttattatcataaaaggttntatcatatcaaaataattntgtttgaaatacaatataataattttgaaaagcataaaaaatattttgaacaatcaatcaagtaattcaaacatatcanacaagaattatacaaggattgaaggatatagatcacaggcattatcaaacattc

SEQ ID NO: 1791 - DNA, 375 bp, Glycine max
gtatatggacgaaagtgcaatactcctatctgttggtacgatgatggagaagcactacttcttggacctgaaatgctacaacagattaacgaacaagtgaagttgattcgagagaagataaaagcatctcacgataggcagaagagctattatgatagaaggaggaagccactagattctcatgaaggagaacatgtgtttttgaaggtttctcccatcaccggggtctgaagagctctcacatctatgaagttgacgcccaagtatctaggtccatatcaaatcttgaagaaggttgggcctgtagcttatcatatcgccttacctccgagtgtatcaaattcgcatcatgtgtttcatgtctctcaactgaga

SEQ ID NO: 1792 - DNA, 433 bp, Glycine max
atatataggttccttccaaactcttagttcgtagtagttgaaaatttaaaatgagaatgaactaaacaaatattatattaatttttaaagttttagtatacattaatttgatacaatcttctataatttgttggtgaagcaaacaaagtactaaaaaaagaaatcaatgttttattagaaatattaaaattagattttttacatgcatgcaatgcaatgtttacataatattattaataatactagtaattgttttcattcttaaaagaaaattaaaattattttttaattaaactaacttgagataaattatattgcaaagatattggttaaattacttattgttgaatgaggtgtttaaattgatcgaacgagatgtgtgaattattttattattaaattctaacttataaattttaaatataaaattgtt

SEQ ID NO: 1793 - DNA, 444 bp, Glycine max
  unsure (1)..(444): unsure at all n locations
taagcttcctgctatggatgtgttcatatgcactgctgatgcaactaatgaaccaactatggatgtgatgaacacagttatatcagccatggcactggattaccctcctcagaaacttcatgtgtatgtntcggatgatggagggtctccattgattcttcatggagtgagggaggcttgtaagtttgctatgtggtggcttccattttgtagaaggcacaaaataaagaacaggtgccctaacgctttttttttttattcacaaatgttagtagttcatattctttgttagcagaggatcaaccccatgaactttttctccttctcttctcccttaaccattcaacccatcttatattatcatgtgtcccaaggcttacttctctgctttgaatgataatgatgatggtgatcttgcaacgagtatgtgttgtcatggaagat

SEQ ID NO: 1794 - DNA, 471 bp, Glycine max
  unsure (1)..(471): unsure at all n locations
agctngcatgaattcacattctcccctttctcaagcaaattcttcttgacatgatcaagatcttcatgatttacattctcccccgttttgatgatgacaaccacctgtaggttaggagcaaaaacaaagaaaaatatctgaaattctgataccaatgccagatgtcgtacaggatgtcacgacatcacgcttcagaacatgcagattatatttgagagtatgaacagattaaacaggtaaataacacaagagaattgttaacccagttcggtgcaatgtcacctacatctgggggctaccaagccagggaggaaatccactaaaatagtgttagttcgaagatctaacagccactgtttacaaccttctcacctaaccactacccgtgcaatctctacctaagagccactcttagatatgagaacccctctcactccctctcaatcactcttccgtgtttacaaataaatc

SEQ ID NO: 1795 - DNA, 361 bp, Glycine max
  unsure (1)..(361): unsure at all n locations
ntagatcaattcaaatggtcataagctttcactcggaggttcgattcaggcgcataatatatcgaggctctcgaaatatagcaacggaagctctcgagaaatttaaatggtcataactnttcactcagaggtgcgattcatgtgcataatatatcgagacgctcgaaattgaacaacggaagctctctagaaattcaaatggtcataacttctcactcagaggtccgattcaggcgcataatatatcgagacgctcgaaattgaacaacggaagctctcgagacaatcaaatggacataactcttcactcggaggtgcgattcatgcgcaatatatatagaggcgctcgaaattgaacaac

SEQ ID NO: 1796 - DNA, 364 bp, Glycine max
  unsure (1)..(364): unsure at all n locations
agcttgcaaagatattntatgggccctaccaaatcgtggaacacatgggcaaaactgcttacaaactccangttgtgaaagatgctcgcattcatccagttttccactgctcattacttaagccctntcatcactccaccatagagcccatcacccatttacctctgcctgtcaattgcatgaactgccaacctctgattgctcccttggtaattctgggttgtcgctgtaacacggaaaattcaggtgttggtgctgtgggacgaccttctacctgaagagacatcgtgggaagattgagagccattgaaagctaccttccaccttaaggacaaggtgcttttccaagccatgaggaatgata

SEQ ID NO: 1797 - DNA, 445 bp, Glycine max
  unsure (1)..(445): unsure at all n locations
agcttcttatctaaggcactcttttggtggtgaatcttcttcttccatggcttattctctagtggatggtgcctcctctcacctcttctcctttatctttcgctataactccatggctgaaaatcaccattgaaggaccttattgaagctcaaagatcaagcctccatagaagcttctcaaccaagcttccatcactcatgattgtcatgtatgaatgcaaaaactatntactgtagcaattcgtggtatctttcctgacaaagttagggttgccataactcgtctatgctttctttntaatgctatctatagcaaagtcattgaccctagaaaattggatgaattggagaatgtggcttccattgtcctttatcaaatggagatgtattntcctccatcattntttgacataatggttcacttaattgttcatctggcgaggga

SEQ ID NO: 1798 - DNA, 443 bp, Glycine max
agcttacggtccatgacctcatacattcgctcttattgggtatatcccactagttttcttcttaaaagcttgctaattttatgccatgcagataggctatatggaagtatccacatacaacagagggaagttgaaagggcgtagaaactaaacatatttcaagcgtttcactttaacgcacaattgtctaatgaacagagttgcactcatctacaatttcaagctgacgtacagcataagtatccatttccctcgacattaactcaaattttgtgtacagaacataaaaatatttgttactaaatactgattctgactaggacaggatagccatgacatctgaggccctcaaggcaatgtagacagaaccatctctgcccttgaagtcattcgctgcatatctggagtacagaactgtattcccaggcatgacggacaatggc

SEQ ID NO: 1799 - DNA, 449 bp, Glycine max
  unsure (1)..(449): unsure at all n locations
agcttctggtgggacatcttgacttgctttccattctgacattcaccacagattctgccttcttctattttcagattgaggatgcctttaacagcacctttgtcaatgattttcttcatgcctcttaagtgcagatgtccaaatctttgatgccatattctgacttcatcttctttggaggatagacatgtggaggagtagctggtttcttggggtgtccataggtaacaattgtcctttgatctgctgcccttcattagaacttcactcttctcatttgtcaccaagcattctgactttgtgaagtttacattgaacccttcatcacacacccgaccgacgctgatcaagtttgcagtnagtncctttaccagcagtactttgttcagactaggaagtccatcatgagctagctttcccattccaatgatctttcctttagagccatc

SEQ ID NO: 1800 - DNA, 350 bp, Glycine max
aaagcatttctttcaaggataaaaacaaggtccatgtaaattaagaatagctatccacaatcactaaggcataatagttccctcctatactcatagttctaaaaggaccaaacaagtctaaatctaagagttcaagcaatctagaggttgaaatcatatttttagatttaaaagaaattctagattgctttcccttttgacatgcatcacacaagtcatccttcccaaacttaaacttaggaagtcccttaaccaacttattgcctctaagaaactctgagatcaatacatttatcttcccgtgtttgattaccactaagcattgatataaaactaagtctaaaacaaaa

SEQ ID NO: 1801 - DNA, 470 bp, Glycine max
  unsure (1)..(470): unsure at all n locations
tgaccaggaattatntgtatgggttggatgttgaattctggttgttcctggtgcggagatgatggtacagagggtgaaccangagctgaagtttcttttggtgaggtagccatggaaaagcaaagcgtttggaatgatttcgtaaatttctgagagctgttggggaatgcagaaaacgagattaacacgagaatataagtttgaatgaggaatgtagagggacgtgtgaagcaacggtcgaatttgctttggttcagtagtgaacgtgctattaatgttaagtgattcgtttgggcacgttcagatatcagtagttgctacaattcctctagcagacaaatgcccagcttgcccctcagtttttcaaactgttttgcatccaatgcctttgtgaaaatatctgctatttgttcctcagtgtcaacatgctccagtgtgataactttatcatcaacaagctctctaatata

SEQ ID NO: 1802 - DNA, 425 bp, Glycine max
  unsure (1)..(425): unsure at all n locations
agctngccaaaggtcgaanaggagcttgtccgatcaattgagcaagaccaaagaaaacatgtgggccatcatcgaccaatacaaggaaaagttaagcctagcggtaactcacaaacaaaggctagaggacgagtacgtgaaggtataagtcctgcaagtggaaagggaagcaagggaaagggtgatcgattcattacacagagaagcaatgatgtggatggataggttctcctttactgaaattctgatactggggacagatgtcgtacaggatgtcacgacatcgcgcttcagaacatgcagcttgtatatgaccgtatgaacagattanacaagtaaataacacaagagaattgtaacccagttcggtgcaacgtcacctacatctgggggctaccaagccagagaggaaatccactaaaata

SEQ ID NO: 1803 - DNA, 470 bp, Glycine max
  unsure (1)..(470): unsure at all n locations
tcaagatgtagttaagatacctgacaacttctgttcgtgtntgttgcttgatagaaacacagatgctagatataataatatgaggaaggctgcttctcgggcagattccggtgacaactatttatactgtccaagggttgtagatctacaggatgaggatntaaggcactttcagtggcattgggaaaagggggagcctgtcattgtcagcaatgtgctngcaaaaacatctggtttaagctgggaaccacttgtcatgtggcgtgcattccgtcagatgactaagaccaagcatgaacaacatttggatgtgaaggcaattgattgcttagattggtgtgaggtttgtttaatttctcaatcttgaacttcgagggaattttgcacaaattccattgctcatgttcattctcatgaagcttatgtttaaattgtgtaatgttggtacttattttaactggaaccactga

SEQ ID NO: 1804 - DNA, 473 bp, Glycine max
  unsure (1)..(473): unsure at all n locations
agcttaactaactccaaggcatcacctgctgctttatactccgaatcggtagttctcacctaccagaagttccagaatccagtacagacttctatttcagcttatgtgtgagtaaaatattgctcaaataataaatcatgttgatgttgctattcaggaaaaataacaaaataccaataaattatgttaataataaaggggttggtatgtgttgatggtaaattatggagctacttatttacctgcaacaactccccgcaccctaagctcttttgataacttttcaacaaattgtcggggattgagatgtcgaacgcttgaaaattcaacctcaaactcttctgggaccatgttacagcaataaggaacccaagatgaaagaattcgctttcggtcacatttagcaactataggagccctgttagggaaacatttaacaaaatagacgttattntacacatggagataacaat

SEQ ID NO: 1805 - DNA, 451 bp, Glycine max
  unsure (1)..(451): unsure at all n locations
ntaagaagttgtcaaacattaatgaatagaaaacaacatattgtagttgctactgacaagaaatcaaacttggtgaaaagagaatataggattcatttgatggcaacaattgattgtattcatttctattgaagcaaagattgacatttcgtggtcatgatgaatcaatttattcacaaaatcaagataattctattgagcttctacatattcttgacaatcataatgaagatattgataacgttctaaaaaatgctcgtggaaatctcaaaccagtggcacctaatattaaaaggatattgtgatagctgccgcttgtgagaccaccaaaattattgttgatgatgttagagatgattnttttgccattctaattgatgaatctcgagatatatcaattaaggagcaaatattggttgtttttgttatgcagataanaatggaagtgtca

SEQ ID NO: 1806 - DNA, 436 bp, Glycine max
  unsure (1)..(436): unsure at all n locations
tactatgtcccaacaatcctactagtagttcctgtggactcttgttgcataaacattcttgccaatccaaaatcagaaattnttgggttcatattctcatcaagtagtatgttactagctttcaagtctctgtgaatgatttttagtcttgagtacttatgaagatagagtattccttgagaaatcccttctattatgttgaagcgcttcttccagtctagtaacatgcttctagtgcaatcttgtcaattaaaacaaggcagtatgtgttagaatatatactatacaagagtaatacactgcaagacatacatagttatgcttaagataggaaagcataagtaaaggattaaaggaatcatccgtaacaattattgaaaaattcagtcagaanacttgaaatttcctcataagagcatcgatggtatatataatt

SEQ ID NO: 1807 - DNA, 381 bp, Glycine max
  unsure (1)..(381): unsure at all n locations
taaatcttaataattagtaggatgttcttggcacttctcatgttaaattgttcacattatcttaatatttttaaactttctttcacaaaagtaacaaaataaattattttctataaaatacactgaactacatctaagcttaatcaactttagcaaagtatcattaaattttctcatagatgtatntattttataattaatttatagaaataactaattttcaaaaaaaaaatcatgaaattaacaaaataaactatttntacaaaatacaccgaactaaatatgaatttaataaactttagcaagctatcatttaatctttttcatanatggatttatcttatgatatcatctactcatgtatcaaaattaatttcatga

SEQ ID NO: 1808 - DNA, 450 bp, Glycine max
  unsure (1)..(450): unsure at all n locations
tgtgggtggaggacgcatgaacgaaaacacaatttatgggtcttcgtaaaagggttgaggatggagaattgcactaagcaatcactacgcacggttccaagctccagggtggaggacgcatgaacgaaaaagcaattcatggggctccgaaaaagggttgaggatggagaattgcactaagcaatcactacaaacggctccaaactcgtgggtgaaggacgcatgaaccaaaacgccattcatggggctcagaaaaagggttgaggatggagaattgcactaagcaatcactacgcatggctccaagctcctgtgtggaggacgcatgaacgaaaatgcaattcatggggctccgaanaagggttgaggatggagaattgcactaagcaatcactatgcatggctccaaactcgtgggtgaaggacgcatgaacgaaaaccccattcatg

SEQ ID NO: 1809 - DNA, 456 bp, Glycine max
  unsure (1)..(456): unsure at all n locations
cgtcttgctggatatttatatgcatatttttctgatgatcaccgaggaacaattagggatcaacttgaaacttatgtgcnttaagtgagacgcacatgcttcttttttcanttgtgaagatgttcaaagtttggctatgaagatggttcacactgagaaacatttggtatttccattggtttataaacttattgagctagctntgatattgccggtgtcgacaacatccgttgaaagagctttttcagcaatgaagaatatcaagtctaaattgcgcaataagatcaacgatgtgtggttcaatgacttgatggtatgttacaccgagcgggagatattcaagtcacttgatgatattgatattattcgaacatctaccgcaaagaagtctcggaaaggacacttgcctcgtaatttatttaacccgctttgtaaattatgttatctctttattta

SEQ ID NO: 1810 - DNA, 426 bp, Glycine max
  unsure (1)..(426): unsure at all n locations
agctagagcgtaaactanatgccttggtttacctgttaacctaactggccatgggataaaaatctgcacctttcgccacactctgtggtttatgctcctctaccgaccaccatacagacctttgcccttctatgcaacaatctgaagcaattgaacaacctgaagtttatgctgaaaacatctacaatagacctcctcaacctcagcaacaaaatcagccacaacagaacaactatgacctctccagcaataggtacaatctcgggtggaggaatcatcccgaccttagatggtcgaattcttcacaatagcaacaacaacaacaacagccttattattaaaatgctactgggccaagcagaccatacgttcctccaccaatccagcgacagctacaacaacgacacatcggacccgaaatagcaa

SEQ ID NO: 1811 - DNA, 409 bp, Glycine max
  unsure (1)..(409): unsure at all n locations
agctagctaacccatggaagctcctaatatctctcactctttntgnggtgggccatccttggatggccttgattttctcagggtccacttggaccccatttctaccaactacaaaacctaagaagactatattatctacacaaaaggtacacttctctatattttcatagagggtgttttcctaaggactggaagaacttgcctgagatgtcctaagtgatcatctaggctcctattgtccactaaaatatcatcaaaataaacaactacaaatctacctatgaaatcccttaagacatgatgcataagcctcataaaggtgcttggtgcattagtgagcccaaaaggcatcactagccattcatacaaaccaaacttggtcttgaaagcggttttccactcatcaccc

SEQ ID NO: 1812 - DNA, 446 bp, Glycine max
  unsure (1)..(446): unsure at all n locations
agctntacgcggacaagcatcgtagggaagtctttttgtttttgggactgggctctggctcgacttcgttcttacaggcagccctctgccaaaggggatcactcaaccaatgtgaagttagctcgttgttattatggcccatttcaggtcacagttaagctcgggcccgtagcttatcgcgtggatttttcggcaggcgtttgcatccacctggtgtttcattgctcgaacctcaaaccttttcggggcgagacagactccaattcctcaattcctttgccacccaattttcacgagaatcaaccactcatatcccctcttgccattctggngtctcgtcgtgcaacctctgatcctcatagttcttggcaggttttggtgcagtggcagggtctcccaccggaggagacgtcgtgggaagattgtgaccagtctttgcaggacta

SEQ ID NO: 1813 - DNA, 441 bp, Glycine max
  unsure (1)..(441): unsure at all n locations
tatggtcgtnntgaattgcttagaccttatgttttcaatttctagcgccactatatagtacgggacacaatcggacatccgagtaaaaaggtatagttttttgaatttactgagagcttcagttttcaatttcgagtgtctcgatatattacaggactcaatcagacatccgagttaaaagttatggtcgtttgaatatgctacgagcttctgttttcaattgcgagcgtctagatatactaagggacacaatcgcacatccgagaaaaaagttaatgtcgtttgaatttgcacagagcttctgttttcaattttgagcgtctcgatatactacgggactcaatcggacatccgagttaaaagttattatggtttgaattngctaggagctactattttcaanttggagcatttcgattataacgggactcaatcggacat

SEQ ID NO: 1814 - DNA, 424 bp, Glycine max
  unsure (1)..(424): unsure at all n locations
ggatcttaagcactgagctgcagcttgagcaattaaacgatgataacttttttctcggatgtcggattgagtcccgtaatatatcgagacgctcgacattgataataaaaactctgtgaaaattcaaacaacgataactttttactcagatgtccgattgcgttccgcaatatatcgagatgctcgaaattgaaaatggaagctcgtagcacatgcaaaccacaataactttttactcggatggccaattgtgtcccgtaatatatcgcgatgctcaaaattgaatacaaaagctgtgagcacatacagacgatagtaactntntactcgaatgtccgattgcgtcccgaagtatatcgagacgctcaaaattcagagtagatgttgtgaccacaatctaacgacaataactctttactcggat

SEQ ID NO: 1815 - DNA, 423 bp, Glycine max
  unsure (1)..(423): unsure at all n locations
gcttctacatcctatgacagtgttgcctcacttttgcttttttgactctagcaatagagacactatatagtggtacctgcactccaagaactttggatacaatcgccttactgattcaaactcggcaatcctntaaagcagctagatgagttttgggtcaatggtctatgggttgaataatgtgataaaaataacgcttcaatagtgtgatacatatacataagattattaacatataatgtataaaataaaaacacagcttatataagcctacatattctaatgtatgtgaaaaaaggatttaatcttatatattatatcttagaagataatctctaagagtataaaactatcgtaaagttaaaaggaataaaagttatattttgaaatatgttcgcataagacttatattaatattatatt

SEQ ID NO: 1816 - DNA, 352 bp, Glycine max
cttgagcttcgctcattacctgtcataagctatttttacaaagctcggctcggcttatataaaagtgtggctcggcccacgagcctatttaaaagtctgcctaacatcgcccttgattaaccaattatcttaaaacctagcgaacaacgaactataagaagaaccttagtcaaattcgtgtcagtactgtacaaatccaaaaataatggactaacataatcatagtgaattcaagcggcacaacacagcgtacatcatgagaaaataaaaagaacgtcattttatgagacgtatgaattagacatggtttgcacaacatgaattttatcttacgtgcacagtgtgtatgaac

SEQ ID NO: 1817 - DNA, 403 bp, Glycine max
cttgaatgctctattcaatggagttgacaagaatatcttcagactaatcaacacatgcacagtggccaaagatgcatgggagatcctgaaaaccactcatgaaggaacctccaaagtgaagatgtccaggttgcaactattggctacaaaattcgaaaatctgaagatgaaggaggaagagtgtattcatgacttccacatgaacattcttgaaattgccaatgcttgcactgccttgggagagaggataacagatgaaaagctggtgagaaagatcctcagatccttgcctaagagatttgacatgaaagtcactgcaatagaggaggcccaagacatttgcaacatgagagtggatgaactcattggttcccttcaaacctttgagctaggactctcggat

SEQ ID NO: 1818 - DNA, 455 bp, Glycine max
  unsure (1)..(455): unsure at all n locations
ctaagctcggagatttatcattggttctactcgatgacaccagaatatatagttggaatcatcaagcttntctgaaatcgaaggaaaagattgatgtgaatgatgagaggaagtggacacagcaaaattgttttctgccattgatgaatccttctaagagattggacattagatcctccaagttctgagtctgtacgaaatgctgttggagttcttcaagagattggggcattgtcagttgatgaacaactcactcagctagggcagaagcttggctgtcttcctattcatccatcaacaggcagaatgcttattttttccatatagatgatatgtcttgatccagctctaactcttgcttgtgcattcgagtttaatgatccatntgtgcatcccactttacctgatgaatagaagagagcttcagctgctagatctgagcttggctctttgta

SEQ ID NO: 1819 - DNA, 481 bp, Glycine max
  unsure (1)..(481): unsure at all n locations
ntaatatatcaaccaccaatattagatacaattaactaattatgtgtttacttcatctngtttgaattccaataagatacatatgtacagcttatgcactttgatttttgttatcgacatttatagtttgaaacaaaaatgcaaattggaataataaatcatggtagctagacaaatacaattttggttaatttttttaagagataaaactagtttatattcatatgggccgtcttgattaatttgaatttgaatttcaagcgagatttgtgtatttgttaattntggtcaaaaaaattattggttgacgaaattaattgatttaaaatttaaacaaaagttaaatatgttatgaacgaaaataaatatataagcacaattagaaacgctaaattaatctactgtcttagttaaaatcatgctggtgaacacaatctagaggttagtgacatataacgagtggagatcctcttgagtgcag

SEQ ID NO: 1820 - DNA, 465 bp, Glycine max
  unsure (1)..(465): unsure at all n locations
ngaaggacatacacaaagtgtgactatatgatgtgacaatcggttgtagctagcatatactcacctccccctctaaaatntaattggattgggcttcccccaattcaattaaatttatttcccaatacatacatcaaatattcacttaatgcatgtgaaattacaaagcaacccataatacaaaaattagtctaggtatcctaaaatataaaggctgaaaaatcctatatttctagggtaccctacctacattatgaaaccctaaatacaaggcccanaaaaaaatgaaaccttaatataatatgtacaaagataagtgggctcatacttagtccatgggcccaaaatctaccctaaggccgatgagaaccctagagccttctcttgcatctctggtctaatcttcttggagtcatctatccaatggccttggagggtaggaatgcatcattcccttccccttga

SEQ ID NO: 1821 - DNA, 424 bp, Glycine max
tctcgatatatgatgcgcctgaatcggacgtccatttgataagttatgactctttgaatttcctgagagcttgcgttgttcaatttcgagcgtctcggtatattatgcgtcagaatcggacttccgtgtgacaagttatgaccattttaatttctcaagagcattcgttgttcaatttcgagcgtctccatatattatgcgcctgaatcggacttccgtgtgataagttatgaccatttgaatttctcgagagcttgccgtgttcaattccaagcgtctcgatatattatgcacctgaatcagactttcgtatgacaagttatgaccgattgaatttctcgagaggcttcgctgttcaatttcaagcgtctcgatatattacgcgcctgaattgacttccgtgtgaaagttatgacaatttaat

SEQ ID NO: 1822 - DNA, 382 bp, Glycine max
cgcctgaatcggacttttctttgtaaagttatgaccatttgaatttctccagagctttcgttgttcaatttcgagcgtcccaatatattatgcgcctgaatcggacttccgtctgacaagttattaccatttgaatttctcgagagcatatggtgttcaatttcgagcgtctcgatatattatacacctgaatcgggcatccgtgtgacaagttatgaccatttgaatttcttcagagccttcgttgttcaatttcgagcgtcccaatatattatgcgcctgaatcggacttccgtgtgacaaagtattaccatttgaatatctcgagagcactcgctgttcaatttagagcgtttcgatatattatgcgcctgaatcggac

SEQ ID NO: 1823 - DNA, 428 bp, Glycine max
actatgaatactaagcttcatggtctctggtataggctctgggactttccattgcaacttatgtggagggcaaagaaggccttcttctgggggccagagccataagtgagacaccactctagaagagttagacttctaaccttgtgtcaggacctatgggccaaggaatagtctcaggtactcaatttttacggaacgtctgttttgatttagctgtttgtagcacgtctcaatgcgctggttgaacgacatgcaatttttacccttacattgaaagggtttcgcattgaggggttttccacttcaaattgtgtctctgttttctttcatttctattatgtgctctatactttattggtactcctgacaggtactcgcaagggtgggaaaatatatgtacgttatctcgtcttactctgttatagatt

SEQ ID NO: 1824 - DNA, 487 bp, Glycine max
  unsure (1)..(487): unsure at all n locations
ngcttatctcttcaggatgctcaacacagtactgcatgtgctccttcaacttagacctacaacaagcaaatagacaagagcatataaatcttctcacaaatcacaacaaattcagcattagcaagttcacatgtcacaaattcaatacccgaattccttgttcaggctgttcgcagccacggttgctgcctttccgccgccgtatttggccacaaagtcatccttcacacgctccagaaaagccacaggcacctgtctcccaatcgattcatccgcaacaacacaataagctacaaaaaacaagtgtgtgagtcagacattcatttccaaaaacacagcaccgaacttcagataagcctataaacaaataataacaacacgaatttcatttcagttcattttcaaacacatcaccgaacttcanaatagcctctaaacagatcagaacaacacgaaattcatttcattttcaacacaacaccgaact

SEQ ID NO: 1825 - DNA, 375 bp, Glycine max
  unsure (1)..(375): unsure at all n locations
tattgtcgttnngaattgcttagaccttatgttntcaatttctagcgcttcgatatagtacgggacacaatcggacatccgagtaaaaaggtatagttttttgaatttactgagagcttcagttttcaatttcgagtgtctcgatatattacaggactcaatcagacattcgagttaaaagttatggtccgttgaatatgctacgagcttctgttttcaattgcgagcgtctagatatactaaggcacacaatcgatcatccgagaaaaaagttaatgtcgtttgaatttgctcagagcttcggttctcaattttgagcgtctcgatatcctacgggactcaatcggacatccgagtcaaaagttattatggttt

SEQ ID NO: 1826 - DNA, 462 bp, Glycine max
  unsure (1)..(462): unsure at all n locations
agctntgagcaaattcaaacgatgataactnttactctctgatgtcggattgagtcccgtaatatatcgagacgctcgacattgataataaaaactctgtgaaaattcaaacaacgataactttttactcagatgtccgattgtgttccgtaatatatcgagatgctcgaaattgaaaatggaagctcgtagcaaatgcaaaccacaataactttttactcggatgtccaattgtgtcccgtaatatatcgagatgctcaaaattgaatacaaaagctctgagcaaattcaaacgataataactttttactcgaatgtccgattgcgtcccgaagtatatcgagacgctcaaaattcagaataaatgttctgaccaaaatctaacgacaataactttttactcggatgtctgaatgaatcccgtaatatatcgagacactcgtaatctaaaactaaagctct

SEQ ID NO: 1827 - DNA, 436 bp, Glycine max
  unsure (1)..(436): unsure at all n locations
gcttggagtttccagtgccaattcgtcttcttctttagtccagtcttcttctggcttcagttcattagagggctttccttctgtgtccagcatcttgggatgttcccagcctttgatgacagctttccaggttctgctatctagtgatttgaggaaggccaccattcttgctttccagtattcatagttggttccatcaagaaatggtggtctgttcactggtcctncttctntctncatgttcatcagaaattatcntcctagatctcactcagtgatttcgagtgcctgctctgantaccaatgaaattcttgatactgggacagatgtcgtaccggatgtcacgacatcatgcttcagaacatgcagatngtatgtgtccgtatgaacagatttaaacaagttaataacacaagagaattgttaacccagttc

SEQ ID NO: 1828 - DNA, 473 bp, Glycine max
  unsure (1)..(473): unsure at all n locations
tattaatatatgattaatataattaannaatatttgtaaaattagctgataaattagtttataaatgttaatagcataaaaatacatatttaattatttaattatatatgtatgtatttaatttgtttccaataacgtgtcatcataaaaactagggcaatattttttttaaaaaaaattgtattataaaactataaaatgtttgagttgtataaagcattaattttctactaatttttctcttttttgaacccaatttttttttttgatatttttgtaaaagttagggagctacatactnttaattgtatttccttcttaacatggcattccttcttaacgtgaattatctttatataaatggcttntttttttcattgactgaaaantttaaagatccgagtgcacaaatgacatatatgatagtaagttactgagcttttgttaaatttatacctgaatntcatacttaa

SEQ ID NO: 1829 - DNA, 364 bp, Glycine max
tcctagacataagaatgcgcatcacgtaacaacttcttctgatgatgccagataaggtcatgagggataatctcagctaccttgaagttagcagatggctaagtaaactctctgtttaggtggtagcaaagctcatatgtgcatcatttaggactttactggcatagtaaatagagcgaagcatcttatacgcctctgtcctagcactgcaccaacaacgtagtcactagcaccacacatcatttcagactctaggctgcaatttggggccacaatcactggagctgacaccagcctccctttcatggtgtgaaatgctagcatacattcttcatcgcacttatacacagcatctttgttcgat

SEQ ID NO: 1830 - DNA, 419 bp, Glycine max
  unsure (1)..(419): unsure at all n locations
tctcccanaaaatggtgtcgtcagcaaatgggaggatattcactagaactcttgttcttccctaccaagaagctntggaagcaatcttttattgttgcttccctcatcattcctgtcaagccttcaacaaccaagtcaaacaatagaggggccaaaggatccccttngtctcaaatctcttgaggcttaaattcagaggttgagcttccattcactagaatagatatagaggctgatgtgaggcaccccttaatccatccaatccatctgtcatggaacctcattcttctcatcatatganaaaggaattgccaagacactaaatcataggctntttcgaaatccactttaaacaccatgcaggacctcatagacctcctangcctctcaagtacctcattagcaaccanaacaccatg

SEQ ID NO: 1831 - DNA, 454 bp, Glycine max
agcttcatgctgaagtatgtatgacaaaactttattactgttattcaacacatacaagtgagcttgtaacaaatcttctacacttggagtgataacatgcagtccttttgaacccttaccgcccactctgtcgtcatggcgagactcaggaaggccaataggtttagccttttcaatgtactctgaataaaattcaatggcttcttctgcaatgtacctttcaacaatagatgcttccagacgatgtagattcttggtatacccttttaagatcttcatgtattgctcaaccaggtacatctaacgcaaataaataggaccacaacatttaatttctctgacctgatgaacaattaagtgaatcatggtgtcaaagaaagtaggaggaaaatacatctccagttgacacagtataattgtggcctcattttccaggccatcaaacttgacagga

SEQ ID NO: 1832 - DNA, 381 bp, Glycine max
  unsure (1)..(381): unsure at all n locations
tcaaaggtcgagatgttagacaagtggcctcagatatcttattattagggggttgaattaagatattccaaactacttccccaattaaaaatctatttcactttctttttaagttataaattcccttaacaatgaacttcttaaatattaattcaaataaaaaaattgagtatgaatataaagcaataataaacaaaggagattaacggaagagaaagtgcaaactcagaattatacttggtccgccacacccttgtgcctacgtncagtcctcagcaacccgcttgagagttcactatcttgtagatccttttacaagttctaacacacaaggacaatcctntctttgtgttagaattccttacaacaagagaccacagt

SEQ ID NO: 1833 - DNA, 447 bp, Glycine max
  unsure (1)..(447): unsure at all n locations
ctgatatggatattagattaaaggtaaaagctggcacatattatacattgtgtagggtaatgagtgcagaaagttgtactatgcctaagtgggtagcattaacaagatggccatttggtagcttaacactaatgggactaatttgacgatatgaataaaaatttgttaaagaagaagaaacatggtcagtggctcctgaatctaagatccaagaggtagagttggatttattcgtaagacaaaaccatacctgttggatcgttattggtgcaagacgaaatagaggcaacctgtggtttaatggacgctgaggttccggccgacggctgttgtattaaagctagaagtgctatgtactgctctgatgaanaacgaacctgttcttgtgattcttggggatagtattggtcatctgtggccttcccttcagttgccactacactatta

SEQ ID NO: 1834 - DNA, 457 bp, Glycine max
  unsure (1)..(457): unsure at all n locations
caagcttgagatattnttaagccatacaatgtctttntaatttgtacactntgtcttcctggccatcaacttgaaaacctagaggctgatcaaaaaacacatcttcttcaagaggaccatttagaaaagcagacttgacatccaattgatgcattggccaccttctcaaacttgcaattacaactacaagccttattgtatcaatccttgctactggagcaaaaatttcaccataatccacaccttctctttgcaagaaaccctatgctactagtcttgccttgtgcttgaccacctctcctttgggattcttcttcactttaaagacccatttaactacaatagctcttttccctttcgggagagtcacaagatcccaggtatggttcttcttaattgagcttaattcctccttcattgcttgaatccattgaggttcttgcaatgtttcctctac

SEQ ID NO: 1835 - DNA, 370 bp, Glycine max
  unsure (1)..(370): unsure at all n locations
agcttggacttnctgtgttctgggaacctctttttctttaagtgtacccaaacccaatcacctggttcaggcacgactatctttctgcttttgttggcttgccttgcatagctcgcatttttcttttcaatttgagccttcacttgctcatgcagcttcttcacatacttagctttagtctatacgtccttatgcttaaccataacaatgttaggcataggcaacaaatcaagaggagtntaaggattacccccatacactatctcaaatggtgaacaattacttgtgctatggataagccgattataagcaaactcaacatgaggcaaacatgcttcccaagatttaagatttttnttcaaacaatcct

SEQ ID NO: 1836 - DNA, 464 bp, Glycine max
  unsure (1)..(464): unsure at all n locations
ggctaagtcntatttgatgatgccaaagactcaagtcaagaatcaagagtcataacagtttcaagaatcaaagagtccttcaatcaagaatcaagattcaagtgaagattcaagagaagactcaagatatgcaagaacttcaagaaaagcatcaagataagtataaaaagattctttcaaatgaaaagattgaatagcataaacagaagcacaaacaattttataactgtttcacaaagtagtaattgattaccatgggcatgtaatcgattaccaatgtttttgaatgttggatttcaaatttcaagagtcacaacttgtgataaaacattttcatatttgtgtaatcgattacacaacatttgaaatcgattaccagtgtttctaaacattggtattcanatctaaacatgaagagtcacatctattgatgtgtaanntgatacactaaatggaaatcaata

SEQ ID NO: 1837 - DNA, 466 bp, Glycine max
  unsure (1)..(466): unsure at all n locations
tatagcttacttattatccacaaaaagcttcactccatcactttccttgattnttaattcttgtaataatgtgtccaacgagacagcttggcaagcactcattgtagctggaacatacttagcttcacatgttgataaagccactatggattgcttcttagaactccatgatattggtgttgcaccatacatgaatatgtaacctatagtactctttctgtcatctctgtctcctccccaatccgcatcagtatatcccactaattcctctgagttgttgttgtctttatttggaaatagaattccagtattgatggtcccttttatgaaccttagaatcctcttagcagttaggagatgaggaattctgggtcttttcgtatatgtacttaccagtccaatagcaaattccaaatcaggtctttgatgacacaagtacctgagagaaccaacaatatgtttgaac

SEQ ID NO: 1838 - DNA, 408 bp, Glycine max
  unsure (1)..(408): unsure at all n locations
ctgcaatagatgccactnntactcaatttttaaatgatatgttgacaaggaaacacaagtatattcacaaggagaatattgttatggaaggaaattgcagtgctatgatacaaaaagatccttccacctaaccataaagaccctggaagtgtaaccattgcttgttcaattggtgaagccacccggggaaaggctttcattgatttgggagccagtattaacttaatgccactctccatgtgaagaacattgggagagttggagatcatgcccactagaatgactttacaacttggtgaccggctcattaccagaccatatggagtggatgaagatgtgttggttcgagtaaaacattntatcttcccagcaaactctatggtaatggatatctatgaagataatgac

SEQ ID NO: 1839 - DNA, 423 bp, Glycine max
  unsure (1)..(423): unsure at all n locations
gcaattaaacgaaataattttacgcacatgtcatattgagtcccgtatatatcgagacgctcgtattgaaaacgggagctcgttgcaatggcaaccgaaataacctttaactcggatgtncgatttgagtccgtaatatatcgagacgcttcaaattgaaaacagaagccttgagaaaattctaacgagaattattttttactcggatgtccgatggagttccgtaacatatcaagacnctcnaaattgaaaacggaagctcatagcaaattgaaacgaaagtaacttttaactcggatggtccgattgagtccgtaatatatcgacacgatcgtaattgaaacaaaagctcgtagcanacgcanacgacaataacattttgactcggatgtccgactggagtcccgtatatatcgagacgct

SEQ ID NO: 1840 - DNA, 328 bp, Glycine max
  unsure (1)..(328): unsure at all n locations
gggggggttgaattaaagatattccaaacttttctcctaataaaaatctatcttacttttacttaagtatgaatccctttatgacagtcttcttanatattaattcaaatgaagcaacttgaatatgaatataaagcaataataaataaaggagattaagggaagagaaaatgcaaacttcagtttatactggttcggccacacccttgtgcctacgtccagtccccaagcaacccgcttgagagttccactaacttgtaaatttcttttacaagttctaaacacacaaggacaacccttcctttgtgtttagagattctttacaaca

SEQ ID NO: 1841 - DNA, 439 bp, Glycine max
  unsure (1)..(439): unsure at all n locations
agcttcggtgggctgccaaattcctcanaaccttttgttctcgaaatgaacactttaggggtcgacatgggcgccgtccttgtccaatatggacatccaatagccttctttagcaagacgttctgtctgaaactccaaaactcgtcgacctacattagggagctcgttgccattaccacgacagtcaaaaagtggtgccattacttattgggccatcacttcacgattctaacggatcatagaagtcttaaagagctaatgactcaggttgttcaaacacctgaacaacagatgtatttagctcgtctattgnngtacaactattcaatccagtatcggtcaggcaagaccaacactgccgctgacgccctatccagaatcacggaactagtagcgggacaatntctaatgctaacaataccctaacctttgttttttt

SEQ ID NO: 1842 - DNA, 459 bp, Glycine max
  unsure (1)..(459): unsure at all n locations
agcttcccaaccaatcttcgatatctttcaggatcagaataaggctccccatgattgggtagcaatttttgatttggatccataggagtatcaattggtctacaatctgacataccagtttctttaagtatgtctaacgcatacttccttagtctaaaaatgactaaataaatgttcttttagttgagcaatttttccttggtcatttcttatgatgactatatcatctatatagaccaccaagtaaaaacatctactcgatgaggtatgacaataaaaaactgaatggtctgcttcacttcgttttatcccaaaagcctgaacaactgagctgaattttccaaaccaagcacgtggggattgtttgagtccataaagagacctncaaaatttgcaaaccaagctagacttcctctgagcaacaaatcccggtggttgctcatataaatctctattcta

SEQ ID NO: 1843 - DNA, 470 bp, Glycine max
  unsure (1)..(470): unsure at all n locations
agcttccttaatcacctcattaaggactagaacaccatgtaggatgtgtctgttntttatgaaagttgtctgcctctcatcaataagaccagatatcacttgtctcaatctatntgctaataacttagctatcaccttgtacatacatccaatcaaggagatgggtctgtagtcatcaaatgactggggatgtttaattttgggaatgagagctatgaaggaagcattactgcctctagggaaactgccatgtacatggaattcatcaacaaatcttctgaagtcagctttcagcatatcccanaattctttaatgaatttgaagttgaaaccatcangtccaggacatttgtccncatcacaactccatactgcttctntgatctccaaatctgaaaaaggaacaaccaaagactccctctgctcctgggttagtgaagagaaatgcactccatcaagagtgggtctac

SEQ ID NO: 1844 - DNA, 458 bp, Glycine max
  unsure (1)..(458): unsure at all n locations
tggagaggatgcttaatggaggaaaagaaagacggagagaattagagaggggggagcacgaaattgaaggaataaaagaggtagagaagtggaactttgaagtatgtctcacaagactctcattcatcaaagttacaataagtgttacacatgcttctatttatagactaggtagcttccttgagaagctttcttgagaaaacttccttgagaagctttcttgagaaaactttcttgagaagcttctttgagaaaacttncttgagaagctagagcttatctacacatacccctctcataactaagctcaccttcttgagaagcttccttaagaagattccttgaaattctgatactggggacagatgtcgtacacgatgtcacgacatcacgctttagaacatgcagattatatttgacagtgtggtccgtttaaacaaatagataacacaagagaa

SEQ ID NO: 1845 - DNA, 409 bp, Glycine max
  unsure (1)..(409): unsure at all n locations
agcttgttgcattntagtgaaagaacaccgagtactatttagtctcacaaatgcaagaactacgtaggtctgagttcctcatcacaaattgaggatacgtaggagcaaaagccccgcttttgtcgaccacctcgccttttgctatcgtgacctgtgagtccggtggcacgcggaaacacccgatggttatccgcgcacactntttgctatcccatgacctatgagtccggtggcacgcggagacacccgatggttatccgcgcacactctttgctatccaatgacccaagggtccggtagcatgcagagataccttcgggttatccgcacctttcgccagctagaggcaagcgagcccgttgacatgcagagatcaacgtggtcatctgcacctttcctggagatgtca

SEQ ID NO: 1846 - DNA, 354 bp, Glycine max
  unsure (1)..(354): unsure at all n locations
agcttatgctgcanacatctacaatagacctnctcaacctcagcagcaaaatcaaccacagcaaaacaattatgacctcttcaacaacagatacaatcccggatggaggaatcaccctaatctcagatggtctagccctcaacaacaacaacaacagcctgctccttccttcaaaatgttgctggtccaagtagaccatacgttcctncttcagtgcaacaacaacaacagcaacagcaacatcaatagagacaacaatccactactaaggcccctcctcaaccttcattggaagaattagtgaggcaaatgacaatacagaacatgcagtttcagcaggagacaacctcaatt

SEQ ID NO: 1847 - DNA, 484 bp, Glycine max
  unsure (1)..(484): unsure at all n locations
agcttgttggtggcaaagtcaaaatctaatagaatgtatacttgaatcaacctgtagctagctatttttgtattcattgtaactaacggagattctaaatttccacttaatatgtgaagatgtaccttttctgagaccttattgctactaccatttagtagctctggtgccatccaaggtagagttccacgaacaccaccagacaccaaggtatttcgcttaatctttgataggccaaaatcaccaacctggtgaaaagcaagtttcttagctttatcacaatgaagacaatgtaatagaatgaataatccacagcttgaaaagataccttgcatattggccgcatatgatccttcaagttcacgagcanatngtcacatttcaagtcanaatgcacaatatttttcgagtgtaaatattccactccaaaagcagcattcatgggcaatatcagtctcttgcggcgtcaagatacctggaataa

SEQ ID NO: 1848 - DNA, 428 bp, Glycine max
ctaagctagacatacatatctcttcttgatacactaattcaaataatctatttcatggtctacccaatgaagacccttatgctcacttggccatctatatagagatatgcaatattatcaggttggtgggtgtgcctgcggatgcaatcaggttgagtctgttctcattttctttatctggagaagctaagagatggcttcattcttttaaaggaaacaatctgaagtcatgggatgaagtagtagaaaagttcttaaagaagtacttccttgaatcgaagactacagaaggcaaagctgccatatcttttttccaccagttaccagatgaattgttgagtgatgcacttgaaagattagaggtttattgagaagactccactcaaggtttttagaccaatacagctcaacatattatagatgggtga

SEQ ID NO: 1849 - DNA, 430 bp, Glycine max
  unsure (1)..(430): unsure at all n locations
agcttgcttctacaaaaagaatacacacacatgacctctatttatagcctaagtgtcacaganaattggaggggaaattgaatnttctattcaaatttcacttgaattagaaattgaatttatggagccaaatttcggagccaaaatttcactaattatgattcgtgaattttagctatggttcaacccactagtccaagatcaagtccaagattctccactaagtgtgcttaggtgtcataagacatgtaaagcatgaagtatatgcacaaagtgtgactatatgatgtggcaatggagtgtagcanacaaatgctcacctccccgtctaanattaattagattgggcttcncaaattcaattaatttatttccaacaacacataaatattcattaatgatgtganatacaaactaccctaaacaaact

SEQ ID NO: 1850 - DNA, 250 bp, Glycine max
actagtactttggtttctagccgtgtatttggctatattatgacatttgaaccatttaatgatgcaatccttcctaggaagggaccaatcactagaaccatgagccagaggctccaagaagattgggctagagctgctgaagaaggccctatggttctcatgaaccttatgatagatttctgagcccatgggccaaggttgggtccaattatctttgtacatattagactaggatgtcattatatttggt

SEQ ID NO: 1851 - DNA, 467 bp, Glycine max
  unsure (1)..(467): unsure at all n locations
gcttaagctccttcaactgcacaaggctcttaatatttgaagagtattcttgtggaaccttcacctgacgaagacacttgacaaaacttatctnctccttcttggacaaagtatggcaagctgggggcaagtaacttttcttcccatcagaccttggatgcaactgtgatcttatacccatatcagctagatcttgacgggtattcaagccatccttcgtcttgccttgaatggtaaggagcgtcccaatcacactgtcacaaacatttttctccacatgcataacatcaatacaatgtctaacgtcaagatcacaccagtacggaagatcaaagaaaatggacctcttcttccatatgcaactctgacttttatccttcttttgggtcttcccaaatacagtgttcaggtgttgaacccgctgatatacctgctcaccagtcaacggtatcgacgcaatatcatgc

SEQ ID NO: 1852 - DNA, 417 bp, Glycine max
  unsure (1)..(417): unsure at all n locations
ttctaacgacaataactgtntactcggatgtnctgattgagtctagtaatatatcgactcgctcgaaattgaatgttgaagctctaagccctattcaacaacaataacggtttactcggatgtccgattcagtgacgtaatatatcgggatgctcgaaattgaatgttgaaccttctgacccactcaaacgacaataacgttttactcagatgtctgattgaatcccganatatatcgagacgctcgaaatngaatgttgaagctctgagccaattcaaacgacaataactttttactccgatgtctgattgacgtccgcaatatatcgagacgctcgaaattgaatgttgaacctatgagcctattcaaacgacaataactttttactctgatgtctgattcgagtccgtaatata

SEQ ID NO: 1853 - DNA, 324 bp, Glycine max
  unsure (1)..(324): unsure at all n locations
agcttggactntctgtngtctgggaacctctnctttctcangtgtacccaaacccaatcaccttgttcaagcacgactttctttttgcttttgttggcttgccttgcatagctcacaattttcttttcaatttgagccttcacttgctcatgcaacttcttcacatactcagctntagcctgtgcatcattatgcttaaacatagcaatgttaggcataggcaacanaatcaagaggagtcaaaggaataaatccatatactatctcaaatggtgaacaattagttgtgctatggacagctcgattataagcaaactcaacatg

SEQ ID NO: 1854 - DNA, 362 bp, Glycine max
tctaaaccttgtacaagaatgaagctctgataccacttgttatataagtggcctcaaatatcctaagaacggcgggggttgcagtaagatattccaaactgtttcccctaatttaaaaattattttactttttactcaaggtattaatctcctcaatgacaatcgtcttaaatatgaactcaaaccaaaccaccttgatatgaatatatagcaaacataaataaacgagattaacggaaaagaaaatgcaaacctcagtttatactggttcggtcacacccttgtgcctacgtccagtctccaatgcaaccgcttgagaagtccactaacttgttaattccttttacaagttctacacacac

SEQ ID NO: 1855 - DNA, 463 bp, Glycine max
  unsure (1)..(463): unsure at all n locations
taacaatcagtgtcatactatngatcaaaacanagcaggtattaatatgccatactagactcaaaatatgccacaaacactagacctaaatcagtgtcacagaaattggaagaaaatattttatccaagcacaaacttcaagccttattccatgtattggggggaagttatggctggccatatgggtagaggtgtcataaaggagcaagtatggaggaagggaccttggactgctgaagaggacaagttgcttgttgagtatgtcaggttgcatggtgaaggcagatggaactctgttgctangcttgcaagtaagaaacaccaaacttttttcactggtttgtttcttaatatatatgattcggatttgacatttataagtgacaatatagcacaaaaacaactgaaatngttttcaacttctactgttcatngtggctacattcatgttcacccgaagctc

SEQ ID NO: 1856 - DNA, 313 bp, Glycine max
  unsure (1)..(313): unsure at all n locations
tacacttctttcagagaaaggagcttaacattttcttctcaaaaactgaaaataacactactaagtcttcaatctgtacttaatgatgctgaggagaaaaaaatcactaatcctgctatcaaggaatgggtggatgagctcacacacactctctatgacgctgatgagttgttagatgagatcaacaccgagacattgtgatgcaaagtggaagttgtgacctaaagtcaacccattggtgattaggcgccaaacgtgctttcttattctttcanaagggtttatggggtcatcaattatgagatacaaagct

SEQ ID NO: 1857 - DNA, 345 bp, Glycine max
agctaactaatcaaatgggacaattggctactcagttaaatcaacagcagccccagaattctgacagattaccttctcaatctgtctagaatcccaaaaatgggagttccattacattgagatcgggaaagcaatgtcaaagacctcaaccagcaacatcttcctcatctgcaaatgaacctgcccaacctcactctactccagaaaaagatgatgacaaaaatttaaagagtaagttacctaacaatttctatgaaggtgaatcttccacttgtaattctgatttacaaaagcagcatatccctcttccattcccttcaagaagcaattccaacaaaaaaatgg

SEQ ID NO: 1858 - DNA, 361 bp, Glycine max
  unsure (1)..(361): unsure at all n locations
cgaaatgcagatattgtttcatttcggaagagtgcgcaaccaaaaagtacagtctttccatgactattcatacccacaaaaattccaaatggcacttcataagaattgaccttgtgtgtagtatcaaatacaacaacatcaccatattnttggtgcccatcagagctagaagtatgagaccaaaaaatatgctctcaccttctctcttcatcacgtggatatgcatactggaaattatagccacttctttttgcatcctcaccgtacttgagaagatcttggcatcatttctttcacttatttttggtttcacaaaaaatacgaatgccctttcataaatggaaataccatgcttacattt

SEQ ID NO: 1859 - DNA, 423 bp, Glycine max
  unsure (1)..(423): unsure at all n locations
agcttattgattntgataatatcactatagaaaatacaacattaaaagtaatttaaacacaaaataatcaatctttatattgtgtntttcttgtcagatctcattccaagtgaatttatccatgttattacggatgcacatgtttaccacaatcatgtgaggccttngcaggagaagctccataaccagccaaaaccttttccagtatgtgtaatgtttagcacttcttttactttatattgtgactcttttacttgttgaccccctaatctacttcttgtagactttggagatcaatcccaaaatgagagatatagattcttttgtggctgttgatttcaagctcataggctatgatcctcaccagaagattgacatgaagctggctgtctaaaatctggggattctcactccttcgaactg

SEQ ID NO: 1860 - DNA, 409 bp, Glycine max
  unsure (1)..(409): unsure at all n locations
tncgctnttggtgaataataagaaaaaagtcatctatccaaaattatcacactcctttcttcatccaacaatgaattggtctatttaaggaagatgatacacagcattattgcacatctctgtagaagcagccactatagtaaacaatcttctctatctaaaatggagtttgttctaaattacctaaatgccactgccattggagttctttctataaccctcttctttttgtttttgtataatcccttcaaatttgcattatgtaaaaaagaggctcccaaagttgcaggtgcatggccaatacttggtcacctaccactattgagtggttcagagacacctgatagggttttgggtgctttggctgataagtatggacccatattcaccatcaactatggtgtcaaaa

SEQ ID NO: 1861 - DNA, 386 bp, Glycine max
  unsure (1)..(386): unsure at all n locations
ctctaggatcttcttgacttctcttgataaaacttcaacttgcccattggtctggggatggtaagggaagctaccttgtgtctgacactatagtgctggaggactntcttgagttggatgttacagaaatgagatcctncatcacttatcagtacccttggtgtgccaaaccttgagaagatgtttttcttgaggaagcgaataatagtctctgcatttgcatggttcacaactatttcttccacccatcttgttacatagtccacaaccaatataatgtattcatttgagtaaaatgattgcaatggaccaatgaaatccatcccccagcagtcaaaagcttcaaccctcagaatgttctatagtggcgattcattccttctgga

SEQ ID NO: 1862 - DNA, 224 bp, Glycine max
cactgcctcaagtagttcacgatctgcttccataggataacacgttgcctaacagttactatcaggtcaagagatcttacgcttgcactagccagtgatggaatgaatccacatggcaatttaagcactcaaaacagctcatggccagatctactattaatttacaatcttgctcctgagttgtgcatgaagagaaaatacatgacgttatcgatgatgatatc

SEQ ID NO: 1863 - DNA, 457 bp, Glycine max
  unsure (1)..(457): unsure at all n locations
tatctaanactgcgattgtgagattgatgcttattcggaaaacctctaatcctgcccatttttagtctaatattagttcacacttgtaattctaaatctaatatggctgaaaaatagagaacattggtttccttttcttatacgtatttttcaatttttgttcctactttattatgtgtttatagacttgagtgaaatgaatacaaactcaacttttggatcatattatgaatcctagatcaattgtgcttcgtctatatatttcgtggcatcataaattatcttgtaaagcctttcatttgtctatatttataaatcataaatataaacaatatcatagatattctttgtgaaattcaatattaaatcttatatattcattgtttttctttctcaacaactctcatatctccatctatctagnttatctatngactnttatgcggatctacatata

SEQ ID NO: 1864 - DNA, 404 bp, Glycine max
  unsure (1)..(404): unsure at all n locations
cccatggaagctcctaatatctcccacactatntgggatgggccattcttggatggccttgattntctcaaggtccacttggaccccatttctgccaactacaaaccctaagaaaactatattatctacacaaaaagtacacttctctatatttgcatagagggtgtttttcctaaagactgaaagaacttgcctgagatgtcctaagtgataatctaggctcctactgtacactaaaatatcatcaaaataaacaactacaaatctacctatgaaatcccttaagacattatgcataagcctcataaaggtgcttggtgcattagtgagcccaaaaggcatcactagccattcatacaaaccagacttggtcttgaaagcgggtttccactcatcaccctttt

SEQ ID NO: 1865 - DNA, 447 bp, Glycine max
tgtagagtctttcgtcaggactcgggcttgtgccctgttggtgccatggagatgatccaaaagtctctacctgaatctctaagaaagagtgtaaacaagtgtgacctcgcacaatccaacaagagcatataatggattccacacaactttacttttcgatatctcatacctaaggagcttgtaaaataattgcttggtagcccttttttcttactatgggagacaatctacttcaagttttaaacaacagttcacaacttcaattgtagctgcattagtcgtatctgtctgcaattttccaatcgagacaaaactgctactacaattgctactgcagtttataaccttgatgtgcgttgcttgctctatgatgtattattcttctgtacaaagatgacagggtagcaccaacagagaaatctaatattgcaatgtgtagcattgagt

SEQ ID NO: 1866 - DNA, 471 bp, Glycine max
  unsure (1)..(471): unsure at all n locations
catgcangctttctgctcgatactcatctgggttgtgcgactaccatttccatcaacagacaactgatcgtagttgctcaaggaaacacacaaaatggccaattcaacattctcaaacatttctagccacttgcaattttctgctagccctctagcatgtattggaattagttgatacctgcaatcaatgagaacaaagcatatgacacagatcagcaactttttatagcagctctggcaatcggatcaatcatgactacctataaaatttctcacatgaaacaataggcgcaaatattttcacccacctaactaaagaatcatgtagatcggcagtgtcgacagtttcctcacgagctggccgaggaaatgaaaactctaccagaagccatcccattgtatgaagtaactccttcagcatagaggatatctaaatccgagggttcataatcagtcctcaatatctcaaca

SEQ ID NO: 1867 - DNA, 305 bp, Glycine max
aagatacattgatcattcgtttgtgttgaagctgctttacctttttgactcagaagaccaaagagagagggattacctgaagactatcctccaccgtatttatggaaagttcatggtgcatcggccattcattacaaaagccatcaacaatatcttttacaggttcatatttgagacagagaaacacagtgggattgcagagttgcttgaaatattgggcagcataattaatggtcttgctttgcctttgaaggaagaccataagctgtttcttgcccgtgcgttgatcccgcttcacaagccta

SEQ ID NO: 1868 - DNA, 440 bp, Glycine max
  unsure (1)..(440): unsure at all n locations
agcttatattaaatagagtataaggagtactctaatgtatatgtaaagtgatatccgntaatttgaataaatatatatgatctaataagatgaacaaaattaatataaaatatgtttagtctgttagattgtaaaatgaacacaatttgaaagacaaataagaggaagatacatgtttttgtctaaatatgattggatatttttctctttatagcgcttttctctctgaggtcttttactgagtttcataaaatgttgtattggaggatgaaatacctacaaagatactgtgacgcttaaataagattntggcctagagtaataaataaacatgttgtactaacctcaagtccacaagcatcgttataatcctcgtatccgagatattatgcacttatatgcctggtggccatcacggttttatccttgtaaatacaact

SEQ ID NO: 1869 - DNA, 189 bp, Glycine max
tgttagacagacggcctcagttctcttaagaagggggtggttgttttacgataacaagaactctcgcgcaattcgcctttcactctctgctcttacatgaacgatgcaccctcaacatgaattactctaaagacaattctccatagactgctttaatggaagagagaactgcacactagattcatgctg

SEQ ID NO: 1870 - DNA, 404 bp, Glycine max
  unsure (1)..(404): unsure at all n locations
tattacgtgttgatgattatatgtatatcaattgttaaaatatattagaaattaatagttcaaataagaaaattaaattgaaggaaattaatatattaagattcaacgataaatactttcaatgcanttttagtttaattatttattagactcttttaattgaaaataatatagttcgatttaatatgtacatgttttgtgccatgtaaatattaatattgtgtgatgtctatatgattcatgagatgtgataacatgtttcattgagattataacattgtgattgaaaataaatataaatgtttgattaatacttgatgtgatattacttgtgttgtgacttatgaattggtgaatatacaataattcgactggtgtttactttgagaaaaatgtttatgtgc

SEQ ID NO: 1871 - DNA, 459 bp, Glycine max
  unsure (1)..(459): unsure at all n locations
tcttagttntagatgatgcagatgagtntgtagatacctcatgcactcctctaatgactatagcatcatttctggtgctaaactgttgggagttggaagccatcttctcaattaaatttttggcttcagtaggagtcatgtctctaagggctccaccactggcagcatctatcatacttctctccatattactgagtccttcataaaaatattggagaagaagctgctccgaaatctgatggtgagggcaactggcacatagttttttaaatctctcccagtattcgtataggctctctccactgagttgtctaatacttgagatatccttcctgatggtcgtggtccaggaagcagganattntttttctaagaatactttcttaaggtcatcccagctcgtgatggaccttggagcaaggtaatacagccagtcctttgccactctctctaaagaat

SEQ ID NO: 1872 - DNA, 474 bp, Glycine max
  unsure (1)..(474): unsure at all n locations
taattcttagagggngaaggccctttcangggcggtgcatgatgtgtttttaaaagttgtagctaaaacagttccaaattattgtatgagcatttatcattttccaaaatctttagctaatgaacttcataagatgatgagctccttttgttggggtgccaaaaggagtggtcatagagggattcactggatggattggcacaagctgggcagttcacaaggaacatggcggaataggttttaaagacatatatggatttaacctcgctttacaagggaaacaagggtggaatctattgaaaaacccaactgctttggtttcaaagattttcaaagctagatattatcctaaagcggatttcttggtggccattgagcataaataatccttcatactcttggagaagcatatgcaattcttgggttctattaagggaagactatagatggaaagttggaaatgggtcatcaatc

SEQ ID NO: 1873 - DNA, 417 bp, Glycine max
agcttgaaggtaaactagatgccatggttaacctgttaacccaactggccatgaatcaaaaatctgcacctgtcgccagactatgtggtttatgctcctctgtcgaccaccacacagacctttgcccttctgtgcaacaatctgaagaaattgaatagcctgaagcttatgctgcagacatccacaacagacctcctcaacctcaacagcaaaatcagccacaacagaataattatgacctctccaacaacaggtacaatcccggatggaggaatcatcccaaccttagatggtcgaatccttcacaacagcaacagcaacaacaacagacttattttcaaaatgctgctggcccaagcagaccatacgttgctccaccaatccagcagcaacagcaacaacagccccagaaataac

SEQ ID NO: 1874 - DNA, 410 bp, Glycine max
  unsure (1)..(410): unsure at all n locations
agcttcttgatgtagaaaagacaaaagttatattctttaaatatttaatttctcaaatagaactttgggtttcctatgtatttcatctcaaattatttcttcaatcaatctatagcttttggaagctcttcaaaagttccaataatatatacgtcatctacataagcaatgattatgaaaatatatttttagattttcctgaaaaatgacaaataagatcattttaatatccttcctttaacaagtactcactaagtctattatacaacatgcgacttgatggctttagtccatacaaagtattcttcttgagaatatgcattattggacaaactatttcctttaaggagttntatgcanatgccattataaatagagttatataagtaagatgtaacaatatccattat

SEQ ID NO: 1875 - DNA, 457 bp, Glycine max
  unsure (1)..(457): unsure at all n locations
gagctngcttctacaaccaattgaataggaacatttgcctttggaggcatgggtaagggaaagattactagtataggtaaaatccgtgttcctttcttagcctccatagacaacgtcttatatgttgaaggtttgaagtataacttattgagcaaagttaagtttgcgacaatggttatattgtgtccttcaacaaagaccaatgtatagtcaagatacaagatgacaagtncttatttactactaaatgacacaacaatctgtatgagattgatctgataggtctaagtaaacaaaatataatgtgtctgctttgtagagaatatgagagatggatttggcacaaaatatttgggcatgtgaatctganacatatctcacaactttcttaaaaaggaattagtgaacagacttcctaagatttgttgaaactctcatcttctctgtgaagcatgtc

SEQ ID NO: 1876 - DNA, 320 bp, Glycine max
tatgaccattcgaatatctcaagagcttccgctggtctatgtctagcgtgtagatgaggtatgtccccgactctgacatgagcgtgaaaagatgtgaccattctattgtgtcgagagcttatgatgttcagtttagaacgtctcgatatattatgagacgcgcatctgacgtgaagtgagacaatccctgatctcttggatattttccagagcttccggagattactttcaagcgtatagatgagctatggacacgaaccgcacattccagtgaaaacttgtgacggttcgaatttctcgagagctttcggtggccaatt

SEQ ID NO: 1877 - DNA, 475 bp, Glycine max
actaagcttacaagggaagataacacctcattcatatttggtcgatgttcaagatctgggagggtgcagcacaatgataacttaatgagctctggcaacacttcgtcatggtcaacatcccaggtaaacaaagggtctacaatattggcaagttgttttattccatttttaagggcttttgtcactacttcacgcaaagtgattggcaaaccatcctctttttagagtcctgtcggccttctttttgttagaaactccattactatgacaccgaagctgaacacatctgctttagtggttactttcctcatgtaggcaaattctgaaaattacacagcataaatatcttgtttagagagtgaaacttataaaaactctcgggtatacaatgttaataagataagaggattcgaaacatagtgacaaaataagacgttgtgtaattgtgccagtcttggtcatgctaccttctctg

SEQ ID NO: 1878 - DNA, 459 bp, Glycine max
  unsure (1)..(459): unsure at all n locations
ntgtaatacaccaaattcttttctttgtttatttgcggccacttgaattatttatttcaatttctatccttatacccatagtaagtattgacatttatccatattttatttttccattatcagctgacaaggttgaagctattctatctaattttttatagataattttcacacatcaatgaaaactcacataaaaataaataaaacccatgcacaatacaaaaccttatatttcttttgtattatattaattatataaaaataaatttgaattataattgaatatgtttgctgttttgagaaccccttgaatcactattaagatacttgattgaaaagtttaaatatatcaataaatatatgttttaacatatagtatgacacacatttattatctctctatacattaataatatattacattagaatggataaatgcatatgtatatatatatatat

SEQ ID NO: 1879 - DNA, 464 bp, Glycine max
  unsure (1)..(464): unsure at all n locations
cgtcactcanaacaactcattgtgcatgaacctattgaatctagctntcaacattgaaataaagatataacaattgaaattgtaacatctcattttcttaaaactaattttaagaaaatgttatttataaataaatagagttttagaaaaatgatgagatttttgtaattaaatgaataagaagaaataattgtattaaaataatggtttgagagaaaataaaaaggatacatttgataggaaataaaatagagtgtttgtttataaagtaataaaaaaatagagtagacaatagactaagagtatctaactatgaatagagacatgctaggtcatttntaactntctctccctctcagtttgcgtntctttctcctcctctaaacctntctattccgcatccaccaatttatcccagaaaatgtgatctcgactcattcatcgtggatcgcataatattaaca

SEQ ID NO: 1880 - DNA, 367 bp, Glycine max
  unsure (1)..(367): unsure at all n locations
actatgaatgacaaattccttgggataaaggtagtggtgccatgttttcaaagcccgtactaaggcatacaactccttatcataagttgaatagttaagggtaggaccacttaacttttcactgaaataagcaattggatggccttcttgcaacaacacagccccaatcccaacatttaaagcatcacactcgatttcaaaagatttttgaaagtttgcaacgcaagtatggnggcattagttagcttttgcttaagaatattgaaatcttcttcttgtttctctccccattagaaaccaacatttttcttgggcacttcattgagaggtgctgtcaatgtgctaaaatcattcacaaatcgtctat

SEQ ID NO: 1881 - DNA, 369 bp, Glycine max
gcttaagctccttcaactgcacaaggctcttaatattttaagagtatccttgtggaaccttgacccgacgaagacactgacagaaacttatcttctccttcttggacaaagtatgagatgctgggggcaagtaaattctcttcccatcagaccttggatgcgactgtgatcttatacctatatcagctagatcttgacgggtattcaagccatccttcgtcttgccgtgaatgttaaggagcgtcccaatcacactgtcacaaacattgttctccacatgcataacatcaatacaatgtctaacgtctagatcacaccagtacggaagatcaacgaaaatggacctcttcttccatatgcaactctgac

SEQ ID NO: 1882 - DNA, 486 bp, Glycine max
  unsure (1)..(486): unsure at all n locations
agcttctacattcaatttcgagctnttcgatatattactggactcaatcggacatccgagtaaaaagttattgtagtttgaatttgctcagggcttcggtattccatttcgagcgtctcgatatattacgggactcaatcggacatcagagtaaaaagttattgttgtttgaatttgctcagagcttcggtattccatttcgagcatctcgatatattacgggactcaatcagacatccgagtaaaaagttattgtagtttgaatttgctcagggcttctgtattccatttcgagcgtctcgatgtattacgggactcaatcagacatccgagtaaaaagttattgtcgtttgaatttgctcagagcttctacattcaatttcgagctgttcgatatattacgggactcaatcagacatccgagtaaaaagttattgtcgtctgaatttgtcagagcttcatattccatttcagcgtttgattata

SEQ ID NO: 1883 - DNA, 484 bp, Glycine max
  unsure (1)..(484): unsure at all n locations
agcttgcttctacaatatccnncttttgatgatgacatcttctgaaatcaagaagcacacacacactttttcctagtcgatcactcatataaattctcctcctttgtttttgaatttatgtttatcttaaaaataagttgattactcatgtgaattcttgatttaatcccatttctctccccctttggcatcaacaaaaagccaaagtgcgtatcaaacttaaggtatacaaatataacttaaacatctatacttaatattcatgaaaaaaatatcaaccaaatcatgaagcaagaagcaagaaccatgaaaaccatgaagcaacaaccatgaatagattaattttaaactccacatagtcaaataacatacttaatattggtccaaacataccatgcaaataaggaaatagtatattgttcaaatatcataataataatagagaaattatttgataagtcactaacatctattagtcctaact

SEQ ID NO: 1884 - DNA, 393 bp, Glycine max
  unsure (1)..(393): unsure at all n locations
ggccgccacggagttntccgactatgctcttgtgtggtggaacaagctacaaaaggagagagcacgaaatgaagagccaatggttgatacatggacggagatgaaaaagatcatgaggaagcggtatgtgccggctagttactcaagggacttgaaattcaagctccaaaaactaacccaaggcaacaagggggttgaggagtatttcaaggaaatggatgtgctcatgattcaagcaaatattgaagaagatgaggaggtaactatggctcgatttcttaatggtttgactaatgatatccgtgatattgttgagttgcacgagttngttgaaatggatgatttgcttcacaaagcaatccaagtggagcaacaattaanaaggaacggagt

SEQ ID NO: 1885 - DNA, 447 bp, Glycine max
tgcaggtgctgctactggtggaggcacttgaatttgcttgccagaccacaaggtgatggcactcacatttttcggattctgcacagtttgtgaaggcaatttgtcaaaaatttgggactgagcttggttcaactgagtagccatctgccccatctgatttgttagactctgaatagaggctcttgtctcttgctgaaattgcatattctggatagtcatttgcctcactaactcttctaaggaaggttgaggaggggcctcagttgcttgttgtctttgctgttgctactgctgtattggaggaggaacatgtggcttgcttggaccatcaacattctggaagggagggacaagctgttgttgttgtggacgacttgcccatctcaaaattggatgattcctccaacctggattgtatctgttgcttgaaagatcataattattctg

SEQ ID NO: 1886 - DNA, 465 bp, Glycine max
  unsure (1)..(465): unsure at all n locations
gcttcaacatcagaccacttccagggtgctggtactacttcacatggacttgatggggcctatgcaagttgaaagccttggaggaaacacgcctgcctatgttgttgtggatgatttctccagatttacctgtgtcaactttatcagagagaaatcagaaacctttgaagtattcaaagagttgagtctaagacttcaaagagaataggattgtgtcatctagagaatcaggagtgaccatggcagagaatttgaaaacagcaggttcactgaattctgcacatctgaaggcatcactcatgagttctctgcagccattacaccacaacagaatggcatagttgaaaggaaaaacaggactctgcaagaggctgctanggtcatgcttcatgccaaagaacttacctataatctctgggctgaagccatgaacacagtatgctacattctacacagagtcacact

SEQ ID NO: 1887 - DNA, 431 bp, Glycine max
  unsure (1)..(431): unsure at all n locations
agctcatgctttttccccaagctgtacagtttattattttaaggactgttggcaagtgatagtatgatgtagtaaagaaacatgcataatgagattaaagtagtggttactagtggtaattacagtatatatggttgataactggagagtaataaacctagcgaggtgtaatatatcaagtgtgatagaaaatgtgttactagcatttcacatatactaattacagaaaactacttatgtttttattcaagttaattagctattactttgtatgtggcagttctttcttctgtgtatgttgagtggctgtagcatatgttggttcaacacagtatgttntgttctctgcattaggaatttcccagttaacagaccccttgcattatcactcactgtgagtgtcaatggtgtgagtgcagcactctacacac

SEQ ID NO: 1888 - DNA, 460 bp, Glycine max
  unsure (1)..(460): unsure at all n locations
tgccnanataaagaaagggaatagattgaatctagtaagatgcattaaggatgaagaaggaaaagtattggtcagagatcaagatatcaaagaaagatgggagaaacattttataagcttttcaattatggacaaaggatcagcttggaagtgaagacagagcatatgcattgcaattttagcaagaggcaagaggagtatgacttggaagtgaagatgggagaagatgtcataccacatgttactaagtttaaatatatgggatcaataatataatacaatatcatgaggaaattaatgaggatgtcacacatagaatacaagcaaggtggttaaaatggagaaaggcgtcaagggttatttgtgattgcaaaataccaactttaaatgcaagttttgttgtacagcaatagtttgactatactctatggtagtgaatggttggtttagagggacaata

SEQ ID NO: 1889 - DNA, 335 bp, Glycine max
  unsure (1)..(335): unsure at all n locations
agcttcacatcataccacttccagcgtgctggatctacttcacatggacttgatggggcctatgcaagttgaaagccttggaggatagaggtatgcctatgttgttgtggatgatttctccacatctacctgtgtnaactttatcagagagaaatcagatacctttgaagtattcaaagagttgagtcttagacttcaaagagaaaaggattgcgtcatcaagagaatcatgagtgaccatggcagacaatgtgaaaacagccgggtcactgaattctgcacatctgaaggcatcactcatgagttctctgcagtcattacaccacaacagaatg

SEQ ID NO: 1890 - DNA, 433 bp, Glycine max
  unsure (1)..(433): unsure at all n locations
agcttaagctccttcaactgcacaaggctcttaatatttgaagagtatccttgtggaaccttcacccgacgaagacactgacaaaaaattatcttctccttcttggacaaagtatggcaggctgggggcaagtaaattttcttcccatcagaccttggatgcaactgtgctcttatacccatatcaactagatcttgacgggtattcaagccatccttcgtcttgccttgaatgttaaggagcgtcccaatcacactgtcacaaacatttttctccacatgcataacatcaatacaatgtctaatgtcaagatcacaccagtacggaagatcaaagaanatggacctcttcttccatatgcaactctgacttttatccttcttttgggtcttcccaaatacagtggtcagggtgtgaacccgctgatatacct

SEQ ID NO: 1891 - DNA, 467 bp, Glycine max
  unsure (1)..(467): unsure at all n locations
agctngagcaggttggaattggaaagcaacaaattaactggagaaataccctcctcccttggtaatcttaaaaggcttcaattcttgtaagtatggcattctgtttgctaggctctacatatatataatgagtcttaggccttagcatgtattttttgtgcaatgtttaaaagtgtctgtttcttgtcctgctaccagaacattgagccaaaacaatctcagtgggactattcctgaatcacttgccagtcttccaatcttaatcaatgtgtatgtaaaataatggtttctagaactctgccattnttttaaagtatatttcattaatttagtatctgattgattattcaaacttctcttttgcagtctgctagattcaaataatctgagtggccaaatcccagagcagttatttaaggttcctatatacaagtatggatggtacaaccataaaattagtatatgat

SEQ ID NO: 1892 - DNA, 408 bp, Glycine max
  unsure (1)..(408): unsure at all n locations
tctcgtagtagaacataggcaacgtatctaccataatcgtgatcatctccctctcagtcatgggcgggatgacttgggctgctaggtctctccacctttgagcatattctttaatggactcatgttctcgcttggtcatgctctgaagatggttccgatcaggagccatatccgcgttgtattggtactgcctaatgaaggcagtttccaagtctttccatgaccggatctgagaagcttccagattggtataccacgccactgctgctccggctaagctgtcttgaaagaagtgcgtcaacagctctttgtccagagaatatgcccccatccttcggcaatacatccaaagatgacctcttggacacgtcttccctttgatntatcaaaatctggtattttaaactt

SEQ ID NO: 1893 - DNA, 464 bp, Glycine max
  unsure (1)..(464): unsure at all n locations
taagctccttcaactgcacaaggctcttaatatttgaagagtatccttgtggaaccttcacctgacgaagacactgacaaaaacttatcttctccttcttggacaaagtatggcaggctgggggcaagtaaattttcttcccatcagaccttggatgcaactatgctcttatacccatatcagctagatcttgacgggtattcaagccatccttcgtcttgccttgaatgttaaggagcatcccaatcacactgtcacaaacatttttctccacatgcataacatcaatataatgtctaacgtcaagatcacaccagtacggaagatcaaagagaatggacctcttcttccatatgcaactctaactgntatccttcttttgggtattcccaaatacagtgttcaggtgttgaacccgctgatatacctgctcaccagtcaacggtatcggcgcaatatcatgc

SEQ ID NO: 1894 - DNA, 374 bp, Glycine max
  unsure (1)..(374): unsure at all n locations
agcttgcccttgttcttcaccctaaagtgtatataaattaggaacaaaccttttgtagaagcttgctcacccctagaagctcctaatatctcctatactttntggggagggccattcttggatggccttgattttcttagggctcacttggaccccatttctaccaactacaaattctaagaaactatattatctacataaaaggtacacttctctatattagcatagagagtatttttcctaagaactgaaagaactttccttagatgtcctaagtgatcatttaggctcttactgtacactaaaatttcatcaaaataaatgactacgaatctacctatgaaatcccttaagacatgatgcataagcctcat

SEQ ID NO: 1895 - DNA, 406 bp, Glycine max
  unsure (1)..(406): unsure at all n locations
catgcaagcttcttaatgttatagaattcaatagctcaaggaagcgaatgtcagtgatagtgaaagatgaagaagggaaaanttttctactctgtaaaggtgctgacaggtctgtgataaaataatttatagccttcaacttctagcctgcgcatttaacctatggacttgcctaacttattttttcatgcagtgtcatgttggaaaggcttgcaaacaattggaggaagtttgaaaggaaaactgtggaacatgtgcgtgaatatgctgacacaggtctaaggaccctagtacttgcctattgcgaacttgatgaacaagaatacaaggagttcgatgataaattctctgaagtaaaaaattctgtccgcgcagatcaggaaactctgattgaagaagtatcgga

SEQ ID NO: 1896 - DNA, 452 bp, Glycine max
  unsure (1)..(452): unsure at all n locations
agctngttactatgataagagcatacctgttgtttcctgaagtccaagtacaagactttntgtcaataatatcaccaaaaactatcacattaacaaaatcacagcctctaagatttcgacaaattattaggtagccttgaagcattatgtttttatgattctaatctaccattctctttatatataatacataactatattttttaatttgtaattaattataatanntcaatatgttatgtaaaaaaatagttaaaataattaacattataatgattntagactatctaataatttctagtaagaatttaatgtataacaaacctggaagcacagaaggctaccacataatccgtcccagaacaagtgaaaatactatgtggatcatcataagcatagctgtaagaaagtggacatgcctncttaaacttcttcgaataaaacgtgggatt

SEQ ID NO: 1897 - DNA, 164 bp, Glycine max
  unsure (1)..(164): unsure at all n locations
agcttatacatggagcaaggtaaattctcattatatcatattgcttaagcacaagaaacatcatattgcgaggtaaatgttaaggcagataaacaatcaaaactcctatctaatatctaccactctatgtctcttctatntgcagggnaaagcaatccttgcta

SEQ ID NO: 1898 - DNA, 466 bp, Glycine max
  unsure (1)..(466): unsure at all n locations
tgttccgtctaaaactcagattaaacgagganttttctgcaaaatacctctntgatcaacattctgaatacaaaccattttgtaattcttttgcgaagttaatggtttgcatagcaaaacttgacggagtctttatagtaactaataatcattcactcagtcctcactttcctctggtttcacaaagaattcaatatgagctattctacttggttgctgatagccaaccgaatcagcatatgggtgtgacacagatggtttggcaattgaaaccagatgctggacttttaacattccacctctcccaatgcttaacttacttcctctattttctttaataacactgctaggcatattagaacgtgttgctctgaggaacttatatttgtacctgttaacaacaagcatagtaatgacaaataaatcgctggcaaggaaatgacaactaacacataaataatagttt

SEQ ID NO: 1899 - DNA, 415 bp, Glycine max
  unsure (1)..(415): unsure at all n locations
ctttgaatcggtggtctgattgtgttccaaaggatatcgagatgctcgtaattgaaaacggaagttctgagaaaaatcaaacgacaataacttttaactcggatgtcctattgagccctgtaatatgtcgagacgctcaaaattgaaaacggaagctctaagaaaagtgaaacgacaataacttttgactcggatgtncgatatagtctcgtaatatatcgagacgctcggaattgaaaacagaagctcttagcaaattcaaacgacaataacttttgacacggatgtctgattgagtctcgtaggatatctagacgctcataattgaaaacggaagctctacgaacaatcaaacgacaataacctctaactcggatgtctgatcgagccctgtaatatatcgagacgctcgaaa

SEQ ID NO: 1900 - DNA, 192 bp, Glycine max
  unsure (1)..(192): unsure at all n locations
agcttaacatcagaccacttccagggtgctggatactacttcacatggacttgatggngcctatgcaagttgaaagccttggaggaaagaggtatgcctatgttgctgtggatgatttctccagatttacctgngtcaactttatcagagagaaatcagaaacctttgaagtatttaaagagttgagtctaa

SEQ ID NO: 1901 - DNA, 469 bp, Glycine max
  unsure (1)..(469): unsure at all n locations
ggaggatatctatgtttattgtaacattcatcaatattgtgatttgtgaatccataatgtgtacaaaccttgcttgctttcctatcaaaactccctttatcaaagcttcattggctacttcctcctcctctagaagtataacttggaggaaaaccatttttcctataacatctgtccactatgtgattatccttaccacagtatgtacatgatttcgatgaaagtgagcctgttgcattgatgagactagtgtntcccatcagatcactattattgatctgcctttcttgctgaacaacatatgagaagacctttgctatgctaggtaatggatccatcatcactacattggatcagacaatgccaaaatgataatttaaacctctaagaaactgcataacttgatcttgtttcttcctttctataacactaccaagagcatcacatatacactttnggtcacatatac

SEQ ID NO: 1902 - DNA, 480 bp, Glycine max
  unsure (1)..(480): unsure at all n locations
actataaaactaagctaccacgacatctgaattcatgtacgacaaatctctatgcggtcttagttggaacatggacgctagagtggcaagggcgtcggccatctgatnttcctctctaggaatgtgatgaaaggatatgtcatcaaagaattctatcaacttccttatgtaagcctcgtaaggcaccaatttatggtccctggtctcccattcacctttcaattggtgaattaccaatgccaagtccccataaactttgagcaacttgaccttgatgtcaatcgccacttggatcccaaaggcacacgccttatactcacctatgttgtttgtgcagtcgaaacccaacctagccatgaaaggtatatactattcatccagngaaaccaatactgcgccaactccatggcctagtgcattagatgcgccatcaaaccacacgaatccattgtccctgtcttcatcctctactttctcctc

SEQ ID NO: 1903 - DNA, 428 bp, Glycine max
  unsure (1)..(428): unsure at all n locations
agctttcaacactggcaactgcaagatanttgtaagttctggcatatatgggattaggccaaatggaaaaattacaaatgtcaaaagactaaccggtagggccatgactaacacaaggccaataaagcaacggccttaagcctcttttcaattattgaaattntatatatttttaaaatacttctaaattaatagataataaattttattatattatttgtatttaacttgtttctaaaataattagtaaaatttattctctctaaatataaaatagaataactatattgaatgagaatatttttaagaattattgtgtttgataagaacaagtaaaaaaattctctanaaaaaatatctttggattctttttgctaatattttctcttactatatttttcataatgcacaatgaacaagatagattc

SEQ ID NO: 1904 - DNA, 448 bp, Glycine max
  unsure (1)..(448): unsure at all n locations
gtacaagaccgnggaattagccattagtgtgtggcctggatcttctgttggactagtttgacccctgtgcttgacaccatgtggcccaagtactccacctgggtttgggcgaaggaacatttcgagagcttaatgaagaactggccctgcgacaaaaccgtgaaagccaattgcaaatgaagtaaatggtcattgaaggagctactataaattagtatgtcgagatgtggacatcaaagcccaagcccatgacaaccaccagccccaggcccatgactagatggaagcccaagacccaatacaaggcataggaagacccatgacaagagcaagagctaaaaaggcacaagatgctttggaacatatggtgattattctgagggtagttcaaatgcaaggagaggcccaacacttggagtctcaaaagggaatgttgctagtcctatgt

SEQ ID NO: 1905 - DNA, 380 bp, Glycine max
  unsure (1)..(380): unsure at all n locations
agcttcaaggttcanagttggatcaaaagcggcttgagggacttttccatttcccgagcatcagttgagtggcgcattcctgttcctgatgacaagacccagactatatatgtatggtttgatgctttactagggtaaggatatgtatcttatagcttgtgcgtgctcctctagcttcccttgactctattctataatcttataggtcctgtctatcatactcaccgactatcatcttgtttattgttcgaaatacatagctaaatgcatgaaagttcacattatgcatgatcatttgtacagaatcacgataaagaacagcttggacttctgctattttgctgaatattctctattacatgtgtcgctaatcaccttcc

SEQ ID NO: 1906 - DNA, 426 bp, Glycine max
taagctcttcaatgcttcctctttcttgctgggagaagttcttatcattttgacatgcataccaaaagccttagcaaacttgacagccacatgacctatgcctccgaggcccaccacacccaagtgcaacccaggctgagcaagcctataatatttcattgggctgcatactgtgattccagcacatagcaacggggcgtgcaccatctaacggaagagattttgggattagcacgacaaagttctgatcaaccactatgatatctgagtctccaccttgagttattgccccatcataatagcgtgcactgtaggttacatgtatttttggacaatatacatagaagccgatgctgtcggtccaacatgagccacacgaacctacagagccacccacaccacgcatgcaccatcactgcactttgg

SEQ ID NO: 1907 - DNA, 396 bp, Glycine max
  unsure (1)..(396): unsure at all n locations
tgagcccacttatctntgtacatattagattaaggtttcattattttctggccttgtatttagggctctataatgtaggtagggtaccctagaaatgtaggatttttcagcccttgtattttagggcacctagactagtttttgtattacgggtatgtttgtaatttcacatgcattaagtgaatatttgatgtgtgtgttggaaaataaatctaattgtattgggagaagctcaatccaatttaattctagagggggaggtgagcatttgcttgctacaccccattgtcacatcatatagtcgcactttgtgcatatccttcatgctctacatgcctcatgccacgttagcatatttagtggataattttgaacttgatcttggttagtgggctg

SEQ ID NO: 1908 - DNA, 421 bp, Glycine max
  unsure (1)..(421): unsure at all n locations
agctggcttcctttgattntcggcatgtctcgggacttcacatatcgngcaacaaagggtgccaagtatctcgaagcggccaatcaaaggttgtatatcatcaaataataatccccggacgaaattagggtatgacagggtcgaagcggcttcctataccaatgtcacgaggagtgtggtggtcagattcataaagagggagttgnattgtcagtacgaactccctaggaagatcattactgacaatggcacanatctgaataacaaaatgatgcaggatatgtgcatggatttcaaaatctagcatcacaattccacgccctaccgaccaaagatgaacggagccgtggaagcagccaataagaatattaagaatattattcagaagatgacagtgtcgcacaaagattggcatgagatg

SEQ ID NO: 1909 - DNA, 453 bp, Glycine max
  unsure (1)..(453): unsure at all n locations
ngaaggagtttattgcatcagggaacaatttcactttaaaagtgtgtcctaattggattcctaattntcaacttacctatttggatgtgacatcatggcagataggtcccaactttccatcgtggattcaatcacaaaacaaacttcaatatattggactgtctaacacggtgattttagattctattcccacttggttctgggaaccacactctcaggttgtgcatttaaacctctctcataatcatatccatggtgagcttgtgactacattacaaaatccaatatctatccaaactgttgatctaagcacaaatcacttatgtggtaaattaccctatctttcanatgatgtgtatgagttagacctttcaaccaattcattctctgaatccatgcaagaatncttatgtaacaatcacgacaaggcaatgcaattagaatttctcaatc

SEQ ID NO: 1910 - DNA, 340 bp, Glycine max
  unsure (1)..(340): unsure at all n locations
tctaattgattaacggaagctcttgaganactcaaatggtcatatcttatcacacggacgtncgattcaggtgcataatatatcgagacgctggaaattgaacaacgtatggccttgagatattcaaatggtcataactagtcacacggatgtccgattcatgcacataatatatcgagatgctcaaaatcgaacatcggaagctctcgagaaattccaaaggtcataactcttcacacggaagtccgattctggcgcatcacttcataagatgctctgaattgaacaccggatgctctcgagaaattcaaacggtcataacttgttacacggaagttcg

SEQ ID NO: 1911 - DNA, 469 bp, Glycine max
  unsure (1)..(469): unsure at all n locations
tctanactntatacaagaatgaagctctgataccacttgttagacaagtggcctcagatatcttaagaagggggggttgaattaagatattccaaactacttccccaattaaaaatctatttcactttttttaagttatgaattcccttaatgacaatcttcttaaatattgattcagataaaacaatttgaatatgagaataaagcagtaataaataaaggagattaatggaagagagagtgcaaactcagatttatactggttcggccacacccttgtgcctacgtccagtccccaagcaacccgcttgagagttccactatcttgtaaattccttctacaagttctaaacacacaaggacaatccttcctttgtgcttagaattcctttacaacaagagactcacggtctcttaatcccttagagaatgaggagaagtagaagaataaatctctctagaaagagat

SEQ ID NO: 1912 - DNA, 432 bp, Glycine max
  unsure (1)..(432): unsure at all n locations
agcttcaagaaaaagatggcctcagtatattccttatttccagaagggaattccatcaatagacctccaatctttaatggagagggttaccactactggaaaacccgaatgcaaatttttattgaggcaatagatctacatatttgggaagccatagaaatagggccttatatacccaccacaggagaaagagttacaatagatggtagttcatcaagtgaaagcataactatagagaaacctatagatagatggtctgaagaggatagaaaacgagtacaatacaacttaaaagccaaaaacataataacatctgccctgtgaatggatgagtatttcacggcttcaaattggaagagtgctaaggaaatgtgggacactnttcgattaacacatgaaggaactacagatgttaaaagatctatgataaat

SEQ ID NO: 1913 - DNA, 493 bp, Glycine max
  unsure (1)..(493): unsure at all n locations
acactcagatactaagctgttcgccatcgttcgcgtgtatgacatccactccacaaggtttgaagttgaggagaccttcaatcctattacacaacgtggccgacaaaagtgggcagttaacttgaatggtcattattgtcaatgcagaaggtattctgcgcttcactatccatgttcacatattattgcagcttgtggttacgtgagcctgaactactaccaatatatagatgttgtttatacaaatgagcacatcgtaaaagcttactccgcacaatggtggcctcttgggaatgaagcgactattcctccttctaatgacgcatggacacttatccctgacccaacagcaattcgtgcgaaaggtcggcctaaatcaacaaggataaggaatgagatggattgtgtcgaaccctctgagcaccgacaaaaatgcagtagatgtggagccgaagcgcataacangcgtcgatgtccaatgcaatctgagcgt

SEQ ID NO: 1914 - DNA, 464 bp, Glycine max
  unsure (1)..(464): unsure at all n locations
agctnntggaaatgatntctatacaaaagttagtcgtataaagtgactaacacacttaggctataaatagaggtcatgtgtgtgcatttcttcaactttgatcattttagaattacgcttcaaagttcagacctcttttgaggcacaaattttcgtgctccttctcctaccttcaggctcttatccatggattcctatggtggtgagcttcttcttgactcatcttctccttgaagtggtgtctctaatcaactttcttccttattcatttcgctaccattaaacttcaagaagaaaagcactccattgttgaagaagatccaaggcctacaagttccacatggagctacattagtattgccctttctcctacgtatccttagatgcgatgaggaacttagacctacgtagttctttaagtctgaatggttgttgtgctacatngattttatcttaattttaaa

SEQ ID NO: 1915 - DNA, 395 bp, Glycine max
ataccttcatctgacttattatcattatttcctaagctatcttttccattattcaatacaaaacatttacgaccaaagatatgaagatgtgagatgtttggttttctgccattgaacaattcatatggagtattctttaaaatgggtgttattaaagccctatttaaaatgtagcatgctgcgttaacggctttagcccctatagttgttggaagaggagtatcatttaggtcagtcctatctatctcgttcaaagatctatttatactttctacaacaccataatgtcgaggggatcttggtgttgaaaagctatgctcaattccatgcttatcacacaataattgacattcttcacttgcacactgacgcgcatgatcactcctaatagatat

SEQ ID NO: 1916 - DNA, 409 bp, Glycine max
  unsure (1)..(409): unsure at all n locations
ggaagganaacttgatgccttggtcaacctagtaactcagctttccatgaataagaaatctacacttgttgcaggagtctgtggtctatgttcttctgcagatcaccatacagaaatctgtccttttttgcagcaatctggagtcaatgagcaacctgaagcttatgctgcaaacatttataatagacctcatcatcagcaaaacccacaacaccagaataattattgacctttaagcaatagatacaatccatgctggaggaatcatccatatctgagatggacaagcccttcacaacaacaacaacctgtccctccctttcagaatgatgttggtccaagcaagccatatgttcctcctttcatacaacagcagtcacaacaaagacaacaagcatctgaggctcct

SEQ ID NO: 1917 - DNA, 484 bp, Glycine max
  unsure (1)..(484): unsure at all n locations
tctntgagaaaacttccttgagaagctagagcttagctacacatacctctctaatagctaagcttacctccttgagatgagaagctagagcttagctatacacaccctataatagctaagctcacccccatgacaaaaaacatgaaaatacaaaaaaaagtccttactacaaagactactcaaaatgccccgaaatacaaggctaaaaccctatactactagaatggccaaaatacaaggcccagacgaaggaaaaatctattctaatatttacaaagataaatgggctcatacttagcccatgggctcgaaatctaccctaaggctcatgagaaccctagggccttcccttggatctctagcccaatctacatggagtcttctacccaatgcccttgcagagtaggattgcatcattgagttatgtggagttntattgacctaagttgaaattatgagatttcaaatcttacctaaacctact

SEQ ID NO: 1918 - DNA, 475 bp, Glycine max
agcttgtaggcctaggatcttcttcatcaatggattcctttgcttcttggaaaatgaatggcagcggaatggagaaggaagagagagagagagaggagacgccacttcaaggagaagatgagtctagaagaagctcaccaccataagaggccatggataagagcttgggggaagaaggagatgaatgaagggagagggagagaagagcactgaaatttgtgctccaaatgagctttgaaatctgaattttaatattcaaatgatcaaagttgaaaaaaatgcacacacatgacctctatttatagcctaagtgtcacacaaaattggagggaaattcaaatttcacttgaattggtggagccaaactttggagccaaaatttcactaattatgattagtgaattctagttatggttcagcccactaatccaagatcaattccaagattctccactaagtgtgcttaggtgtcatg

SEQ ID NO: 1919 - DNA, 325 bp, Glycine max
cccgttgttcaatttcttacgtctatatatgtgatgcgcctgttatcgaccttcaagagaaaagtaatgaccatctgaaattctcgagagcttccgctgctcaatttcaagcgtctcgatctgttatacgcctgaatcggacctccgagtgacatcttatgaccatatgaatatttcgagagcttccgccgatcaacgtctagcctcatgacatattatgcgcctgactcggacctactagtgagaagctcagaccattagagttggtcacgagcttccaacgatcaatacccagcgtctcggcatgtgatgcgcctgaattgga

SEQ ID NO: 1920 - DNA, 344 bp, Glycine max
  unsure (1)..(344): unsure at all n locations
agctctaacatcagaccacttccattgtgctggatctacttcacatggactcgaaggggcctatgccagttgaaagccatggaggaaagaggcatgcctatgctgatgtggatgattcctcgagatatacctgggtcaactgtatcagataaaaatcacacatcctngaagtattcaatgagctgagtctaagacttcacctagacatagactgtgtcatcaagagactcatgagtgaccatggcaaagagtacgaaaacagattgtttactgaattctgctcatttgaacgcatcactcatgagttgtatgagccattacaccacatcagagcgacatatatg

SEQ ID NO: 1921 - DNA, 425 bp, Glycine max
ttatgctattacctaaacttatgagctctagctaggttgtagcttcctataataggtataagaataggatcaaagcttctactttgacaatcacagtgtcaaggacttaactgatgacattattgcaaattcaatgttttgacattccttaattttgtaggtactaccaatgggaaacgggcaaccccaaatccagaaatgggttctacatctcaaggggaacggaagaggaagcggttagcaaccgacggagaggaggaaactttgcaaagccaattaattgatgtcttagaaaagaatggcaaaatgctacatgatcaacttgaagctcagaacctgaatttccagttggatcgccaacagcagaaagacactgcaagtaacatagttgctgtacttgataagcttgcagatgctctacggag

SEQ ID NO: 1922 - DNA, 408 bp, Glycine max
  unsure (1)..(408): unsure at all n locations
agctgcatactgttntcattatgacaataaaatatttttgcaggctatacagctggatccagaatntgctaacaacattgggcagattgttcttcttggtggtgcttttgcagtaaatggcaatgtgaatcccgctgctgaagccaacgtgagtatttcaatcctgtattcaaattcttaatataacttccataaaaatattgtatcatccacaagtcaatctgtctaactcttcggttggatttgttccagacatttggtgatccagatgctgcagatgttgtatttacaagtggggcagatgtacttgcagtggggataaatgttacccaccaagttgtactgacaggtacccctttgacaaattctttggctcctttgtatacttgagtcatttttgtaaaattc

SEQ ID NO: 1923 - DNA, 437 bp, Glycine max
  unsure (1)..(437): unsure at all n locations
agcttctggtttaattacgtgcgtctcgatatctctactgtgacacaatcagacatccgagtgaaaatntattgtgctttanatgtgctcagagcttcagttttcaattaggagcgtctcgatatattacgggtctgaatcggacatccgagttaaaaattattgtcgtttgaattttgccagagctttcgttatcaattacgagcgcctcgatatcctacggtgctcaatcggacatccgaggtaaaagttatagtcgatagatttttcccagagcttccgttttcaattaagagcgtctcgatatcctacgggacacaatcggacatccgagtcacaagttattgtcgtttgactcttcttagagcttcctgtttaaatttcgagcgtcttgatatattacagggcgcaatcggacatccgagttgaaagttatt

SEQ ID NO: 1924 - DNA, 495 bp, Glycine max
  unsure (1)..(495): unsure at all n locations
agcttagctaactctataggagacatcctataatgagctatggatatgggtccagtaccaggtactaagtctatggaaaactctatctctctctcaggtggcagatcagatatatcctcaggaaacacttcaagaaactctctaacaacagggaggtcacacatagaaacctttgtctctacttctaggctagacaagatcatgtacacttgagcatcttcctttanagatgtcacaacttggttggcagagataaacatcatatccttactcactctagaatcatcaaacaccacactnttatcaaaacagttcaacaagacatggttggaagataaccagtccataccaagaataacatcaatctgactcataggcaaacaaatcacatcaattaagaatgttctaccagaaatctccacagaacaattcacacacacataagaaagtaacatagaaccactagtaggggtctctaccactagatctttatta

SEQ ID NO: 1925 - DNA, 375 bp, Glycine max
  unsure (1)..(375): unsure at all n locations
agcttctacattcaatttcgtgctnttcgatatattacgggactcaatcggacatccgagtaaaaagttattgtcgtttgaatttgctcacggcttcggtattccatttcgagcgtctcgatatattacgggactcaatcggacatcagagtaaacagttattgttgtttgaatctgctcagagcttcggtattccatttcgagcatctcgatatattacgggactcaatcagacatccgagtaaaaagttattgtagtttgaatttgctcagggcttcggtattccatttcgagcgtctcgatgtattacgggactcaatcagacatccgagtaaaaagctattgtcgtttgaatctgctcagagcttctacat

SEQ ID NO: 1926 - DNA, 480 bp, Glycine max
  unsure (1)..(480): unsure at all n locations
agcttcttcttgtnntttcgccccattganaacaacatttttcttaattacctcattcaaaggtgctgccaaggtactaaaatccttcacaaatcgtctataaaaacttgctaggccatgaaaacttctcacctctgtcacacttttaggtgtaggccactcttgaatagccttgaccttttcttcatcaacttaaacccctttggaactcaatacaaaaccaagaaacacaacatggtctttgcaaaaaatacattnttcaaggttagcatacaattgttctttcctaagcacacacaacaccgattntaagtgtacaacatgcaaatcaagggttatgctataaacaaggatatcatcaaagtacaccaccacaaatntaccaatgaattctctcaaaacatggttcattaatctcatgaaagtgcttggtccattagtcaaaccgaaaggcataaccaaccattcatataatccata

SEQ ID NO: 1927 - DNA, 469 bp, Glycine max
  unsure (1)..(469): unsure at all n locations
agcttaacaggttcaggtgctggtgttgctactggtggaggcactttgaattggttgccagacctcanagtgatgacactcacattnttcagattctgcacagtttgtgaagacaatttgtcagaattntggggctgagcttggttcaactgagtagccatctaccctatctgatttgtcagactctgaatggaggctcttgtcttttgctgaaattgcatattctggatggtcatttgcctcactaactcttctatgaaaggttgaggaggagcctcagttgcttgttgtctttgttgtgactgctgctgctatatcggaggaggaacatatggcttgcttggaccagtagcattctggaaaggagggacagactgttgttgttgtggaggacttgtccatttcagatttggagattcctccaacctggattgtatctgttacttaaaagggcataattattctgatg

SEQ ID NO: 1928 - DNA, 391 bp, Glycine max
  unsure (1)..(391): unsure at all n locations
agctnttggaaggatcaaaaagtgccttatgaattctcccgtgcttatgccaccagtacctggaaggcctctcattntgtacatgaccatgttggacgagtcaatgcggtgtatgctggggcaacatgacgaatccgggaagaaagagcgcgttgtttactacctaagtaagaagttcacgacctgtgagatgaattactccttgctcgaaagaacatgttgtgctttagtatgggcatcccatcgcctaaggcagtacatgcagagccatactacctggttgatatccaaaatggacccggttaagtacatctttgaaaagccagctctcacgggacgaatcgcccggtggcaagtcctgctatccgagtttgatatagtctccgtcacc

SEQ ID NO: 1929 - DNA, 484 bp, Glycine max
  unsure (1)..(484): unsure at all n locations
agcttgctaacccatggaagctcctaatatctcttacactttntggggtgggccattcttggatggccttgattttctcaaggtccacttggaccccatttctaccaactacaaaccctaagaaaactatattatctacacaaaaggtacacttctctatatttgtagagagggtgtttttcctaaggactgaaagaacttgcctgagatgtccttagtgatcatctaggctcctactatacactaaaatatcatcaaaataaacaactacaaatctacctatgaaatcccttaagacatgatgcataagcctcataaaggtgtttggtgcattagtgagcccaaaaggcatcactagccattcatacaaaccaaacttggtcttgaaatcggntntccactcatcaccctttttcatcctgatntggtgataaccacttttaagatcaatctttgaaaagatattggcaccatgcaactcatc

SEQ ID NO: 1930 - DNA, 455 bp, Glycine max
  unsure (1)..(455): unsure at all n locations
tactcaagcttgtccaanatgcaaacaataataattgtcaaacggatatcctattgagtattgtaatatatcgagacgcttgtaatggaaaacagaagctcgtagaaaatgcaaatcgcaataacttttaactcggatgatcgattgagtcccgtaatatatcgagacactcgaaattgaaagcagaagctctgagcaaattctaacgacaataacttttgactcggatatccgattgagtcatttaataattcgagacgctcaaaattgaatacagaagctctatgcaaattcaaatgacagtaactttcgactcggatgtccgattgagtcattttatgaattgagacgctcaaaattgaatgcacgagctcttaccagatccaaatgacaataactttntactcggatgtacgattgagtgccgtaatatatctagacgctcaatattgaaa

SEQ ID NO: 1931 - DNA, 479 bp, Glycine max
  unsure (1)..(479): unsure at all n locations
tactcaagctcttatccatggcttcctatggtggtgagcttcttctttactttcttctccttaaagtggcgtctccaatcatcattcttccatctccattccgctgtcattaatcttcaagaagcaaaggactccattgatgaagaagatccaaggcctacaagctccacaaggagctacatcattttgggtttgatatctagacttttagtccactattactattgtgtagggtacatttgtcctttgcaacaattaataagtataaattaacataaatatctcatcatcaatataatattctcaacaacaacatgataaattacaaacaaaaaattatagaccaacccacccatcataaatatgtatgactttaccattataacaattntatacttcatgtttaagggtatcaaaacccctcataagtctttgggtactatctccttcatcttttattatgtgcatatgaccttcat

SEQ ID NO: 1932 - DNA, 399 bp, Glycine max
  unsure (1)..(399): unsure at all n locations
cggattctttttactctggaaacctcttctttctatgtgaacctcaacccaatctctgggttggtaaacaacctttttgcgacccttgtttgcttatctagcatagctctcattcctcttttcaatttgggccttgactctttcatggagctttttctcacagtccgctttggcttgtacttcctcatgcttaaaaactgaaatattaggcattggcaacaaatcaagaggagttagtggattgaaaccataaataacctcaaaaggagaacaactagtggtgctatgtatagccctattataagaaaattcaatatgaggtaagcaaacttcctaattnttaagattctttttcaaaatggtccttagcaagatacccaaagtcctattcatgacctc

SEQ ID NO: 1933 - DNA, 408 bp, Glycine max
aacacgacatggagactatctagcatagctaatagggaagacaacaactaaacattcccagatggtaagcgtgcaattataaatcccaattccactgcagtacatgatcacaattcctattaactgctattggcagtaaccaagttcataaagaacagtccacaactcaatgcggccggatctgcccgcaatatccctaaatcgacagccatgcgaccacaatctaaaaccttggtagtaacataagcatggggccaaatacatgaataagagaggctagttttactttacccctgagcaaatatgcgaccagcctcaagagcattgtgaccaacttcactattacccatgtcatcttctgttggaaagtctacagcggtaccatgagccctaaccaatctccatcgt

SEQ ID NO: 1934 - DNA, 470 bp, Glycine max
  unsure (1)..(470): unsure at all n locations
tactcaagcttctcatgctgagtaggaccccagtagtaccctntcaatcccactacattgggatgcctgatgtttgcaatttttttagcctctttggtaaattcttttctctttgttgccattccttctcttagccacttcactctcaataacaaaccatgctccagagttgccttgtaagatgtaccatgactgcttctccccaaaacttcagctggggctccagacagctcctcatgtgtcaatgttattgcatcatcaagaaaataaagttctccagtcaatttatctgctgatcttgcatatagtcttgcatgatttcctacagaaactgaatcactagatcctggtgatgaaaagtggctattttttgatggggagaaccttgttgcagctgccattttttcatcatggctgataatctcagatgacgaacctttctgtgaggtcacaaaatcctcggctgatac

SEQ ID NO: 1935 - DNA, 437 bp, Glycine max
  unsure (1)..(437): unsure at all n locations
tactcaagcttgtatctgtggattcactttcgatctcaactataccataaggtataacattattcaccacaaaaggaccaatccactttgacctcaacttaccactcatgagtccgagcctagagttatacaataaatttttttgtccaaccacaaagttcttcttagctatcaagctgtcatggaacttcttggtcttctcctagtagaatttggaattctcataggcttctaaacggatctcatctagctcacttagttgcaacttcctttcctctccagcctggtccataaagaagttgcaagtctttacagcccagtaggctttgtactctatctctacaggaagatggcatgtcttgccaaagacaacccgataaggagacgttcctatgggtgctntgtacgcagtcctatgcgcccaanaagcatcatct

SEQ ID NO: 1936 - DNA, 477 bp, Glycine max
  unsure (1)..(477): unsure at all n locations
agctagaaatccaatgcaatccaagttatgatctaatcatttatctattccatatccaattgactaaattaattaacataagtgcataacataaccaccacatatctaatcaactggatttaaagttgcaaccgtgccaattcgacgataatataaaacgaagtaaactcacgaacctatcatcatcattattggtgtattgaactaattaaatttttttctatcgtcaaacaaacatattattattatagtaacaggtaccagnggcaccacatatcatacatatatatataactaattaattagtgcaacatatacacaataaaacccaactgtctagccaaacgctctaataacaaaaataaataaactatatattcttataatgaagactatcaagaaaggaataagaaacaatggagattatattccacggcaccaccatgcactattagtatattactaatcatccatgga

SEQ ID NO: 1937 - DNA, 390 bp, Glycine max
gaaagaaggttgtcttcgaacccggagattgggtttgggtgcacatgagaaaagaaaggtttccggaacagaggaaatcaaagcttcaacaatggggagatggaccatttcaagtgcttgaaagaatcaatgacaatgcttacaaagttgagctgcccggtgagtataatgttagttccaccttcaatgtctttgatttacctctttttgatgcagatgtagaatccgatttgaggacaaatccttctcaagagggagagaatgatgaggacatgaccaagagcaagggcaaggatccacttgaaggacttggaggacctatgacaagggctagagcaaggaaagccaaggaagctcttcaacaagtgctgtccatactatttgaataca

SEQ ID NO: 1938 - DNA, 448 bp, Glycine max
  unsure (1)..(448): unsure at all n locations
agcttgaaattgaacaacggaagctctcgagattatcgagtggtcatataatttcacacagatgtccgattcggggaaataatatatcgagacgcacganattgaacaacggaagctctcgagaaatttgaatggtcataacatttcactcggatgttcgatccggggacataatttatcgagacgctcgaaattgaacaaccgaagctctcgacaaattagaatggtcgtaacttttcacgcgaatgttcgattcggggacataactcatctagacgctcgaaattgaacaacggaagctctcgagaaattcgaatggtcataagttttcacacggatgtccgattcggggacataatatatcaagacactcgaaattgaacaacggaagctctcgagaaaatcgaatggtcataacgtttcacacagatgtncgattcggggacat

SEQ ID NO: 1939 - DNA, 409 bp, Glycine max
tgagcgcttgccatagcttctaactcaagccttctggcctcatatacttgggaagcctcttctgcagtgttgaaagtgcctaaccatatacgattgttctgaaatgggttatagatctcagaagcccatttaccccattttctctgcctgacacctctatatttaccaggagtcttcctcctcgctgatggggtatgagtcaaaaccctcttcttactttggggttgacctttagtgctaaccctcattgtatttattttgttattcaactcacaagaactagtttcaagagtggtgaatgtgtgaagaagacggagaagagagatctcacacatacttcttttaactattctcgggttctgaatcctcttggagtcatcatcggatgaatcagtagcatcaggatcgt

SEQ ID NO: 1940 - DNA, 478 bp, Glycine max
  unsure (1)..(478): unsure at all n locations
agctngcattacaatagatgtttttaaagataaattaaataaattattattattatataatagcatacccaaagcgaatcatttcttgattaggtaaaatgttcactaacttttgcttagattcctaagtagaagcatcctttctaattcattttttttctctcttcttttttataattatttaggtggtaagtcctactctactaggtgactatgattattaaagaatttggccatcaacattagtattatttttttaataaacgtgttcatattttaaaggatataaaatgctcagattcaagtgcaagaacagaatgtattacaatgataaaaattaataaaaacaaattatttataaaatttaagactggataagttctcattaataattatgtatactctattcctataaaatataagaatggtggcttaattatgtattctctacttgccatgcaacatntttatgggtcat

SEQ ID NO: 1941 - DNA, 489 bp, Glycine max
  unsure (1)..(489): unsure at all n locations
ctcacttgatgcatagagaagagtaacaccaccacctgcacaaagcacaacacantcaaattgattgaacaacatagaattagaactaagcatacaactgccagtgctaataatctacctggtactatgccctcctctacagctgccttggttgcatttaaggcatctgtcactctatccttcttctcaccaacttcagcctcactggctcctccaatctgcanaagtaaggtttcagatgttaattttatcatgacaaaaccatatgatgaagcaccagataagacttaacagcaagcaaggtaaactcaaataaacaaaccttcagtactgcaacacccncagaaagcttggctaatctttcctgtaacttttccttgtcataatctgaagtgctattntcaattgctgatctaatctgcttgttaaaattcatcacaagacacaagtaaaacacatcaataagtatcagtacatgaaacagaatac

SEQ ID NO: 1942 - DNA, 377 bp, Glycine max
  unsure (1)..(377): unsure at all n locations
tcagtgtcatactatngatcaaaacaaagcaggtataaatatgcaatactagactcaaaatatgcaacaaacactagacctaaatcagtgtcacagaaattggaagaaaatattttatccaagcacaaacttcaagccttattccatgtattggggggaagttatggctggccatatgggtagaggtgtcatagaggagcaggtatggaggaagggaccttggactgctgaagaggacangttgcttgttgagtatgtcaggttgcatggtgaacgtagatggaactctgttgctaggcttgcaagtaagaaacaccaaactgttatcactgtttcgctactaaaatatatgatcggattttcacatttacaaccga

SEQ ID NO: 1943 - DNA, 491 bp, Glycine max
  unsure (1)..(491): unsure at all n locations
gcttacanagagaatcatctagatataacaactgtggaagttctcttacgaggctatgcttttcaagctttaagattaacctcaagctagcatgaccaagcttctcatgccatgcccaatgatgctctttgactgagagtaagcatgacacttttttactggatagatcaccaagtctaatcttatagagatttccttgtctcttagcagagaagagtgaagacctatccttgttttggactatacacatatccttaataaaggtgacattatatccactatcacataattaacttatgcttagtagattatgcttcaatcctttaacaagcaacacattntcaataggaggatagagagggatacaaatcttactgacactagttatcaaatctttttgattccctccaaaagtgatcgccccatcagacatagggcttaggaattagaacatagactntnttcctgtcatgtgtcgtgagcagccactg

SEQ ID NO: 1944 - DNA, 137 bp, Glycine max
  unsure (1)..(137): unsure at all n locations
gtctcacattatctgcctcaattcttggagtgcagcttatgtatctattgngtaacttcactcagtgtcaattgattttaagatgaaatctaacatggtatcagaacccataatctatcttggttctcgcctattct

SEQ ID NO: 1945 - DNA, 468 bp, Glycine max
tactcaagcttgtagattattgatttaaacattatttagtttattctttcttttatacataatatacatttatgtaaagtttactttcaccatttagtttgtcaaattatatcaaattcaagttagacaacattattttcaatatttgactcattgtattaagttgaatatgacaattctattattatttgtatctaaagataattattataaaattcaataaatttacattacattccctaaaaaaattataatacataatattttataatattttataatttgatgacaataataatgataaaatgcattaggctagttaactcaactgaaaccttttcaatgaaatttatgtctttaaaatataatatcatattaaatatgaataactttagtctcatgtaagtatgatataatatggacttaactcataaaattctgacttttacattactcaagctttattaa

SEQ ID NO: 1946 - DNA, 313 bp, Glycine max
  unsure (1)..(313): unsure at all n locations
agctntactgtaacaatgaagaatgcttctatgaattacttcatccccctgaagattgcaatgtgaactcatccttgtcattcacacttcaggtactttgtaaagtattggcggtgtggtacctttagttctactaatatccgcccttctaatagttgaaacttgaatttctgtatgttgcctttctagatctgcagagtcgatgacatcctttgtgaaagccttataaaaggttctgtcgatcatttccacagggcgaggaccataagtgttgaatcttctggaacaatatctgcctctggaatgggtatgc

SEQ ID NO: 1947 - DNA, 454 bp, Glycine max
tactcaagctctgatggtgttgagaagacatcacatgtttgtcatcatcaattatggggagaatgtgaatgtatgtatacatgattttgatgatgtcaaaagaagaatcaaacaagactcattttgcttcaagattaatacaagattgtttcaacaaacaaagccttgattcaagatttcttcaagatcaagccttgtctcacaatgaaaggtttcaagtcattcaaggcacatgtaatcgattaccaatacatgtaatcgattaccaatggtttgaaattgtgtaatcgattacacatcatatgtaatcgattaccagagactctgaatgttgggaattcaaattttaaatgaagggtcacaactgttcaagaaaaacaactatgtaatcgattacactaattctgtaatcaattaccagagaggattttaaggaatatcgccacagtcacat

SEQ ID NO: 1948 - DNA, 390 bp, Glycine max
ttaacacctgagctgcagcttgatgcaacatttgggaggtattgattcttcgagatgatgcgctccatgagaggttggatcaaatggagaatagagatcataatgaagaagataggaggagacaacggaatgatggtgtttctagacaaaaccgaattgatggtattaaactcaacattcctccatttaaaggaaagaatgatccggacgcctacgtcgagtgggagatgaagatagagcatgtcttctcatgcaccatctatgaggaggaccagaatgtgaagcttgccgtcacggagcattccgactatgctcttgagtggtggaacaacctgcataacgagagagcaagagatgaagagccaatggttgatgcatggacggagatga

SEQ ID NO: 1949 - DNA, 462 bp, Glycine max
  unsure (1)..(462): unsure at all n locations
agcttctttgagnaaacttccttgagaagctactgcttagctacacacacccctctcataactaagctcacctccttgagaagcttccttaagaagattcctaaagaagctagagattagctacacatacctctctaatagctaagctcacctccttgagatgaaaagctagagcttagctacacaccccctataatagctaagctcacccccatgacaaaaaaaaaaaaaacatgaaaatacaaaaaaagtccttactacaaaaactactcaaaatgccccgaaatacaaggctaaaaccctatactactagaatggccaaaatacaaggcccaaacgaaggaaaaacctattctaatatttacaaatataagcgggctcatacttagcccatgggctcaaaatataccctaaggctcatgagaaccctatggccgttccttggatctctagcccaatcta

SEQ ID NO: 1950 - DNA, 490 bp, Glycine max
  unsure (1)..(490): unsure at all n locations
agcttcttagtctcggctaatgaagatgaattctttgctacttcatgcactcctctaatgacaatagcatcatttctggcactaatttgctgggagttggaagccatcttctcaattaaatttctggcttcagcaggggtcatgtctccaagggctccaccactggtagcatctatcatacttctctccatgttactgagtctttcataaaaatattggagaagaagctactcaaaaatctggtggtgagggcaactggcacatagttttttaaatctctcccagtattcatataggctctctccactgagttgcctaatgcctaaaatatcctttttgatggccatggtcctgcgaagcagggaaattttttctaagaatactctcttgaggtcatcccagctcgtgatggaccttgnggcaaggtaatatagccagtccttctccactccctctaaagaatgaagaaaagccttcagaaatatgtgat

SEQ ID NO: 1951 - DNA, 364 bp, Glycine max
agcttgtcagggaacaattatgcatgtattcatagatgagagctttcttgcgtccttccaaacagaatcaaagaagtatgacaacattaacatgagaagttctactgatacactattagaaaatatgttttctacatcggttatttatgactttcaacatcggtttttcaaccgatgttgaaagtaccgacgttgatagtattatcgttaacatcgggttttgaaaaaccgatgttaacgtaaaattaccaacatcggttatataaataaccgatgctgctaatatgaattacacccacacaatgtatattaatgctgaaagttaacatctgtttttacatagaaccgatgttgtgttcagaat

SEQ ID NO: 1952 - DNA, 442 bp, Glycine max
  unsure (1)..(442): unsure at all n locations
agcttattggagatggagcttcggtggagagataagtccttgtttggctgatttaaagcatttgaattacttggacttgagcggcaattatttacttggagcaggtatgtcaattccttctttccttgggacaatgacttccttgactcacctcgacctctctgatactggattctatgggtagattccatctcagatntggaatctctcaaatttggtgtatcttgacctggcgtatgccgccaatgaaacaattccatctcagattgggaatctctccacattggtgtatcttggccttggaggtcattctgttgtcgaacctctgttagctgaacatgtataatgggtatcaagtatgtggaagcttgaatatcgttatttgagtaatgcanacctatccaaagcatttcattggctacacactctccaatctcttcct

SEQ ID NO: 1953 - DNA, 446 bp, Glycine max
agctttctctcacaattaatgtgtctactgactaacaattctaaatgcaagttcacattcttgtgccttctttgtctaacatacacacttgctcaaactcatgaaaagagacacaaattccatcaaaatcatgcactcaattcaaaataaagacatacacccatttttcacaaaaagataaaagtacttcactgccatatcattaaaactaagttaaactgttcaaaatgcttcataataagcaaacaaactacccataaacaaaactaacaaaaaggaattaatgtactaaaaccatgaccataataataataataatctaaaaggcaacaacaaaagaaacacaaaatcatcaggaatatcaacattcttgtcagtgtgagccacaatttcctcagcagtccatccagtcagaaaagtcataaccatcatctatgttgcaagat

SEQ ID NO: 1954 - DNA, 440 bp, Glycine max
  unsure (1)..(440): unsure at all n locations
agctntgaaatctgaagtttaatattcacatgatcaaagttcataaaaaatgcacacacatgacctctatttatagcctaagtgtcacacaaaattggagggtttgaaattgaatttgtggagccaaactttggagccaaaatttcactaattatgattagtgaattttagttatggttcagcccactaatccaagatcaaatataatattctccactaagtgtgcttaagtgtcatgaggcatgaaaagcatgaaggacatgcacaaagtgtgactatatgatgtggcaatgaggtgtagtaagcaaatgctcacctgcccctctaaaatttaattggattgggcttctaccaattcaattaaatntatttccaaccacacacatcaaatatccacttagtgcatgtganattacaaaactacccctaatacanaaact

SEQ ID NO: 1955 - DNA, 469 bp, Glycine max
  unsure (1)..(469): unsure at all n locations
agcttcacanaatgtggagataaggatgttatagtacaagttcctttaactagtacttctacttcaagaattgttgttccttatactgttgaaccacacaacaatcaagaagaacaacaaattaatgatcctgaggttaacaatgaacctatagtagaacaatcacaagacatagtattaagaagatctcatagagaaaaggagatctgctatttcgaatgattatgtgatttatctacaaaagtcggaaaatgacttaagcattgataatgatccatcagtttcattttcaaaagccattaatggtgatgattctggacaatgattacatgctatgaaagatgagcttaaatcaatggcacanaatggtgtatgggaccttgtggaattgcctgaaggatgcaagagagttgggtgtaaataggtctntaagactaagcgtgactctcatggaaatattgaatgacac

SEQ ID NO: 1956 - DNA, 302 bp, Glycine max
aaactaagcttgtaaagtgctggatgggcttttccttcgcaagttgacttgaagatgtacaacagttaccctgagctctctgatgccttgtgcaagatgtataactccttcaccattggtaactataattaatccataatttaccatacatcaacttttttttatatagaatttaatgactgatcataactcttacgtatcagtatctagattgttttctgtttaatataactacccaaaagatatggatcttaaatttgatcatgttgaaagctcactaatggtgtatgtgaatattaaat

SEQ ID NO: 1957 - DNA, 432 bp, Glycine max
  unsure (1)..(432): unsure at all n locations
agcttgaacctgctaatcaaaagcccttcttctgttcccaaaatcaagtctttaatttatctgatattttggaaacacgtcaatttctgaaatatatactttatganaaacgattcttaaaattaattagattgatctcaataatgcagattttaatctaatgccctttgtttgagtttatcttttaaatattaaaagatatgtttaacaaatgttgcaataattgtgaataatataaataacttaaaagacgtctccaatgctntttccatatttgataacgcacatttaaaatagtttgtaacaaagctgcataaagaaatacttaatttttaataatgaataaacaagcagatctcaaatctatcagcgactggtatagacatcatacataaagagcacacatactatgaaggcttgtcattgtgaatc

SEQ ID NO: 1958 - DNA, 475 bp, Glycine max
  unsure (1)..(475): unsure at all n locations
gaagttagatatatgtgattatctattcgttatatatatatatatatatatatatatatatatatattttgcagtttgttaattaagacttaaaggcccatgtcagtgttatatatttattgttttgaattggttagtgcatgtatattacatagattttatactattattaattaattgatgttgaagatgttataatgttgttatgatatgatttttgaaaattagttgattcagtgtatgtgtatataggttgtgtcttgtaaatattgctatgaatgtataatatgatatatgagtataagtgaagtatgcgtgcttatgaatatatgtgaagacaatgtgtcatggtatgtgtgtgtgctgcgaaaaaatgtgagaagaatctactcccccgggataggaatctncaagagatnttgaaattaaaccatgtgcatattgtgtgtgaaccatgaatcatgttgtgcatatg

SEQ ID NO: 1959 - DNA, 481 bp, Glycine max
  unsure (1)..(481): unsure at all n locations
ctcgacccggatccttaagtcactgcggctgcagcttggtcctgattanaagaaatcttctttaataaagccaatctagttcgacaattggtgaagttggagtataatgatggtcatagtatgattgagcacttgaataattctaaagggctcgtaaatcaattaaccaaaattgagatgaagattgatgatgagttgcaagcccttctactccttagttccttgctggaaagctgggacacactcgtggttacacttagtaactcagctccagaaggaaagctcaccatggatacagtcagtgacagccctctcggtgaagaagcaagaagaatggaacgaggtgagtctatccatcccgaggctaatgttattgagaatcggggtaggaatgagactcgtggatgtaataagagccgagatctgagttttcccaacactattcaacactatggatgtaatgttattgagactcgttcac

SEQ ID NO: 1960 - DNA, 397 bp, Glycine max
  unsure (1)..(397): unsure at all n locations
agcttgaagganaacttgatgcctttgtcaacctagtaactcagcttgccatgaatcaganatctacacgtgttgagagagtttatgatctatgttcttctgcagatcaccatacagatctttgtccttctgtgcaacaatctaaagcaattgaacagcctgaagcttatgctgcaaacatctacaacaaacctcctcaacctcaacagcaaaatcagccagaacagaacaattatgacctctccagcaacaggtacaatcccgggtggaggaatcatcccaaccttagatggtcgaatccttcacaacagcagcaacaacaacctctatttcaaaatgctgctggcctaagcagaccatacgttccttcaccaatccagcaacaacaacagcaaca

SEQ ID NO: 1961 - DNA, 398 bp, Glycine max
agcttgcatacaagattcttcttgcctggcacttcaaaaccttctggttgggtcatatagatgtcttcctctagatccccatgcaagaatgcagctttaacatctaactgctccaagtgaagattctctgcagctactatgctcagaataactctgatggtagtcatctctacaactggagagaagatctctgtgaaatcaattccttgtttctgctgaaaccctttcaccacaagtctcgccttgtatcttcttctaccgccagattcttcctttagcctatagacccacctattctgtaatgccttctttccttctggcaatctacttaaagaccacgtcttattcttctgaagggatgacatctcatctttcatcgctagctcccactcaatagt

SEQ ID NO: 1962 - DNA, 334 bp, Glycine max
cactattgatgctgcaattgagtgaagagatctggctattgcaagaacgagtttcgttattacagagagctatcacgatacacaacgagcccacgctgttgtttgttacttatatttaatatgttaaattacttatttattcttataatttcgttctttgtattttttaatttcaatagttaataatgtaattttcttaaatacttatagtttaaaaatatttttctaattctgaccatctgcattctaattcttttctacctcatatcgcttaaaattaatctttttaattcatataatttcgattttaatcatctttaatccctgtccaaaa

SEQ ID NO: 1963 - DNA, 269 bp, Glycine max
  unsure (1)..(269): unsure at all n locations
ctgcangcatgcaagcttgcttctacaatcaagaatgatatgaatgttctaattctgataataacaatcactgagtggataatgttattgattagaggaagctaattgaagccaccaggaaagaccattacccgcttcccttcatggatcaaatgcttgagagacttgcagggcaatctttctattattttttagatggatattcgggctataatcaaattgcagtggatccttaggaccaagataagatagctntcacatgccccttc

SEQ ID NO: 1964 - DNA, 284 bp, Glycine max
tgaatggttcgttcagtctgaccatctgtttgaggatgataagctgaactaagcttcaactttgtccccaaggcttcatgtagactcgtccaaaatcgcgaagtgaacctcggatccctgtcagatacaatactagaaggaattccatgcaaccttactacttccttgatgtacaactccatgagtttctccattctatacttcatattcactgggataaaatgagcagatttggcgagtcgatctactatgacccacactgcatcatgtccacgactagtctt

SEQ ID NO: 1965 - DNA, 287 bp, Glycine max
tcaagagacagtgcctgagctgcttaaaaactccttgcttgttatgaagatgaggggtatactggcccagaggagtgccttgggtggtgatagtctgtgggaacttacatggctacacgtgaataacatttcaccatcattgcaacttgaggtattccctgagcaggattctgagcatttgcagcacaaacagggtgaatcaataagtttgctgcctgatgaaaagggtttcgtgccttcaagtgaaacaacaatctgcgaacatgctggcattcgttggtaactat

SEQ ID NO: 1966 - DNA, 380 bp, Glycine max
caggcatgcaagcttcattcctttctcactcatgtgtccaagtttttgatgccacatggtcgaattattgatagcttcagtaactgctaccttatcctcatctgcaagcatgtaaagaagaccttgcatttttccacgagccacaacgagattgccttttgttaccttccaagctccatcaccaaaagtggtgtgatgtccctcattatccaactgctctatagatattaaatttatctttaaggcgggaatatgtctgacattgtgcaatgtccatagggattcactggaggtcttgatgttgatatcacctcttccgacaatgtcaagagactttccatctgcaaggtaaactttcccaaatcttccagaaatatagc

SEQ ID NO: 1967 - DNA, 346 bp, Glycine max
  unsure (1)..(346): unsure at all n locations
agcttagatgcagaacaagagaggttacatggatatataagagatctcgagcaaaataggtcgcgtatgatataatttaaaatgtaagtccaacattggttttcaatacaaaaccgatgttaacagaatgatgttaacgttaacatcggttttcttcaagaaaccaatgttaactggtcatacgttaacatcgattntcagaaaatcgatgttaacgaacataggttaacatcggttttcttcaaacccgatgttaacgaagagatattaacatcggntttggaaaaaccgatgttaacaaattaatgttaacataggttttacaagaaccgatgtaaacgtcact

SEQ ID NO: 1968 - DNA, 460 bp, Glycine max
  unsure (1)..(460): unsure at all n locations
cgaaggcacactggatgtgttggtcaactcggtaacccagctgttcttgaatcagaaatctgtacctgtcgcaagggttaggggatagtgctgctctgctgaccacgatacagacctttgcccttccatgcagcaacctagagcaattgagcagcctgaagcttatgcaggacatatatacaatagacctcctcaacctcagcagcanaatcaaccacagcagagcaattatgacctttccagcaacagatacaactctggatggaggaattaccctaacctcagatggtccagccctcagcaacaacaacaacagcctgctccttccttccaaaatgcttctggcccaagcagaccatacattcctccaccaatacaacaacagcaacaacctcagagacagccaacagttgaggccccttcacaaccttncctcgaagaacttgtgaggccaatgact

SEQ ID NO: 1969 - DNA, 429 bp, Glycine max
  unsure (1)..(429): unsure at all n locations
caggcatgcaagcttctagtctcaattntagcgtctcgatatattacccaattcaatcggacatccgagtaaaaagttattgtcngttgaatttcctacgagcttctgttttcaatttggagcgtctcgatatattaaaggactcaaccggacatccatgtataaagttattgtcaattcatatttcttagagcttcggattaaaattttgagcgtctcgatatattacgggactcaatcagacatccgagcaaaatgttattgtcgtttcaatttgatacgagcttctattttcaatttggagaatctctccatatattacaacactctgtcgggcatccgagtaaaaagttattgtcgtttgaattctctaagagtttccgttttcaatttggagcgtctcgatatattacgggactcaaccggaca

SEQ ID NO: 1970 - DNA, 348 bp, Glycine max
  unsure (1)..(348): unsure at all n locations
cgctacattgatgcatcttggctacggaatcttcgaattgggcacttannatttggaggcttaagtctgctatcaaaggagaagatggtaagaggactaccctatattaatcaccctgatcaactctgttaaggatgtttacttggcaagaaatttagaatgatttttccaaaggagtcaaactcaagagctaagaagccacccgagctaatacatgttaacgtctgtgggccaatcaagccccaagctcactacgtaaaaataaatatttcctctttctcattgattatntttcaagacaaacatgcgtctatttcttaaagcacaaatcataagtcttttccacct

SEQ ID NO: 1971 - DNA, 400 bp, Glycine max
  unsure (1)..(400): unsure at all n locations
atcttaagtcgactgcagctgcagctattatttcanaacgagttttgataatttatcattataagaacaaaatatatgcatgttgaaatttataagaatgaaatctaacattatatgatataaacatatctttaaggtttgatataatattcataataacctacttaaaaatatattttgaaataatacatttaaataagacataagcttattttttaataaacttaactataaaatttagtctaccgctttatataaatcaacatgattaacattttaaaaaataaatacatgtaagattttaatgtattatatcaaatttaatataataataacactaataatgaatatttatttatgaacttttaaataaatgatcttggtaagtctaaaaaagttt

SEQ ID NO: 1972 - DNA, 395 bp, Glycine max
agcttcatgcttaagtatgtatggttaaacttcattactattgttcaagacatactagtgagcttgtaataaatcttctagacttggagtgatcacatgcagtcctcttgaacccttaccacccactctgtcatcatgccgagactcaggaaggccaataggtttagccttctcaatgtattctgaacaaaatttaatggcttcttctgcaatgtacctctcaataatagatgcttctggacgataaagattctttatatacccttttaagatcttcatgtatcgctcaaccgggtacatccacctcaaataaacaggaccataacatttgatttctctgaccagatgcacaatcaagtgaatcatgatgtcaaagaaagcaaggggaaaataca

SEQ ID NO: 1973 - DNA, 177 bp, Glycine max
  unsure (1)..(177): unsure at all n locations
tgcaatgtattgctcgacaaggacatgaatgctngttggttatcttgggcttgcaaggctgcatcaccatgaacatgtggctgacacaacaagagtgatagggactctggggtacatggcacctgaacttgtccgaatcgggcgaccatcagctgcatgtgatgtgtatagtttcgg

SEQ ID NO: 1974 - DNA, 158 bp, Glycine max
gcttcttcccgttcgtcgtcatgcaggttgtcaacatcttcattaagcctctgtctcatgctctatcttcaggctgatattccaagctgtgaatgatgaacatgcagtcccagcttgcggcggctctcagtcgaagcctacgtacgctggataatcaa

SEQ ID NO: 1975 - DNA, 389 bp, Glycine max
agctttgatgcaacatttggagagtgttaatgaatcaacgagatgatgcgctccatgataggttggatcaaatggagaatagagatcataatgaagaagaaaggaggagaagagggaatgatggtgttcctagacaaaaccgaattgatggtattaaactcaacattcctccatttaaaggaaagaatgatccggaggcctacttggagagggagatgaaaatagagcatgttttctcatgcaacaactatgaggaggaccaaaaggtgaagcttgccgccacggagttttccgactatgctcttgtgtggtggaacaagctacaaaaggagagagcaagaaatgaagagccaatggttgatacatggacggagatgaaaaagatcatg

SEQ ID NO: 1976 - DNA, 415 bp, Glycine max
ccaatatgaataacatcttccaacaatcaaaataaatatttattctataatgataaaatcattttcaattctttttaaaaaaaattaccctgtatgaaattgaaaaagtcaaatcttttactttacgtgttatttcaaaaatctaatatttctatttttcttttgcagaaatgaaatgacagctatacataaataggaatgacaatgatcaagatttacatagggtcctatagtattccttatataacttttaaaatatttattataaaaattaataaatttatggtttgatttataaataaatgacatattggaaagtgaaaaagatctttacactatcaatagatatattactttctatatttctcagaaaaggctatatatatatctatattatcacttaatagtctctata

SEQ ID NO: 1977 - DNA, 298 bp, Glycine max
  unsure (1)..(298): unsure at all n locations
aattaataatactaaaattagatagacttgtttgaactttaaattggtctgatatctagtttggatatagtttatcaaattgcatttcttactacaccgcgataacatatattgtagtaattacaatgtttgcattattacattaattatactcgtcatttgtgtaatatttttttataatgtcaaattttaccaatctaaattntattaagcagataatatttatataaaaaacagagacaatatgtagataattagattaatttcttaagcatgttattaagagggtcttattctg

SEQ ID NO: 1978 - DNA, 331 bp, Glycine max
tggacattacttcttctatggacgctatatctacgcgcataatatatcgttacgctcaaaatcgaacaacggaagctcttgagaaattcaaatggtcataaccctttcactcggaggtccgattcatgcgcataatatatcgagacactcgaaactgaacaacggaagctctcgagaaattcaaatggtcattacttttcactcggaggttcgactcaagcgcataatacatcgatacgctctacattgaacaattgatgctctttagccaatcaaatgggcataacttttccctcggaggtctaattcaggcgcattatatatctacacg

SEQ ID NO: 1979 - DNA, 401 bp, Glycine max
  unsure (1)..(401): unsure at all n locations
cttaacanaaggcattcaaagtgggtggaatttctagagcatttcccttatgttatcaaacataaaagggaaaaggtaatattgtagccgatgctcttcctcggcgtcatgcattgctttctatgcttgaaacaaaattgattggtcttgaatgtttgaaaagcatgtatgaaaatgatgaaacttttggagaaaattttaaaaattgtgaaattttttcagaaaatggtttctttagacatgaaggctttctttttaaagaaaacaaattgtgtgtgcctaaatgttctactagaaattngcttgtttgtgaagcacatgaaggagggttaatggggcattttgggtccaaaagactctagaaacattacaagaacnattttattggcctcatatgaaaa

SEQ ID NO: 1980 - DNA, 389 bp, Glycine max
tacacattcaacttcgagcgtctcgatatattacgagtctctatcaaacatccgagaaaaaagttattgtcgtttgaatttgctcagaggttcaacattaaatcttgagcgtctcgatatatgacgggactcaatcagacatccgagtagaaagttattgtcgtttgaattagctcagagcttcaacattcaatttcgagcgtctcgatatgtgacgggactgaatcagacatccgagtataaagttattgtcgtttgaatttgctcagaacttcaacattcaatttcgagcgtctcgatatatgaccggactccatcttacatccgagtaaaaagttatctgccgtttgaattggctcagagcttcaacattcaatttcgagcgtctc

SEQ ID NO: 1981 - DNA, 357 bp, Glycine max
aggcatgcaagcttagagccaattcaaacgacattaactcttttctcggatgtctgattgagactttttatataacgagatgctcgaagttaaatgtttaagctctgagccaattcaaacgacaataactttttactcggatgtttgattgaggcctgtcatatatcgagacactcgaaattgaatgttgaagctctgagccaattcaaacgacaataactttttactcggatgtctgattgagtcccgccatatatcgagacgctcaaaattgaatgttgaagctctgaaccaattcatacgacaataactttttactcggatgtctgattgagtcctgtaatatatcgagacgct

SEQ ID NO: 1982 - DNA, 227 bp, Glycine max
ggacaagtacctaagaatatctgttccatgagattctgaagttttttcaagggtcttctcactctaacttaggcgtctaacttcaccgcctgttttcaatttatccttcaggcaaccctcgagtttcgtattatggatagtgattatgtgcttgtaatcaggtgaacacacctgatatggtttgcgggcacatctacatgcactttcatttccctcatgatgatcac

SEQ ID NO: 1983 - DNA, 432 bp, Glycine max
  unsure (1)..(432): unsure at all n locations
cttgcagcttgtccttatggttattaatgtatgaattgttgcttttgcacctcttccttgttttgttatatatctgtttgcattcgggattccaattttcatcaacagtggttaccctactcctcacgtgaagtggaacttgtgggttatccacaagctgctgcttaccctagtttatggtntcatactgttcatgtatcattctaggtggagagaaaggttacctggttagtgtcctggattgttatattattttatctttaattagttttatgatagcatagtttatcttcctcttttngcagcaaggcctgcttactataagtatgttaccattatgttcatcttgaatgcaattgcgctgtttgctcgcggcattactggaaacggtgctgctttcggattctggttagattcttctattctatatct

SEQ ID NO: 1984 - DNA, 382 bp, Glycine max
acactgtgttcatgctctcccaacagcacatgtatactcacgatcccaatcagacactatgctagatggcacaccatgtaatccgacaatatcactactatacacggaggccaacttctccacggaaaatatgacactaatgggaataaagtgagcagacttggccagcctgtcaacaataacctatataaatcaaaccttttgggtttaggtaggcctacaacaaaatccatacaaatattcgccctcttccactggggtatctacaagggttgaacttccctaaagtctctggcgtttcatcttacccttctgacagactaaacatgcatacataaactcactaacctctctcttcatgttaagaccttacaacaggatc

SEQ ID NO: 1985 - DNA, 250 bp, Glycine max
  unsure (1)..(250): unsure at all n locations
gcatctatcatacttctctccatattactgagtccttcataaaaatgttggagaagaagctgttctgaaatctgatggtgagggcaactggcacatagtttcttaaatcgctcccagtactcatacaggctctctccactgagttgtctaatacctgagatatctttcctgatggctgtggtcctggaacanggaaaaaattttctagaatactctcttaaggtcttccagctcgtgatggccttggagc

SEQ ID NO: 1986 - DNA, 506 bp, Glycine max
tagaatgcagaagaagcaacaacaatcaatttaataatgttctataaacatgcaaggcaaaattgattgcaataacataaatgagataagggaagagagaatgcaaacacaattttatactggttcggccacttcccgtgcctacatccagtactcaagcaacccacttgagatttccactatctttgtaaaatccattacaaagtctgaaccacaaagggacaacccatcccttgtgttcagatgctttacaacaagagactcacaatctcttaaccaatctcattgaataagaagaatggaagaagaattatctcttcaagagaagaatattacaatgaagatccatggatgaactcttaatggatgtgcaagtgcttgcccaagagttctttgagagagcatttgacaatgaagttctcttggaatctctctcattctcttttgagaggataagacactttggagcagcaaaactctctctctaaattcgtgcccagtcacct

SEQ ID NO: 1987 - DNA, 472 bp, Glycine max
tgtagggttaaagtctcatgactgtcacgtgctcatgcaacaattgttagccgtggctatacgagacatcttgccaaacaaagtcaacttatccataactcgcctgtgctttttcttccatgctatatgtagcaaagtcattgatcctgtcaagtttgatgagctggaaaatgaggccgcaattatactgtgccagttggagatgtattttccccctgctttctttgacatcatgattcacttgattgtgcatctggtcagagaaatcaaatgttgtggtcctgtttatctgtggtggatgtacccgattgagcgatacatgaagatcttacaaggtatacaaataatctatatcattcagaagcatctattattgagaggtacattgcagaagaagccattgaaattttttcacaatacattgagaacgctaaacctgttggcctctctgagtctcagcatgatgatagag

SEQ ID NO: 1988 - DNA, 334 bp, Glycine max
  unsure (1)..(334): unsure at all n locations
gaatctttcttagatattggagaaaaaagtctctntgtaatctattccttccttttgagtaaatcccttagcaacaagtcttgccttgtatctctcaatgttgcctaatgaatcccgtttggtcttaaatacccatttacatccaatgtcctttgccccattangcatctctacaaggttccaaaatttgttactgtacatggaattcatctcatccttcatggcatcataccataaatntgactctttacaactcatggctngatcaaaagtntaggatcattttcagttacaatatatagtcagattcttacaaatatacaatataatcact

SEQ ID NO: 1989 - DNA, 211 bp, Glycine max
aaaatctgaagatgaaggaggaagagtgtattcatgacttccacatgaacattcttgagattgccaatgcttgcactgccttgggagagaggataacagatgataagctggtgagaaagatcctcagatccttgcctaagagatttgacatgaaagtcactgcaatagaggaggcccaagacatttgcaacatgagagtggatgaactcat

SEQ ID NO: 1990 - DNA, 498 bp, Glycine max
  unsure (1)..(498): unsure at all n locations
gtgcatataacttgaagaggattgatagtantatactatagttgtactgggcttaaaagcccattagtataagtggtatacaaatatattcttgtactcctattttcattagacaaataaaattcaatgtctatagaaccaataacagccacaattgtaactagtaagaagagggttcacaaaataacaaaactacagtctatttaatatcgtaccttccaatagggtgagtggtacccttttccattgctgatacaacagcaagagcttctttttcacaggtgggaatgcaacacgaaggaacatttgattctgtgtttctaacatgatgaccataaatgggctcaattgccttgaatacgagtccaccagtggtcaatgtccctgttttgtcaaatgcaatagtatgacaagaagcatgagcatccagaacatgcccacctttgagttatatgccctgcaaattgggcaactgtcacagccacaatgaaagaagca

SEQ ID NO: 1991 - DNA, 328 bp, Glycine max
gcttaacatcagaccacttccagggtgctggaactacttcacatggtcttgatggggcctatgcaagttgaaagccttggaggaaagaggtatgcctatgttgttgtggatgatttctccagatttacctgggtcaactttatcagagagaaatcagacatctttgaagtattcaaggagttgagtctaagacttcaaagagaaaaagactgtgtcatcaagagaatcaggagtgaccatggcagagagtttgaaaacagcaagtttactgaattctgcacatctgaaggcatcactcatgagttctctgcagccattacaccacagc

SEQ ID NO: 1992 - DNA, 197 bp, Glycine max
  unsure (1)..(197): unsure at all n locations
ccattcttgctttccaggaattcatagttggntccatctaggattggtggtctgttcactggtcctccttctttctccatgttcatcagaatttatctccctagatctcactctgtgatttcgagtgttggctctgataccaattgaaattctgataccaggggacagatgtcgtaccggatgtcacgacatcacgc

SEQ ID NO: 1993 - DNA, 386 bp, Glycine max
  unsure (1)..(386): unsure at all n locations
tcatccaactaatacatggaaagacaactgtatataccaggcatctaagatttctcanacattatcatccatatcagngattgaaaagagcctttgatgtaagtcaagaaaatgaaagcgcgccccgtccattagtaggaatagatgtctatgatcgggtaaaagatatcataactatgattgggaagacacaaaaaaaaccgtcatctgatgcaaacatatggaagaaaaggtcaatattctttgatcttccatactggtccaatcttgatgttagacactgtatagacatcatgcatgtagagaaaaatgtttgtgatcctttaattggcaccatccgtaacatgaaaggcaagacaaaggatggctcgaagcgtcgtcaagac

SEQ ID NO: 1994 - DNA, 297 bp, Glycine max
aaagtcacacgactgtcacgtgctcatgcaacaattgttagtcgtggctatacgagacatcttgccaaacaaagtcaggttagcgataactcgcctgtgctttttcttccatgctatgtgtagcaaagccattgatcctgtcaagtttaatgagttggaaaatgaggccgcaattatactgtgccagttggagatgtattttccccctgccttttttgacatcatgattcacttgattgtgcatctggtcagagaaatcaaatgttgtggtcctgcttatatacggcggatgtaccc

SEQ ID NO: 1995 - DNA, 420 bp, Glycine max
  unsure (1)..(420): unsure at all n locations
tcaaccaaggggagatggaccatttcaagtgctagaatgaatctatgacaatgcttacaaagttgagctgcccgatgagtataatgttagttccaccttcaatgtctctgatttatctctttctgatgcagatggagaatccgatttgaggacaaatccttctcaagagggagagaatgatgaggacatgaccaagagcaagggcaaggatccacttgaaggacttggaggacctatgacaagggctagagcacggaaagccaaggaagctctttcacaagtgttgtccatactatttgaatacaagcccaagttttaaggagaaaagttcaaggttgtgagttgtatcatggtccaaatggaggaggactaaatgacaccactntatttcaactttagagcggttagtttgctaaataa

SEQ ID NO: 1996 - DNA, 474 bp, Glycine max
  unsure (1)..(474): unsure at all n locations
tgttggtttttagctagacaactctttattactattnnttattttctatattnttcttccatcttattcttttcttgctcgctctctttntgctcctttctttccatgagatattttgctacctaaacatacgtatatttttgtgaggtattttgctatatacatgcgtgtccaaggtatcttgctacctaaacatacatatatatgttttgtgagatattnttgctatatacatgcatatccaaggtatcttgctacctaaacatacatatatatattttgtgaagtattnttcctacatacatgcatatccaaggtatctttctacctaaacatacatatatattttgtgaggtatgactaccttccgagcttgtgcttgttntatttaaattcctaggatcatgagcaactaggtgtgtcctgctatgacttgagaaacaaaggtgatcaaataacaagcagagatttaaa

SEQ ID NO: 1997 - DNA, 276 bp, Glycine max
ataaataagataagggaagagagaatgcaaacaccaatttatactggttcagccacttcccgtgcctacatccagtactcaagcaacccacttgagatttccactatctttgtaaaatcctttacaaagtctgaaccacacagggacaacccgtctcttgtgttcagatgctttacaacaagagacttacagtctcttaaccaatctcattgaataagaagaatggaagaagaattctcttcttcagagaagaatattacaatgaagatcatgtaa

SEQ ID NO: 1998 - DNA, 236 bp, Glycine max
gtggtttgtgtgacatgggaatgcttgatgaggctagtaagtatgtggaggaaatgttgtccatagatttttctcctcattctgctgttgttcacgccttggtgaaggggttttgcaatgttggtagggtagaggatgcttgtggagtcctcaccaaggcactagagcatggggaagctcctcaatcggatacttggatggccataatgcctgtaatatgtgaagaggatgatgat

SEQ ID NO: 1999 - DNA, 258 bp, Glycine max
ctgtgatcgtatccccatattagctagatcttgacgggtattcaagtcatccttcctcttgccttgaatgttaaggagcatcccaatcacactgtcacaaacatttgtctccacatgcgtaacattcattcaatgtctaacgtctagattagaccagtctggaagatcaaagaaaatggacctctgcttcatatgcaactcttacttttatccttctttgggtctttccaatacagaatcaagtgttgaaccgctgat

SEQ ID NO: 2000 - DNA, 406 bp, Glycine max
tgttgccttagcacgcaagttatttgaataaattccagacgatgtctatttggaccctctaaagacattgcctattgaggaacaacaaaggcataatgctgagaaggctaccatgatggagatagatggtgaaccagtgacgatggtggtagcgatgttggtggtggcaccaactgttattggtgtggtggtggtagtgacaatgatagtggcagtgacattgatggctgtggtggtggtagtaatgtccactgtgatggtgatgtctatggtggtagtaatgatggcggcagcggtagtgatattagtggtcatggtgatagcaaccaattatggcggtgacaattgataacgatggcggccgtggcgatcgaagtggtattggtggtggtggcgatgacagtgg

SEQ ID NO: 2001 - DNA, 367 bp, Glycine max
  unsure (1)..(367): unsure at all n locations
cttaacccctntctaaatgataggctcataatgcagaagaagattaataagcaatcaatctaataatgttctttaaacatgcaagacacaattgattgcaataacataaatgagataagggaagagacaaatgcaaactcgatttatactggttcggccactttccgtgcctacgtcaagttctcaagcaacctacttgagatctttcactatctttgtaaaaatcctttctacaacttctgaacgcccaagcaatccctttaccttgtgttcaggaaactcatatttcacgggaccactagtctctcgattacaattgactntctgagaagaatagaaagatntctctcctttagagtggataata

SEQ ID NO: 2002 - DNA, 492 bp, Glycine max
  unsure (1)..(492): unsure at all n locations
ggcattcgacagtggagctcatccaatggagtaattgatgctatagaaattcacgatttaaaggagctgaatgctttggaggctggtagttctgacagaaatctgaatcaatcagaagtggagctcaagaagtctctgcaggagcaattgtggcatgctgctaatgcctatgaatctttgctgaggcaaaaggctagagtgaaatggttaaaggaaggggacagaaattcagcttacttccacaagctgataaatcatagaagaagacataatgccattcaaggattgatcattgatggggaatgggttcacgaccctagtatggtcaaaactgaggctttcaatcatttcatagatagactttctgagcagaattntaatagaccaaccctggatggtgtgcagctaccttccattggtcanagcgagaatgaagcccttgtgggcagattntctgatgcagaaataacctcagctgtgtgggactgtcat

SEQ ID NO: 2003 - DNA, 236 bp, Glycine max
  unsure (1)..(236): unsure at all n locations
aaactaacccaaggcaacaagggggttgaggattatttcaaggaaatggatgtgctcatgattcaagcaaagattgaagaagatgaggaggtaactatggctcgatttcttaatggtttgactaatgatatccgtgatattgttgatctgcaggagtttgttgaaatggattatntgcttcacaaagcaatccaagttgagcaacattaataaggaaggagtggcttaagagttta

SEQ ID NO: 2004 - DNA, 480 bp, Glycine max
  unsure (1)..(480): unsure at all n locations
tcataaggttatatatggcctcaaataagctcctaaggctnggtttgataaactaaatgagactctactaatgtttgaattcaaatccaacaagtttgatccttcactatttgtttattttaaggcttcatccataatctacattccggtatatgttgatgacatcataaaaacatgaaatgatattcctttattacatcaactcatttctaagctaaatatagtattttctctcaaagatcttggatcctcagattatttcttgggaatgaaagtaaagcatctatctgatggttccattgctttaacttanaccaaatatattagagacttaatgggcaaaaccaacatgttagatgtcaaacctatatcttccncaatggtaactggctataagctcacctacaagtggtttaatcctttctttttatccctatatgtatangtcatttgtaggaagcacttaatatgctactataa

SEQ ID NO: 2005 - DNA, 181 bp, Glycine max
acccgtcctagcttttcctaacttttctaaaacgtttgagctataatgtgatgcctctggagtgcgagttggagctgctttgttgaaggtgggcaccctattgcttattttagtgaaatacttcatggagcgacccttaactacccgacctatgataatgagctctatgccttaatgagag

SEQ ID NO: 2006 - DNA, 443 bp, Glycine max
  unsure (1)..(443): unsure at all n locations
acaacatatttcttaaaccatcggatcaatgagagcnactcatgggtgtggagagtcaaccttcatgggcttcctgtaggaattatagtataacatcatctgaaatgtagctacatataggttcaaacaatgtaactaaataaattagtagtgagtacattataattgtaggaaaatggttagtatatagatattatatgtaccctaacaggttttttaaaacctccttgcaaactacactcgtggtagaggtcaagctttttttgtctttatcatgtattaaaacctttaatccattctttgatttgactctcgatagtgcaacatataattgaccatgactaaacaatggggtttatgcaagtaaagttcaacactatatcatgactggcctggagacttattaattgtcattgcataagagagcattattggaaatagtc

SEQ ID NO: 2007 - DNA, 459 bp, Glycine max
tcccgttgcccgagtcgacccggcccgagttgggctggttgagtgttaactccagcgtttcaagtctcgggtcgctctggtaagcgaaaaacgggtacgggttgatcgtgaacggcgatttgttgtccttgagtatcgccagcagctgtttgagcgtgtcttgcatcgcctggttgaacaacccggacgagggcgggtccgactgagtcaacacgggcatctgagtgcactgtggagaccttgatcttgccgtcgagcgaagccgcgccgagggcattttggacatttagcatcttcgggactagctgcgacttaataccctgatcggataatgtcaaaatctcttttccgacggtgatcatagtgatgttgctcgccaggtagtaaggcaagacgttctcgataacccactgtgtggccgctgtgggatcgcctgcgagactcgctatgtctccgttg

SEQ ID NO: 2008 - DNA, 145 bp, Glycine max
tatatcaatacgctcgaaattaacagcggaagctctctcgatattcatatagtcataactattcacacggatgtccgggtctggcgcttaatatgtcgagaggctcgaaattgaacaacggaagctcttgagaaatgcaactggt

SEQ ID NO: 2009 - DNA, 492 bp, Glycine max
  unsure (1)..(492): unsure at all n locations
gatggcctcagcanattccttatttccagaagggaattctatcaatagacctccaatctttaatggagagggttaccactactggaaaacccgaatgcaaatttttattgaggcaatagatctaaatatctgggaagccatagaaatagggccttatatacccaccacagtagaaagagtttcaatagatggtagttcatcaagtgaaagcataactatataaaaacctagagatagatggtctgaagaggatagaagacgagtacaatacaacttataagccaaaaacataataacatctgccctgtgaatggatgaatatttcagggtttcaaattgtaagagtgctaagaaaatgtgggacactcttcgattaacacatgaaggaactgcagatgttaaaagatctacgataaatgcactaactcatgagtatgaattatttagaatgaatgcaaatganaatattcaaagcatgcacaagagatttac

SEQ ID NO: 2010 - DNA, 414 bp, Glycine max
  unsure (1)..(414): unsure at all n locations
caattactgtgtaaatttcatagttgccaatcattgtcttctctatatctcttatgaacaacacgagtgcaccacttttactctgatattagacaacctataacagagacgggtgtttaatatttctctatgaatagagacaactattggacaagtatggaactggggcaacctcaaagatttcattaattgcaactttgtcaagatcatcctctccagagccgtctactcgtagtaaatgatntgctgcattatgaatcatcaatgaattatacgtgccacaattatagcatacaatgtattaatatgcagcttaagaaacaaaagttcaatctaatacagcgaattaccagaacagaagaacccacggtcatcttcacaaatgccaccaagatcattgccatctggaattga

SEQ ID NO: 2011 - DNA, 311 bp, Glycine max
agcttgaaggacaaaaggaactcatttcactcatttgctcattacaaagatagtatggttaaactttagagagatctagagtcgtgcttagacggtagtgacagggagaagcactttctcaccttaaggaagatatcaacagctctatagagcccatcactcacaatacgtgcatgatctggaagtagttcagcaagggatatgaactctgatggcaacaagtttgggtctagtgccacttcagcaagatagttgcccattaatgtggatacctttagaatagacctttgtttgggagatccggggctgtc

SEQ ID NO: 2012 - DNA, 490 bp, Glycine max
  unsure (1)..(490): unsure at all n locations
tctntccctaacctgtggcataggcaacacagaaatgatgtctatgatgaagtaacgttntaaatatctcttggcaatctttctaggatctataacaagttcacctcgtccaaatacccgagatgaaggcgcaatgtaggcggtgcggaattgaaaacttatgcggaggagataaatgaaatcacatattgttctcattgtgacagcaaaacttgctaggctgttatctatggcgaggcaaaatgatttgtggttgaaataaggaaggtaaaagaagaagggatcgcatgctatagaaacaatgcacagaatctcaaaaaacttgttccaataaagaaggttcttatcttgaggatcaaatactttnttctcagacactttaagatcttctgggaacactgcccaagtagtcactccagtctttagtgatcttccanatgtctttagtccatctgaactcttcttcattcctagcctaaatgatttcgat

SEQ ID NO: 2013 - DNA, 447 bp, Glycine max
  unsure (1)..(447): unsure at all n locations
agcttgaagattntcaatctttcatttatgaaatataaatcacatccttcaaaagctcctgtaaattaaaagagaagccccatatacttctaaagcgggagaagaaattttttataatttataataaaaagcaaaatcagactgatgcaaagccaggtgaataagaaaaaacatatgaaataagtacagcttgatttgatgttaaagaatatagtcataagcccaagaagtgaagatgatctttccaacaatagccaataaattcggcaagagaagcaaaacataccccagagaccttcacgaattgcccattttttgcagttctaagctcagagtctggataatgagtaacaaagcccataatagatcttcttccccaataagtattccaagtgaaagatgcagcaactaagccaaaaagaatcacaactacaataaggagaatag

SEQ ID NO: 2014 - DNA, 422 bp, Glycine max
  unsure (1)..(422): unsure at all n locations
cggaagctgacgcganactaanatggtcattacatttcacacggaagtccgattcaggcgcataatatatcgagacgctcgatattgaacaacgtatggtgtcgataaattcatatggtcataacttgtcatacggatgtccgattcaggcacataatatatccagatgctctaaactgaacatcgacagctctcgagaaattacaatggtcataactattcacacggaagtccgattcatgcgcataatatatcgagacgctcgaaattgaacaacggaagctctcgagaaactcatatggtcataacttatcacacggacgtccgattcaggcgcttaatatatcgagacgctcgaaattgaacaacgtatggtgtcgagaaattcaaatggtcataacttgtcacacggatgtccgatt

SEQ ID NO: 2015 - DNA, 175 bp, Glycine max
gcttgaaattgaacaatggaagctgtcgagaaattcaaatggtcatatcttgtcacacagaagttcgatttcagcgcacactatatcgagacgctcgaaattgaacaacggaagctttcgagaaattcaaatggtcataacctattaaacggaagaccgaatgccgcgcataata

SEQ ID NO: 2016 - DNA, 456 bp, Glycine max
  unsure (1)..(456): unsure at all n locations
agctgttaactgaatntacaacgttccaattgatttcaaaatggtgtaatctgattacaacatattggtaatcaattactagtgcatctgaacgatgcacttcaagacattgtgaagagtcacatcctttcataaaaagcgttgagtaattgactacaaggatttggtaatcgattactactgacaagttttgaacacaagatcaaaacatgacacctcttcaagtggtttcttgaccagacttgaagagtctatagaagcaataccttgattggcatttgaagagcacttacaacacttacaacctttacaaacaactactcgacatgatctataacaaccttcgaatctcttcgaacatcttacacttcttcttattattcttttgcaaaagctatctaaagtattctggttttccaaaccttgaaaacagaagtgtgctatatctcttattct

SEQ ID NO: 2017 - DNA, 446 bp, Glycine max
agcttaactggttgaagctttcagaaacatgtatctcatgaggtgacataaattaaattatttatatcaatattattgaagatacacgtttatgagcataaacaatcaatctaaaaattataataattttattgaaaaataaacttatcttatttaaatgactttttgcacaattttaataagttatcaagaatatcacagtaaaccttaaaatgttcattatattatataaataaattagattttgtttttatctctattttgatattaaaaaaatatcacaagttaagtctttaatcttaaaaaaaaacttttgatgagtaagacctaaattcggtctatttctcctcctattcacatctatagaagatagtggttcaaaataatcagaaagatgctattcagcttatttttacctctttagagtatgtctctatcgtgttagt

SEQ ID NO: 2018 - DNA, 481 bp, Glycine max
  unsure (1)..(481): unsure at all n locations
gtgaagctcctgtttagctatacccgattntactcaaccattcgtagttgaatgtgatgctagtggagttggcattgtggctgntttgatacaaaacaaaacgcctatagcttatttctcggagaaattgggaggagccagattgaactattgcacctatgacaaagagttctatgccattgtaagagctcttgatcattggaatcattatntgcgttctaatcactttatattgcattcagatcatgagtcattgaagtatatcaatgggcagcagaagttgagtccaaggcatgctaaatgggttgaatntcttcaatcttttaatttctcttcaaaatacaaggatggtaagagtaatgtggtggctgatgcactttcaaggaggtatgctttaatatcaattcttgaaactcgtttacttggttatgagactttgatagattattataaagaagatgttgattctcgtgaaatatac

SEQ ID NO: 2019 - DNA, 453 bp, Glycine max
agcttcttagtttcagatgatgcagctgagtctgtagctacctcatgcactcctctaatgactatagcatcatttctggtgctaaactgttgggagttggaagccatcttctcaattaaatttctggcttcagcaggagtcatgtctccaagggctccaccactggcagcatttatcatacttctctccatattactgagtccttcataaaaatattggagaagcagctgctctgaaatctgatggtgagggcaactggcacatagttttttaaatctctcccggtattcatacaggctctctccactgagttgtctaatacctgagatatccttcctgatggctgtggtcctagaagcagggaaatatttttctaagaatactctcttcaggtcatcctagctcgtgatggaccttggagcaaggtaatacagccagtcctttgccactccc

SEQ ID NO: 2020 - DNA, 392 bp, Glycine max
  unsure (1)..(392): unsure at all n locations
ntctctntgaagttntgtatgatattcctttcatacaaaatttcatactttgcaacgganaaacataattaatgccaaaagtatactatcgaaacatgtaattgaaaatacatgtaatagaaattaaaatccctaaatttcataattaggatttatacataattgagagaaattaaatcatccctagatttaataattagggttcatacataattggaagaaattaaatcattcttggagaatcataaatttcataacacatgttttgatatcacatgtaaaacattaagggggttcttagactatcaattataggaaacaacatgatcttaaaacatatgattctcacatacaatcaataaacaatagataatggtgcatacctttcttca

SEQ ID NO: 2021 - DNA, 455 bp, Glycine max
tgtagttaagaccgcagacaacttctgttcatgtttgaagcttgatagaaacacagatgttagctatagtaatatgaggaaggctgcttctcgagaagatttgactgacaactatttatactgtcctaaagctgtagatcttcagtacaaggatttaaggcattttcagtggcattgggaaaagggggagcctgtcattgtcagcaatgtgcttgaatgtacatctggtttaagctgggaaccacttgtcatgtggcgtgcattacgtcatgtaactaataccaagcgtggccaacatttggctgagaaaacaattgattgcttagattggactgagggttgcttaatttcccaatctttaactttattgaccttggagagctctttacacaaattttattcttcaccttcattctcatgaagattatgtctaattgtttaatgttggtacttat

SEQ ID NO: 2022 - DNA, 462 bp, Glycine max
  unsure (1)..(462): unsure at all n locations
caagcttgcttcttcacaaaggtagtgctcatgcctttnttntggaataatgtggtttacactcttaaagtcatggctccacttgtgaaagtgcttcatcttgtggatggtgaaaggaaactagccatgggctatatttatgaagcaatggacaaggcaaaagaaacaattatcaagtctttcaacaacaatgaaagcaagtacaaagatgtgtttgcaatcattgataaaagatggaattgtcagcttcatagaccattgcatgcagctgcccacttcttaaatctagagtgcttttatgacaacactgacttggagtttgattttgaggtcaccaatggtttgtttgagtgcattaagaagttttgatttagaggtcaccaacttgggacaaaatagaatgctgacctatctaggagggcttaatggaatgttaatcacaaaatccaatctagcttttat

SEQ ID NO: 2023 - DNA, 431 bp, Glycine max
  unsure (1)..(431): unsure at all n locations
tactcagctanacattcaatttcgagcgtctccatatattacgcgactcaatcagacatctgagtaaaaagttattgtcgnttgaattggctcagaggttcaacattcaattttgagcatctcgatatattacgggactcaatcagacatccgagtaaaaagttattgtcgtttgaaatggctcagagctttaacattcaatttcgagcgtctcgatatattacgggactcaatcagacatccgagtaaaaagatattgtcgttngaattggctcagaggttcaacatataatttggagcgtctcgatatattacgggactcaatcagacatccgagtaaaaagttattgtcgtgtgaattggctcataggttgaacacttcaattcgagcgtctcgatatattacgggactcaatcagacatccgagtaa

SEQ ID NO: 2024 - DNA, 371 bp, Glycine max
  unsure (1)..(371): unsure at all n locations
ctgcggcatgcaagctntaagccaattcatacgacaataactgtttactcggatgtctgattgagtcccgtaatataacgaaacgctcgaaattgaatgttgaagctctgagccaattctaacgacaataactttttactcggatgtccgattgagtctcgtaatatatcgacacgctcgaaattgaatgttgaagctctgagcctattcaaacaacaataactttttactctgatgtccgattgagtgacgtaatatatcgggacgctcgaaattgaatgttgaacctctgagccaactcaaacgacaataactttttactcggatgtttgagtgagtcccgtattatatcgagacgctcaaaattgatt

SEQ ID NO: 2025 - DNA, 462 bp, Glycine max
  unsure (1)..(462): unsure at all n locations
agcttccgagaatcaacatcaagattcaagaatctagagaagacttattctatataagtattaaaaagttttttcaaaaactgagtagcacatagattcttaacaaaaccttttaccacagggtttttactctctggtaatcgattaccagattattgtaatcgattaccagtagcaaaattctgttcaaaaagctgtcaactgaacttacaatgttccaattgatttcaaaatgttgtaattgattacaatgttctggtaatcgattaccattgtgtttgaacgttgaaattcaaattcgaatgtgaagagtcacatcctttcacgaaaatgctttgtgtaatcgattacactgatttggtaatcgattaccagtgataggttctgagcaaatcagaagatgtaactcttcacatagttattgactctttcacattggtttaagttnttctaaacgtcata

SEQ ID NO: 2026 - DNA, 427 bp, Glycine max
  unsure (1)..(427): unsure at all n locations
gctctctctgtcaatgttaggttcatatgctcaactacaccattgagttgaggtgttcctggcatggtcctctcccttctaatattgtgctcatagaaaaactttctaaatctgtctacatattcaccaccattgtcagttctgtgccttatgatctccaatcctgtctcattttcagccatggctttccatatcttaaaagccacaaatacttctaacttgtattttagaaagtaaactcataccttcctagagtgatcatctataaaactcataaagtattgtttgccaccaatggatgacacatatgttggtgtacacaaacatcagagtgaacaagctcaagtntttccttctttagggttctgctatctgtctaaaagctgactctnttctgattgccaaatatgcagtcttcacacatgta

SEQ ID NO: 2027 - DNA, 473 bp, Glycine max
cttttcttcttcactggttaagcagtttacaacatttaccaaagctctttccagcgaagtctgtggagttgcaagagcgctaatgttttccttgtcaacttcctccaccttgaagcacttcctgttctcctctagatattttattgcttcaaacaggttgaaggtcaccttctgaatgtcaatgctcatctccagatttccattccccatgtccaccacacagttggcagtcaacatgaagggtctacctaagataaaaggaatctccgtgtcttcttcgatatccatgatgacaaagtccactaaaaaggtgaagtggcagaccttgactaggacttcttctaccaccccatacggtcttgtgattgagcggtctgctagctgaagcgtcatcctagtagggtctatcttcagattaccaattcttctgcacattgataggggcatcaggttgatgctcgcccctaagtcaa

SEQ ID NO: 2028 - DNA, 346 bp, Glycine max
  unsure (1)..(346): unsure at all n locations
agcttctacttncatggcttattctctagtggatggcgcctcctctcacctcttctcctttatctttcattgaaactccatgactgaaaaccaccattgaaagagcttattgaagctcaaagatccaacctccatagaagcttctcaagcaagcttccatcacttaggctataaacagaggccttgtgtgtgcaatttttcaactttgatcatttgagaaattacacttcaaggtttacaactcatatgaggcataaattgggtgccccttctatacctgtccatccactcataatctgcttcctttaagctcttatcgatggcttactatggtggtgagcttgta

SEQ ID NO: 2029 - DNA, 459 bp, Glycine max
  unsure (1)..(459): unsure at all n locations
agctntattntaatctttagttacactccagatatgcagtatgtaagaattaatgtctcatgtgagagacatttgacttatgtaaggactaataagtaaataattaacgattaagagctaaattgtaattgggcttaataggagaagtttctaggattaactgctacttgatgggagtagtggttataaaaggggcttaatacccactaacgtgaaataaggtccccttcctgaccagaaaagtgttctctctcactcatagccatcactaacggagagaggcagaaaagaaaggccaaaggaagtgaaatcttatttctctcatctttcaaggaaatcaaagtaacggagagaagttcctatggagaaaggtacaagtcttcctatggagaaaggtacacatcattatctattggtgtttattgattgtntgtgagaaccatatgtttcaagatcctg

SEQ ID NO: 2030 - DNA, 443 bp, Glycine max
  unsure (1)..(443): unsure at all n locations
agctggatgctaattatgtcttctggaaccaacactgaagcatcttcttcactccattntccatcacgaagtacctgctaaggtaaattagattagatgtcaaatgaaatggaaacaagacagtataacaaagtcattggaaaaggaaaacttaaacatgcaatagtgatgtaagtagctactgttaaatcagtgaagaggggaataacctttgctttgggggctaatctggccataagggcagcagctgcattgccagcattgttttcttctatgaaactgatggtggagtttataagtagcaaaagaactatgccagcaaaatcttgataatctccaccttcaccctgcagaagtttgagttattatattaaatataatggattgtaaattgtaacatcactgttttcagacagtaaaaattgactgaccgataatgaaac

SEQ ID NO: 2031 - DNA, 493 bp, Glycine max
  unsure (1)..(493): unsure at all n locations
atcctctaactcacctgcggcatgcaagcttcatggtcttctccttgtagaatttggaattctcataggcttctaaacgaatctcatctagctcacttagttacaacttcctttcctctctagcctgatccatagagaagttgtaggtttttacagcctagtaggctttgtgctctatctctacaggaagatgacatgccttgctaaagacaacccgataaggtgacattcctatgggtgctntgtaggcagtcctatgcgcccaaagagcatcatccatcctggtgctccaatcatttctgttcggctgcacaatcttctccaagatctttnttatctccctgtttgaaatctcagcctacccattagtttgggggtggtaaggtgtggaaattctgtgcacgaccccatactttntgagcaaggcatacatggacctattacaaaaatggtgccttgatcactaacgatggctctcgggactccaaacctg

SEQ ID NO: 2032 - DNA, 399 bp, Glycine max
  unsure (1)..(399): unsure at all n locations
tcaagcttaggactcattctntaactgccaacagagagagatgcagttttgctaagcccagactagagtatcttggccacatcatttgtggttttggggtggcagcaaataaatccaaggtggcagcaatgagttcctggccagttcctaaagattcgaagagtttgaacgggttctagtacagatgcaaaaaatatataaggtttattctagaatgaataaaagagggcttggatttacttagttgagccggttggtggttaacattttacgcgaatattacatgatacaacaatatttaacatgcgctatcattaatgtcatatgacgcatgcagagttctgagtggaacaccgagtgtaacatataagatgtggggtatctttaaggttttaaaaa

SEQ ID NO: 2033 - DNA, 295 bp, Glycine max
  unsure (1)..(295): unsure at all n locations
gagtgaagatgagaagaagaagcttgaatagttgaatgtagaagttgacaacctctgcaaggtgatcaaggatgttttgggtgacaaggttgagaaagttgtggtctctgaccgcgttgtaaattcaccatgctgtcttgtgactggcgaataccgctggaccgcacacatggaaaggataatgaaggcccaagctctaatggacaacagcatggcagggtacatgtcaagcangaagaccatggagatcaaccctgagaacccaatcatggaggagctcacgaagcgtgctgat

SEQ ID NO: 2034 - DNA, 207 bp, Glycine max
ccggatccttaagtcacctgcggctgcagcttaacatcagaccacttacagggtgctggttctacttcacatggacttgatggggcctatgcaagttgaaagccttggaggaaagaggtatgcctatgtggtggtggttgatttctccagatttacctgtgtcagctgtatcagagagaaaacagacacctttgaagtattcaaaga

SEQ ID NO: 2035 - DNA, 509 bp, Glycine max
  unsure (1)..(509): unsure at all n locations
tactaagcttgaggtangagaagatgagtggagggagagggagagaaggtgtgctcatatttatgccttaaatgaggtctgaaattcgaagtctaatttctcaaatgattaaaggtgaaaaaatgcacacacaatacctctatttatagcctaagtatcacacacaattggagggaaatttgaatttgtattcaaatttcactggaatttgaatatgaattggtggagccaaattttcactaattatgattagtgaattgtggttatggttcaacccactaatccaagatcaagttcaagattctccactaagtgtgcttaggtgtcacgagacatgttaaacatgaaggacatgcacaaagagtgactgtatgatgtgacaatgtggtgtatcaagaaaatgctcatttcccccttataatggtccaaaatttaattggattgcgcttctcccaatttaattaaatntatcctccaatacacacacatcagatagtgcacttaatgcg

SEQ ID NO: 2036 - DNA, 459 bp, Glycine max
agcttgtccttgactcatcttttccttgaagtgacatctctaatgatctttcttccttctccattctcctgtcattgatcttcaagaaacaaaggacttcattgatgaagaagatccaaggcctacaagctccacatggagctacatcaaggaggaagcacactatgatattgatttacattcttataataatgctatcccttttaatgttgccaacaatgcaaagtttaagaagatgcttgatacagtttcctagcatggtccaggatctgtccctttatcatacaatgatattaggatgaaggagaaaactcatctttctttgaagaatcatatagcttattggaagacatctagatgtgctataatgacacatggatgaaccgatacgaggaagacgatgacctatttactaattttggtaaattatccacttggaactatgttttgaagtctgta

SEQ ID NO: 2037 - DNA, 418 bp, Glycine max
  unsure (1)..(418): unsure at all n locations
ggatcttatagaactccttcttcttacggtgcttcatattttcttaccattgtcaatgattgctcacctgcagtttgggcttttttgttgattgataagaaagaagtatcacgggcacttacaaatttttttgctattgcagaaaggcaatataaaaaaatggttaaaactatgagaagtaataatggaacagaattcatttgcatgaaaaaatattttcatgagcgtgggatagttttccaaccttcttgtataggaacaccttagcaaaatggcagggtcaaaagaaagcatcggcatatcctcaatgtggtgcgagctttgtgatttcaaagaagtttacccattgaattttggggcgaatgtgngtngacaacatgatacttgattaatcgtactccaagctcagtcttaaaag

SEQ ID NO: 2038 - DNA, 311 bp, Glycine max
ttcgagtgtctcgatatattacttgactcaatcagacatccgagttaaaagttattgtcgtttgaaattgctacgagcttccgttatcaattgcgagcgtctagatatactaacggacacaatcgtacatccgacaacaaagataatgtcgtttgaattcgctcagagcttgcgttttatatttctgagcgtctcgatatactacaggactcaatcggacatccgagtaaaaagttattatcgttggaattttctaggagcttctatctttaatttggagcacctcgatgaattgccggactcaatccgac

SEQ ID NO: 2039 - DNA, 445 bp, Glycine max
  unsure (1)..(445): unsure at all n locations
agcttgctatccnctccaagaaaaggattaaaatttcctcatccgattctgatgatgatgtcgaactagatgtctcgacatctaagagggccaagaaatctggaagaaaggtgcctggaaatgttcctgatgcaccattggacaacatctctttccactccattggcaatgttgaaaagtggaaatatgtgtatcaacgcatacttgcggttgaaagagaactgggaagagatgccttggattgcaaggagatcatggacctcatcaaggctgctggactgctgaagactgtcagcaagttgggagattgctatgaaggcttactcagggaattcattgtcaacattccttctgacataactaacagaaaaagtgatgattatcaaagagtgtttgtcagaggaaaatgtgttagatactcccctgctgtgatcaacanatatct

SEQ ID NO: 2040 - DNA, 438 bp, Glycine max
  unsure (1)..(438): unsure at all n locations
cgtctcgacccggatacttaagtcacctgacgctgcagctttgcaactttataaanaattgtttcttatttgacattagttctatattaaaattaacttttcatatgtttcaatgtgaaatatatagttgaaaccataaaggtatcacatgtgatatatatatgagttactttttaactatgcacatttttttacttaaagtaaaatagtgtgatatttcatatatctttaattgatatacttcacgattaagagaagaaacacgatgattaatatgataacgaatgtgataaaaagagatgaatgtgttcaattaggtttcatatgaatataaaattggaaacttaacatagttgacataaatacgattattaaatagtgaattctatagcatataatcagatgatggtgggaacttattatacacagataatatat

SEQ ID NO: 2041 - DNA, 409 bp, Glycine max
atttcgagcgtctggatatattacgggactcaatcaaacatacgagaaaaatgttattgtcgcttgaatttgctctcagcttcaacattcaatttcgagcgtcccgatatattacgagactcaatcagacatccgagtaaaaagatattgtcatttgatttggcacagagcttcaacattcaagttcgagcgtctcgatatatgacggaactcaatcagacatccgagtaaaaagttattgtcgtttgaatttgctcagaggttcaacattcaatttcgagcgtctcgatatattatgggactcaatcagacatccgagtaaaacgttattgtcgttagaattgtctcataggttcaacattcaatctcgagcggctcgatatattacgggactcattcacacatccga

SEQ ID NO: 2042 - DNA, 393 bp, Glycine max
  unsure (1)..(393): unsure at all n locations
gagtntggagtgcacattgtagttactaagatgtggagagacatgaaagaagcaaagccactagtggaagggaatgagaggaaacaatatgccaaagtatttgattatgcacatgaattgttgaggagcattcctggatcaacagttaagatcaacacagtgccaagtccaggaggtccaccataatttcagaggctatatatttgtcttgttggctgtaagaaagggtttgttgctggatgtagaccattcacaggtctagatggatgtttcctaaagagtgcatttggaggaaacttgctctctgttgttgggcttgatggcaataaccacatctttgttatttgctatgctgttgtggacatcgagaacaaagacaattggaaatggttt

SEQ ID NO: 2043 - DNA, 296 bp, Glycine max
atgttgttagtcgtcatctggatgtcgagagtgttatcttgttggattctgagaagaagatcaataaaatcttggtcctctaattcagctccatcttcttttgcaatattgttcttttcttgatgctctctgatgatgttttccaggaccttgtcaacctgcttgtgcaacttcttcaatctggtcatgtttccagttaggaaatataacaatggaattgaaggaaagacatcagcaatgtcgaatccttccccggattctacgattcttcggatcaaagacacaacaaactcatc

SEQ ID NO: 2044 - DNA, 363 bp, Glycine max
  unsure (1)..(363): unsure at all n locations
tgtaatcgattacacacatactgtaatcgattaccagaggagtttttcagataacattctcaacagtcacatctttttatctgtttcttaaatggccatcaaaggcttatatatatgtgacttgagacacgaatttaacaagagttttcaagaacaaaaaggtcttatcctcttaaaaagaaaaatagttntatcctcttacaaattccttggccaatacacttgtgattcaataaggaattatttgagcgctcaaattgttgaatctatctcttccaagagagatttcttcttctcttcttctttattctgaanagggattaagagaccgagggtctcttgttgtgaaagaattctaaacac

SEQ ID NO: 2045 - DNA, 413 bp, Glycine max
  unsure (1)..(413): unsure at all n locations
gcttttggaggtctattngcataatacacctaggggttcttccctttatagtataccccttcatcaactcagttgcaatgagaatatgattgtgaacgacttgaccgggcacaaaagctgcttggctagtatgaacaatatcctgaatcacactccctagcctcctagtcaaaaaatattatatcactctataaaaagtagagcaacctgcaataggcctgtaatccttgacagtcttagcagtaatagatttaggaatgagtgtcacaagagtactattaaaaacctttaatagagttcctttctcgaaaaattcattcattgcagcaataaaatctttctttactatatgccagctatttttgaagaattgtgccctataaccatctatgccaggtgctttcatatcacca

SEQ ID NO: 2046 - DNA, 315 bp, Glycine max
  unsure (1)..(315): unsure at all n locations
gcttgcttctcataagaggcatgctaagtgggtagagnttctacttctatcttcatatgccatcaaacataaaaaggggaatgggaatgtaatggctgatgctgtgtctaagatacatgctttacttgctatgcttgagactaaactgtttggtctcgagtctttgaaagtcatgtataatcatgaggtggactttgctgaaatttttgctgcatgtgataagttttctgaaactggtactataggcataatggagttttgttaaagcaaataaatttgtgtgcctaagtggtccattaaagagttgcttgtgag

SEQ ID NO: 2047 - DNA, 338 bp, Glycine max
ttcgagtgtctcgatatattatgttctctgtatcggacctccgaatgaaaagtgatgaccatttgaatttcttgagagctacctttgttcaatatcgtgcgtctcgatatattatgcgcctgaatcggacctccgagtgaaaagctatgaccatttgaatttctcgagagcttccgatgctcaatttcgagcgtcttgatatattatgcgcctgaatctgacctccgtgtgaaaagttatgaccattttaatttttcgagagcttccgttgatcaatctcgagcgtctctgactatgatgcgcctaaatcgacatccgagcgaaaagtatgaccattg

SEQ ID NO: 2048 - DNA, 307 bp, Glycine max
tctcgatatgttatgcgtctgaatcggacatgcgagtgaaatatttgaccatttttatattccgagagcttccgttgttcaatttctagcatctcgatacgctatgtgcctgaatcggacatgcgagtgaaaaggtatgaccatttgaatttctcgagagcttgcgctgttaaaattctagcgtcttgatacgctatgcgcctgcatcgaacatgcgagtgaaaagttatgaccatattaatttctcgagagatttcgttggtcaatttcgagcgtctcgatatgttatgtgcctgaatcggacatg

SEQ ID NO: 2049 - DNA, 451 bp, Glycine max
  unsure (1)..(451): unsure at all n locations
actaagcttctacattcaatntggagctgttcgatatattacgggactcaatcggacttccgagttaaaagntattgtaggttgaatttgctcagggcttcggtattccatttgagcgtctcgatatattacgggactcaatcggacatccgagtaaaaagctattgctggtagaatttgctcagagcttccggattccatttcgagcagtctcgatatattacgggactcaatcagacatccgagtaaaaagttattgtggtttgaatttgctcagggcttctgtattccatgtcgagcgtctcgatgtattacgggactcaatcagacatccggagtaaaagttattggtcggtgaattagctcagagcttctgcattcaatttcgagcgtttcgatatattacgggactcaatcagacatccgagtaaaaagttatatgtcgttgaat

SEQ ID NO: 2050 - DNA, 413 bp, Glycine max
taaggagggaattccaggggtggaacatgctctattcaaagcatgattggtgggacgaagtttcacacaatgtgagggaattgactacaattaagtgtttttacctgttgtgaaaaacacttcaatcaaaatggttttggccttagttgcacaagaagacatggaattggaacaacttgatgtaaggatagctttcttacatattgagcttgaagaagaaacctacatgactcaagcagaaggttttgtcaaaatatgtgaagaaagaaaggtatgcttgctaaaaatgtccctttatggccttaagcattaataaaatggcttaaaaaggtatgagtatgactggtgtgtctacttgaagaatattgagcatgatgttattgtctacttactgctctatgtaaatgatatgc

SEQ ID NO: 2051 - DNA, 389 bp, Glycine max
  unsure (1)..(389): unsure at all n locations
atatatgtatgtgngtntatgtagcatgataccttggatatgcatgtatataacagagatacctcacaaaatatatatatgtatgtttaggtagcaagataccttggatatgcatgtatatagcaaaaatatctcacaaaacatatatatgtatgtttaggtagcaagataccttggatatgcatgtatatagcaaaaatatctcacaacatatatatatgtatgtttaggtagcaagataccttggacacacatgtatatagcaaaatacctcacaaaaatatacatatgtgtaggtagcaaaatacctcatggaaaaagaaaaagagataaataagaaaaaaaataattattagttgtctagctaaaaaaacaacatgctttgtgaa

SEQ ID NO: 2052 - DNA, 430 bp, Glycine max
  unsure (1)..(430): unsure at all n locations
ttatttaattnggacgaatctgcaccgtttaacatgactcttattaaaaagtagtagcatcaacatcaaattacattcaaaatttcaaatagtaatagtattatttatgtaagttttttttttctcactcagaatcacatgtatttcttactttttctcactcagaaaattgacctaataatcaatggcgtatccagaaagtttttccagtgggagcaaaaaatagtctaatattttttcaaataaaaaattatataagtttttctaaaaatggtaataaaaaattaaaaactataaaatttaaaaggataaagtgattgctcattaaagaatttggctagacagcagaatgacgtgattgctcattaaagaaatatcattccttcccttagaattttaattatcattaaaaatanataaagatagactc

SEQ ID NO: 2053 - DNA, 429 bp, Glycine max
ccttctattacggacctatgaaactaagcttttttctttttatctaagcagattagaaatgttcacctaattaatttaaatttaatcacttgataatatattaaaattaatttatctgttttttacgttgaaattaatttatgtgtttgtttctatctttctcatgtaaattaaaatttgactccaaattgtttgtgcttttaattggccaatattagttttgtgttttaaatagtttttaattggtcaatgttgttagttttaatttattgttgtaattaataattaaatgcaaatatttgtatttaaatttggatttattattaattgtacttagatattagttgttctgtaattattttttatataacattgataaattattcatactcatattagttgtacttaatagtgattattcatacttaa

SEQ ID NO: 2054 - DNA, 394 bp, Glycine max
  unsure (1)..(394): unsure at all n locations
gggaagaagtgtacatggagattccacctggatatggtgccactaatggaggaaataaagtttgcagactaaagaaggtcctatacagtcttaagcagtcttctcgggcttggtttggtaagttcactcaagttatggtatctttggggtacaagcaaagccaaggtgaccatactcactttataaaacactcccaagatggaaaacttactttgctcttggtctatgtcgatgatataattattgcaggcgatgatgaacttgaaaaataaaacttaagggagaggttagctgcccaatttgagatgaaggatctcgggaagctaaagtacttcctcgagatagaggttgcacactctangcaagggatcttcatttctcagaanatatatac

SEQ ID NO: 2055 - DNA, 391 bp, Glycine max
  unsure (1)..(391): unsure at all n locations
tgtgcatccaataccatgatgaggatgtcccatatgttcttaatactggactgatccatttgcttccaaagtttcatggccttgcagatgaagacccgcacaaacatatgaaagaatttcatattgtctgctccaccatgaaacccccagatatccaagaggatcacatatttctgaaggcttttcctcattctttatagggagtggcaaaggactggatgtattaccttgctccaaggtccatcacgagctgggatgaccttaagagagtattcttagaaaaaaatttccctgcttccaggaccacaaccatcangaatgatatctcaggtattagacaactcagtggagagagcctgtatgaatactgtgagagaattaaanactatgt

SEQ ID NO: 2056 - DNA, 284 bp, Glycine max
gacactctgagtaaaaaagttattatcgtttgaatttgctgagagcttcaacattcaatctcgagcgtctcgatgtattacgggacttaatcatacattcgaataaaaagttatcgtcgcttgaatttggtcagagcttccacattcagtttatagcgtctcgatatattacgggactcaatcagacatccgagtaataagttattgtcgttcgaaaattcttagagcttcggtattctatttctgagcgtctttgattattacgggacttatcagacatccga

SEQ ID NO: 2057 - DNA, 336 bp, Glycine max
  unsure (1)..(336): unsure at all n locations
agcttgccttgccccttgatatattagagggactcatggtcactatgaatgacaaattccttgggataaaggtagtgttgccatgttttcaaagcccgtactaaggcatacaactccttatcataagttgaatagttaagggtaggaccacttaacttttcactaaaataagcaattggatggccttcttgcatcaacacagccccaatcccaacatttgaagcatcacactcaatttcaaaagatttttgaaagtgtggcaacgcaagtatggnggcattagttagctnttgcttaagaacattgaaagcttcttcttgtttctctccccatttg

SEQ ID NO: 2058 - DNA, 450 bp, Glycine max
  unsure (1)..(450): unsure at all n locations
agcttaccttgctcggcgggctcttgattacttgattgggtttaacatttcaccattactatggaggaagttaccaggttgccaatcagctggaagagttcaatctgctgcactttctcttatatgtgatagagaaatggaaattgatgaatttaaaccgaaggagtattggactgtggaggttcaaatgaaaaagaaagagctgagatcaaacaagaaccttacttttcctgctcacttgacccattttgattcaaaaaagttgaataagttttcaattacttctgataccgaggcaagagatattcgaagcaatataaactcagctgattttcatgttgttagcttgaaaaanaacaaaagtcgaagaaatcctccaacaccttatataacatcgacacttcagcaagatgctgcaaacaagttgcatttcactgcaagtcacacaat

SEQ ID NO: 2059 - DNA, 217 bp, Glycine max
agcttatcttatggatgcttgcgatatggctacttattataattccaagcaacttctgggcagtggaagtaaccgtgtttgtcaagcaaggcacaacaatggaaaggaacctgggccagaacttgcatataccaacagccctcctatggaactttgtggaggacaccattctcatttgtctccccatttacgaacgttactatgcaccattcatgcg

SEQ ID NO: 2060 - DNA, 315 bp, Glycine max
  unsure (1)..(315): unsure at all n locations
agcttgtaatctattacacacatactgtaatcgattaccataggagttnttcacaaaacattctcaacagtcacatctttatatctgattcttaagtggccatcaaaggcttatatatatgtgactagagacactaattttatcataagttttcagatcaaaaaggtctaatcctcttaaaaagaaaaatccttttatcctcataccaattccttggccagaacactggtgactcaataaagaattatttgagtgctcaaattgttcaatctatctcttttaacagagatttcttcttttcttcctctcattctg

SEQ ID NO: 2061 - DNA, 441 bp, Glycine max
  unsure (1)..(441): unsure at all n locations
agcttccttatgaagatntcctaaaaagctagagcttagttacacatacctctctaatggctaagctcaccttcttgagatgagaagctagagcttagctacacacctcctataatagctaagctgaccccatgaaaatacaaaaaaaaatccctactacaaagactacttaaaatgcctcgaaatacaaggctaaaaccctatactactagaatggccaaaatacaaggcccaaacgaaggaaaaacctattctaatatttacaaagataagctggctcatacttagcccatggactcgaaatctaccctaaggctcatgagaaccctagggcattcccttgaatctctggcccaatttacttggagtcttctatccaatgcccttgcggggtaggatggcatcacaagtaccctccacttgaactgatccacaagagat

SEQ ID NO: 2062 - DNA, 239 bp, Glycine max
agcttcaacatcagaccacttccagggtgctggatctacttcacatggatttgatggggcctatgcaagttgaaagccttggaggaaagaggtatgcctatgttggtgtggatgatttctccagatttacctgggtaaactgtatcagagagaaatcagaaacctttgaagtattcaaagagttgagtcttagacttcaaagagagaaagactgtgtcatcaagagaatcaggagtgac

SEQ ID NO: 2063 - DNA, 357 bp, Glycine max
  unsure (1)..(357): unsure at all n locations
agctttgagcaaattcaaacgacaataactntattatcggatgtccaattgagtcccctaatatatcaaactgctccaaattgaaaatggaagctcgtagcaaatttaaacgagaataactttttactcaaatgtgcgattgagtcacgtaatatatcgagacgctctaaattgaaaacggaagctcatagcaaatgtaaaccgtaataacttttaactcggatgtccgattgagtcctgtgatatattgagacgctcaaaattgaaaacagaagctctgcgcaaattctaacaacaataactttttactcggttgtccgattgagtactggtatatgttgagacgctcgaaattga

SEQ ID NO: 2064 - DNA, 362 bp, Glycine max
  unsure (1)..(362): unsure at all n locations
agctnttaactcggaggtccgattcaagcgcataatatatcgagacgctcgaaattaaccaacggaagctctcgagaaattcaaatggtcataacttttaactcggaggtccgattcatgcgcataatatatcgagacgctcgaaattgaacaacggaagctctcgagaaattcaaatgttcataacttttcacacggaggtctgattcaggcgcataatatatcgagaccctcaaaatttaacaacggaagctctcgagaaataccaatggtcataactcttcactgggatgtccgattcaggcgcataatacattgagacgctccaaattgaacaaccgaagctctccacaattcaaatg

SEQ ID NO: 2065 - DNA, 396 bp, Glycine max
  unsure (1)..(396): unsure at all n locations
agctntataactngngtcanagctaccaggaatgagtatactcccatcaataaactcaaatgtgttcttagcacctaaggcgcgtctcataaaacgagcccatgcatggtaattagagccatttagcacaggagtgactgttacagacgaaggtccatctcctacatgaacataatacgggctggaaggatcttgcgatggatctgcaagaccacctccatgattgttgccggaaccacctggacgagccatcagagttacgcagatatggagctagacgctctgtgataccatgttaataaatgaatataaaagcaaggaaggagacaatatggagaaatgcattgacactcaattcatggaattacatcaggctgatgcttgttatttatatga

SEQ ID NO: 2066 - DNA, 278 bp, Glycine max
  unsure (1)..(278): unsure at all n locations
agctntatgttcaattgccccaatgacatctattcttcacatggaanaaggccaagaggcggacatgactttcagacgatggggcagaacattgacattgttcgcatacgctcgacatatatggcatttacttacatgggtgcagcaatcgctttccataacgagccaagaataacctgctctaaggatcttcctggccatagcatgcccattggcatgtgtgccaaatgaacccccgtggacttactcaatcatgtaggtcggctctatggcatcta

SEQ ID NO: 2067 - DNA, 389 bp, Glycine max
  unsure (1)..(389): unsure at all n locations
agctntacattactcctcatgcttctcaccatgtctaataaggttcgatttcttcattctaccacaccattctgatccggagaaccaggcatagtgtattgggcaacaatcccatgttcttgaagaaatttcgcaaatgaacctggtgcttgtccatcctctgtgtatctaccatagtattccccacctctatctgatctcacgatcttaatttgttttccacattgtttctcaacttcagccttaaaaactttaaaggcatctaaagcttcattcttagaatgaagtaagtagagatacatatatcgtgaataatcatttataaagcttatgaagtatttctgactatttgcgtccatgtctagacaacatatgtctgtatgtatgat

SEQ ID NO: 2068 - DNA, 465 bp, Glycine max
  unsure (1)..(465): unsure at all n locations
agctntactaattaanaaatgtactcttctaaggcttttacttatgttgttaagagaataaggagtagaagagaaacttaaccaaacgtaaaagtggaaattaaaatgcacagcggaaagtaaaagagtagggaagaaggagacaaacacacaagagtttttaaattggttcaacaacaacccgtgcctacatccaatccccaagcgacctacggtccttgagatttctttcaaccttgtaaaaatccttttacaagcaaagatccacaagggatgtaccctcccttgttctctttgaacctagtggatctaccctccactagaactgatccacaagagatgtaccctctcttgttctcagtcaaacccaagtagatgtaccctctacttgtaccacanaggatgtatcctccaatgtgttaagacaaagatctcatgcagtcaaacctttgatactttgtgaat

SEQ ID NO: 2069 - DNA, 391 bp, Glycine max
  unsure (1)..(391): unsure at all n locations
gcttgcatgcttgctaagatgcattntgaagaatcataccaagaaaagtattacaatttataatctgaggcttgcacatcatgtcatgttgacatgagaagcatatataattgaacaagaaggaacataaattgtgtttattttattgaatacataccaagaataccagtataatatgaaagcggaacatcggtgtgctcaatgttgaaaagtatttgagttggggacaccaagctgaattcttcccattntgtagatccccacactaaagcacctttcttgaatctgggtgccagatttaggactattacactccataccctgtaatggctgatgtacacaacggtagagttagaccagccaaatttatgatcccaagagtatntcaaac

SEQ ID NO: 2070 - DNA, 415 bp, Glycine max
  unsure (1)..(415): unsure at all n locations
agctagagtatcattccaaatgtatggcttcaattacctgctaaaggcaacaggcacaattccagctctatattcagcaatttgcaagaaggcaggttcagccatatcaaagtgttgcagaggagggttgcaccaacccccattgttgttaggcaaagaacggtttggggggcagaagttagtggcagttacagtaatggagccaggtttgcaccatcttgggtcatcatcacatctcatttcatagcaagatccacagcttaagccattgttgaacaaagcagtgcttatagccacagtgtcagttccatagccctggctatacaaatttccatacccacatgctccacctgcatgtatanaatacanagcataaacatacaactcatcacttaactttcataaacacactcta

SEQ ID NO: 2071 - DNA, 421 bp, Glycine max
  unsure (1)..(421): unsure at all n locations
acacgttaactcgcttntgatctctatgaatctgctgcaaatcaactatcaagacgtcaacgattgcgcgagttgcttaaacaatcccaatcagctcctcttaccgaggaagaacagataataactatttatactggaacgaatggttatcttgattcattataaatgggacacgtaaggaaatttcttgttgagttacgtgcttacttaaacacgaataaacctcaattcaaagaaatcatatcttctaccaagacattcactggggaagcagaagtccttttgaaggaagctattcaagaacagatggaactctttttactacaggaacaggtagaagaaaattgattaatcgtttaataactctataatgtcactttcaaattcttatacattagatcttttaatatctctttatttc

SEQ ID NO: 2072 - DNA, 359 bp, Glycine max
agcttcctcttattagtgcacagctccttcaagaatttggcatattttggaattttctttattgcatccagcagaggtatgtttacctctacttttctgaatgtctccaagatctctttctctgcctcttccatttttttgttggaaactgctcttggagggaatggaagaggagggatgtgctgcttctgcaaattaccagtggaagattcacctgcacagaaattgttaggtaaatttttgtcatcacctttttctggagtagagtgaagtttggcagattcatttgtagatgaggaaggtgctatgggttgaggtccttgacactgctttcccgacctcaatgaaatggcactgac

SEQ ID NO: 2073 - DNA, 410 bp, Glycine max
tgcagctttgagcaattcaaatggtcataacttttttcggaggtccgattcaggcgcataatatataaagacgctcgaaatttcacaacggaagctctcgagaaattcaaatggacataacttttaactcggatgtccgatttatgcgcatcacatatagagacgctcgaaattgaacaatagaagctctcgagaaattcaaatggtcataacgtttaactcggaggtccgattcaggcgcataatatatcgagacgctcgaaattgaacaaaggaagctctcgagaaattcagatggtcataacatttaactcggatgtccaatttaggcgcataatatatcgagacgcttgaaattgaacaacggaagctctcgagaaattcaaatggacataacttttaactcggat

SEQ ID NO: 2074 - DNA, 304 bp, Glycine max
taccttgctctgcgggctctcgaatactattattgggttcaacatctcaccattattatgtgttgatgttaccatattgccaaacaactggaatagttcaatctcgctgcactttctcttatctgtgatagagaaatggatattgtagaatcttaacccgcagcaccttggactgtggacgttcaactgaaaaagatagatctgtaatcaaacaagaaccctacttttcctgctcacttgacccattttgtattcaaaaagttgaatatagtttcaattacttctgatcccgaggcaagagata

SEQ ID NO: 2075 - DNA, 338 bp, Glycine max
  unsure (1)..(338): unsure at all n locations
agctntggagtttccaagtgccaattcgtcttcttcttttgtccagtcttcttctggcttcaattcattagagggctttccttctgtgtccagcatcttgggatgttcccagcctttgatgacagctttccaggttctgctatccagtgatttgaggaaggccaccatccttgctttccagtattcatagttggttccatccagaattggtggtctgttcacttgtcctccttcttttctcatgttcatcagaaattatctccctagatctcactcagtgatttcgagtgcctgctctgataccaattgaaattctgatactggggacagatgtcgta

SEQ ID NO: 2076 - DNA, 398 bp, Glycine max
  unsure (1)..(398): unsure at all n locations
actaagctatgctgcaatattacaatagacctcctcaacctcatcagcttaatcaaccacagcagaacaattatgacctttccagcaacagatacaaccctggatggaggaatcaccctaacctcagatggtctagccctcagcaacaacagcagcctgctcctttcttccaaaatgctgctggcccaagcagaccatacattcctccaccaatccaacaacagcaacaaccccagaaacagccaacagttgaggcccctccacaaccttccctcgaagaacttgtgaggcaaatgactatgcagaacatgcagttttagcaagagaccagagcctncatttagagcttaaccaatcagatgggacaattggctatccaattgaatcaacaacagtcc

SEQ ID NO: 2077 - DNA, 261 bp, Glycine max
atacttagactatcctaaaaaatgatagctctttcaattggaaacccaagattgctaaccagacctttaagtcagatcccatcctttattgcttctattagagcatgcactctacctttgtagtggataaaaccacaatgggctaaagagtttccttccaactatcaagagagttgccaatcatgaatgcgtaccttgtcatagttctccttgcatccaaatctacagcatagtcaaaatctaaataaccaacaagagcac

SEQ ID NO: 2078 - DNA, 289 bp, Glycine max
agcttctcctttgctccctataactgattgcagttctcgagagtgttggacctctttttagcattagggtggaaattagataccgagctattacagagagggtcggagtttcgcctattgtatagaagatggtggaaaatatacttaggtggtttgggcatgtacagagaagaccggaagactctgtattgaagatgagtgacctgatggagagaatgcacacacttcgatgcagatgaagacccacaaagactattcgagaggctatcaagaacgatctcgaacttaa

SEQ ID NO: 2079 - DNA, 412 bp, Glycine max
ctatttcaattacgagcgtctcgatatattacgggattcaatctgacattcgagtaaaaagctatcgtcatttgattttcctgagagcttcagttgtcaatttcgagcatctcgatatactacacgacacaatcggacatccgagtcaaaagttattgtcgtctgatttttcttagagctttagttcttaatttcgagcgtctcgatatactaccggatacaatcggacatccaagtcaaaagttattgttgtttgaattttctcagagcttctgttttcaattacgagcgtctccatatattgcgggactcaatcgggaatccgagtaaaaaggtattgtcgtttgatctttcttagagcttcaagttttaatttcgagcgtctcgatatactacgggacacaatcggaca

SEQ ID NO: 2080 - DNA, 310 bp, Glycine max
  unsure (1)..(310): unsure at all n locations
tctatcctcaattacgagggtctcgatatattacgagactcaatcggacattcgagtcanaagttattgtcggttgactgttcttagaggttccgttttcaatttcgagcgtctcgatatattacacggctcaatcggacatccgagttaaaagttattgtcgtttgatatttctcagaacttcccgtttcaattacgagcgtctcgatatccttcgggactcaatccgacactcgagtcagaagttctagtcgattgaatntactcagagcttctggtttcaattacgagcgtctcgatatattacgag

SEQ ID NO: 2081 - DNA, 322 bp, Glycine max
  unsure (1)..(322): unsure at all n locations
agctntgagaaaaatcanacgacaataagtnttatctcggatgtcctattaagccctgtaatatatcgagacgctcgaagttgaaaacggaagctctaagaanagtccaacaacaataacttttaactcgaatgtccgattgagtcccgtaatatatcgaaacgctcgtaatttaaaacagaagctctgagcaaaatcaaacgacaaatacttttaactccgatgttcgattgagccctataatacatcgagacgctcgatatgaaaacgggagctcttaagaaagtcaaacgacaataacgtttgactcggatgtccgatt

SEQ ID NO: 2082 - DNA, 390 bp, Glycine max
  unsure (1)..(390): unsure at all n locations
agcttactntaagtatttctaatatttctgttgtgggaattcttttgtatntttttaaagcagattcccattcttttatactttnttttaaacaagttagaacctattacttccaaagccagtggaaggccagaagcataagttactgcacgttgcaagacctccacgtaatttggatcagctttttcctttttaaaagctttccatgtaagtaactgaagagcatcgttctcatccaattccttcacctcatatgttgtaataacttgatgaggtgctagcaattgtttgtcccgagttgtgatgatgaatttgctgccgggaccaaaccaatctggtctaccaacaattgcctgtaattgctcgtgcttgtcaacatcgtctagaatc

SEQ ID NO: 2083 - DNA, 379 bp, Glycine max
  unsure (1)..(379): unsure at all n locations
tctatgatcaatcaagattataaagtggtgccctanaagatactgtctccattntttaacagcaatggtgattgtagcgagttcacgaacataagttgaagaagaaagtaacttgcggcaaaactgcttgctaaaaaaagctatcgggtgtcttccttgggacagcaccgcacctatacccgaacctgaggcatctgtctccaccacgaaaggtttcgtgaagtcaggcaatgctaagactggagaatgtgtcatagcatgcttcaatttgttgaaggcaacatcagcttccacggtccagtggaactcttccttggtcaacagacttgtaagtggtgttgccaacgttgcgtagctccttataaatcttcgataaaag

SEQ ID NO: 2084 - DNA, 443 bp, Glycine max
  unsure (1)..(443): unsure at all n locations
ntagcttcttaaggagagtttctcacagaagcttctcaaggaagttttcttaagaaagcttctcaaggaagttacctagtctataaataaaagcatgtgtaacacttgttataactttgatgaatgagagtcttgtaagacacaactcanagttcaacttctctccctttttcttccttcaatttcgtgctccctcctctctttcttttagcaaatgctcacccccccctctaaaatttaattggattgggcttcttccaattcaattaaatntattttcaaccacacacatcaaatattcacttaatgcatgccaaattagaaaactacccctaatacaaaaaactagtctaggtgccctacaatacaagagatgaaaaatcttacatttctagggtaccttaactatattgtggagccctaaatacacggccaaaaataat

SEQ ID NO: 2085 - DNA, 223 bp, Glycine max
  unsure (1)..(223): unsure at all n locations
tgtcctctgccaaccaattntccaacagatttttcttgttctgtttcacaaccaaccgcgataattctaatgattcagaggcatttcagctttccctttgtaaaaagggtcaaaatactgaacagaggaggagttgcccagcttgcacaggaacactcttgcacgtaaaggagataatcggcaccttaacattataactaattgaccaaacaaaaggacacca

SEQ ID NO: 2086 - DNA, 351 bp, Glycine max
  unsure (1)..(351): unsure at all n locations
ctgcagcttatgtaagtcaatttaggaggcatctcggataggatcttttccgtgcatatttgcgcanaatctcttgaactaggaagatgttgtccatcatctttctgttcttaatgaaggcagtttgagtttccccaataatagtctcaagcactggggctatgcggttgaccaaaattttagacataatcttgtataacaaattacaataagatatgggtctaaaatgggtaacctgggagggctaatcatgcttaggaataagtgcaataatagcatggttgatctgctntannaattttctagttgtaaagaattcattaaccgcctcaaagatatcatcaccaatga

SEQ ID NO: 2087 - DNA, 367 bp, Glycine max
agagaggtgcaagtaaggaagcaagtgaagttggatatttcgattggaaagtacaatgataaggtgttttgtgatgttgtttctatggaggccaaccacttactcttggggagaccatggcaatttgataagacggataatcatgatggtttcaccaacaagatccctttcacgtattaaggaaaaaaagatagtgctcaaaccattgagtccacaagaagtgtgtgaggatcaaagaataatgagagagaaaattcttcctacaagagagaacatgagaaagagagctaaacacttgagagttcaaaagtgacgacaataagagggaaacacaagagaggaaaaagatgagtgaaacacttgaagt

SEQ ID NO: 2088 - DNA, 403 bp, Glycine max
  unsure (1)..(403): unsure at all n locations
tttgattgctctggtagagttcccaaacgtcaaagagaatgagaagggattgaagcctncattctgtactgtcttcgtgcaattntgttccctctctccgtggatattagtaaatcccaacagtgaaggtgtgtggaattgaatcgtgaccaacatatcaaaattttacgacaatccaatggttaacgagttcaggatcgtagttttaccgagacagttttggatttctgcgggaaaagaaaaggctacgatgcgaactgtatttctctcagctccgacatgatttcgaaattcccaatggtgaaagtgttcataattgagttgcgaacttggtatttaaatttcacgacgatccaacggtgaatgagtctgagattgtcatttctctgagatagatttggtg

SEQ ID NO: 2089 - DNA, 382 bp, Glycine max
gatgcaacatatggagaggttaatgaaacaacgagatgatgcgctccatgagagggtggatcaaatggagaatagagatcataatgaagaagaaaggaggagaagagggaatgatggtgttcctagacaaaaccgaattgatggtattaaactcaacattcctccatttaaaggaaagaatgatccggaggcctacttggagtgggagatgaaaatagagcatgttttctcatgccacaactatgaggaggaccagaacgtgaagcttgccgccacagagttttccgactatgctcttgtgtggtggaacaagctacaaaaggagagagcaagacatgaagagccaatggttgatacatggacggagatgaacaagatcatg

SEQ ID NO: 2090 - DNA, 284 bp, Glycine max
  unsure (1)..(284): unsure at all n locations
agcttcaagagatcatccnctcgacaacattattggtgatatctcanaaggggtaacaactagacactctcttaaagatttatgcaataatatggcttttgtatccatgattgaacctaaaaatataaaagaagccataatagatcataattggatcattgccatgcaagaagaactaaaccaatttgaaagaaacaatgtgtggaaattagtagaaaaacctgaaaattatcctgtcataggaacaaaatgggtttttagaaataaattagatgaacatggta

SEQ ID NO: 2091 - DNA, 412 bp, Glycine max
acgtgcatttgtgtgcaatacacaattccttgtacaccacaacaaaatggtgtatcagaaaggcggaataaaactttaatggatatagttacgagtatgttaatcaattagactttatccgtatcctctgggatgtataccttgaaaactgccttgtagttgctgaacaaggttcctagtaaggtagttccaaagacaccttttgaactgtggacaaataggatacctaatataaggcacctgcatgtttggggttgccaggcagaaataaggatttataatccgcacgaaagaaaattggatgcaagaacaatcagtggatatttcattggttatcaaaaaaaaaaaaagttaacagggtatatgtctgattggtctaatcatagtatgagaactttcaaaactggaaatg

SEQ ID NO: 2092 - DNA, 317 bp, Glycine max
agcgtctcaatatattacgggactcaatcagacatccgagtaaaaagttatcttcgtttgaattagctctgaggttcagaattcaatttcgagcgtctagatatattacgggactcaatcagacatccgagcaaaaagttattgtcgtttgaattagctcagaacttcataattcaatttcgatcgtctcaatatatttcgggactcaatcagacatctgagtaaaaaaggtatggcgtttgaatttgctgagagcttcaacattcaatttcaagcgtctcgatctattacgggactcaatcagacattcgagtaaa

SEQ ID NO: 2093 - DNA, 394 bp, Glycine max
  unsure (1)..(394): unsure at all n locations
cttataatcgattaccacaagttttttaaactttntataacatcctctagaaatttgaatttaaattctaaagcttgcaatcaattacaacttgtgtgtaatcgattaccagacatgagaattcaaatttcaaatctgaagagtcacaactcttcagaaactaactgtgtgatcgattacaacaattatgtaatcaattaccagcaaggaattgtcgaacataactcccaagagtcacaactgttcaagaagttttgaatggctatcaaggtctataaataggtgacttgngacatgaaattctgaaaaagagaatttcctgacaaattgtctatcctctcaaaccaaattgcttatactctcaaaagaattcttgtcaaacacttcaaattaa

SEQ ID NO: 2094 - DNA, 472 bp, Glycine max
  unsure (1)..(472): unsure at all n locations
taatggcttctttagattctntgtctntcanaagttttttcatgtatagattattccaagatcatgatgaagacgaagtcaatttgtgtctcatgacagaatctgatgagaataacaaagaagattctataatgaagaaatggtacatagacagtggatgttctaagcacatgacgggtgatgtatccaaattcacaaccatttcccccaagaaaagtggacatgttacatatggtgacaacaacaagggcaaaattattggagtaggtaaaataggaacgagttcttctactcctattgaaaatgtgttacttgtagaaggtttgaaacatagtctattaagtgttagtcaattatgtgataaaggatataaagtatctttcgattctgaanaatgtgttattaagcatgagcttgacaaagatattgaacatatacgttttagagaaaataatgtctacatgattgatct

SEQ ID NO: 2095 - DNA, 386 bp, Glycine max
  unsure (1)..(386): unsure at all n locations
ctgagcaaatcgaaatgacaataactntatactcggatgtccggttgagtcccgtaagatatcgagacgctcaaaatttatatccgaagctctgagaaaattgaattgacaataactttatacacggatgtccggttgagtcctgtaatatatcgagacgctgcaaaatgaaaacggaagctcgtaggaaattcaaacgacaataactttttacttggatgtccgactgaatcgggtaatatatcgagacgctcaaaattgagactagaagctttgagcaaattgaaatgacaataactctatacacggatgtccggttgagtcccgtaatatatcgagacgctctcaatttagatccgaagctctgagaaaatcgaattgacaat

SEQ ID NO: 2096 - DNA, 262 bp, Glycine max
  unsure (1)..(262): unsure at all n locations
catgcaagctnntcatttcatatttcgaccatctcgaatattaccggactcatccggacttccgtgtataaacttattgtcaattcaatnttctcagagcttcggatcaaaattttgagcatcttgatatattacgggactcatttagacatccgagtaaaaatttattgtcgttagaatttgatacgagcttccgttttcaatttggagcatctcgagataaaatgagaccctctgtcgggcatcccgaaaaaacgttatt

SEQ ID NO: 2097 - DNA, 420 bp, Glycine max
  unsure (1)..(420): unsure at all n locations
gcttgagcactgagtgaagcttctgtgaatattactacatatatttcttgcatgatactattctncatatgtaattcttcagtgctgcatctaaactcactcacaatatcttcaaagaaacatttatatacatcctgaattattgaaacttgagtatgtgcatcctctatatcatccttaagcttctgaatgggttggaacaaatttttctgtgtcagttggtgctgtgaacaattttccacagaagcagaaagctgggaagatagactcttaaattcctttttcttatctgatagtgtgtccttcagttgatgattctccgattgtaagaagtccaatctatcctttaaactgctaagagattcaatggtttcactgaatggatgtactttctcattttcatcaacggattcattcaat

SEQ ID NO: 2098 - DNA, 374 bp, Glycine max
cttgagaggaatactagagaagctagagcttatttacatacacctctctaatagctaagcgcacctccttgagatgagaagctagagcttatctacgcatcccctataatatctatgctcacccccatgccaaaatacatgaaaatacaaaaaaagtccctactacaaagactactcaaaatgccttgaaatacaaggctaaaaccctatactactagaatggccaaaataaaaggcccacaagaaggaagaacctattataatatttacaaagataagcaggctcatacttagccaatgggcccgaaatctacctcaaggctcatgagaaccctatggccttcccttggatctctggcccaatctacttggag

SEQ ID NO: 2099 - DNA, 332 bp, Glycine max
  unsure (1)..(332): unsure at all n locations
agctagaggaaacccttcgcattgtaccttttatttcccgcaaaacccaaaactgtctcagaaaactatgatcctggatttgttaaccgctggattatattcgaattgngatatgttgttagaaattcaattgcacaaactttcactgttgggatttgcaagataatatttgtggagggagaaaaatgaatcacatgaagatagtgcaagtggagacttcaattccttctcattctctcntaacgttggggaccctatcagagcaaccagaggaatctcaagaacttgttatagatgtctctattcgctgcggaagacatgtgaacccgctt

SEQ ID NO: 2100 - DNA, 424 bp, Glycine max
  unsure (1)..(424): unsure at all n locations
cgcatgcaagcttattgatgttattgcttaatttattggtaatttgttgcgtcttttgacctatgtcattttcttctccggccacaggtatgccaggaatgactgcttatgctggtttctttgaggtaggttctcccaaaaaaggagacactgttttcgtttcagctgcctctggtgctgttggtcaacttgttggccaatttgctaagttgactggttgctatgttgttggaagtgctggaagtaaagagaagggatttgtttaattattgttggtatatgtccctggataaacgaataatcagcttaaatgttggatatttattctactgcttaaaatactattattttgaattaacctaattacaataacagccaccanagccttttctataatgtagagttgaattggcccaattatatt

SEQ ID NO: 2101 - DNA, 458 bp, Glycine max
  unsure (1)..(458): unsure at all n locations
agctgntgcctcanaacacattgnttcccacatcctatgctctagtaatcgattaccagacagtttaatcgattaccagaagacaattttaaaaatcagattttaaaaaaggttttgaattagaatttcgaatcatgtaatcgattactagatgtttgtaatcgattaccagcaacgacacttcagaaaaaactttgaaaagtcatgacccttcaaaatataactgtgtaatcgattaccagtgaagaattttagaaaaagctttttgaaaagacacatatcttcaaacaattttcaaaaggcacaaagggcctatatatgtgtgtctgcattgtaaaatcaagagagagatattctaagagaacttaattgccaagtgctctctcaacaacttttgggaaaaacacttccaaatctattgagaattcatccaggaacttcaaantgtattatcatct

SEQ ID NO: 2102 - DNA, 470 bp, Glycine max
ttaagtcacctgcggcatgcaagcttcttagtttcgtacttggtgacttggcaatcaacgcattgagcaacaaagcgagagacgtcatcttgaaggccgggccaataaaaattggtcatgagacgagccacggtcttggcgacgccggcgtggccaccggtgggggtggcatgatactctgtcagcagggtggtgatgatgggtatatcggaaggcaaccagatacggcctttatacaacagcagtttgtcagcaatggagaactcacggtggtggtcgggatgattctgaacatcaagcatcttttgctgaaaggtcgaattcgtgcgtgactggtcatggagctcatctaaaaaagtgagacaagggacggagagaatgagaaaggcttgagaagctcctttcggtaacctagataaggcatctgctgcctgattatggctccctgagcgatactggatatgataatc

SEQ ID NO: 2103 - DNA, 338 bp, Glycine max
  unsure (1)..(338): unsure at all n locations
agcttgaaattgaacaatggaagatcttgagatattcaatcggtcttaacttttcactcggaagtccgattcaggcgcataatatattgagacgctctcgtgaaattcacatggtcataacttttcactcagaggtccgattcaggcgcataatatatcgagatgcacataattgaacaacggaagctctcgagaaattcatatggtcataccttttaactcggagttctgatctangcgcataatacattgagacgctcgaaattgaacaatggaagctctcgagatttcaaatggtctaactctaactcggaggtccaatcaggcgcaaatatatc

SEQ ID NO: 2104 - DNA, 448 bp, Glycine max
  unsure (1)..(448): unsure at all n locations
agcttctcagatccggtcatggaaagacttggctactgccttcattangcagtaccaatacaacacggatatggctcctgatcggaaccagcttcagagtatgaccaagcgagaacatgagtccattaaagaatatgcccaaaggtggagagatctcgcagcccaagtcgtcccgcccatgactgagagggagatgatcacaattatggtagatacgttgcctacgttctactatgagaagctgataggatacatgccagctaactttgcagacctcgtcttcgccggagaaagaatcgagtccggactgagaaaagggcaatttgaatatgcctccaacgttgcccccaacaacaacagaagagccccagtggtgggcgcgaggaaaaaagaaggagatacccacgcggtcaccaccgccccaacatggatgaaagcgccccaaatg

SEQ ID NO: 2105 - DNA, 418 bp, Glycine max
  unsure (1)..(418): unsure at all n locations
agcttaacctacttaggtttctatgttgaaggattgtggttctatcttntctagagattagattggattaaataaatttttaaggggttgaataaatatctactctaattaattttgattaacatttacagttaaagttaaccattcacattatagtttaacgattaaaatttcaacaattttgtaatttcctttacatattaaagtattttataatgattttagttattagttcttaatgttattaaaaagtcaaaatatcatttgattgcaaacttgtaaactaaatctaaattttcttaaaaaatggacctgacagcgggaggggatttataaccatacatctaatttattctctgttcaatgtagaaaatgcattttgattagattgcgcttcaatagtgtataactaaaaaat

SEQ ID NO: 2106 - DNA, 421 bp, Glycine max
  unsure (1)..(421): unsure at all n locations
agctnggccaattggaagaattgcaaaattntgtctttatatgtcaaatctgcatttcttaatggccctttagatgaagaagtttatattcagcaactccccggatatgaagtcataggcagtgaagacaaggtgtacatacttagaaaggctctatatggactaaaataggctccaagggcctggaataaaagaatagactcctttctacatggtgaagactttaaaaaatatattgtagagcatggtatctatgtgaaggcaactaaggatggtggagtcctgctaatatgcctatatgtggatgatttgctgattatagggagtaatccagctgagatagaaaagttgaagggcaatctcaaatctgaattcgagatgtcagaattaggcttgctatcatacttccttggtattgagt

SEQ ID NO: 2107 - DNA, 421 bp, Glycine max
agcttgtgctattccaagttcattaatcatacctttaagccagaatgcttccttcactccttcagctagggccatgtactctgcttcagttgttgaaagagcaacaactgattgttgatttgctttccaactgattgttgtaccaaacaaagtaaacacatatcctgttaaagatttccttgtgtctacatttcctgcaaaatctgcatctacataacctgtgattgctgcctcatatgctgtcttcttgtaccttaatccaactttcgaagatccatttagataccttagtgtccacttcacaacttcccaatgtgcactgccaggatctcccatgaatctgcttataatacttacagcatgagctaagtcaggtctgctacaaaccattccatacattatgcttcaacaccactggcat

SEQ ID NO: 2108 - DNA, 458 bp, Glycine max
  unsure (1)..(458): unsure at all n locations
agctnggcagctgacattggctttttggaatcattcgcagacatgtcttctgaacctgaaaccagcatctcaggcttgatggtggttgagccgtccatggattgactatgctggtgtctaactctgggcctttcattagtcccaataacaacattctcggtagaagaggtgggtgcccctgacgccggtgttgaagccgatgctcccacagcattagacggctcaaccatttgaaacgtggacgttgccgacgatgaattgaacttatccatatcaaggtacatggacagcaagtcctcctcggcatcatcggagaaggaaggaccatcaccacctccaacaacaccaaggtcactgtcgaaactaatatcatccggtaaagtgagaatctccgaatgagcacgcctatgacctctatttctcggnggattatcaggcattctgctaatatcatgact

SEQ ID NO: 2109 - DNA, 457 bp, Glycine max
  unsure (1)..(457): unsure at all n locations
agcttgtgctccaggaaaccactttttatgatgatcaaatgaangcaaattttctgtcactaatgcatcaccaattgaaaaatttgaatcactaaaactccaagcaagaatcttagcactgtctattatcctccctgttgaataattatttgatatcagtagtgatgtttttgttcttcaactgggtgttgacatcagccacaaacagttcacttttcctggttcctgatgctgtagtagtcttcgtattgtgaaatttgaaattaatattgttgcaaaggcagaacaatggaaatttcaaaatatgaaagtgcgaactcacatgtggaaatctatcaatgaattttgctgcattagcaacttcagtggcagctctgatttcttcatttgttgccccatccttaccataggcaatgttttctttgatgctgcaactgaagagtattggttcctgact

SEQ ID NO: 2110 - DNA, 338 bp, Glycine max
  unsure (1)..(338): unsure at all n locations
agctntgagcaaattcaaacgacaatttctntttattctgatgtccaattgtgtcccataggttatcaagacgctcggaattgaaaacggaagctcttagaaaaatcaaacgacaataatttttaactcggatgtgcgattgagtcccataatatatcgagacgctcataattgaaaactaaagctctgagcaaattcaaacgacaataacttttgactcgaatgtccgattgtgtcctataggatatcgagacgctcgtaattgagaacggaagctctgagaaaaatcaaacgacaataactcttaacttggatgttcgatggagccctgtaatata

SEQ ID NO: 2111 - DNA, 457 bp, Glycine max
gcttgcacacaagattctccttggctggcacttcataactctttggttgggtcttatagatgtcttcctctaaatccccatgcaagaatgcagttttaacatctagctgctccaagtaaagattctctgcagcaacaatactcaaaataactctgatggtagtcatctttacaactggaaaggagtctctgtgatatcaattccctgtttctactgaaaccctttcaccacaagtctcgccttgtatcttcttctaccgtcagattcttcctttagcctacagacccacctattttgtaacgctttctttccttctggcaatttagttaaagaccacgtcttattcttctgaagggatgtcatcttatctttcatcgctagcttccactcaatagtgtcattcccctgcatagcctcactgaaacattctggctcaccaacatcagttaacaacaaa

SEQ ID NO: 2112 - DNA, 361 bp, Glycine max
  unsure (1)..(361): unsure at all n locations
agcttaaacattcaatntcgagcgtctcgatatattacatgactcaatcagacatccgagtaaaaatttattgtcgtttgaattggctcacacgctcaacattcaattttgagcgtctcaatatattacgggactcaatcagacatccgagtaaaaagttattgtcgtttgaataggctcagagctttaacattcaatttcgagcgtctcgatatattacgggactcaatcagacatccgagtaaaaagatattgtcttttgaattggctcagaggttcaacattcaatttcgagcgtctcgatatattacgggactcaatcagacatccgagtaaaaagttattgtcgtttgaattggct

SEQ ID NO: 2113 - DNA, 436 bp, Glycine max
agcttccagcaaggtccttataatcagcaaggtctttgaaggaaacaccccgacaaccagttcaataaagaccagggtggatcctcaaacaagccaattcaacaagggcctaacatctttcagaggacgactaagttggaagagaccttgactcagtttatgcaggtaatgatgtcagatcataatagtattgagtcaacactaaaaaaccttgaggttcaggtgggacaactggccaagcagatagttgacaagtcattcaacagttttggagcaaatacaggcaataatcctaaggaggaatgcaaggctatgatgactaggagtaaaaagtttgtggaagctgaggatgaagagagtgtggtgtacaaggagcaaatgggtgaaaagataggtgctgaggttaaggaaaatgatgtgaagggtaaagagaatc

SEQ ID NO: 2114 - DNA, 383 bp, Glycine max
  unsure (1)..(383): unsure at all n locations
tgcaagctatcccatgacagctaagtgaccgggatatgtcactccggagacagctccaagaagacttgtgggtagctgcacaacatcatgaatctttgcttcgtcagaagtcgagagcaagatgggtcaaggagggagattctaattcccattattttcatttgctagtaaatgcaagaagaagagataattctctgcaaggtttatggattgatggagcttgggttgaagatccgccaagggtcaaggagacaggaagacaatttttcatctgcagattccaaaaagtggttcacaatagacccctcctagatggngtagaatntcagtcattagatcagtaccacaataacttgctgagtgggagatttacggaggaagag

SEQ ID NO: 2115 - DNA, 402 bp, Glycine max
  unsure (1)..(402): unsure at all n locations
agcttgtggagacctttactactaggcagtggtatcttgtggtggacatcttgggtatgcatgttaggtcggctctaactgcaatggtatatcgaaaggggctaaggatatcaagcttggccaagcaaagtcacacgagtggggaggttgttaactacatggctattgatgttcagagggtaggggactactcttggtatcttcatgacatgtggatgcttcctctgcagattgttcttgcccttgcaatnttgtataagaatgttggaattgctgctattgcaacactgattgctacaataatttccatcgtcgtcactgttcctattgccagngtccaagaaaaatatcaagacaaattaatggctgctaacgatgaaaggatgaagaaaacatctgagt

SEQ ID NO: 2116 - DNA, 402 bp, Glycine max
  unsure (1)..(402): unsure at all n locations
agtcacctgcggcatgcaagcttctcattctcacctttctttgcctatagttctccagatatactantttcatgtttggcgctgcatctcaagttcagacttgcgtaaaagtggaagcaactacgagtagcttccacgttttttgtgatagtataacgcgatttgagcattaaatgcatatacttgaagtggctccatgctatgactcttaattcaaaattaagttatttttaatgttttctattttctttgtcatgaatagaaatatgttgatttgaaaaaggagttgagcacaacagatagacatattttgatagaaacgggattcattcgtcaatggtgaacatcctcataagttcatattaaattaccttgctaccctcgaaacacctacagaattga

SEQ ID NO: 2117 - DNA, 459 bp, Glycine max
agcttatgctgcaaacacttataatagaccccctcaacagcttaaccaacaacagaagaataattatgatctttcaagcaacaaatacaatccaggttggaggaatcatctaaatctgagatgggcaagtcctccacaacaacaacagactatccctcctttccagaatgttgctggtccaagcaagccatatgttcctcctccaatgcagcagcaacaacaacaacaacaacaaagacaacaagcaactaaggccccttctcaaccttccttagagaagttagtgaggaaaatgactatccagaatatgcaatttcagcgagacaagagcctccattcagagtctaacaaatcagatggggcagatggctacttagttgaaccaagctcaatcccaaaattctgacaaatttccttcacaaactgtgcagaatccacaaaatgtgagtgtcatcatct

SEQ ID NO: 2118 - DNA, 411 bp, Glycine max
  unsure (1)..(411): unsure at all n locations
agcttcttatactaacgtcacaaggaatgtggttgttagattcataaagaaggaggtganttgtcgatacggactccccaagaagatcattactgataatggcaccaatctaaacaataagatgatgcaggagatgtgcgaagacttcaagatccagcatcataactctaccccttatcggccaaagatgaatggggctgtagaggctgcgaataagaatatcaagaagattggtcaaaagatgacggtgtcatacaaggattggcatgagatgttgcctttcgccctacacggatacagaacctcggtacgaacttctactgggggcaacaccgtattcttggtttatgggatggaggcagtactcccatttgaggtagaagttccttctcagaggataatggcggagtc

SEQ ID NO: 2119 - DNA, 383 bp, Glycine max
  unsure (1)..(383): unsure at all n locations
agcttgtgcatccaataccctgatgaggatgtcccatatgttcttaaaacaggactgattcatttgcttccaaagtttcatggccttgcaggtgaagacccgcacaaacatttgaaagaatttcacattgtctgctccaccatgaaacccccagatgtccaagaggatcacatatttctgaaggcttttcctcattcattagagggagtggcaaaggactggttgtattaccttgctccaaggtccatcacgagctgggatgaccttaagagagtattcttagaaaaatttttccctgcttccaggaccacagccatcaggaaggatatctcangtattagataactcagtggagagagcctgtatgagtactgggagagatt

SEQ ID NO: 2120 - DNA, 422 bp, Glycine max
  unsure (1)..(422): unsure at all n locations
tagtggatgggcctctctacctttctctttgttttcgtgcattcatggtggaaataccattaaggacctcattgaagctcacagatccagcctccgtagaagccccacaagcaagtttccatcatgaactntgaactataattctaaaatgatcaaagttcacaaaatgcacacatatggcctctatttatagcgtaagtgtcacacaaaattggaggaaaatttgaatttctattcaaatttcacatgaattagaaattgaatttgtggagccaaaatttcactaattatgattaatgaattntatntatggttcagcccactaatccaagatcaagtccaagattctccaataagtgtgcttaggtgtcatgagacatgtaaatcatgaacgacatgcacacagtgtgactatatgatgt

SEQ ID NO: 2121 - DNA, 450 bp, Glycine max
  unsure (1)..(450): unsure at all n locations
actcggatgtctgattgagacccgtaatatatccagacgctcgaaattgaataccgaagctcttaaaaaattcaaacaacaataactttntactcggaagtcagattgagtcccgtaatatattatcgagttgctcaaaatggaataccgaagttctgtgcaaattcaaaccacaataactctttactcggatgtctgattcacgcccgtaatatatcgagacgctcgaaaatgaataccgaagctctgagaaaaattctaacgacaacaactttttgctcggctatccgattgagtcctggaaaatatcggaatgctcgaaattgaatgctgaacctctgagcaaattcaaacgacaataacattcttactcgggtgtctgatggagccctgaatatatcgagacgctcgatattatataccgatgctctgagaaaattcacacaacaa

SEQ ID NO: 2122 - DNA, 333 bp, Glycine max
  unsure (1)..(333): unsure at all n locations
tcccttgccgctgcagcttaacattcaatttcagggtttcgattattacgggattcaatcatacatccgagtaaaaagttattggcgtttgaatttgctcagagcttcngcatgcacagtcgagcctctcgatatactacgggactcaatcagaccaccgagtaaaaagttattgtcgtttgaatatgctcagagcttcggcatgcaagttcaagcgtttcgatatattacgggactcaatcagacatccgagtaaaaagttattgtcgtctgaagttgctcagagcttcgataatctatttcgagcgtttcgatatattacgggactcaatc

SEQ ID NO: 2123 - DNA, 378 bp, Glycine max
  unsure (1)..(378): unsure at all n locations
tagccttgttcctncctaccttacatgtttcatcaaacttggttctgaacactcactttgctccaacaacagattatcctttggggagttctacaagctcccatacatcattattctgaaactggtctagctcttcttgcattggtttgacccaatattaatcagacatggnatcatctatgtgtttttgctcaatctcatataagaatgatgtgttcttaagagagttccttctctgtacttatgccataggatcacatatgatctacgctctagatgttgtttcctcaacaggcatacagttggttctctggcctcttcaggttggttgtccactggtgagttagacgcaagttggttctgactcgacacaacagt

SEQ ID NO: 2124 - DNA, 319 bp, Glycine max
agcttgcatgatttacatctccccctttctcaagcaaattcttcttgatatcatcaaaatcttcatgatcccgactcgttggtggaggatgcatgaatgacaatcaattcatggggctccgaataaaagtggagattggaggataggcgaatagcgctaggcaatcaattcgcggtgtttccgactcgttggtggaggatgaatgaatgacaatcaactcatggggcttcgaataaaagtggagaatggaggataggagaatagcgctaggcaatcaattcgcggtgctgcagactcgatggtggaggatgcatgaatg

SEQ ID NO: 2125 - DNA, 340 bp, Glycine max
  unsure (1)..(340): unsure at all n locations
tcagaattcaatttcgatcgtctcgatatattacaggtctcaatcagacatctgaggaanaaagttattgtcgtttgaatttgctgagagcttcaacattcaattttgagcgtctcgatgtattacgggacttaatcagacatccgagttaaaagttattgttgtttgaatttgctgagagcttcaacattcaatttcgagcgtctcgatattttacgggactcaatcagacatccgagttaaaagttattgttgtttgaatttgctgagagcttcaacattcaatttcgagcgtctcgatgttttacgggactcaatcagacatccgagtaaaaagtta

SEQ ID NO: 2126 - DNA, 470 bp, Glycine max
  unsure (1)..(470): unsure at all n locations
tctataaaactaagcttacanatctggcaacagagaaatatatggtaggtacctagtactggtacaaggtttatagtgtgacagcaggaacatctcacacttgtagcaccacgtgtgtacattagcaatgtcgtacagcctccacaataaagttgtgacatgtccattcctgcacgggcaacatgaaattaaagggttccccagatgtaaccatttagttaaagtccaatacatgttaatgaatacttaatcaagctgaatgcatagtttcttatcagattatctctgtctccagctctctccacacacacacacacagagtatcttttaaaataatatgccaatgttagctacacacacaatttcttgattctttttatcttaataaaagcatatagctaacatttctattgatctttcatcatcattgatcttcaatctcttgaagaatctattanacaagcataatc

SEQ ID NO: 2127 - DNA, 472 bp, Glycine max
  unsure (1)..(472): unsure at all n locations
tgtgcctcttcacgtctggaatatgaatgtagcatatagatccaaagacccttaggtgctttgctgatggcttcttcccgttccaagcttcaattggagtcttgtcttttacagacttagttggacatctgttgagtatgtaaacagcagtgtagactgcttcagcccagaatttgttaggtagtcccttctccttgagcatcgatctagctatttccataactgtgcgattctttctctcggacactctattntgttgaggagaatatgagactgtaagttgtcgctcaatgccttcatcctcacaaaatcttttaaactcgcgagaggtgtactttntgccgcgatcacttcttagtacttttatccgttttccactttgattntcagcaagggccttgaactntntgaatactccacagacttctgattttatttaaaanatataccatgtcatctagagaagcatcat

SEQ ID NO: 2128 - DNA, 414 bp, Glycine max
  unsure (1)..(414): unsure at all n locations
tcattaagaggcttcctcaagaagcttcctcgnggcttctntgataagctctctcattagacttctttgagaagcttgatgcaatccttcctacgaagggaccaatcactagaaccaggagcaagaggctccaagaagattgggctagagctgctgaagaaggccctagggttctcatgaaattcagggtagatttctgagcccatgagccaaggttgagtccaattatctntgtacatattagactacgatgtcattatatttggtccttatatttagggcttcatattgtaggtagggtaccctagaaatataggattttttcagcccttgtattttanggcacctagactagttnttgtattaagggtagtcttgtaatttcacatgcactaagtggatatttgatgtgtg

SEQ ID NO: 2129 - DNA, 463 bp, Glycine max
  unsure (1)..(463): unsure at all n locations
tgtcattggtcaatacatccttctatgctaataatcatttaattcgttctctntattgaatggattaattattgtgatgtaaatttcaaaattaaaaatgaagtgaattactcatagaattagaattggtagaatcattaaaagacgatccttttatcaagaaacctcaatttcaactcatttttatttattggctgatatcttataaactaataaagcaaatctatacacctataaaaaaaattgcagctccaatgataatagctggagagactcggtcatatgcatttgcaatatacgcaacaagaaatgccaataatcctgccaacagtgtcccgaatcctctgttgagccctttgcataaagttacccctagaaccaaaagaaattaaaaaaatattaagatcatgcacaaataacatgcnacagaaacacattatntaacataggaatatagaaatat

SEQ ID NO: 2130 - DNA, 282 bp, Glycine max
  unsure (1)..(282): unsure at all n locations
catgcaagctntgaatgctctattctatggagttgacaataatatcttcagactgatcatacacttgcacagtggccaaagatgcatgggagatcctgaaaaccactcatgaaggaacctccaaagtgaagatgtccagattgcaacttgtggctacaaaattctaaaatctgaagatgaaggaggaagaatgtattcatgacttccacatgaacattcttgaaattgccaatgcttgcactgccttgggagagaagatgacagatganaagctggtgagaa

SEQ ID NO: 2131 - DNA, 453 bp, Glycine max
  unsure (1)..(453): unsure at all n locations
tctgaggttgtcgtgtgtatattagaggatatgttcaatgaattatccagacaaggtaatgaaggccttgatatgactttctaggtctaatattaaaaagtgtgaaataaatatgatgcttatttttattgatctatatattattcttgtgtaatgtctaagattattatcctttcaatcgtaaaggaagaaaaaattaagaggaagaccaggcagcatcccaatgagcaatcccacattntgattgaggttgatttacttgctaatattgttgacataaggctttggcaagctcaagaaattatagaattgctcaaacctacggtaagttccttcacaccatgtcttaatcttctgtcctgtgggttatgttgtgtgaatcgactgctatcgagggttactttcatctctggtcagtattattaagtttgtgatccctaacagtgatacata

SEQ ID NO: 2132 - DNA, 463 bp, Glycine max
  unsure (1)..(463): unsure at all n locations
taagcttaatgatcagcacanagccatcatttgtaactatccaggacccagcattaaaaatgtataagctgtaatcaaatagaanattcctttccaatcatcaagattagtatccaaagaanaaaaaaacatgaaaaaaaaggaaattctgatttaatatacaagcactggccactcagtcatgtaccagcattgggcagggctgccataaaggaattgtaagaagactcaagatcaaagtgaagctgcctcgcctgttgttccgtcaactcatcagctgcacccatcttagataaccttgcaatccattccttcattntggttntcccctcaaaatcaggcggcaggaatgtcaacttattaagcgaagcataaaggtccgagagcaatgggtgcacctgatccacagccaccatgttaagtttcaaggaatccattgaagtaataaaattctgaacacact

SEQ ID NO: 2133 - DNA, 421 bp, Glycine max
  unsure (1)..(421): unsure at all n locations
tatccaaacaggaaaaaataacatatgctttctatgcttctgatagacttgaactttatatatttgatcaaataaagagtacactagatgaatttctcaataaatatttataggagaaaaaaataataaggtaaaatgaattaaatntctttgtcttcaactaacacagctaatttaactcataagtacttactgagaagtttatccaaataaggtctaaagcttaatcagataccgaaacgggtatggagggagtaaaantaattttaacaaaaagagtgtgacaaaaaacaatgaaatgaaagagtacttcgaaattggtcttctacaggtgtactgatggcccatccattattacgacagataanaacaacagggggcctcatgactgctgcaaaattcatagcagcatgaaaaatct

SEQ ID NO: 2134 - DNA, 458 bp, Glycine max
cggaagctctcgagaaaatcgagtggtcatatattttcacacagttgttcgattctgcgaaataatatatcgagacgcacgacattgaacaacggaagctctcgagaaatctgaatggtcataacatttcactcggatgttcgatccggggacataacttatcgagacgctcgaaattgaacaaccgaagctctcgacaaattagaatggtcgtaactcttcacgcgaatgttcgattcggggacataactcatctagacgctcgaaattgaacaacggaagctctcgagaaatttgaatggtcataagttttcacacggatgttcgattcgggaacataatatatcaagacactcgaaattgaacaacggaagctctcgagaaaatcgaatggtcataacgttccacacagatgtccgattcagggacataactcatctagacactcgaaattgaac

SEQ ID NO: 2135 - DNA, 392 bp, Glycine max
  unsure (1)..(392): unsure at all n locations
agcttgtaggccttagatcttcttcatcaatgaagtccnttgcttcttgaagatcaatggcagcggaatggagaaggaggaaaggtgattagagatgtcacttcaaggaaaaaatgagtcaaaatcaagttcaccaccataggaagccatggataagagctagaaagtatggaaagatgagtggagggagagggagaaaaaagagggtaccttagtaatgtaggatttttcagcccttgtattttangacacttatanctagttttgtattaagaaataatttataatttcacatgcattaaatgtattatttgatgtgtgtatgttggtagataaaattaattgaattagaagaagcacaatgcacatgatgtactaccatgtgagatgtg

SEQ ID NO: 2136 - DNA, 381 bp, Glycine max
  unsure (1)..(381): unsure at all n locations
agcttgagaatggagaatngcactaagcaatcactacgcatagttccaaactcgaaggtggaggacacatgaacgaaaacacaattcatggggctccgaanaaggggttgagaatggagaattacactaagcaatcactacgcatagctccaaactcgaaggtggaggacacatgaacgataacgcaattcatggtgctccgaaaagattgagaatggagaattgcactacgcaatcactacgcatagctccaaacgcgaaggtggaggacacatgaatgaaaacgcaattcatggcgctccgaaaagaatgagaatggagaattgcactaagcaatcactacgcatagctccaaactcgaaggtggaggacacatgaatg

SEQ ID NO: 2137 - DNA, 424 bp, Glycine max
  unsure (1)..(424): unsure at all n locations
nggacagttcagcagaccacaggtttgtggttaggattcttccctcaggaacccaatgagcatatacatccttcaatgtttgaatggctttttggccttctggggtctccctgcctccaatgaggacacggtccggattgaaaagatcttggattgcagttccctcagcaaggaattcagggtttgaaaggatttggaacttgattcccttgccattgtgagtcaaaattttctctatggcctcagcagttttcacagggacagtggatttctccaccacaatcttgtcactcttggatacatcagcaatcatgcgtgctgcactctcccagtacgttaaatccgcggccttaccggctccaagaccgcgagtttttgtcggggtgttgacagagacaaacactatgtctgcctcatagacatg

SEQ ID NO: 2138 - DNA, 413 bp, Glycine max
  unsure (1)..(413): unsure at all n locations
agctntacattntcgtgaatgtgacaatctatttcttagtggattgattcaccttaacagcccacaaaatcatataagcataattagatgcaacaactcactcatctccaatcttcatatgattgcaccaaatgaaagcccaaacactgatgagaatgttatctcacattcatccaacatttccataaagaactccaagatggaaattggtaaatcatatataagttacaatctttaattgcataattattatatcttgtccttaaatcattcaatgagaatgcatagccctttaattcctagttntttttataaggctactcaagtggtagatcctctcttnaattttttattaaaaaatatgtgatggtaaatattcattttctcattaagttgcaatcttatgtataaaa

SEQ ID NO: 2139 - DNA, 455 bp, Glycine max
tcatgtcaaagagagaacgtttttctctgtccaaaagcactctttgagctttctccaatcaacttaaatgcagcttctgcaccagcaaagttgtttttgtcaggatgaagttggagagcaaacttgctatattgcttcttaattattgcatcaccagctgtctgttcgacctgaagaatttcataccaatccatctcattaccatacaatttctgctcagcagagcagtgcacatcacaaacaacaagcatttgagctatattttccagatcaaggtacagctgctgagcctttagagcaactttgcgagccccaacaaaatccctgttttccatcttcttttcagaatgtccttggcccttaaggcctcttctttattgcagtccatcaaagatccagatgggaaaatattatagtggatgctatggccaagtgaagctacatttaatccaaca

SEQ ID NO: 2140 - DNA, 378 bp, Glycine max
  unsure (1)..(378): unsure at all n locations
gcaagcttgctcagctagctgatataatcatgcatacttttctgatgatgaccgaggaacaattagggatcaacttgaaacttatgtgcttcacgtgagaagaaatgcttctttttccacttgtgaagatgttcaaagtttggctatgaagatggttcaaactgagaaacatttggtatttccattggtttataaacttattgagctagctttgatattgccggtgtcgacagcatccgttgaaagagctttttcagcaatgaagattatcaagtctaaattgcgcaataagatcaacgatgtgtggttcaatgacttgatggtatgttacaccgagcgggagatattcaagtcacttgatgatatngatattattcg

SEQ ID NO: 2141 - DNA, 450 bp, Glycine max
  unsure (1)..(450): unsure at all n locations
tgttagctntaaggaggtacctctgagatactacatacctacattggttgtgcccttaaggtatttaatgatccttttaacggctgttaagtgagattcctttggattggccatatatcttgcacacaagcaaacacttagcatgatatccggtctacttgcagttaggtagagaagtaatccaatcatacctctatatcttaactcatccactgatttacctttctcatctaagtcaaggtaggttgaagttgcattggagtatatgcttctttgcatttttccatacagaatttcttaattagttatatacaataattggttcgactaaggaaggttccattctttatctgcttgacctggagtcaaagaaagaagttcaattctctaatcatatacatctcanattctttctacatacaacttgaaaattccttacacaaaatttca

SEQ ID NO: 2142 - DNA, 445 bp, Glycine max
  unsure (1)..(445): unsure at all n locations
gtacagcagatgtcactctactccaaattcttgaaggatatgtttacaaggaaacataagtacattcactaggaaaacattgtagtggaaggaaattgtagcactgtgattcaaaagatccttccacctaagcataaagaccctgagagtgtaactattccttgttcaattggagaagtcactgtgggaaaggctcttattgacttangagccagtataaatntaatgtcactctccatgtgtagaaggttgggagagttggagataatgcccactaaaatgactttacaaatggttgaccgctctattaccagaccatatggagtaattgaagatgtgctggtcagagtgaaacattttatcttcctgacagacttcgtggtaatggatatctgtgaagatactgacattcctgtaatattgggaagggcattcatgttaactg

SEQ ID NO: 2143 - DNA, 432 bp, Glycine max
agcttcttagtttcagatgatgcagatgggtttgttttacctcatgcactcctctaatgactatggcatcatttctggcgctaaactgctgggagttggaggccatcttctcaattaaatttctggcttcaacaagagtcatgtctccaaaggctccaccactggcagcatctatcatacttctctccatattactgagtccttcataaaaatgttggaaaagaagctgttctgaaatctgatggtgagggcaactggcacatagtttcttaaatcgctcccagtactcatacaggctctctccactgagttgtctaatacctgagatatctttcctgatggctgtggtcctggaagcacggaaaaaaatttctaaaaatactctcttagggtcatcccagctcgtgatggaccttggagcaaggtaataca

SEQ ID NO: 2144 - DNA, 453 bp, Glycine max
  unsure (1)..(453): unsure at all n locations
agcttcattcctttntcactcatgtgtccaagtctttgatgctcacatggttgaattattgacagcctcagtaattgctaccatatcctcatctgcaatcatgtaaagagatcctcgcttctttccacgagccacaatgagattgccttttgttaccttccaagctccatctccaaaaggggtgtaatgtccctcatcatccaactgccctatagatattaaatttctctttaaggcaggaatatgtctgacattgtgcaatgtccatagggatccactagaggtcttaatgttgatatcacctcttccgacaatgtcaagagattttccatctgcaaggtaaactttttcaaatcttccagaaacatagttagacaataaatctttagagggagtagtgtggaacgacgcacctgagtccatgatccatgaatcaacaggactatccaaact

SEQ ID NO: 2145 - DNA, 452 bp, Glycine max
  unsure (1)..(452): unsure at all n locations
ggcttctacattnttcatggtaccaattggttctttctttgtatagcttggatgattcatatgcgttgaggcgcatctctttaagttcctgtagctttaccttcctcctctctctacatgttgtagagtcaaagttgaggaacttcatggcccaataagcttttatttctaactacccttgtaggtggcatgcttttccgtacaccatttgaaacggngagaggccaatgggtggtttgaaggttgttttatatgcccataggcaatcatcaagctttgcagcccaatccttccttgaagtagctacggtcttttctagtatcctcttgatcctccctatttgaaacttcatcttattcatatgtttgtgaataatagggtgatactactttatgttgaacattatagtattggaggacctttgagagttgagcattacaaaagtgtgtacc

SEQ ID NO: 2146 - DNA, 255 bp, Glycine max
  unsure (1)..(255): unsure at all n locations
tcttgtctctctttcttgacttcctcaacgtctcctttacaccttggcttaacgaggcttcatcttgctccttcaagcccttctctacgatatcccacacatcttgagctcctagtagcgccttcatcttgatactcccaattatcatagttgtctttgtgagcatcggcatttggaaaggaaaaccttcattcgccatcttttgaggatctttgagctctgataccacttntgtggaaataaggctttttatgt

SEQ ID NO: 2147 - DNA, 430 bp, Glycine max
agcttatgctgcaaacatttacaatagacctccttaacctcaacaacaaaatcaaccacagcagaacaattatgacctctccagcaatagatacaaccttggatggaggaatcaccctaatctcagatggtctagccctcaacaacaacaacagcaacctgctcctttcttccaaaatgttgctggcccaagcagaccatacattcctccaccaatccaacaacagcaacaaccccagaaacaacaaacagttgaggctcctccgcaaccttccctcgaagaacttgtgaggcaaatgactatgcagaacatgcagttttaacaagagaccagagcctccattcagagcttaactaatcagatgggacaattggctacacaattaaatcaacaacagtcctagaattctgacaagctgccttctcaagct

SEQ ID NO: 2148 - DNA, 375 bp, Glycine max
  unsure (1)..(375): unsure at all n locations
agcttagtcctataccattgttcactgaactctttataactgttggggaacaggtccttaagtttcccacacctaaagtaattcaaggtagtacattaaaagcatattcctgatcctagcaatatttatattcataaataaacatggtaagctgatacatcttttgaaatgttttttatttggaacagtgaatctgtctggatggatgactgatgaagagtttgcaagagagatgattgctggagtaaatccacacattattaagaaacttgaggtaaatttactattgaactgttaagtacataacactantaaacatttatccacttgttaaatttgcagttgataaccttaactcattgcaaattatattta

SEQ ID NO: 2149 - DNA, 379 bp, Glycine max
cacacggaagtccgattcatgcgcataatatatcgagacgctcgaaattgaacaacgtatggtgtcgataaattcaaatggtcataactttgtcaacggatgtccgattatgcacataatatatccagatgctcgaaactaaacatcgacagctctcgagacatacaatggtcataacttttcacacggaagtccgattcaggcgcataatatatcgagaagcttgaaattgaacaacggaagctctcgagaaactcaaatggtcataacttatcacacggacgtctgattcaggcgcttaatatatcgagacgctcgatattgaacaacgcatggtgccgagaaattcaaatggtcataacttgtcacacagatgtct

SEQ ID NO: 2150 - DNA, 340 bp, Glycine max
  unsure (1)..(340): unsure at all n locations
agcttgtaaatgaacaacggaagctctcgagattattaaatggtcataacttatcacacggaagtccgattcagacgcataatatatcgagaagcttgaaaatgaacaatggaagctgtcgagaaattaaatggtcataacttgttacaccgaagtccgattcaggcgcatactatattgagacgctcgaaattgaacaacggangctcttgaaatattaaatggtcataacttattacacgggagtccgattcgacgcatatatattgagaccttgaaattgaacaacgaatgctctcgagaaattcaaatggtcataacttttcaaacggaagtccga

SEQ ID NO: 2151 - DNA, 469 bp, Glycine max
  unsure (1)..(469): unsure at all n locations
tctatggaaactgggatcttgagcttcaatgaagtccttcaatggtgattttcaaccatggagatgcagcggaagataaaggagaagatgtgagatgatgtagcttcatgtagagcttgtaggccttagatcttcttcatcaatagagacttttgcttcttgaagatcaatggcagcggaatggagaaggaggaaaggtgattgtagacgccacttcaaggagaaaatgagtcaagaacaagctcaccaccatatgaagccatggataagagcttgaaggtangagaagatgagtggagggagagagggagaangggcatganatgtatgcctcaaatgaggtttgaacattgaagtgtaatttctcaaatgttcanagttgaaaaaatacacacacaaaagcttctatttatagcctaagtgcacacaaaattggagggaagattgaatttctattcaacttcacttg

SEQ ID NO: 2152 - DNA, 421 bp, Glycine max
agcttctgttttcaatttcgagcgtctcgatatattacgggactcaatcggacatccgagtcaaaagttattgcggtttgaatttgatgtgagactccgttttcaatttgtagcgtctgaatatattatgggactcaatcagacatctgacttgaaagtttttgcggttttaatttctaggggcatctgctctgaatttcgaatgtctcgatacattatgggactcaatcggacatccgagtaaaaagttattgtcgtttgaatttgctacgagattctgttttaaaaatggagcatctcgatgtattacgggactcaattggacatacgagtaaaatgttattgttgtttgaatttgcccagagctctcgttctcaatttggagcgtctcgatatattaccggactcagttggacatccg

SEQ ID NO: 2153 - DNA, 446 bp, Glycine max
  unsure (1)..(446): unsure at all n locations
aattactttggttcggtcaaaattatttattttaggataatttatttttaccaaaatgtgtaggcttttatttttctttttattactaattatagggatgcaatctttgttttgtaaagccataagtccacttgtatgttcttcagttaattttggaattatgcttttttcaaaattttcgtaaagaaaatctacagttttttctatttggtttagtctgatttccaaagtggaaatcctattgttcataattttatttccatgatcattttctttcttaaagtctggaaattctattttcagaatagtttgtacactagttntgcagaaattcttatagcataaactacagtgagctcttagtgttttgtgtggatatcttttacagaaataacattctttgtgatctggtcctatgtggaattgtatttcatgttcatggtcat

SEQ ID NO: 2154 - DNA, 472 bp, Glycine max
atactcaagcttcttagtttcagatgatgcagctgagtttgtagttacctcatgcactcctctaatgactatagcatcatttctggcactaaactgctgggagttggaagccatcttcttaattaaatttttggcttcagcaggagtcatgtctccaagggctccaccactggcagcatctatcatacttctctccatattactgagtccttcataaaaatattggagaagcagctgctctgaaatctgatggtgagggcaactggcacatagttttttaaatctctcctagtattcatacaagctctctccattgagttgtctaatacctgagatatcctttctgatggatgtggtcctggaagcaaggaaaatgttttctaagaatactctcttcaggtcatcctagctcgtgatggaccgtggagcaaggtaatacaaccagtcctttgccactccctctaaagaatat

SEQ ID NO: 2155 - DNA, 458 bp, Glycine max
  unsure (1)..(458): unsure at all n locations
ntattcttaattttcttgaacttgataattgggaatttgctttatttntgacaatacactntcccattcgtcaatcctcctaccatgtaagtaagatccaagaacttcaagagctagtagtagtcctccacaataagcaactacatttcttgcaagttcattgaagtcttcttttggatttggttctccaaaagcgtgaaaacaaaaaagctcaagagactcattttcgtccatttcctccatttcataaacataatcaactntaaataggttcagtacacctgcatctcttgttgtaatgattattacagatccttgaccgaaccattcacaatttccacataaatcttctaattggcgaatctccttcacatcatcaagtacaatgagcaccctttttcctgaaagtctattctctatcatagttggtcccatcccaatgctatgtatcttgacct

SEQ ID NO: 2156 - DNA, 458 bp, Glycine max
  unsure (1)..(458): unsure at all n locations
tttgagcaattcaaatggtcataaatagtcactcggaggtcttattcangcacataatttatcgagacgctctaaattgaacaacggaagctctcagaaaatttaaatgctcataacttttaactcggaggtccgattcatgcggataatatatcgagacgctccaaattgaacaatggaagcttttgagcaattcaaatggtcataaatagtcactcggaggtccgattcaggcgcataatttatcgagacgctctaaattgaacaacggaagctctcagaaaattcaaatgctcataacttttaactcggaggtccgattcaggcggataatatatcgagacgctccaaattgaacaatggaagctgttgagcaattcatatggtcataactattcactcggaggtccgattcaggcgcataatttatcgagacgctcgaaattgacaacggaagc

SEQ ID NO: 2157 - DNA, 397 bp, Glycine max
  unsure (1)..(397): unsure at all n locations
ctaagctgaatagacattcgtgtgaaagtatgacatttgatttttcgagagtttccgatgtttaatttcgagcgcatcgatatattataagcctgaatcggacatccgtgtgaaaagttatgaccatttgaattttagagagttcccgatgttgaatttcgagtgtatcgatatattatacacctgaatcggaccttagtggtaaaagttatgaccatcntgaattcacgagaagctttgttgttcaatttcgagtgtcactatatgtgatgcgccaaaattggacattcgagttaaatgttatgagcatttgaatttctcaagagcttccaatgttcaattctgagcgtttcgatatgtgatttgcctgaatcggacatccgtgtcaaaagttatg

SEQ ID NO: 2158 - DNA, 341 bp, Glycine max
agcttcaacctagaggagacggaccattccaagtgttggagaatatcaacgacaatgcctacaagattgacttgcctagtgagtataatgtaagtgccactttcaatgtgtctgatctatctctttttgatgcagatggaggagccttggatttgaggacaaatccttttcaagaaggagggagtgatgaagacataaccaagggcaaggaccatgaagcacttgaaggttccatgaccagaggcagacttaaacaagcccaacacgttatagagacaacgctggtcatttgtatagctgccattgatgatgattgaaggcccaagtggagaaagatgaat

SEQ ID NO: 2159 - DNA, 462 bp, Glycine max
gtcttatttcagcagatgaagatgaatccatggccacatcatggactcctctaaggacaatagcatcatttcttgcactgaattgttgggagttggaagccatcttctcaatcagattcctagcctcaacaggagtcatatcaccaagagctccaccactggcagcatcaatcatactcctctccaggttgctaagtccctcatagaaatattgcagaaggagttgctcagaaatctggtggtgaggacagcttgcacacaatttcttgaatctttcccattactcatacaagctctctccactaagtttccagatgcctgaaatgtcttttctgatggcagtggtcctagatgcaaggaagaatttctccaagaacacactcttaaggtcatcccagctggaaatggacctcagagcaaggtagtacaaccaatccttcgccactccctccagagtataaa

SEQ ID NO: 2160 - DNA, 456 bp, Glycine max
  unsure (1)..(456): unsure at all n locations
agcttctaaactntatacaagaatgaagctctgataccacttgttagacatgtggcctcagatatcttaagaaggggggttgaattaagatattacaaactgtttccccaattaaaaattctactttgattctaatgcaagttccaagttcccttaaagatgaatttctaaatgatgattcaaattaaacaatctgaatgtaactgttaagcaacaataaataaaagagtttaagggaagagaaagtgtaaacacagtttttatacaggttcggcaaagtccgttgcctacgtccgatccccaagaaagccgcttgggagttccactatctcgtaatcctttacaccttctgaaacacacaaggacatcccttcctttgtgttcagatgctttacaacaagagactctcagtctcttagccctttgatcagaaagagaggaagaagaaatgatctt

SEQ ID NO: 2161 - DNA, 452 bp, Glycine max
  unsure (1)..(452): unsure at all n locations
tctaccctggatcgaatggtcacataacacctcttgtaacgtctgcacaggcacaactccttatgaggtgacgtttggaagaaagccatttaactttccagagtatatcaaaggaacatctaacatcgaagcattgaatgcttattgactgacaaagatgccactttccaaacgattcgcaaaaagcttcttaaagcacaggaagctatgaaaaagtaggccgatagcaagaggcgcaacaggcaataccagataggtgattgggtcttgctccggcttcgtcctctccaccagacatcagccaaagggcctcaaatagcttctggtaaactcgcaaaacgattctatggacccttccaggtaatagatcgcattggcattatggcctacaaactgaaattgccggagacagctaanatccaccctgtgttccattgctctaaacttaaacc

SEQ ID NO: 2162 - DNA, 411 bp, Glycine max
  unsure (1)..(411): unsure at all n locations
agaagtagtatatttcaccttcaaaccaattcaatcaactatcaaatatganattacaacacataaaggcgccaatgaaccgaatagcactcaaaaaagagtacatcgcatgctaaacgtgacttacaggaaacgcattatagaccatgtgatgctcaatatcaagcagctccccagtctccaaacacgaaggtctgtgaactggaaagctagttttgagaaactgttccaatcgatgcgcatcgatgtttgatctgtagcctccgtctcactaaaaccaatcagaaccacgttcacttcaagcggaactcgaaacgggacctacacgaaccacagactaaagcattcacacttaatataacacatcaattaattggatagcgaatgtgaatttgatttttgtggtgacca

SEQ ID NO: 2163 - DNA, 448 bp, Glycine max
agcttagaaagacaatacttcattcatgacatcaaataaactttaaagtcatccgcaatattcaaataaaacatatatgaattattggaaaagataaaacacaatgccaaatgtgagtgcataccactagtcatatatcattaaagtaattaagtttaagacacataatcatgaacaacctagagcacgtcaatataatcataatgttcagtcatactaagcaagtgttaaaagaaatactaagtattcaaatgtcataaaaacatagtcaaagacaaggcttaaaaacaaaatataattataatctaaatatattatcagagaatctaagcttaggtttaagtaacaaaaattagttatgaacacatacatggtgactcattacttatcttgattaattaaccactagattttaagtatgatataacaatcatgaacacatatcata

SEQ ID NO: 2164 - DNA, 455 bp, Glycine max
  unsure (1)..(455): unsure at all n locations
ntggaagcaatcttgtattggtgcttccttcatcattcctgtttatgccttcagcaaccaagtcaaacagtaggggggccaaaggatccctttgtctcaaacctctttgaggcttaaattcagaggttgggcttccattcactagaatagatatagaggctgatgtgaggcaccccttattccatccaatccatatatcatggaaccccattcttctcatcatataaaanaggaattgtcaagacattgaatcataggctttttcgaaatccactttataaagacacacccacacacacacacacacatttcctctcaactaccttatttgcaaccagaacaccatggagctactgtctacccttcacacagacacacccacacacacacacattcacgttgggacacacccactcatactcacacacacacactcactcggacacacacgcaca

SEQ ID NO: 2165 - DNA, 448 bp, Glycine max
  unsure (1)..(448): unsure at all n locations
agcttcaagaaaaagatggcctcagcaaattccttatttccagaagggaattctatcaatagacctccaatctttaatggagagggttaccactactggaaaacccgaatgcaaatttttatcgaggcaatagatctaaatatctgggaagccattgaaatagggccttatatacccaccacagtagaaagaagttcaatagatggtagttcatcaagtgaaagcataaccatagaaaaacctagagatagatggtctgaagaggatagaaaacgagtacaatacaacctaaaagccaaaaacataataacatctgccctaggaatggatgaatatttcagagtttcaaattgcaagagtgctaaggaaatgtgggacactcttcgataacacatgaaggaactacagatgttaaaagatctangataaatgcactaactcatgagta

SEQ ID NO: 2166 - DNA, 435 bp, Glycine max
  unsure (1)..(435): unsure at all n locations
agcttgccttgccccttgatatatttaagggactcatggacactatgaatgaaaaattccttgggataaaggtagtgttgtcatgtattcaaagcccgcactaaggcatacaactccttatcataagttgaatagttaagggtacaaccacttatcttttcactaaaataagcaattggatggccttcttgcatcaacacagccccaatcccaacatttgaagcatcacactcaatttcaatagatttttgaaagtttggcaacgcacgtatgggggcattacttagcttttgcttaagaacattgaaagcttcttcttgtttctctccccattcgaaaccaacatttctcttgagcacttcatttagaggtgctgccaatgtgctataattcttcacaaatcgttataaaaacttgctnaccatgaaactctca

SEQ ID NO: 2167 - DNA, 430 bp, Glycine max
  unsure (1)..(430): unsure at all n locations
agctntatgngatgtaaagacctgcaacttctctattgatcatgctggagaaggaaatgaagtgcaactaagtgagctagatgagatccgtttacaagcctatgagaattccaaattctacaaggagaagaccaagaagttccatgaaaacttgatagctaaaaaggactntgtggttggacagaaagttttattgtataactctaggctcggactcaagagtggtaagttgaggtcaaagtggattggtccttttgtggtggctaatgtttttccttatggtacagttgagatcaaaagtgaatccacatataagagttncaaggtcaatggacaccggctgaaaccattcctcataaatcccttcttagcggatgtagtggtggaggagaccctcttacttcaccctacttctcttccgccatgactt

SEQ ID NO: 2168 - DNA, 306 bp, Glycine max
  unsure (1)..(306): unsure at all n locations
agcttgtagggttaaagtctcacgattgtcatgtgttgatgtaacatcttgccaaacaaagtcaggttagccataactcgcctgtgctttttcttccatgccatatatagcaaagtcgttgatcctgtcaagtatgatgagctggaaaatgaggccgaaattatactatgccagttggagatgtatttttcccctgctntctttgacatcatgattcacttgattatggatctggtcagagaaatcaaatgttgtggtcctgtttatctgtggtggatgtacccggctgagcaatacatgaagatc

SEQ ID NO: 2169 - DNA, 455 bp, Glycine max
  unsure (1)..(455): unsure at all n locations
ntacattactcctcatgcttctcaccatgtctaataagggtttatttcttcgntctgccacaccattctgatccggagaaccaggcatagtgtattgggcaacaatcccatgttcttgaagaaattttgcaaatgaacctggtgcttgtccatcctctgtgtatctaccatagtactccccacctctatctgatctcacgatcttaatttgttttccacattgtttctcaacttcagccttaaaaactttaaaggcatctaaagcttcattcttagaatgaagtaagtagagatacatatatcgtgaataatcatctataaaggttatgaagtatttcggactatttgcatccatgtctggacaacatatgtctgtatgtatgatttctaataaattagaactcctctttgcaccttcttagacttgttagtttgcttacccttaatgcaatcta

SEQ ID NO: 2170 - DNA, 462 bp, Glycine max
actaagcttgtgctgtgtacttttactctctcaactctcaattactggggcctttagcttgcgtttgtgtccttctatgctatattatgcagtaaaaagatttgagagatttttcttacagtaaaacactaaaacattctgtacttcatgatatggttttgaagttctgaggggacattttattttcctgtggtggtttgcatcttttgcaagtatcagataacactccttgatggggttgggagtgtttggttctgttctggttttggcactcttattcaagcatttggcatctcaacttccaaatactgatgagttctctgtgtctgagttcttgaagaagatgatgggtttagcatctttccaaggctacaacttctctgcttctgtctgttcatggaaaggggtttcttgtgatgccaatagagaacatgttgctgacttagtcttttctggtatgga

SEQ ID NO: 2171 - DNA, 532 bp, Glycine max
  unsure (1)..(532): unsure at all n locations
tcaggctgctcaattgctccaggttgctgcatggaagggcaaaggtctgtatggtggtcatcagaggagcacaaaccacaaacccttgcgacaggtacaaatttctgattcaaggccagctgggttaccaagttgaccaacgcatccagtttgccttcaagcttcttagtttcagatgatgcagatgggtttgtagctacctcatgcactcctctaatgactatggcatcatttctggcactaaactgctgggagttggaggccatcttctcaattaaatttctggcttcagtaagagtcatgtctccaagggctccaccactggcagcatctatcatacttctctccatattactgagtccttcataaaaatattggagaagaagttgttctgaaatctgatggtgagggcaactggcacatagtttcttaaatctctcccagtactcatacaagctctctccactgagttgtctaatacctgagatatccttcctgatggctgtggtccttgaaacanggaaaaattttt

SEQ ID NO: 2172 - DNA, 514 bp, Glycine max
agcttcacatggagctatatcatgtggtatcaagagcaacttcttctatgtaatgttcttttgctttctctatcttttgttcagtcaattcactttcattccttgttcttcatcttattctccatgtatctcttccattttcttatggtttggtgttttttagagtggatccaaaaaaataaatcgattaaatcttagatctacacttgttcttgcatttctatggttcaaattttataaatctactcttgaatcatgtttttgtgttgattttaggttctataatttttcagtcataatcttcttgtactaaacctttaaatttcaattttcttgcaaaatattgattagaaaagaaaacacaaaaatctaagtgtaaatcacttaatccatgttgtcttagagtcatgtttagtcataataattgtcacattatgttctaagtttgcgttcattttttattttgttgattgaattctagataccatttttttatttattcttgcaattctta

SEQ ID NO: 2173 - DNA, 317 bp, Glycine max
agcttgaaattgaacaacggaagctctcgagaaattttttgtgttataaatttacacacagatgctcgatccggggaaataatatattggagacgcacgaaattgaactacggatgctctagacacaggtgaatggtgataacatgtcactcggatgggcgagactgtgccaatttctatccagacgcttgaagtcgaacaaccgattgtctaaacatattacaatggacgcaactgtttacgcgaatgttcgattgggggacaaaactcatgctgacgctcgaaatggaacaacggaagctctatagaaattcgaa

SEQ ID NO: 2174 - DNA, 537 bp, Glycine max
  unsure (1)..(537): unsure at all n locations
gtttgatcttctgattcacgtgcttaaaatgctctcgatacttttattcttcctctcaaactctttgaactcttccttgcacttcctcatatcattatctaactcctattttatgaaaatgaaagaaaaaaacaatgactagattacttcctcaaaagcttatcattaagaatcatatgaccagcaatataatcatgcaaactgattcaattagaaaacccgtctcatccaaacctcttgtcttttcatatagttgttgggcgcagtttcaagctctttgagagtttgttcactatcttggattttatccctggaataagataccaccatgttcttcgcgaggaaagaattcaaattcaccaaataaagaaaaaaaaattccccattgaaatccaaatgtacctttctgccttgagatntcttttagagtagcaacattcccttgtaactcattcatttttccacctgtatcatcaagggccaactttgtagctttctgtgccatttaaacagagacaactccttaacatgtatgct

SEQ ID NO: 2175 - DNA, 500 bp, Glycine max
agcttgtagggttaaagtctcacgattgtcatgtgttgattcatcatcttgccaaacaaagtcaggttagccataactcgcctgtgctttttcttccatgccatatatagcaaagtcgttgatcctgtcaagtatgatgagctggaaaatgaggccgaaattatactatgccagttggagatgtatttttcccctgctttctttgacatcatgattcacttgattatggatctggtcagagaaatcaaatgttgtggtcctgtttatttgtggtggatgtacccggttgagcaatacatgaagatcttaaaagggtatacaaagaatccttatcatctagaagcatctattgttgagaggtacattgcaaaagaagtcattgaattttgttcagaatacattgagaaggctaaacctattggccttcctgagtctcggcatgatgacaaagtgggtggtaagggttcaagaagactgcatgtgatcactccaagtctaaa

SEQ ID NO: 2176 - DNA, 475 bp, Glycine max
tccgactatgctcttgtgtggtggaacaagcttcataggtttatacaagaaatgaagagcccatggttgatacatggacggagatgaaaaagatcatgaagaagcggtatgtgccggctagttactcaagggacttgaaattcaagctccaaaaactaacccaaggcaacaagggggttgaggagtatttcaaggaaatggatgtgctcatgattcaagcaaatattgaagaagatgaggaggcaactatggctcgatttcttaatggtttgactaatgatatccatgatattgctgagctgcaggagtttgttgaaatggatgatttgcttcacaagatgtccgattcagtagcataatataacgagacactctaaattgaacaacggatactctcgagaaattcaaatggtaataacttttaactcggaagtccgattcatgcgcataatatatcgagacgcctgaaattgaa

SEQ ID NO: 2177 - DNA, 500 bp, Glycine max
  unsure (1)..(500): unsure at all n locations
agcttgtaccttcacagtctacaaaatcgcattctaaattgattgagaggtgttttggctaaagaaaactttagattttttgtattttagagcccggccaaatgcagcttcctaatcacaaaagatattcttcaaaataacattatcttgcaaattttctctagaaaacaatcatccacgaataataaatgcaaaatcccaggtgctttcccacaaatcttaatgccatgaatatccctcctattttcaacccttctcaataaagatgtaagaccttgagctaaaattataaatataaaaaagggagaagggatctccttgccagagatctcccaggggagataggatcaaccttgtcatgattcactaccactacatactaaacagttttgacacacatcatcatccactcggtccattgattgcaaaatcacaacttgacaaggattgcatctagaaaccccagtcaacgaggtcatangccttacatatatcaatct

SEQ ID NO: 2178 - DNA, 529 bp, Glycine max
tgatggacgaatggcctcactccaagcaacaagaatgttcaccgcaggagctcctaagttaggctttagaatttcaagggtgagaaaattaggccttcttgatgaaaatgctggtactacaggagatggtttgattcccaaccttgtgcctttaaaagctagagttgcagtagaacttttacttgataggagataacttttgagcttttttccttctttctctcctatttcaactactagaaggaggtgagaatctgcaaccaattcttctccattggcttccgtgtttgtgagaatcattcccacccctcctaaacttctcaccacatcacccttttgcactctaggactaaggcttctatcacaaattactatctttcctgacagcactttaggatccaaggtcccttccaagcatatagatcttggatcaaccctactagaattgctcaccatgtaccacccaaggtattgtttctcaattgatagcacatttttccatttatagagtgaaactccaatcattttt

SEQ ID NO: 2179 - DNA, 515 bp, Glycine max
agcttgatagacctgtaattcttacacttgctgggttaccactctcaacattgggcaatgcttgtccgtacttaggggctcgacaaaattatcaccccctacctgtcaaggctaccaccccggacattagacaatcttcaacgcaggacaatctcttttgcctgcaagtcggctcagagcttggtgttagacaagtggcctcagaaatcttaagaagggggggttgaattaagattatgctaactattcccccaattaaaacctactcagatttttatgcaagttctaagtttcctttataacaaattacttagatgatgaatcaaatgagcaaactgaaatgagactaataaacaacagtaaatataagagataaagggaagagagaatgcaaaaccaaatttatgctgcttcggtcacacccttgtgcctacgtccagtccccaagcaacccgcttgagagttccactatctttgtacattctttacaagtactgaacaccacaaggactttc

SEQ ID NO: 2180 - DNA, 364 bp, Glycine max
  unsure (1)..(364): unsure at all n locations
tctaaactttatacaagaatggagctctgataccatttgntaatttatttttctcagatatcttaagaagggggattgaattaagatatcacaaactattccctaattaaaaattctattttgattttaacccaaatcccaagattccttttaaaatgaattcctaaataattattcaaattaaacttactgaatagaagccatatacaataagaaataaaagagtttaagggaagagaaagtgcaaactcaattttatactggttcgaccacacccttgtgccttcgtcgagtccccaagcaacccgcttgagagtttcactagcttggaaaaatcctttacaagctctttaccacacaagga

SEQ ID NO: 2181 - DNA, 415 bp, Glycine max
agcttttggtacaatgaagaagaagaagttcaaagagattttatgcttgtaaaggattgtaagagattgattggaagagtattcaagattgaatgaattaatagaaaatgcaaaaacaaagtcttgcttttatagactcttcatgtctggtcaagaagaccatttagaagagttataacatttagaaaagcttaaaaccaatttgaaaaagtcaaaaaccttttgaagagttacatcttttgatttattcagaaacagtcactggtaatcaattactaaatcagtgtaatcgattacacaaagcttttatgtgaaaagatgtgactcttcacatttgaatttgaatttcaacgttcaaaggcactggtaatcaattaccaaaacattgtaatcgattacagctttttgaaattaa

SEQ ID NO: 2182 - DNA, 554 bp, Glycine max
gctgcatgcatgctatcttgccattgataggttcacgaatcttgggaaaccatttacctcaaatcctctgcctcacacctccgaactcgcaatcggagttatgaggccctccctttcgtatgatgcatccttttgtagaacctttcgcttgaaccatgtgaatcactatcgccccattttgtgtacaaccaacttagggctgcctgatgtacttcttccactttgtaagagaggcctccacagaatcactttcagcactgcaacatttccgcgatttcctgtttctgcggccattccgaaaccaacaaataaacagaaacatgttgcgactttgcacttactttcttcaataaaacgttggctaacgtctcagactcgacacaatcacatattgaaacataacggaagcataacaaaacggagcttatgcagctaccacaaattgattataacaaatagcgcgtgaattgagactataaagaatatttacattgtccttcaatcaatcataaactatcctgtgtgacaatccatgaaaaataaatttgactgaa

SEQ ID NO: 2183 - DNA, 615 bp, Glycine max
tttatgagtggccaatataccaaaatcaacatttttttaactaaagtttttgttttattttctttttaatgtaaaaatgtgtaaaactagttgacactcctctgtaattggtttggataggatgttaagtacatgtaaggactattagtagcaaaatttcatcttgttgttcaagtctaaattataagcaatcataagtttacaattattcaactagtttttaagtgttaggagaatctacgtgaaaaagatcatccacatcaaataaaattttagtaacatcaaaagagaatcaaatttatatccacaaaaaagataagagtcatttttagatttttattaatttgtatcgacctgtcttgttataaaaatttaaaatagttctttttttaattattttatacttaatagttcttattaaaattaaaagatttatcatatagacagtataataatttgtgaataaataatataaaaaagtaaataaattatataataatcataattataatatataataaacttattgaattttaaataattaaatatgcacactgaaatttgattaatagtcaacataattctcatatacataaaattaaaaacataaaaaat

SEQ ID NO: 2184 - DNA, 605 bp, Glycine max
agcttcaggaacacaaaatggaactcatgagactaaatcttcatgaagaaaatgacaagaaaaagaaaggaatgacacttaaagttttatcttcagttcaagaagaaagtgataaagaagacttgaatgaagtagaagagatgatgatttcagtttcttcgtaaagagattaaataaattcctaagaaacaaagaaaatcaaagaagatcaaacttcaaaccaaagaaaagaggagaggattcatcttttgttccaaagtgttatgaatgtaaccaaccaggacatctgagagttgattacccgagtttcaagaaaagaatggaaagatctaagaggaaaactttcaatgataagaaagcaaataaagcttacatcacttgggaatataacaatatggattcatccgaagactcagaaaatgaagtcatgaatctaagtcttatggcaaaaaaatatgaaagcgaagaagaggtaacatcttctaacaataacttatctatttcctttgatgaacttcaagatgcattcactgatttacataaagaatcagtcaaacttgcaaaacttgtttcattttccaagaaaactattttaaacttagaaa

SEQ ID NO: 2185 - DNA, 467 bp, Glycine max
ctacctgcatgcatgcttcacaattatgaactcgtagctactatagaattttcattatatgattcattatagtttactgctctatgtacattctttctaactatttctagcatttttcccccgttcaaaatcatcattcctgttttgatgctctacaacatctcatgttaaagtctctttgaactatccataacatatgatgatgtacaattcccccatcccacgcaaagtcatctattataactttagatgaactcattgtcaatgacgtaattgaaagtccatattttccatctctaatggatagagaacaacatattaaaggcagtggtgatcttcgtagctgctccaacaacactgaaactgacattcctcctatttctaatccaagcattgataaagtaattacatcaagtccagatgcaagatttgttaaaaaaaggcgacatcgttgcttggaggtaaca

SEQ ID NO: 2186 - DNA, 509 bp, Glycine max
ggtcggatttatcgtgaggctctttgatagaagtctgtcagtggggtcgatttttgagcataacccaatcccctatttggtaattaacgtcacagtgtcgagtatctgcgtgttgtttcattaaagcctgggccttgatcagcttcttttagatgtagttgaagttgtcttccctatgggccaatattgcatcgacgacagcaacgtttgaagttcctattccgggaaattaaaaggcttatggacaaacattatttcatatggtgtagtgtcggtgccgacattccacgaggtattatacgaacactcgacccaagggagtaatttgtgttatgtccccggtcatcggtgaacaaaagtgcacagatactgttcaacgacgcgattcagaactttggtttggctgtcactttgcagttgataagctgagctcatccgcaattttgtaccactcaatcaaaaaattcttgccaaaagtgactgacaaagagtaggtcacaaatcgagac

SEQ ID NO: 2187 - DNA, 563 bp, Glycine max
agctttgaggagcccgcaaggtaatctggaaaggagaatgttttgtgtccaaatattatctcgtaaggtgtggagcctgtgctactattccacgaagtgttatgggataactcaacccacggcaataacttgccccatgtttctggccaacgatgcacaaaggcacgcaaatattgttcaattaccctgttcattacctctacctgaccatcactctgaggatggtaggcagaactcattcgaagatgagtgccactcagtctaaagagctctttctagaagccgctgatgaataagggatcatggactgaaactaagcttctgggaatgccgtggagtttgacaacaatgtcaatgaacaacaaaggtaccatgtgagctgtatgagcctgaggtataatgccgaagtgaatcccctttgaaaagcggtcaacaaccacaaggagtacaatcttgccctgaaaaaaaggaagaccaatgacgaaatcaagggagaggtcctcccatggtctgaatggaactggaagagggcacaacaagcccacaatatgtttcgtttcata

SEQ ID NO: 2188 - DNA, 541 bp, Glycine max
agcttgtagggttaaagtctcacgattgtcacgtgttgatgcaacaattgttagccgtggctatacgagacatcttgccaaacaaagtcaggttagccataactcgcttgtgttttttcttccatgtcatatgtaacaaagtcgttgatcctgtcaagctttagtcaaacagaaaaatccaaaaatgtcaaagaattgggtgttgaaaaagcataacaagactttctgtgattggattaaagatacaatctttgcagatgaaaatgcttcagaaacattaagaaatctagtagatgggcctaaaagaaatgttattacttggcaaggatacgacataaacaagtattcattttacacaagagcacaagacgataaaagtacaatgcacaatagtggggtcaccctaagggctgaatctcaacaacttgcaagtgtgcatgatgtcaatccctatgtagcttccatcccttactttgggttcattcatgaaatttgggagcttaactatgggaaatctactgtttggctttccaaaggaaat

SEQ ID NO: 2189 - DNA, 551 bp, Glycine max
tgtagggttaaagtctcacaattgtcacgtgttaatgcaacaattgttagccgtggctatatgagacatcttgcgaaacaaagtcaggttagccatgactcgcctgtgctttttcttccatgccatatgtagcaaagtcgttgatcctgtcaagtttgatgagcagtgaaatgaggctgcaattatactgtgccagttggagatgtattttccccctgctttctttgacataatgattcacttgattgtgcagtggatgtacccggttgagcgatacatgaagatcttaaaagggtatacaaagaatcaatatcgtctagaagcatctattgttgagaggtacattgtagaagaagccattgaattttgtttagaatacattgagaaggctaaacctgttgaccttcctgagtctcgacatgatgacggagtgggtggtaatggttcaagaggactgcatgtgatcactccaagtctagaagatttgttacaagctcacttgtttgtcttgaacaacaataatgaaagtttgccatacatacttaagcatg

SEQ ID NO: 2190 - DNA, 530 bp, Glycine max
agctttgatgtttgtgttgaatgcattaaaggtaaacagattcataagcaagaaattaggtgcatatagagctacagacgtgttgaaattgatacatacaaacatttgtgggtcatttcgtacacctttatggaatggtcaccaatattttatatcattcatagacgattactctagatatgcatacctgtttcttatacatgaaaagtcacaatctctggatgtgttcaaaaaatttaaagttgaagttgaaaatcaaatcaacaaaagaatcaagagtgtcagatctgaccgtggtggagaatactatggaagatatgatggttcaggtgaacagcgtccggggccttttgccaagtacctagaggaatgtggaatcgtcccacagtacaccatgttggggtcacctaacatgaatgatgtggttgaaaggcgaaacaaaactcttaaggatatgataagaagaatgatttgtcattccaacttactagagtcactctggggagagacactaaagactgtagcttaca

SEQ ID NO: 2191 - DNA, 554 bp, Glycine max
tgtagggttaaagtctcacgattgtcacgtactcatgcaacaattgttagccgtggctatacgagacatcttgccaaacaaagtcaggttagccataactcgcctgtgctttttcttccatgctatatgtagcaaagtcattgatcctgtcaagtttgatgagttggaaaatgaggccgcaattatactgtgctagttggagatgtattttccccctgctttctttgacatcatgattcacttgattgtgcatctagtcagagaaatcaaatgttgtggtcctgtttatctacggtggatgtacccagttgagcgatacatgaagatcttaaaatggtatacaaagaatctttatcgaccagaagcatctattgttgagaggtacattgcagaagaaaccattgaattttgttcaaaatacattgagaaggctaaacctgttggccttcctgagtctcagcatgatgacaaagtgggagggaagggttcaagatgactgcatgtgatcactccaagtgtagaacattttgttacaagctcacttgtatgtcttg

SEQ ID NO: 2192 - DNA, 571 bp, Glycine max
  unsure (1)..(571): unsure at all n locations
ttaaccatgatgatcaatctatgatgaagattgcatgatccttatgcatcttattctcatgagaaatgtagaaaaatcccctttgttgactcttaaaagtgatttcagaaggtaaggttcataaaatgagttacaaaagagaaaaaaacaagatatggtacttatagattttaactaatataattgtaataatcgattaccaaaacttgtaattgattaattcaatcaaatacccttagttttacatttctagaattgtgctaatcgattatcttgatcaagaaagaacaaacataactcttttagaagcaatgtaatcaattatgatatttgataatcaattatttcaacttccagaaagcttcctaaatttttcaaaggcaatgtaattgattacaagaaatgataattgattatcttgatgtacaaagccttccttcttcttgattatcttgatttgcaatatttattggttgttaggaaatgatgtaaacccatttgcacaagggttgaggatggatctttaaaggnttctttttttacttgtatgaaaatttaaaaatggaatgga

SEQ ID NO: 2193 - DNA, 509 bp, Glycine max
agctttgatggtgttgagaagaaatcacatgtttgttatttcaaaaagggggagaatgtgaatgtatgtatacatgattttgatgatgtcaaaagaagaatcaaacaaggctcattttgcttcaagattaatacaagattgtttcaacaaacaaagccttgattcaatatttcttcaagatcaagccttgcctcaaagtgtagagatttcaagtcatccaaggcacatgtaatcgattaccaatacatgtaatcgattaccaaggcacatgaaagtgtgtaattgattacacatcatatgtaatcgattaccagagactctgaacgttgggaattcaaattataactgtgtaatcgattacacaaacattgtaatcgattaccagttgaaagttttcagaaaatctgccaacagtcacatcttttcattagatttgtgaatggccatcaaaggcctattaataggtgacttgggcacgaattttatgcagaaagttttgcttgcaaaaa

SEQ ID NO: 2194 - DNA, 484 bp, Glycine max
ttgatagattgcaagtgtataattagttaagaaaactatatgagggaagttttacccaaatcatttttgtatggcaataatgctgcagtcctatgcttaatctccttacactaatctccttacacctaaacatgtacataaaaaaatgatttgatcaggtaaaaggaggaacattgagagcttctgattcattccctactggtcgacatctagttgagttatgggctccaaattcccaaaagcttccaaaaacatcagttttgaacagcataaaacttcagcaacctaatggcatttactatgaagacataacatttagggacatcctctttgattctagctacaagggtggagggatattcattgttgattctgttagaacaaggatcaacaactgctttttcttgcatttcaccacagaagggattctagtccaaagtggccatgagaccttcataacaagcagtttcccttggcagcactc

SEQ ID NO: 2195 - DNA, 498 bp, Glycine max
tgaatcggacatccgtgtgaaaagttatgaccattttaatttcccgagagcttccatttttcattttcgagcgtctctatatgtgaccgaatcggatatccttgtgtaaagttatgaccatttaaatttcgtgagagtttccgatgtttaattttgagcgtatcgatatattataagcctgaatcggacatccgtgtgaaaagttatgaccatttgaatttctcaagagctttcgttgttcaatttcgagcttgtcgacatattatgcgctcgaatcggacatctgtgtgaaacgttatgaccatttgaatttctagagagtttccgatgtttaatttcgagcgtatcgatatattataaacctgaatcggacctcagtgtgaaaagttatgactatttgcatttcgcgagagtttccgatgtttaattttcagccgatcgatatattattagcctgaatcggacattcgtgtgaaaagttatgaccatttgaatttc

SEQ ID NO: 2196 - DNA, 485 bp, Glycine max
  unsure (1)..(485): unsure at all n locations
tgaaggaaaactagatgcattggttaacttggtaacccagctggccttgaatcagaaatttgtacctgtcgcaagagtctgtggtttgtgctcctctgcagaccaccatacagacctttgcccttccatgtagcaacctggagcaaatgagcagcccgaagcttatgttgcaaacatttacaatagacctcctcaacctcagcagcaaaatcaaccacaacagaacaattatgacctcttcagcaacagatacaaccctggatggaggaatcaccctaatctcagatggtctagccctcagcaacaacaacagcagcctgctccttccttcaaaaatgttgttggcccaagcataccatacatttctccaccaatccaacaacagcaacagccctagaaacagccaacagttgaggctcctccacaaccttccctcgaagaacttgtgaggcaaatgaccattcagaacatgcaatntcaacaag

SEQ ID NO: 2197 - DNA, 470 bp, Glycine max
ttgtttaagtctatgtagtcaatacacattttccacttcccattagactttttcaccattaccacgttagccaaccacttggtatactacacctctctaatgaaagcaacacttagtagtttctttgcttcttcatctaccgcctttcctctctcaggttgagcttcttctttctttgggcaatgggtttagcctctgggcagctgaataacttgtgatagtggaaatttgagtcaattcctggcatatctgatgcagaccatgcaaataggccgacgttggctggtatcactcaggccactaactcttctacttttttactctcatcaaacacctaagtttggttaactctgagggatctttgtcgagttggaatagtttgacttctttttttggcttggctctctgttctgcttctcatggatcgagttcagactctactaggctttttattaagagaggtgcatgct

SEQ ID NO: 2198 - DNA, 477 bp, Glycine max
tgagttgttgtgtgctgtaaaagatgttcctctaatctaacattctgtattaccacgtgttatctcacagactttgactgcagttatggtcaaactaatccatggctctctgcttctgggtacagattacagattacacctgtttctgttccttccattaattgctgaagggctatttctactcactaatttcctttgattaagttttataaatttgaattttaacaattaaatttaatgtatttcgaaatgagtacattttaataacaataagaataatgatatattagtaataaaatttcttaacttaatattatttattttcaaatatatatatatatatatatatatatatatatatatatatatatatatatatataaaataaaatatgtcattagtttaatattaccttttaaattttataatgtaagtatatattggctaatataaaacgttaacgaaattaactaattt

SEQ ID NO: 2199 - DNA, 352 bp, Glycine max
agcttatctaccttactataacaaggccatatattttcttttgttttagaagggtgagtcaattcatgcagactggtcattgtgatcattgggatgcagaaatccgaattttgagatacattacacggaccccaggaccgtgactactctatgaagaccaaggaaacactcacatagttggattgtgcgatgctaattgggaaggatcacctattgataggcgtactatttcaggatctagtgtgaatattgttagaaatatcgtttcctggaagagtgaaacacaaacagttgttgcaccgctatttcaaaggctgaaataaagctgaggctgaagccacatgtagagccg

SEQ ID NO: 2200 - DNA, 472 bp, Glycine max
agcttatctacctcactattacaaggccagatatttctctttgcatttggagtggtgagtcaattcatgcagtctcctcataatgatcattgggatgcagtaattcgaattttgagatacattaaaaggaccccaggacaaggactactctatgaagacaaaggaaacactcaaatagttggattttgcgatgcagattgggtaggatcacctattgataggcgttctatttcaggatatagtgtgtctattggaagaaatcttgtctcatggaagagtaagaagcaaaatgttgttgcaaggtctagttcaaaggctgaatataaagctatggctgtaaccacatgtgagctgatttggattaaacaacttcttcaagaattgaagtttggaaatattcaacaaatgaagctatgttgtgataatcatgcagccctacattagcttctaatccagtatttcatgagagaac

SEQ ID NO: 2201 - DNA, 499 bp, Glycine max
  unsure (1)..(499): unsure at all n locations
tatgctacattagcggngccactaactgatttgttaaaaaaagaagcattatgttggaccaatgccaccgagcaggccttcatcaaattgaaacatgccattacatcaacccctgtattggcactgcctgactttactcagccttttgtgttagaaacagatgaatttgaaattggagtagaggctgtgttgagtcagaatggccacccaattgcatacttctccaagaaattgctccctagaatgcaaaaacaatttgcttacactagggagtttattcactgtaacagcagcattggctaaattcgggcattatttgttgggctagaaatttgtcataaaaaaaattgaaaagtttgaaaagtctcttggatcaatcgctacaaactcttgaacaacaagcatgttttcataaattcattggttatgattntcgaattgaatacaagccaggtaaggataatgtcccagctgatgctctttcccgagtgttctttat

SEQ ID NO: 2202 - DNA, 416 bp, Glycine max
tgtgaagaaaatggaggaatggttcagggataacggggcagagtatgcatatatggctacggagaaggacaacgttgcatccgtcaagttgttcaccgacaaatgtgggtactcaaagtttcgtaccccctgcattctcgcgaatcctgttttctcgcatcctgctagaatctctcacaaagtgactatcattgaactctctccgagcgatgccgaaatactctaccgcagcaagttttccacaacggagttcttcccgcgcgacgtagactccgttctccgtaataagctctccttaggcacttttcttgccgtccccaaaggcttgtaccgggctgacacgtggcccggctcaacccgctttcttgagggtccaccaccctgttcttgggccctagtcagtgtgtggaactgca

SEQ ID NO: 2203 - DNA, 570 bp, Glycine max
agctttcatctcattcatctgtagaattatatttgataacatacatgaattgcttcagccaatgccatgctacaagttacacattttcaagatatcattacaaaattttaacttgtatggattttaatctatatataaatataaaatcaccaagagaataaattaaaaataaaagcagatgtttgcaggcaatctagctgctgatactaatacattatgttaagaaatcagggaaaatcatagtaagcataattcgacaaggatctgccatgtattacactccataccttgtattagataagcaaagaaaattaattctgactgggtatctgatctagggcaaaaacaactgcaacttttatttcacatgaacaagtgttaaactaaagctgagtgagcttaaaccacaaaagtagtagaccttggttgtaaggtaggcaggtgaaaatttgcactatgaagattcaacagcataactttctatggtaatttttcaatgcccatacatactccatataggagatatactaatttatttgatggaaaaatagtaaaactatgtgttgggtg

SEQ ID NO: 2204 - DNA, 162 bp, Glycine max
tctcgatatattatgcgcctgaatctgatcttcgtgtgaaaagttatgtttatttgaatttctcgagagcttccggtgttcaatttcgagcgtctcgatctttcatgcgcctgaatcgggcattcgagtgaaaagctatgaccatttgaatttgtcgatagc

SEQ ID NO: 2205 - DNA, 558 bp, Glycine max
agctttcttacagtacttcctgcaccatctgtaccaataatgatgttacagtgaatgttctgttctacacgcttccctttaatgatagaagatgcagttactgttacaaagtcattgctggcatcaatggaaacacactcatggcccatcattatttttttctcacaagactgttcatttccttccaaactttcaggcgcacatatttggaagcctaggttttcaagtcgcttgagtagtaacatagttagcttgtactgcgagaagtgtgcaacagagaccgggctgacaaaatgctcaagatctgataacaagtacaagatatatgaatattctaaaactcaatattgtccaaaacgaacaatatcatgcagtctatgtgttgatatactgcatattttgaaggctatgtataaatattgtcaaaactacacttgaaatagaaatcttcctattgctatcagactggaaattggctctcatgaactacagaatagcaccttgaggttgtatgtgatcaaccgatccaagaattgaaccagagagggaagttcaata

SEQ ID NO: 2206 - DNA, 561 bp, Glycine max
  unsure (1)..(561): unsure at all n locations
tacacaatcaatcaactgttggaatatcttcctacctacagcttcttttagtttacctttggatgcctgtgaagacaaatagttcattgattgtcattgccaattaggcaatagatcatcatgtatgtattatgaataataaacaagcaaatgctccttacaattttgtcaaataactctcctccattcacatactcaagtaccatataaattttggttttgctagccaagacctgcataattacaggtacaaatcataatcagaacatcaaggtttcatagagtcaagctgctttgtaaatgcaataaatcactttattgttctacaatctgaggtttgaagctgttagagatgtgacaaatcattcacatgtcttacacctattagtttaaacatttgtgtctcaatattcttctactaaaaagctgaatagtaatacaagacaaatgttcttgtgcaatatttacgttttaagcctaaacccttcgtgtaaagggtgtaatatataatataaaatcattcatgtgtttctactangcagattaatcttttggaatata

SEQ ID NO: 2207 - DNA, 526 bp, Glycine max
agcttgtgagcgtttcttcttcattcttcaaataagacaattctatgattttttatgagttctgttagtccaatacttgtaatcattgtatgtggcacaaccgaaatcattgtgttaaattatctaatgtttgaatttttaaacttataacctctggtaacaaacctctcaattcttgttgcagttcataaaccatctcatcaatttggttgccaggcatcagtaaaaaaagatagcttgccaattggaaaagaagcaatgcttggagcattttcgttactcaaggttattgagtctgagctacaagcatacttgtctacaactgagggtcgagtggtatgtatccttagaatttcccattgcactttttctttaattttgtatgattctttggtcattgctcttattttatttcaaatattcaacttgcttgttcctctttaatttgtctgattattttttcacttgggtactcatggagtgaatactaattttctagacccctttaacttttttttaagtgggg

SEQ ID NO: 2208 - DNA, 418 bp, Glycine max
tcttctgctcaacagtatatgccgttcatggctccttttccatactattattctccaatgccttatgtgccaaatgctggaatccaagccaccattgctccttcagctccttctcaagccaacatagctactgctagttcagcaccttcaaacagatggaatccggattctagtgcatcccaccatgtcaccaatgtttctcaaaatatacagcaattaacaccttttgaagggtcagaccagataacacttggtaatggacagctccttgacattaactccacaggtctaacttcatttcaatctcctttaaaccctacgtttcctctaattcttagcaatttgctatatgttccttcaattactaaaattcttattagtgtgagttagttttgtaaggataatctaatttattttg

SEQ ID NO: 2209 - DNA, 497 bp, Glycine max
  unsure (1)..(497): unsure at all n locations
tcagcaattacaccttggacatttcaccaatatgaattagtattagttttttggattagngaggaattaccttagaaacttcatcaacaacttcgttggagattttggttcctccaaatgaattgatgatatttccaaagtcattaaggccatggagattccattcccaatagcaccaacagaccccataaacatcaaaaaatgatccaaaggatcatcatatgagaaaagcttctataagggcactgtttttgcagattcatctttggcctcactgttctttgagtctttcttgctggtaggatctccattcaagtcaatatcctctgccattttcttcattgaagactttacacacccttatactaattagtaatcactgtaaacggaaaaaacctgcagaaaatgcattacaggttcaagttagtaacacacaagattgtgctcttcaaagcgtaacctcatagtgaaatttcatttttttcttcttcttggat

SEQ ID NO: 2210 - DNA, 584 bp, Glycine max
agcttgaaggtgcgtaacccaccattttttcatagtaaaacactggtaatgggtctactattattatgatcattttcttctccatcattggaggtgccacttgagctgccaagtctctccatctttaggcgtattctttgaaagatttgtgcccctttttacccatgttctttagttgcatcctatccggagccatatcagaattgtactgatattgcctaacgaaggcaaccattatgtccttccaagaatggactagggaaggttccaagttagtgtaccaggtgacagctaccctagtaagactttcttggaagaaatgtatcagaagtttctcattttttgcgtatgcccccatcttctgacaatacatctttagatggttcttggggcaagtagtcctcttgtacttgtcaaagtctggcaccttgaacttgggaggcgtgacaaaattgggtactaggaacaactcttctatgttagcaaaggcataatctctgcctcctttaatggcattgagcctttcctctagatgatccaactttcccattttttccatagcatgaaggttttacttgctgtgg

SEQ ID NO: 2211 - DNA, 572 bp, Glycine max
  unsure (1)..(572): unsure at all n locations
tgaaggtgtgtagcccaccatcttttcatagtagaatactggtaatgtgtctactatcattgntattatttttttctccgtcattgaggtgccacttgagctgccaggtctctccacctttgggcgtattcttttgaaagattcgtgccccccttttgcacatgttctgtagttgcatcctatctgaagacattatactgacactgcctaacgaaggcaaccactaggtccttccaagaatggactcgggaaggttccaagttagtgtaccaggtaacagctaccccagtaagactttcttggaaggaatgtataagcaattcctcatcttttgcgtatgcctccatcttctgataatacatctttagatggttcttggggcaagtagtccccttgtacttgtcaaagtccagcaccttgaatttgggaggggtgatgatattgggtactaggaacaactctcctaggttagcaaaggcataatcttcaccttcttcaatggccctgagcctttcctctagatgatccaactttcccatttctgccacagcatgagggtttttacttgtcgt

SEQ ID NO: 2212 - DNA, 559 bp, Glycine max
tcattaatagcaccaaaaactattccttgcacaaagcttcattagtagcacctaaaactatgtcatgaacataaatttgcacaagcaacaactcattgtttgatctcttgataaacagtgttttgtcttaacctcttacaaaagattgctcaattaagaaattgctcaacctttcataccaagatataagtgcttgtttgaaaccatacagtgccttttctagcttgtaaacatgattaggatgtttgaagtctacagaacctacaggattctcaacatatatctctttttcgatgtatacattgagaataacacttttcccatccatttgatataacttgaaacccatattacaagctaaagcgggaataaccttatagctttcaaccttgcaactgaggcataagtctcatcatagttaatgccttcctcttggttgtatcatttagcaaccaatatggccttgttcctaactatgatgcttgatgaatcaagcttgtttcgaaacacccatttggttctgattggcttgtgagaggcacgtttatggactaaatcc

SEQ ID NO: 2213 - DNA, 459 bp, Glycine max
tgtaaggatttgggtgggaaatgatagtgagactcaacttggataccaagcttgtgcttcaacaattgcaacaagacccactatccataatgagagaacaatttttttttaaaaccttgcatctcgtatgaaatatgttctctctttaggtttgggttaggtcagcggatttactcccaaggagccttctcaccattagaagatcaccttcttcatagggtaaacctcttcaatatgctcatcacccatggcttcaccttcatttccacttgaggaaggagaagaagtagcctcctcttggctactatagatgtcttgacccctcataatcatggttttctttgtgggggtattgagaagcaatggggcctttcccaatacatttaaagcacttaatgctactagcactatcttaagaactagcccgttggagtgatttccttcctgcatataccctta

SEQ ID NO: 2214 - DNA, 500 bp, Glycine max
  unsure (1)..(500): unsure at all n locations
tatgctgcaaacatttacaatagacctcctcaacctcagcagcatattcaaccacaacagaacaattatgacctctccagcaacagatacaatcccggatggaggaatcaccctaatctcagattgtctagccctcaacaacaacaatagcagcttgctccttccttccaaaatgctgctggcccaagcagaccatacgttcctccaccaatccagtaatcgcaacagccccagaaacaacaaacagttgaggctcctccacaaccttcccttgaagaacttgtgaggcaaatgactatgcaaaacatgcagtttcaacaagagaccagagcctccattcagagcttaactaatcaaatgggacaattggctacacagttaaatcaacaacagtcccagaattctgacagattaccttctcaatctgtccaaaaatccanaaatgtgagtgccattacattgaagtcgggaaagcagtgtcaaggactttaaccagcaac

SEQ ID NO: 2215 - DNA, 442 bp, Glycine max
agcttgcgtggctctatccatatttgaagcagagtatttctctgctggaggatgttgagctcatatcttttggatgaaacaacaactagaggatttcggtatctttcttgatcacattcctttgatatgtgacaacacacgtgcaataaacttgaccaaaaatcttgtcatgcattctagaactaagcctataaaaataagacatcatttcattagatatcatgtgcttaaaggagattgtgttatagtatttgtagatacaaccaaccaactagttgacatctttacaaaacccttgtctagggatagatttataaaataggacatcatttcattatatatcatgtgcttaaaggagattgtgttatagtatgtgtagatacaaccaaccaactagctaacatctttacaaaacccttgtctagggatagattctactcca

SEQ ID NO: 2216 - DNA, 421 bp, Glycine max
  unsure (1)..(421): unsure at all n locations
tcatggatttccttctacaattatatcggataaggatgcaatttttctcatcagttntnggagggagatgtttaaattggctagaactagtcctaagcatagcacttcttatcatccccaaacggatggtcaaaccgaagttgctaatcggtgcttagagacctatcttaggtgctttgctggccctaagcccaagacttggttgaattggttgcattgggctgagttctggtttaacagtaactacaatatctttgctggaatgacaccttttaaacctttatatggacgagatcctccattgttgattaagagctgcaccattccatcaaagttggatgatgtaaatcagttggcccaacaacgagatgatttgcttgcggaattgcgacaaaaattgttgaaatcttaagacccgatg

SEQ ID NO: 2217 - DNA, 628 bp, Glycine max
actaagcttccccggggccatttcctgcgaaggcaaacatttggaaagttagttttacccgtgggacactactcttaaaacaaaaatggcatacaacctcctcccatatatacaaacatcaatgtaaatttagagcaagcttatgcgcatatttccttacgaacgttcacttgcacaagacattctattaactaagaaaaatgcacccatatacaatcaaggcagcttcgttacctagattatttacatgtacttccaaggtgtatttgttacttacatcacacacatctccttggctaaatttacatacatgcatactcaaagcattttggggtaccaaaaattgcacatgtgcacatcttggaatttctaatacctatacatacacaaacttcatgatgaatcttgactatctacaataaggcgctacatttcttgctcttttcaaatttttgctacctaaagccgcatgcaaattcaagtatattttcctttgctgactaaaattgtattcaaattaaaaggtatatatttttttggtatgtattttctttacataacatgcaacaaatttatatatatatttttttgggagaccatttgactaccaaaaattacatgcacatac

SEQ ID NO: 2218 - DNA, 644 bp, Glycine max
  unsure (1)..(644): unsure at all n locations
ntacaagttagggtcacttataatttaactcattgatttgccgagaaaacttatgaattaacgagagtgtgtaatgatttttttttttgtcttgtatgaacatcctttagtaaaatgaacatttctctctatatgattaactttggattttgagtcataccttatccaaaactagacatacatgactttttatacaggtaaagtttataaaattttgttatctaataagtataagttatgcaatagttttataaatactctataaaaggaaaaaaaatgaaaacttgagtattaatataaatttataatccgataaatatatttatgtataaatttggtttgggttggattagattgaattttaaaatcaaatccaaaatctgattttatccaaaacaaatgggtttattaaattttaatttgttcgactattggtttatttgattttcagttttttgcttgatttattcataaagttatttgataaaattagtttatgaacattcctaagaaaaccgataaagtaaagacatcanatgtacaattaagtctattaactagtaaagtacgccttttgtgacaaatctacagtgttaaacattcggagattaatatgtatagtacattcttttgcctatgattct

SEQ ID NO: 2219 - DNA, 368 bp, Glycine max
agcttgcactgcccaaagtggacaaccttccagaaaacgttgattctcaccattgatgtcccttatgatgtcgttcagtatctcaaaaaagcctacgatgatttggaagaacccttgacctgttttctcaaatcttccaaagttgattggcatttctatgacccatatatgttacagttaccaaaaaggttcaaagagaaaaccaaatggtgtggaatagtaagccccggttgggcaccatagttgaaggtattgagccacaaggcagttggtggggttttgactcactctggttggacctctgtggtggaggttgtttagaacgaaaaacctctagttttgttaatgcttcttgtataccatggatt

SEQ ID NO: 2220 - DNA, 285 bp, Glycine max
taacacctctcattcttattactttttcaatattgaaaaagtaataagaatgaaaaatgaaaaggtcgtcttattcaaaaccccaaccaattatgaaatcccctatctcccacttcacacctcggaacgcaccgttcttatagagagaggcgctttcacatcttcttaggctggggagaggaaatgttcccattttttaggatactccggggaacagatatccagtggagatgacggggtggggcctgtacctcataggattaaagcacgtggctacgaaccacg

SEQ ID NO: 2221 - DNA, 382 bp, Glycine max
atacgtataataacggtgctattaggagctactatacctattgctcaacaagatattaagaaaaatttggcttattccacactgtctcaattgggttatatgatgttagctctcggtatgggatcttatcgagccgctacatgctttttgaatactcacgcttattctttgacatggtagaattattgtgagtgatcaaattatttcacaaactatttagctcgattatatatacaaaacttgaatttatgactactaattaaagttcgaataatttggccacaattaattcaatcattttggcttttataattcgttatctggctgactttacgtacaaatgttatttaccacctatctgatccaatttaagtctacctac

SEQ ID NO: 2222 - DNA, 483 bp, Glycine max
  unsure (1)..(483): unsure at all n locations
ccgcttaaggttatgcggnggtttggcggttgttctggagtggcagtgagtgtgtttattggaattggaagggttcgggcgagttcgagttcttcttcttctgaggaggaggaggaggcagtgagtgtgcagtcaaaagtgactcaaaaagtatacttcgacgtgagtattggaaatccagttgggaagtttgtgggacggattgtgattggactgtacggcgacgatgtcccccaaacggctgagaacttccgtgccctttgtactggcgagaagggctttggatataagggttctaccgtccatcgtgtcatcaaggatttcatgattcaaggaggagactttgacaaaggaaatgtatgtatgttttaatggttgatgctttgctttctcattttcgattcattctaaattccttcccttccttgtagggaactggaggcactagtatatatggtcgtactttccaaaatgagaatttaa

SEQ ID NO: 2223 - DNA, 440 bp, Glycine max
agcttatttgaattaatgctcggaaatatatagaaccactttctattaagatgaactattgatattatcagttaaaacaactaactaaagaaggataaaactgtcatcaagaaagttttttttttttttttacaaaacacatgcatcctttataagaaccaattttatttgagaaggtaaaattattatgagtgataaaattatttcacaaactatttaactcaattatatatacaaaacttgaatttatgactactaattaagtttgaaataattggcaacaattaattcaatcattttggcttttttaattcattatctggttgattttatgtaaaaatgtaattcaatcatatctgatccaatttaagtcgatctagattggatcgatttttcttattttaatcatacttttttagaaaatattaaataaatgataa

SEQ ID NO: 2224 - DNA, 502 bp, Glycine max
  unsure (1)..(502): unsure at all n locations
tgtaagaagaataacaatataggagaatgtttntggttgattgataaagactatattntaatcataggttaaggagttgtacaactgatggagatatattacacttagttagggatgcttttgaaaatgagaatgagataaatgtttattttcatcatgaagtagatccaattttagaagaagtcccacagatgttgtacttggaatgtgatccaattccagaagctgttgagaatgaggatgatttagatgatgtacctgttgctggccatgaggaaactaagttttaattcatttgtacttggtccgacatggttactataattaattaatatgattaatttttacttgatcaccattgatgcagatgttggtgctggtgagcatgttggtgctggagagcagagagatggtggtgagcaaagggatgctgatgctattgaatagagagatggtggtgagcagagggatactgatgctggtgagcaaaaggatgctggtg

SEQ ID NO: 2225 - DNA, 445 bp, Glycine max
tattaaaactaaggtgtatgaaactgttttcttttagtaagaccttgtttttacattcgttgacgtattggtctactgtatttttattattttttgttcaatttttactgatttttttatcctattttcagctagatgtattggctattgaatttaatttatggatcttttttactgtttgattattgatacttgcatgatagagttttctatatgggggtgacatatatatcaaactttttgtggcagagcacaagttgtgggatggccaccaattcgatcttttcgaaagaacacgatgatggcttataatttggcaaaatgtgacaacgaagctgaggagaaatcaggagtaggttgtctttacgttaaggtcagcatggatggtgctccatatctcagaaaggttgatctgaaaacctacagcaactatattgaactttct

SEQ ID NO: 2226 - DNA, 504 bp, Glycine max
tcatccaactgaaacatggaaagaagacagtatataccagacaccgaatgtttttgaaaccttttcacccgtatcagcgattgaagaaagctcttaatggaagtcaggagaatgaaagtgtgccgcaaccattagctagaaatgaagtttatgatcgggtgaaggacatcataactatctttggtaagacccaaaagtagacgtcatctgagatgaacatatggaagaaaaggtctatattctttgatcttccatactggtctgatctacatgtgcatcattgcctagacgttatgcatgtcgagaaaaatgtttgtgataatttaattggtacccttcttaacattaaaggcaagaaaaatgatggtttgaaaagtcgtcaagacctggttgacataggaatacgagagcagttgcatctaatatcacaaggtcgttgaacatatctgccccagcatgccacacaatgtcaatagcagagaagagaagtttttgtcaatgtct

SEQ ID NO: 2227 - DNA, 433 bp, Glycine max
  unsure (1)..(433): unsure at all n locations
cttcactacatcaagaatcatcgggttgagtcttctttgtggctctcttactggtttagccncatcttctaaatttattcgatgcatacatgtggatgggctaataccaggaatgtctgccacggtccagcctatagccttcttatgcttcttgagaactgataacaacttctcctcttgctcatcaacaagggaggcagatataattactggaaaacttttgctatcatccaagtaagcatattctacatttgatggcagaggcttcaattctggtgtggatggctggatagtggcagaaagagatggtttctcancctgtacctcataaagaaagtcagaggtattgtgtacttctgacacatgcgtatttctatctgactctatanattcaatctcaagagggtaaacatcagcagacatggtatcaata

SEQ ID NO: 2228 - DNA, 343 bp, Glycine max
agcttatctcacttttttcttattatcttctcctagaagctctggagaaatttatccaagcatgcccttagtaattattttgctggaggtttgcttgctatacttggctatatttacttttcttttttaaatgtatgatgataatactaatcaatgtttacggatgacaggctcacacagtgcttgagatgaactatactgagcagcaattaacagcagctgtcgtttctgatggattacggcctgtccttgctgccgatgacttgggtataccgtcaagattattatcaatgattaaaaaatgctgggatgcagatcctaataacagacctgcttttgatga

SEQ ID NO: 2229 - DNA, 429 bp, Glycine max
  unsure (1)..(429): unsure at all n locations
gcttgtattgatacacacatactgtaatcgattaccagagaagattntcagacaatattctcaacagtcacatcttttcattgtgttcttaaatggccatcaaaggcttatatatatgtgacatgagacacgaatttgctaagtttttttcagaacaaaaaggtcttatcctcttaacaagcaaaattgttttatcctcttacaaattccttggccaaaacactcgtgattcaataaggaattatttgagtgctcaaattgttcaatctatctctttcaagagagatttcttcttctcttcttctttattctgaagagggattaagagaccgagggtctcttgttgtaaaagaattctaaacacaaaggaaggattgtccttgtgtgtttagaacttgtaaaaggaatctacaagatagtggaactctc

SEQ ID NO: 2230 - DNA, 366 bp, Glycine max
  unsure (1)..(366): unsure at all n locations
cttagcacttctgtatggtttcagggctttccatcagctctgattaatctgccatatactcagccggtattacgcctcatgagctttctcatatccagcttactggatttagtttgggtgacttcccttttagatacttangtgttcccctcttatcatcgagattaaatgtatgtcattatgctcccttgcttctcaagattactggcctgacttatggatggagcaagaagtctttatcttatgcangtaagttagagttgattagagcacctattcaacgaattgtgaatntctggatggagattctctctttgccgccatctgttctggaccgaatcaacgcttcgtgccgtaattttctgt

SEQ ID NO: 2231 - DNA, 353 bp, Glycine max
  unsure (1)..(353): unsure at all n locations
ctgcacaagactcttaatatttgaagagtattcttgcggaaccttcaaccgatgaagacactaacaaaaacttatattcttctttatggacaaagtatggcaagcccggggcaagcaaattttggtgccatcagaccctggatgcaactgtgatcgaatccacatatcagctagatcttgatgggtattcaagccatccttcgtcttgccttgaatgttaagaagcgtccccatcacactgtcacatacatttttctgcacatgcataacatcaatacaatgtctaacgtctagatcataccagtacggaagatcaaagagnatggacctcttatttcatatgcaactcttac

SEQ ID NO: 2232 - DNA, 408 bp, Glycine max
  unsure (1)..(408): unsure at all n locations
ctggtgaatatgtccacgagttgcatggaggatgagacaggatggagctctacgagacccgcggtgactntgtggcggataatatggcaatcgatctcgatatgcttagtgcgttcatggaaaacgggatttgttgctatctgaattgcagactggttgtcacaatacaaggtggctggctgaatgaatgctacaccaatgtcttggagaatatatgttagccattgcagctcacaggtagtagatgcgagagcttgatactcgacttcggaggagctgcgggagacagcggactgcttctttgactgccaccaaatgagtgaagaacccagatagacaaggaaccctgtagtggatgtttgagaatctttacatcccgcccaatctgaatcactgaaagctcgaagt

SEQ ID NO: 2233 - DNA, 411 bp, Glycine max
  unsure (1)..(411): unsure at all n locations
tattcctttctcatgataagggatattctatattacttggttgatatggaccaaccttgagataaacacgtcgtatttcatctctttgatcaaaaggaaactcccacatcattgaacgcaatccaggatcttgctctatattaataacatccatatcttctacttcaattcttctacattttaaaggttgtacttcatcaaattaaattaacaatcttgtgtgacatttgaagcttgtggaatacgaataagctgagatgaatcaataatattattgttgtctttcttctttaagaatgaacaaagagttttttgagttgacatcttcaacaatacacctgtagtatatttcttttacaaacaaataaacatacaaaataaaagtaanataataatatattaagttaagat

SEQ ID NO: 2234 - DNA, 473 bp, Glycine max
  unsure (1)..(473): unsure at all n locations
atacaagaatgaagctctgataccacttgttagacaagtggtatcagatatcttaagaatggaggttgaattaagatattacaaactatttccccaattaaaattatatttcactttctattcaagttacaaattcccttaacaatgaactcttaaataataattcaaatagaacaatctgaatataaatataaaacaataataaataaaagagtttaagggaagagaaagtgcaaactcagatntatactggttcggtcacacccttgtgcctacgtctagtccccaaacaacccgcttgagagttccactatcttgtanaatccttttacaagttctgaacacataaggacanacccttctttgtattcagaattcttttacaacaagagaccctcggtctcttaatcccttagagaaatagaaagaagagaagaatgaatctctcttgacagagactagatttacaatct

SEQ ID NO: 2235 - DNA, 446 bp, Glycine max
  unsure (1)..(446): unsure at all n locations
gctccttaactgcacaaggctcttaatattngaagagtatacttgtggaactcttacccgatgaagacactgacaaaaacttatcttctcctttntggacaaagtatggcaggctgngggcaagtaaattntcttcccatcagaccttggatgcaactgtgatcgtatgcccatatcagctagatcttgacgggtattcaagccatccttcgtcttgccttgaatgttaaggagcgtcccaatcacactgtcacaaacatttttctccacatgaataaagagtttagtccncattgagcatttcaagaagagcatggagggagtgtgtcacaattcggtgaagcagaagccctttcttggacaataaagagtggaatacccanngtagtggtcttgactatggcaatgacttcgtgcaatgtctggagacaaacaacaaagttcta

SEQ ID NO: 2236 - DNA, 400 bp, Glycine max
  unsure (1)..(400): unsure at all n locations
agcttatgctgcanacatttacaatagacctcctcaaccttatcagcaaaatcaaccacagcagaacaattatgacctctccagcaacagatacaaccctggatggaggaatcaccctaatctcagatggtctagccctcaacaacaacaacatcagcctgctccttccttccaaaatgttgctggcccaagcagaccatacattcctccaccaatccaacaatagcaacagccccagaaacagccaacagttgaggcccctccacaaccttccctcgaagaacttgtgaggcaaatgactatgcagaacatgcagtttcaacaagagaccagagcttccattcagagcttaactaatcagatgggacanatagctacacaatngaatcaacaacagtcc

SEQ ID NO: 2237 - DNA, 342 bp, Glycine max
taaggaagcagctccattgatatcatttaatttatgcaatgcttaagcccgaataagagaacttgtatcacaggaaaagatctaatccaagtcgaattagggatcatactgattgtggtggtaaaactggcttgaagtagccatctgggtaatatccaaaccacgaagtttcctttggtattaaaacagtgtcgtgctcaaactgttaatgtataaaataagattacaaatatataagcttttctcatgaaatcaattagcaatattctattcataatatcacacaaatacattcagaggacttaccatgataagtaccaaattctgctagctactaaatct

SEQ ID NO: 2238 - DNA, 426 bp, Glycine max
tgtcagttataatatataccgtgctgagacatcaagacaacattatacaataacaacaagggtgtctgcaatcatcattcacttggacgatatttctagttcaatcaaatagggtcactagtcacaacagcaataatctctcaaccaaaacatcaagataaaaaacaggataatgcataacaattttaagataaaagcttgtcataaactggatgatccactaatccaattgacagacaattataaatggatcattctttcttcttttactggaggagcttcggaatagattgactctctctacgacccatcttattgacgggaattatcactacgttagcggctcactcggttactcgagaatccaaattattctatttcctgactgtagcaatgcatagcggtcaataggaacattttcttctc

SEQ ID NO: 2239 - DNA, 457 bp, Glycine max
acatgcctcatgacacctaagcacacttagtggagaatcttgaactcgatattggattagtgggctgaaccatatatgaaattcactaatcataattagtgaaatattggctccacaaattcaatttcaaattcaagtgaaatttgaattgaaattcaaatttccctccaattttgtgtgacacttaggctataaatagaggctatgtgtgtgcatttttccaactttgatcatttaaaaattaaaattcaaattttatagctctcttatagtacaaaatttcgtgcttttctcttgctctcacttcattcatctgcttcttcctccaagctcttatccattggcctctatggtggtgagcttcttctacgctcatcttctccttgaagtggcgtctcctctctctcttccttctccattccactggcattcatcttccaagaagcaaaggaatcca

SEQ ID NO: 2240 - DNA, 466 bp, Glycine max
  unsure (1)..(466): unsure at all n locations
agcttgtgccttttcacgtctggaatatgaatgtagcatatagatccaaagacccttaggtgctntgttgatggcttcttcccgatccaagcttcaattggagtcttgtcttttacagacttagttggacatctgttgagtatgtaaacagcagtgtagactgcttcagcccagaatgtgttaggtagtcccttctccttgagcatcgatctagccatctccataactgtgcgattctttctctcggacactccattntgttgagaagaatatgcgactgtaagttgtcgctcaatgccttcatcctcacaaaatctttcaaactcgcgagaggtgtactctctgctgcgataacttcttagtacttttatccgttttccactttggatttcagcaagggccttgactttttgaatactccaaagacttcttgattttcttttagaaaatatacccatgtcattct

SEQ ID NO: 2241 - DNA, 440 bp, Glycine max
  unsure (1)..(440): unsure at all n locations
agcttaagagcgaanactacggntgctaacttattatcgngtatggaataattcctttcatgtatcttgagctgttgagaagcatangccactacttgtccccactgcataagcactccacccaaacccatcttagatgcatcacagtacaccacanagggttcactcgggtcaagtaacactaaaactggtgcagtggtcaacctttccttaagggtacgaaaactactctcacactgtgcatcccacacaaaagcttgacccttacgagtaagcttagtcaaaggtaaggctagcttagaaaaaccctctatgaatctacggtagtatcctgctaaaccaaggaaactcctaatctcaaacactgacttaggactctcccaactcatcaccgcctctaccttggaaggatctatngctatccctcccctggatataac

SEQ ID NO: 2242 - DNA, 310 bp, Glycine max
  unsure (1)..(310): unsure at all n locations
agcttgccttgccccttgatatattttatggactcatggncactatgaatgacaaattccttgtgataaatgtagagttgtcatgtcttcaaagcccgcactagagcatacaactccttatcactaattgaatagataagggtaggaccacttaactttcttctaaaataagcaatgggatggccttattgcatcaacacagtcctaacccatcatttgaagcatcacactcaatctcaaacgatttatgaaaggttggcgacgcaagtatgggggcattagtcagcgtttgcttaacatagaaagcttc

SEQ ID NO: 2243 - DNA, 419 bp, Glycine max
  unsure (1)..(419): unsure at all n locations
ctgcagcttgacagaatcattctaatttcaagatttctgtaaaagatgaactgcccttttgttctgcttgttgtatgggaaagattcatagatttccttctaagttttctcanaccgtgtataattctcctttggaattaatatacagtgatctgtggggccctgctcctatgaattctcattgccaattcagatattatatgtcctttgtagatgcttatttgtggtttacttggatatattttttaaagaataagtctgatgccttgtctgtttttaaacagttcaaatctcttcttttctgtcagaattggggattgttcataggctgacttgtccacttacacatcaccagaatggtatagtggaaagaaagcatcgtcacatagttgaattaggtctttctcttcttagtcatg

SEQ ID NO: 2244 - DNA, 505 bp, Glycine max
  unsure (1)..(505): unsure at all n locations
cgttattccgactacttgtctaaaccactaaccaagcgacatgtatatatgcagctcttgagaaccttattcacaacatatcgttttctgtattagagtatgatttgactatatcttcggatggaatagatgtttcataaactcctttaatgcattctatctatattcatgaatcataagacaagttattctcctcggatgatttggattattaaaaatgtacataatgttatatgtgtgtatgtacgtacgtataagttggatgaggcatttcttatttatgagacttgctngctttgtgtcacggaatatatattgtgatgatatagatgcatgtgtgggcgattaatgcagcatatcttacgaatctattctaatgacaatgacaagagattgtgaacgcttaatggtgcgcataattaaggagcgaacaccganagaccatatcgacctatctatatatatatatgaatcttctccacattatattttgcgttcctatgtt

SEQ ID NO: 2245 - DNA, 463 bp, Glycine max
  unsure (1)..(463): unsure at all n locations
agctnntggggcatatgtactttaagtgagagatatgatatttaaaattggaataataattaatattacgagtaaataacatatacaaagatgattaattnttacataatcaatcacatattatcatataatgtaaattgattgatagtaataataaaaatataaaattcatattaattatgatttaagttctaaacattatagatgatatgataaaaaaaatgtgtataaaaatgagaaattaagcaataatgagagataataaaattgaataatgaaagagagaaagagtgtgaccgtcacagcttccaatagattggtggtgtcgtgcaagtacttgacgacccatgttagaacacttgctgtggtgtcatgtgcagcanagatgacaccaatgagaatatcaacaactcgagactctgtgtgctgctgatagtacatcttggtcttctcacctcgagct

SEQ ID NO: 2246 - DNA, 491 bp, Glycine max
  unsure (1)..(491): unsure at all n locations
actctacctttacagctntactatttccactgcttcatattgttctcaaactaccacttgtaggccttgcattctgtcatttgtttatgatttgctgattatatttatcaagaacgtacgagatttgcattgttatccatgatatttctatttcattatttttctttatagatttttaatatgatatttaataatacatcttacttggctacatgctcacagtggtataatattctatatgcagtgttnttttgatacaccagggctcatgttgaattgcggtggatttccttatanggatgtcaaggtccgtgttgaaagtgcttggagttcagtcaatctctatgaagtgctcatagtcatttctgacgttcatagacatattaccaggtcanagggttatttattaaatggatgagtagtcctatactcgtgtttaccctatttcttctatatatagacttgttcgataacttcttataagactatag

SEQ ID NO: 2247 - DNA, 337 bp, Glycine max
  unsure (1)..(337): unsure at all n locations
gcttcattaatanatcgagtcctactagctctagtcctcttcatattatctattctgatgtatggcggccaacttcaataaatccaataaaaggatattcctattatgtcatttttattgatttattttcacattatgtttgctggctgtatccaatgaaattcaaatccgaaatttccattattcttccagtttttaaatcctttgttgaaaaccaataaaatgtcaaaattaaaattctttatactaacaatgatgatgaatacattaagttacggtcgctccttctaacttatggaatatctcatgtaacaacttcccatacccgtgaatatta

SEQ ID NO: 2248 - DNA, 438 bp, Glycine max
agcttgcaatcactaagagactcttttaacatcgatagactaagacttagctttcttattgatctttgttttcttggtcttgatttggacttaaaataaaacttgtgtttcttttgtcttggcatcatcaagaccatcatacacatacattcacaaacatcgctatattgtcgtaacaacccattgtcttttgaaccatggatccctcccactcaagttttggtgttatgcattgtaaatcgcaacgtgtctcatcaatcggatgccctctcttacactaaaccaaaaagctccattagaagtcttgtttcatcgtccatcaaattatagtaaactaacagcttttggttatctctggtttccttgggtcactccatatacaactaacaaacttcagaccaagtccgtaccatgtgtttctaggttacaatcttactc

SEQ ID NO: 2249 - DNA, 432 bp, Glycine max
ctaagcttcttcccaatccattggcaaataccaatgcaatctgagttggttactctaaaggccaataatacttggtttctcacacctctccctcctggaaagcaagctattagttgccgttgggtctacaaaatcaagtgcaaatcagatggttctcttgaacgctataaagcacaattagtagcaaaaggctacacataacttgaagggattgattaccatgacactttttcatctactgctaaaatgcgtacaatacgttgtttattagctctggcagttgctcaaaattggtcacttcatcaacttgatgtccacaatgcatttcttcacgaagatctttttgaagaaatttatatgtctcttcctcctggttctcagcgacagggggagaacctagtgtgcttctcaacaatcttatatggataaaac

SEQ ID NO: 2250 - DNA, 451 bp, Glycine max
agcttaataaatcaatctatggcttgtagcaagtctcctgccaatggtatttgaagtatcatgatgtcgtcacttcatttggctttgaaaagaacatcatggatcaatgtatataccaaaaggtcagtgggagtaagatttttttcttgtgttatacgtggatgacattttgcttgcaactaatgataagggtttgctatatgaggtgaaataatctctctcaaagaactttgatatgaaggatatgggaaatgcattttatgtcattggcattaagatccatagggaaagatctcgagcgaatttgggtttgtctcaagagacttatattaacaaatttttagagagatctaacatgaaagaatgttcaccaagtgtagctcccattgtgaagggtgacaaactcactttgagtcagtgcccgaaaaatgattttgagcgggaacacatg

SEQ ID NO: 2251 - DNA, 416 bp, Glycine max
  unsure (1)..(416): unsure at all n locations
agcttccaatcatgcttctgtacagactntgatcaacactggtgccagcttcatcctttgacagcttcaagtgagtaggtgcaggtgttcttttatggctggaattttccatcccaaacttcttgacaatgttctttgcatacttgctttgtgagaggaacatgaagtcttccatctgcttcacttggagtcccagaaaataagtcagctctccaacaagactcatttcaaattcagattgcatctgttgaacaaaatgtcgaagcatctcattcgacatccctccaaacacaatgtcatcaacatatatctgtgctatcatcaagtttctagcatcttgtttgacaaagagagtcttgtcaattcctcccttcctatacccttgctgagtaagggaactctgtagcctttcatac

SEQ ID NO: 2252 - DNA, 403 bp, Glycine max
  unsure (1)..(403): unsure at all n locations
gcttggcaataacacaacctcgactctcattgagtgtagaacactttcaagtggtgctcagttggagaatagtcatgagctatgatgcaatcctaccccgcaagggcattggatagaaaactccaagtagattgtgccagagatgcaagagaaggccctagggttcttatgagccttacggtagatttctggcgcatgggctaagtacgagcccacttatctttgtaaatattaaattaaggtttcattatttttgggccttgtatttacggctccataatgtatgtagggtaccctacaaatatacgatttttcagcccttgtattttacggcacctagactagtttttgtattaagggtagatntgtaatcttacatgcactaagtggatattngatgtgt

SEQ ID NO: 2253 - DNA, 461 bp, Glycine max
  unsure (1)..(461): unsure at all n locations
agcttctgagagtggtaacaaccaaaataaagtgctatggcctatgggtacagtcagataagaacactcacagaatcaacggtcttcatagcctgaggcccaggaaatgtcttgccagaaccatggctctttggaagtagtcgcccctcaacttcttccccactgattcctctagcaatattccacaaccaagtactgcaatgctgtaaaagctagaatcaggaatagaataccaacagattgcaatgaagacaatcaaatggacagtcatgagtaattaagtaactaaatcaaaactgcatggcatgcaattggagaataacacaaaagttgcaatttaaaatatgagatcccanaaatgaaatcagcanagacagccaaatgatgctttggtagtagatatatataacatcatgtaagaacttagaagacatactcacccagtattgatcccataccac

SEQ ID NO: 2254 - DNA, 458 bp, Glycine max
  unsure (1)..(458): unsure at all n locations
agctntggagtttccaagtgccaattcgtcttcttcttttgtccagacttcttctggcttcaattcattagagggctttccttctgtgtccagcatcttgggatgttcccagcctttgatgacagctttccaggttctgctatccagtgatttgaggaaggccaccatccttgctttccagtattcatagttggttccatccagaattggtggtctgttcactggtcctccttctttctccatgttcatcagaatttatctccctagatctcactcagtgatttcgagtgcctgctctgataccaattgaaattctgatactggggacagatgtcgtacaggatgtcacgacatcacgcttcagaacatgcagattgtctttgactgtatgaacaaattaaacaagttaataacacaagagaattgttaacccagttcggtgcaacctcacctacatc

SEQ ID NO: 2255 - DNA, 486 bp, Glycine max
  unsure (1)..(486): unsure at all n locations
gctttcttggagaaacttncttgagaagcttctntgagagaactttcttgagaagctatagcttagctacacacacccctctaatgactaagctcacctccttgagaagcttgcttgacaagattcctaaagaagctagagcttagctacacacacctctctaatagctaagctcacctccttgagatgagaagctagaacttagctacacccncncctataatagctaagctctaccccatggcaaaatacatgagaatacaaaaaaaaaagtccctactacaaagactactcagaatgcctcgaaatacaaggctaaaaccctatactactagaatggccaaaatacaaggcctaaacaaagganaaaacctattctaatatttacaaagataagcgggctcatacttagcccatgggctcanaatctaccctaaggctcatgagaaccctanggtcttccctgggatctctggcccaatctac

SEQ ID NO: 2256 - DNA, 325 bp, Glycine max
cgcacccttcttcaaacattcggtcataggacttgctatagtgctaaaattctggataaagcgtcgataagatgatgcaagaccaacgaaagatctcacctccgaaactgttgtaaggctcgggcaagtcttgatagcatccacttttgtttgatcaacggatactccatctttagacaccacatatccaacaaacaccacactctctaccaagaaatcacactcttccctcttcccatagagtaattgtgctcttacggtctcaaatatctgtttaaatgagtgaaatgctcctctatagacttgctatacaccaatatgtcat

SEQ ID NO: 2257 - DNA, 206 bp, Glycine max
gactcaatcggacatccgagttaaaagttattgccgcttacatttgctacgagcttccgctttcaactatgatcgtgtcgatatattactggactcaatcgaacatcggagtaaaaagctattgccgttagaatttgttcagtgcctccgctttccattcagagccgctcgatatattacgggactcaatcgaacattcgagtaaa

SEQ ID NO: 2258 - DNA, 391 bp, Glycine max
agcttgaacagttaccaatctccaaatgaatcttccctgacaacatgttatcatagagaaacattatcttcaatttaccaagcctcccaacctctctggggagatcaccctgtaaattgttgcgaaacaatgcaagtgtctgcatgttagtgaggatccctatgaaaggagagattgaaccaaccaaagtgttggtttgaagcaatagatcagttagccccaacaacccataaacctcaataggtattgacccattgagaaaattgtttgacaaatcaagttgcttgagtgagtggcaccgacccaactcagctggtatctcaccatgaattccactacctgacatcattaaattctacacacttgtaacattggaacatatggttcttgg

SEQ ID NO: 2259 - DNA, 395 bp, Glycine max
  unsure (1)..(395): unsure at all n locations
cttctcatcaatggactcctgacgtatacgaatgagtgcggttcgttcgataaattcctatctctntatctatttctgagatgtttggatttttcaaaactccatggacatgcagaagagaaatgctattcccactcggaccaagacataactttacttgttcaaataacaattaaggtgaagcagagtcaggaacaacgaatccctttatgataaacagattcattttgcaagttcgttattacgggtagttcctacaaaggatcggactaatgacgtatacaatacttgaattctcgatgtagatgctacatagttggttctcatccttcacagactacgagtataatangagcatccgtcaacanaaggatcaccctaagatgatcatctcg

SEQ ID NO: 2260 - DNA, 452 bp, Glycine max
  unsure (1)..(452): unsure at all n locations
ctaagcttagtcctgttgatctgangttgaaggtaggacccccatacttggggtatccacaactctggcatgctgtcctcttcttgaaatttatatgctcgcaaacaccacacatccaatctcctccagaccagctcattttcctgatcaatatccacacttgaatttttgaattataagaatttttggttccatcaattctcggtgcaaccagataaggactatatgtgcatgtagcctacttacacagtaatgagaaatattattagtccttgttttatgcattatgagttatgacttatgaccctaacttctattaaaggcatgcaattttctatccatatataggttatntgcacaaagaactactgtcttgggtgatagaatactctgtcaagatggcatagcaatcttgtcaagttttctactctactcaatattaatctattcat

SEQ ID NO: 2261 - DNA, 455 bp, Glycine max
  unsure (1)..(455): unsure at all n locations
agcttgttttgtgtataaaaaatgatgcatatgttaccaataatgtgagaaataataactctaatttagggggaaaaaggataaattgaaaacaatgaatgatatatgcctaaaaaatgaaacttattagacatatgaagaaatataaaaatcaaaattgatttattaatataatatccagctcaatatttaaccagttaatttatattatgaagttattttttaattaattgactgcgtgacatttgttataaatctgaattagaatatacattattgttatcatttaataagttgaatctagatatatactcgtggtagtaatttgaatgcttaaatcataaaaattatacttattataacgaccttacttatgtatnttttaataaatagagaaataatacaaattattctacttcaatgaaatatacgatatataatattttatatgaaat

SEQ ID NO: 2262 - DNA, 493 bp, Glycine max
  unsure (1)..(493): unsure at all n locations
atgataaatctttatatataaaanagtagacatgacggtattattgtaatttaaatcttgccgctcattttgagggtacatgcaattaattctatcacttcttttgtttccataatcagatttttaaaacgtaatttataactaattntgattacgattatttcttcttcttttaaaatataagaatggttaaatacttaattgcccattctaaattctcataaattatttcttattttccgttntatattctatgtagtgtgtaaggattttaacaaattagtgtgttagtgatcaaggttctctattaatatgagttcttataagtcacattgtcatttagtttgtttcctttcaactgattgtaattatcgtatgtaaaaatcacgatgttggaaatggatgatggttggtccgcagctattgttgttcaaaanaaaaatattngcgggacacatggtncactagtgagaactatgcatatcttatatac

SEQ ID NO: 2263 - DNA, 312 bp, Glycine max
  unsure (1)..(312): unsure at all n locations
ctaatgtgtgttcccgtatgatgcacaagttgataaaataatattnttcattttctaaaaattaatttaagattaaatatatctttaacagatagtacagttaattatattatgagaaaaaagtcacgcattgacatatataaatgtgtattatactcttacttttttttaacataccactcttttctttatataccactctgagctgattatgtaaaagagttaagctcaagtttttcttttaatttcatatattacatgttaagctcattcttttaattatcttatataaaaacattgattaaatattat

SEQ ID NO: 2264 - DNA, 362 bp, Glycine max
  unsure (1)..(362): unsure at all n locations
cattccacccaaacgcacccttcttcaaacattcggtcataggacttgctatagagctaaaattctggataaagcgtcgataaaatgatgcaagaccaaggagagatctcacctncgaaactgttgtatggctcggccaagtcttgatagcatccacttttgtttgatcaacggatactccatctttagacaccacatatccaagagacaccaccctttcaaccaagagatcacacttttccctcattccatagagttnttgtgctcttaggggctcaaatatttgttcacatgagtgaaatgctcctctatagatttgctatacaccaatatgtcatcaagagtaacaacaacacacttac

SEQ ID NO: 2265 - DNA, 373 bp, Glycine max
  unsure (1)..(373): unsure at all n locations
gaagtgccttatgaatcctcccgtacttatgccaccagtacctggaaggcctctcatattgtacatgacaatcttatacgagtcaatggggtgtatgctgtggcaacatgatgaatccggagagaaagagcgcgctgtttactacctaagtaagaagttcacgacctgtgaaatgaattactccctgctcgaaagaacgtgttatgctctantatgggcatcccatctcctacggcagtacatgctgagccatactacctggttgatatccaagatggacccggttaagtacatctttgataagccagctctcactggaagaatcgcccggtggcaagtgctgctattcgagtgtgatatagtctacgtcacc

SEQ ID NO: 2266 - DNA, 467 bp, Glycine max
  unsure (1)..(467): unsure at all n locations
agctntatcaaatttcccttctaataagttttgtattccaagactttcggtttggtatgtatgatttcctagtcttggaaattagtggtataattntcaaggggatacctgtgactcgattggtgaaataggatctctcttcaaaaaagcatgttttttttaccattgcaaaaagaaaagattttgttgcgaatgaacaagatatcgagaaattgtccatacgtaaaatcataattattgatacaggccttttccacgtaaaaagagaatcttttgttacaatagaagcagaagtgatattgattattcaagaatcgaagtcaatttgctttatacatttacataatatatggcataatagagcctgcgattctttgatttgatgtctagtcaaatntcaaggtggaagttatagttctgaatttatccatgttangatgggaaaatgtgaaaaaaagttggatatg

SEQ ID NO: 2267 - DNA, 284 bp, Glycine max
  unsure (1)..(284): unsure at all n locations
agcttcttctagacttatctcctcactactagataatacactttcaacatcggttatttagaacattctacatcggttctaaaaccgatgttgaaagtgacgatgttgaatgtatgaattttaacatcggttttggagaaccaatgttaacatacatatgacaacatcggttctccaaatacccgatgttaaacacaatgaacaacagcaaaaaaagtgcaggcatgatgaacgttgacatcggttnttcagtaaaaccgatgttaatatgttagtttaacatc

SEQ ID NO: 2268 - DNA, 436 bp, Glycine max
  unsure (1)..(436): unsure at all n locations
tatgccaaaactntcattatattcttcggatatagtatcttcaaagcttgagtgttgaagtgaccaaatcttcaatgccataaccatgaatcatcaattgtaactctcatggcaatgccagtattagtagtatacttaaagcttattggaaaaaacttatatttcctttctccattttaactntggcaatctcttgccttttgggtatttttatcatagataatgcacgtatcttcttcaaggtgaagataatagcctttctccatcatttagccaatgctcaagagattatctttatgatttggaactagtaagacatctttttatgatctcttacctttctttgtctncaccatgacagtgcacttttcttttgactctaccatggtggtcatttccaattgaactntgactctgacagtggtcgcaatttcct

SEQ ID NO: 2269 - DNA, 342 bp, Glycine max
aattcatttttatcgtttttgtaaaatacttggatgaataatacaattaatattacgctacattgaaatgtgactttatgtataatgcatactctcacttatcactacaaccaatatattatacataaatatgtactataatacactacacctttatgattctatgctatgcaattactaataatttatacataatttgatataatatacaatatcaaccattatcttttacaataaaatattactatacaaatctatataaacatatgataactatcctatgattttattttttaatcctaaacttattcatttaacataaactataatactattgacgta

SEQ ID NO: 2270 - DNA, 383 bp, Glycine max
  unsure (1)..(383): unsure at all n locations
tctgttgttcaactttgagtgtctcgatatattatgctcctgaatcgaacatccgagtganaagctatgagcattcgaatttcttgagagcttacgctgctcaatttcgagcgtctcgacatgtgatgttcctgaatcggtcccccgcgtgtatagttatgaccatctgaatttcacgagagcttccgctgctcaatttcgagggcctcaatatgtgatgtgcctccaacatcccagtgaaaagttatgacaattcgaatctctagagagcttccatcgctcaatttcgagcgtctncggatattatgcgcctgaatcggacatccgagtgcaaagctatgaccatccaactctcttacccgcttcatagttcgatttccacc

SEQ ID NO: 2271 - DNA, 436 bp, Glycine max
tctacttcatagtctaccacattcatatgatcaattcatcatcaacattattgtcagtcgtctaacctttgatgatgttgccagaactattcctaaagaagaattctaacaaaagaataagaaagatacgcaggaaaattccaagcatgcaaaggctttaatgatgacgaaggtagatcaatgtaatgtggctctaatgggagttaaaatcatggcagatcaaagtcttgaagaagaaagaacctcatatactataattgtggcaggagatgacacttaaagaaagattgttggcctaaaaagagtggaggagataaactatagagaatcgagctctcaacgttgtgttgctagcacctcacataatatggaagccatgtgtagtgaaacaccaattggttttagaggtggaagacaacttcatgatcgttggata

SEQ ID NO: 2272 - DNA, 436 bp, Glycine max
  unsure (1)..(436): unsure at all n locations
ggataagagtagtaaatgatgaagtgatacctttaggcaatgatgcactgccatgaaattcctgaatgccttcacaaatatcagctcccatcgtgctccaacaagctttgaaaaaatcgaagttgaagctgtatggtccaaggcttttgtctccagcacagcttcaaacaattgctttgatctcttcacaagaaaatggagcttctaaccaattactatcctcattgcttatctgtttgaaatccaccctttccatctggggtcgtgaaacatagttctcctaaagcatgttagaaaagaagcgtttaacttctttcttaacccctaccacatcttcaatataactgcatcagaattaacgcactntagtttattcttctgacattctgttcaaaggcaagagtggaaaaattgggtattgataatcccaagtttc

SEQ ID NO: 2273 - DNA, 488 bp, Glycine max
  unsure (1)..(488): unsure at all n locations
ntctacaaaatcaaacgaacaataactttaactcggatgtctgattgagtcgcgtaatatatcgagacgctcgtaattgaaaacagaagcattgagcaaattcaaacgacaataactttttactcggatgtccgattgagtcctgtaatatatcgagacgctcgtaattgaaaacagaagctctgagcaaattcaaacgacaataactttttactcggatgtccgattgagtcccgtaatatatcgagacgctcgtaattgaaaacagaagctctgagcaaattcaaacgacaataactttttactcggatgtccgattgagtcccgtaatatatcgagacgctcgtaattganaatagaagctctgagcaaattcaaacgacaataactctttactcggatgtccgattgagtcccgtaatatatcaagacgctcgcaattgaaaacagaagctctgagacaatcaaacgacaataactttttactc

SEQ ID NO: 2274 - DNA, 311 bp, Glycine max
tttcgagcgtctcgatatactactgtacacaatcggacacccgagttaaaagttattgtcgtctgaaatggctcacaacttttgtttcaattacgaacgctttgatatattacgggacttcatcggacatcccagttaaaagtttatgtcgtttgaatttgcttaaagcttctgttttcaatttcgagcgtctcgatatattaccggactcaatcggacatccgagttaaagtttttgtcgtttgaattttctcaaagctctctgtttcaattacaaagcgtctcgatattctacgggacacattcggaca

SEQ ID NO: 2275 - DNA, 488 bp, Glycine max
  unsure (1)..(488): unsure at all n locations
cttcattntcaattacaagcgtctagatatattacgggacactttctgacatccgagtaaatagttattgtcatttgaatttactacgagcttctgttttcaataacgagcgtctcgatatactacgagacacaatcggacatccaagtaaaaagttattcctgtttgaatttgctacaagcttccattttcaatttcaagcgtctagatatattacgggacacaatcggacatccgagtaaaaagttattgtcgttaaaattttctaagagcttatgttttcaatttcgagcgtcacgatatattacgggacttaatcggaaatccgagttaaaagttattgtggtttgcatttgctacaacctttcgttntcaatattgagcgtctcgatatattacgggacacaatcgaacattcgaataaaacattaatgtcgtttgaattgctatgagcatctgttctcaataatgagcgtctcgatatacta

SEQ ID NO: 2276 - DNA, 375 bp, Glycine max
  unsure (1)..(375): unsure at all n locations
agctntgagcanattctaacgatagtaactcttttctcggatgtccgattgggtcccgtagtatatcgagacgcacaaaattcagaacaaagcctctgagcaaaatcaaacgaaagtaactttttactcgtatgtccgattgagtcctgcaatatatcgagacgctccaaattgagaacagaaactctgagcaaaatcaaacgacaataactttttactcggatgtccgtatgaatcccgtaatgtgtcgagatgctcgtaattgaaaacggaagctctgagtaaattctaatgacaataactttgtactcggatgtccgaatcgtaatatatcgtgacgctcgtaattganaacagaagctcttagcatattct

SEQ ID NO: 2277 - DNA, 492 bp, Glycine max
  unsure (1)..(492): unsure at all n locations
ntacatgaattntattaacataaaaaatttcttcaatcatagtacctttgatatatctaataattctcttagctccttgtagatgactaacgcgtggctcctcaatgaatctgctaagcaaactaactccaaattatctggtcttgttgcaaccagatatctcatatttccaatcaaactcttatatagagttgcatccacctttttttccttcaacatctcttgtcaactttagctcttcttcaactagtgtggaaacatgctttgaattttccatctcgaatttcttcanaatatcacatgcatacttcctctaggagatgaanatcccaccatctcgctaattgacctcaatgccaagaaaatangacatcaggcctaaatctgtcatctcacaacatcttatcatagcttccctagattctgaaatcaactntgaattcgtgtcagtgaagattagattatcaacatacagacacacaatgagaatat

SEQ ID NO: 2278 - DNA, 270 bp, Glycine max
  unsure (1)..(270): unsure at all n locations
agcttgtcctctccgatggaagaataccgtgacatatgtctcctgggccttataaaggacaatgaagtcaaagtcaacctatgcttgtacctactncatgccaattgaatggccacagcaacccaagttctccaccctggtgagtaataccttgcacttctcttcaccttttccttaacaaatgtgtacctgaaatgttgtgtcacatacttcacgtcctgtgctataaggccgaacgcctcggtggtttccaacgtgatgagtgtggat

SEQ ID NO: 2279 - DNA, 309 bp, Glycine max
  unsure (1)..(309): unsure at all n locations
tatggacaataaaatacgcggtattgagaagagcattttgaaagaagcttctgtgcctgatgctgagaaagatgttncactatcttacaccccgaatgtttctgtgcctgatgatgagaaagatgattctacatcttccggcctaaatgctgagggactccctttatccacgggagaagaatcaacagaagaagaggatttagccctaaatgagactcctgtaacgcgggcgcctgaagctgctgcagtgaactaatgacctgtagacattaatgtgtgaagaaccattgccacacgtggccctcgttt

SEQ ID NO: 2280 - DNA, 328 bp, Glycine max
  unsure (1)..(328): unsure at all n locations
tgcaagctggaatcatttatcctatctcctacagccaatgggcgagtcccgtccaggtagtcccgaagaagaccggcctcacagtgataaaaaatgagaaggaggagttgattcctactcgggtgcagaacaggtggagagtctgcattgactataggaggctgaaccaagttaccaaaaaggacaattttcccctgccattcattgaccaaatgcttgaacgcctggcaagaaaatctcactactggttccttgatggtttttctggttatatgcacaatactattgctcctgaggatcangaaaagaccacattcacctacccctt

SEQ ID NO: 2281 - DNA, 347 bp, Glycine max
agcttatatagaaagttcgttcctaatttctctattattgcatcacctctcaatgagatagagaagaagaatgtggcatttacctgtggtgaaaaacaagagcaagcctttgctttgctcaaagaacagcttactacggcacttgttctatctcttcctgacttttctaaaacttttgagctacaatgtgatgcttctggagtgggagttggagctgttttgttgcaaggtgggcaccctattgtcttatttagtgaaaaacttcatggtgcgacccttaactactccacctatgataaagagctttatgccttaataagagcactcagaacttgggaacattacct

SEQ ID NO: 2282 - DNA, 313 bp, Glycine max
  unsure (1)..(313): unsure at all n locations
agcttcggtattcaatntcgatcgtctcgatgtattacgtgactcaatcagacatctgagtaaaaacgttattgtcgcttggaattgctgaaagcttcaacattcaatgtcgagcatctcgatatatttcgggactcaatcagacatccgagtaaaaagttattgtcgtatggaatttctgagagcttcaacattcaatttcgagcgtctcgatgtattatgggactctatcagacatctgagtaaagaagttattgtcgttggatatgtgccagagcttcaacactcaatttcgagcgtcttgatgtattac

SEQ ID NO: 2283 - DNA, 294 bp, Glycine max
tcttgaaccctcaccgcgcactctttcataatacggagactcctgacacccatcaagtgtacccctttctatgctctctggacatgaatacgcctggttggtttgcaccaaccacgcggatatgaatggaaggcttcttgccacttcattggctctttaaagtcgcatacttcactatattattgctcgtatcttactccccagatcttcaaaccttgcacacgtttctgaagaagatcttatagtcatgtgggcctttcatatcgaccgaccaagcgattgggccacttaacc

SEQ ID NO: 2284 - DNA, 312 bp, Glycine max
  unsure (1)..(312): unsure at all n locations
agcttctccanagaacacaggatcatcatcatactgcaggatatccacaggaaccttgttcttccccaccaggaagcttttgaaacatgtttgagatacttgttgcctcataaaccctgttaggccttcagccactaaatcaaagagaaaaggggccaaaggatctccttgtcgcagccctctttgaggtttaaactctgaagtagggcttccattaacaagaatagatatggaagctgaagagaacaggcctttatccatctaatccatctctcatgagaccccattctcttcatatataaatgagaaatt

SEQ ID NO: 2285 - DNA, 463 bp, Glycine max
  unsure (1)..(463): unsure at all n locations
ttgagcaattcanatggtcataaatagtcactcggaggtcctattcacgcacataatttatcgagacgctctaaattgaacaacggaagctctcataaaatttaaatgctcataacttttaactcggaggtccgattcaggcggataatatatcgagacgctccaaattgaacaatggaagctgttgagcaattcaaatggtcataaatagtcactcggaggtccgattcaggcgcataatttatcgagacgctctaaattgaacaacggaagctctcaagaaattcaaatggtcataacttttaactcggaggtccgactcacgcgcataatatatcgagacgcccgaaattgaacaacggaagctctcgagcaattcatatggtcataacttttaactcggaggtccgattcaggcgcataatatatcgagacgctcgaaattgaacaacggaagctctcg

SEQ ID NO: 2286 - DNA, 486 bp, Glycine max
  unsure (1)..(486): unsure at all n locations
tctagggattaaacataattaagggtattgaaaaacaaatatttaacagaaacattgtatgattctttttcttgggaattccaacggcatgaatgagttgataattggttgattttgatccacaggtcactcaattgagatttgaagccaaggctccaattatgtggtaaattatgactattattgttggcaacacctaaaggacatgacaacttcacgacgagcatttaagatagatagaacaatcttggttcagatctggctggagagactgcagcagccatggtagttacttccattgtgttaaggaaaaccaacccacattactctcacttgcttctacaccaggccatgcaagtgagtcattactcaatgctttgtgtcctagagatcacaattgaatgcactattatactntgaattaaaaataaaatagattagtactgcaggtataattcaatctacgtatagtatatatatactact

SEQ ID NO: 2287 - DNA, 379 bp, Glycine max
atcttaagtcacctgcggcatgcagcttaacatttcaattcgtgcgtctcgtatgttactggactcaatcagacatccgagtaaaaagttatggtcgtttgtattggctcacagcttcaacattcaatttcaagcgtctcgatatgttacgggactcaatcagacatccgagtaaaaagttatggtcgcttgaattggctgagagcttcaacattcaatttccagcgtctcgatatgttacgggactcaatcagacatccgagtaaaaagatatggtcgtttgaattggctcagagattcaacattcaatctccagcgtctcgatatgttacgggactcaatcagacatccgagtaaaaagttatggtcgtttgtattg

SEQ ID NO: 2288 - DNA, 271 bp, Glycine max
  unsure (1)..(271): unsure at all n locations
agtgaactttatagcgggggtgatcacagaatggaaggatattccagttgagcttttgatgcagattttgtcacttgtggatgatcaaacggttatgatagcttctgaagtttgtcgtgggtggagagaggcaatttgctttggcctgactcggttatcactctcatggnacatcatctgtttttttaccttcccttctaatgctttatttcacttttgaggttattatgcttgtggaggcagtgaatattgaaaagggtgattttttttt

SEQ ID NO: 2289 - DNA, 441 bp, Glycine max
  unsure (1)..(441): unsure at all n locations
agcttccttaagaagattcctaaagaagcttgagcttagctacacatacctctctaatagctaagctcacctcctcgagatgagaagctagagcttagctacacaccacctataatagctaagctcacccccatgacaaaaaacatgaaaatacaaaaaaagtccttactacaaagactactcanaatgccccgaaatacaaggctaaaaccctatactactagaatggccaaaatacaaggcccagacgaaggaaatgcctattctaatatttacaaagataagcgagctcatacttagcccatgagctcgaaatctaccctaaggctcatgagaaccctagggccttcccttggatctctagccaatctacttggagtcttctacccaatgcccttgcggggtaggatggcatcatttggcacataactaanatttcat

SEQ ID NO: 2290 - DNA, 395 bp, Glycine max
cctgtattggccttacctgaatctacaaagactattttagtggaggcggatgctatatgagtgggggtcagagccgatctcataccagatcaccattgcatagcctttataagtagaagcttaaatgttcagcaacaatccatgtcaacctataagaaggaggtactacctgtggtgcttgttgtacaaaagtagagacattacttattacctaagcagtctgtaatgaaaactgatcacacaagtctccagtatattcttgaccagagactttccacagctttccaacacatatgcgtggtaaaacctatggaatttgatttcattattgaatacaagcacggaagtgagaaccaagctgctgatgcactctcaagagttgaatgtgctactat

SEQ ID NO: 2291 - DNA, 495 bp, Glycine max
  unsure (1)..(495): unsure at all n locations
ntanacttgttcttacttgataatggttatagacttatagttataattnttaagcaacaaacaaaagaactcatgtgagaattgactcatggtcaagaagatgttctatttattttaattactatcaatttagaatttatggtgaaataaaaaaataaagcaacctgttaaactcggtagaatgatagaaaatttagataatttatatggcatcttaagtatacatcttattatcaccattatataaaacaaataaataaaattaacaaaaggagaaaataatttatctgccaaccatggattttttttttatacttttatctaatcataaattaacatatacaataaaattgttgattnttttatagtaattattttcaagttatagttatcataattnttaattaactgatagtgtaaaattatatattaataaaatataaattaaattcattaacaaaagaacattataaagtgtctgtgcaaaatgaaatg

SEQ ID NO: 2292 - DNA, 259 bp, Glycine max
atataaacttcttcaaacaaatctctattcaaaaaagcattattaacatctaattggagaagacactagtttctaacagcaacaacacagagcaaaactcttacagtggtaagcttggccattggagaaaatgtatcagagaaattgattccagcttattgagtataccctttggcaaccaatcgagctttgtatctatccacaaagccatcattttatatttaaccttatacacccatctacaaccatacatgcttat

SEQ ID NO: 2293 - DNA, 502 bp, Glycine max
  unsure (1)..(502): unsure at all n locations
atactcagctagaagaaataagactagtggctgaggatagatgattagtatctctggcggtttaagttatatgagtgacaacaactctgtacaatattntgatgcacttcaagaacacacacttgagggttttaatctaataagaaagtttgagacggaattcacctaaacttaaatntttataaaatggatttatagaattattaatttgtgatatcgacgatactaaaagattatatatattacgatagaaaatgttattatattaatttattgaaatgatagattttgcttgtatggccgaagttatggccacaaatatatattttagagaaaattattaatttttgaaagtttatatgtaacttgaaaaacttagccaattgttataatgtgaacttatgcttggtattcgactggcgacgattgttagtggagtcggggactgtaacttaccttctagagcctatattattaccataactgtgatgtaatcattata

SEQ ID NO: 2294 - DNA, 486 bp, Glycine max
tatctctagaagacaaataaatgagtttctttgtactctcaaattagtttatgcactttatagaaactctcttctctcatatatagctcctttaaagatgaacaaatttctaaaaattaacttatataatttatgtagaaactcttgattcttctttttcttaaagcgtatatgaaaaaacttaccaaaaaagactctgtcattaagaaaaaattatgaagcttatccgttggttttgttttattataagctttttatcttcatgtgcgttgttccctgattcgtagtaattgctaatgtaacatgagtttaatggaacatattgtcggtgtcaaattacagaataaagaaagtagaaaatcataactaataagactcttaacccagtaaataaactaatcttatagcttgatttgtaattaaataatattatacaactacttttagttattgatacatagcctatcctatcatcttacatttcat

SEQ ID NO: 2295 - DNA, 315 bp, Glycine max
gcttgtaatcgattacacatatactgtaatcgattaccataagagaatttcagaaaatattctcaatagtcacatctttttatttcattcttaaatggccatcaaaggcttatatatatgtgacttgagacacgaatttgctaagagtttttaagaacaaaaaggtcttatcctcttaaaaagtaaaatcgttttatcctcttacaaattccttggccaaaacacttgtgattcaataaggaattatttgagtgctcaaattgttcaatctatctctttcaagagagatttcttcttctcttcttctttattctg

SEQ ID NO: 2296 - DNA, 471 bp, Glycine max
taaagtttgtaggcctgaggattctctattatctctctcacacgcacatatataatagttctatatataataatatattcatgctgataggctcgttggcgtatttgacttcgacaagtttcttcgcttgtttataaaccttaattcaaaatagacttattataaatagacttttgtgacaaatctaactcttaaacaactcagactagacttaacaaatcaataaatagtttctttgagtaatattagattctattcttttaagtaagattttatatttaagttttattgatagaaaaatatgattggaagaaaaaatctcattaaaaatagctcattaggttctttgatagagattaattatcgacaaaactaataaatactctattccaatagcataattaagaaaaataaattaaacttaacaaggatatataataggcaaatgagttacgctagactttgtaatta

SEQ ID NO: 2297 - DNA, 431 bp, Glycine max
  unsure (1)..(431): unsure at all n locations
cgcttgccttagcacactntacttncatctatttcagactatattatttatacgggttggacaaaatgtttccgaagactaatatcatattgttgattaccttgtatatgtaacaatttaccttattattgtggagtttggcattgggtgcataaagggctcgatgacataaaatcactttacaaacatcttctttctactcatcacatctacaacaaatagaacaatatatccctatttgctgatgagtacataatacatttgacttgtttttgccaatatacggatgagttcatcacatttttcttattttggcatcaaaatattattatttaagataaaatatgtgttacatgttattctatatcattatgtgatgtgtcggtttatgatataactatgttcttcctactcgagatatactcattttt

SEQ ID NO: 2298 - DNA, 469 bp, Glycine max
  unsure (1)..(469): unsure at all n locations
agcttacagcaaatgatagaatgtctatagttttatcatttgacaatttattggtattatatgtcttatccttcatatatatagactctcttttttcatctttttcaactgtgaatttttacataattcataaattttatttgataccttgcatagcattgcatttagcaaatacaatttaacatgcttggtttataagtattgacacaaaaaaggcttatgaaaataccttgtattgcatgttgctagggcttattaaaaatatcaaataattttacatgtgtctgtgaaatcagacttattaatgatgcgataaattatgtaactatcatgtctctcgttgatgttgctaaaaaaattgtttaggaagtatanggattaaaagtgcattttgcaaaaagtttaaagatcgagaacataattaacccatttaaatattatcaatanaataaccttaaatttaaaatac

SEQ ID NO: 2299 - DNA, 511 bp, Glycine max
  unsure (1)..(511): unsure at all n locations
tcggacctataaaactaagctgggtatctccttcttcactacatcaagaatcaccgggttgtgtcttctctgtggctgtcttactggtttagctccatcttctaaatttattcgatgcatacatgtggatgggctaataccaggaatgtccgccagggtccagcctatagccttcttatgcttcttgagaactgacaacaacttctcctcttgctcatcagcaagggaggcagatataatcactggaaaactcttgctatcatccaagtaaccgtattttaaatttgatggcagaggcttcaattctggtgtggtcggctggacagtggtagaaggagatggtttctcancctttacctcataaagaaagtcagaggtatgtgtacttcctgaaacatggttagtcctatctgactctataanatcaatctcaagaggtaaaacaccaccaccaggcatgcaatcaatatcactctcagattcactctcagcatcaaagtcagacatatga

SEQ ID NO: 2300 - DNA, 449 bp, Glycine max
ctaatgtgttctcccttgtagaactactaactgcagtaacagttgcagcccaactatccagtagtgatgacaatagaatcaatgccttcacctcatcctcaaatttaatctgcacagattccaattgggcaagaatagtattaaactcattaatatgatcagttacagagataccttctcccatcttgaggttgaacaaccggcgcatcaagtatactttgttggctgctgacggcttctcgtacatatctgataatgccttcattaagcctgcagtagtcttctcgttcacgatgttgaacgcgacgttcttggctaatgtcaatctgatcacgccaagagcctgtcgatctagcaagttccattcttcttgcttcatgtcttctggcttaacccctgataagggctgatacagctttttctgatatagataatcctctatctgcatc

SEQ ID NO: 2301 - DNA, 337 bp, Glycine max
  unsure (1)..(337): unsure at all n locations
ctgagcanattcaaacgacagatcactgtttactcggatgtcttattgagtnccgcaatatgtcgagacgctcgaaattgaagaccgaagctctgagcatattcgaacgacacataactttttactctgatgtctgactgagtcccgtaatatatcaagaagctcgaaattgattatcgaagctctgagcaaactcaaacgacaataactttntacttggatgtctgattgagtcccgtaatatatcgagatgctcgaaatggaataccgaagctctgagcaaattcaaacgacaataactttttactccgatgttcgattgagtatcgcaatatat

SEQ ID NO: 2302 - DNA, 378 bp, Glycine max
agcgttaggatcggaagagtgactatgataatctattatggccaacggaaaaatgaggggttgattgtcaatgcaatttgggggtagctctgctggcttcgacgtcattggcaaaccgcggaatggtttgagtgtggaacaatggaaaatatggtgaattcgtgctccttttggtacttgcaagcggtacgccatgggacctattctctctatgatctgaaatggcccgtaatacctctttgctaatttgcccatactagccggagttccttttgtcgatgtttctcggtatggtcggagcttgactataacccagtcaccacattcataattgaccttgtgccgcttcttatcagcatatgtcttcatacatgcttg

SEQ ID NO: 2303 - DNA, 482 bp, Glycine max
  unsure (1)..(482): unsure at all n locations
ngagcttaaatctaaactcagttattcaaatgagataagctcatgctgtatatgtttgataaaagctcacaaacaacttgtgtttgtgtatgtgtatattctatacaaaagattgtcattttaaatgagaaaatgtatgtatactaataataataatttatttattgttattacttagtaaattgttatcttattgatttattactgtctactatttacgtaacgctacttttcaaagagtttctttactctcttcaacttctagcataaagatatgtactcaactaaatgctaaattaataaacatagaaagaatacattggagaaaatttgaggtacgaaaagaaaattattgttagaatttagaatatgttgaatagtaactgtcatgttgaatgttntatgactgaaagttagcagttacatattattaaatatgcgtaatacgggaatagagggatatgtgtgtatcggtttctagt

SEQ ID NO: 2304 - DNA, 424 bp, Glycine max
agcttatgacaattgaaattctcgagagcttccgaatacgtgtgaaaagttatgaccatttgaaatttttgagagattccgttgttcaattttgagcgtctcgatatattatgcgcctgaatttgacttgcctgtgaaaggttatgaccatttgaatttctcaagagcttccgttattcaatttcgagcttctctatatgtgatgtgcctaaatcagacatacgggttaaaagttatgaccatttgaatttctcaaaagcttcggtagttcaatttcgagcatctcgatgtattatgcgcctgtatctgacatccgtgtaaaaagttatgaccattttagtttatcgggagcttccgcttttcaatattgagcgtctctatatgtgatgcgcctgaatcggacatccgagttaaatgttattac

SEQ ID NO: 2305 - DNA, 468 bp, Glycine max
  unsure (1)..(468): unsure at all n locations
tgtttcgaaaccacccattggttctgataggcttgtgagaggcatgtttagggactaaatcccacacttcattccttttaaaatgaattaattcatcgtgcatagccaacaaccaatgctcatcatgaaatgcttcatatatggttctaggttcaatctgagaaacaaaagttgtgttcaagatccttaaccttggtttcatcttcaagtgcagcttgcgtatcctaaaaacctgcttcttcattttccaaagcattttcttgaacaaaagagccagtttcctcacgaataatatttttaggttcttccacacacaaagttctcctattaagcactctataagccttgcgttgtaatgaataaccaagaaagattgctcatcagttttgcatcanattanaaagagatccttttcattattaaatcaacatttacatcaaaccctaaatggatatattggttcttcat

SEQ ID NO: 2306 - DNA, 473 bp, Glycine max
  unsure (1)..(473): unsure at all n locations
tctatagaaggttcgttcctaatatctctacaattgcatcacctctcaatgagctggtgaagaagaatgtggcatttacctgcggtgaaaaacaagagcaagcctttgctctgctcaaagacaagcttactaatgcacctgttctagctcttcctgactgttctaaaacttttgagctagaatgtgatgcctctggagtgggagttggagctgtattgttacaaggtgggcaccttattgcttattttagtgaaaaacttcatagtgccaccctcaactaccccacctatcataaagagctgtatgccttaataagagccctgcaaacttgggaacattaccttgtttccaaggaattngtcattcatagtgatcatcaatcacttaagtacattagagggcaaagcaagttaaacaagaggcatgcaaaatgggtagagtacctagagcaatttccatatgttatcaaatac

SEQ ID NO: 2307 - DNA, 443 bp, Glycine max
  unsure (1)..(443): unsure at all n locations
agcttcattcctttttcactcatgtgtccaagtctttgatgccacatggttgaattattgacagcctcagtaactcctaccatatcctcatctgcaatcatgtaaagagatcctcgcttctttccacgagccacaatgagattgccttttgttaccttccaagctccatctccataagtggtgtgatgcccttcattatccaactgccctatggatattaagtttctctttaaggtaggaatatgtctgacattgtgcaatgtccatagggatccaccagaggtctttatgtcaatatcacctcttccgataatgtccagagattntccatctgcaaggtaaactttcccaaatcttccaaaatatagttagacaataaatctttagaaggagttgtgtggaacgacgcacctgagtccatgatccatgaatcaacaggacta

SEQ ID NO: 2308 - DNA, 238 bp, Glycine max
tgtaatcgattaccccttcggaactttccgagatggctcccaagagtccctactgtatatattgtattatgtatggcctccctggtctttcaatatattaccagacatgcaagttccaagttcaagtctgatgagtcacaactttttatatactagttgtgtgatccgattcaaccattatgtaatcgattaccatttgcgaatgttcgataatagctcccgagagtccacctattca

SEQ ID NO: 2309 - DNA, 496 bp, Glycine max
  unsure (1)..(496): unsure at all n locations
ggaaccttgatngaatttccatccaatgttggagaaaggttcttgtgtaaagtatagatgtcaaagagggttaaagaaatgttaatcttataaaatatgatcttgtaaacaataaaagattattacttactttttgctaacattttcggtagtagttatcgctatgttcaaagtaagcattgtttttttatattgattactagtgagagtttccatgattntcttattattgttggaagtaatcattgataanaatgtttaagaaggaaaaaaattatataaaaagtatgcaaaatactagaaaggaataatttcatgtgaaaaagtgattttgatatttataatggttttgaagtaattaactaacaaaaatagacactccagtaataataacataacgttcatgtatctttntctctagctaacttaatttggatataacataacgttctttaataacannatatngacatcattgactttgagaaaaaacaca

SEQ ID NO: 2310 - DNA, 383 bp, Glycine max
  unsure (1)..(383): unsure at all n locations
agctnggctgtcttcctattcatccatcaacatgtagaatgcttattctttccatattgatgatatgtcttgatccagctttaactcttgcttgtgcattcgagtttaatgatccatttgtgcatcccattttacctgatgaaaagaagagagcttcagctgctagatctgagcttggttctttgtatgggggttgtggtgaccagtttgctatagtagcagcatttgaatgctggcataattcanaggaaatgggtctagaatcacggttttgttctcagtactttgtttctcaaagcattatgaacaagttatctggaatgcgtaagaatttagcagcagaactatatcagaatgggcttattcatgggcagtttacaagc

SEQ ID NO: 2311 - DNA, 409 bp, Glycine max
tcgattactagaagtttttacgtttttaacaacctttagaaatttgaatttaaattttaaagcctgtaattgattacaacttgtgtgtaattgattaccaacatgagaattcaaatttcaagtctgaagagtcacaactcttcagaaattaactgtgtaatccattacaacagttatgtaatcgattaccaataaggaattttcgaaaataactcccaagagtcacaactgttcaaattttttttgaatggtcatcaatggcctataaatcaattaccagacatgaaaattcaaatttcaagtctgaagagtcacaactctttagaaactaattgtgtaatcgattacaacaattatgtaatcgattaccagtaaggaattttcgaaaataactcccaagagtcacaac

SEQ ID NO: 2312 - DNA, 403 bp, Glycine max
  unsure (1)..(403): unsure at all n locations
tgtagcagantagaactacaataactnttcactcggaagtccgattgagtcccgtaatatatcgagacgctcgaaatttaaaaccgaagccagtagcaaattcgaacgacaataacaattcactcggaagtccgattgagtcccgtaatatatcgagacgctcgaaatttaaaaccgaagctcgtagcaaattcgaacgacaataacaattcactcggaagtccgattgagtcccgtaatatattgagacgctcgaaattttaaagcgaagctcgtagcaaattcgaacgacaataacatttcactcggaagtgcgaatgagtcccgtaatatatcgagacgctcgaaatttataaccgaagcctctagcaaattcgaacgacaataacatttcactcggaag

SEQ ID NO: 2313 - DNA, 436 bp, Glycine max
  unsure (1)..(436): unsure at all n locations
agcttcggttntaaatttcgagcgtctcgatattttactggactcaatcggacttccgagtgaaatgttattgtcgttagaattagctacgagcttcggttttaaatttcgagcgtctcgatatatttcgggactcaatcggacttccgagagaaaagttattgtcgttagaattagctgcgagcttgggttttaaattttgagcgtctcgatatattacgggactcaatcagacttcctagtgaaaagttattgttgatcgaatttgctacgagcttcgatttggaatttcgagcgtctcgatatattacgggactcaataggacttccgagtgaaatgttattgtcgttcgaatttgctacgagcttcgggtttaaaatttgagcgtcaccatatattacgggactcaatcggacttccgagtgaaatgttatt

SEQ ID NO: 2314 - DNA, 473 bp, Glycine max
  unsure (1)..(473): unsure at all n locations
acaatggttttaaaatgtggctcataaacttggaatccctatccgacacaatgctcctaggaaatccatgaagagtcactacctctttgaataaaagatacaccacatgacaagaatcatccnctttgtgacatggaatgaagtgtgccatcctagaaaacctatcaacaaccacaaaaatcgaatctttctcctcttggaccttggaagaccaagtacaaaatccatggaaatgtcggtccaaggggaggtaggaattggaaatagagtatacaaaccatgatgcatgactntagactttgcgttatgaacaaaanttgataatatcatgtttcattntaggccaaaagaaatgttcatgcaaaatgttcaaagtcttttaaactccanaatgtcctggttaaccccctttatgagcttcacanatcatgagttcatganaggaactttgaggcaacacaatcttttatttt

SEQ ID NO: 2315 - DNA, 444 bp, Glycine max
  unsure (1)..(444): unsure at all n locations
acattgagatgctataaattgagatatggaagttcttgagagattcaattggtcataacttttcactcggatgtcagattcaagagcaaaatatacagagacgctcgaaattgaacaacggatgctctctagaaatntaaatggtaaaattttttcacatggatgttatattcagacacataatatatcgagacgttcgaaattcaagaattcaaaaattaaagttctcaagaaatatagagatgaaaaattatgaccatgggtgtacgattgagacccatgatatatcgatatgctcaaaattcaaaaattggtccaattcanaaattcaaagagccctaactntngacatgggtgtacgatngaggcccatgaaatatcgagaacgctcgtaatgaaaaattgaagttcttgagaaattcanatagtcataacatttaactt

SEQ ID NO: 2316 - DNA, 399 bp, Glycine max
  unsure (1)..(399): unsure at all n locations
agcnttatgagagagtcaaagatcaaatggagaggaaaaattataactatgctaaacaagccaacaaagggagaaagaaggttgtcttcgaacccggagattgggtttgggtgcacatgagaaaagaaaggtttccggaacaaaggaaatcaaagcttcaaccaaggggagatggaccatttcaagtgcttgaaagaatcaatgacaatgcttacaaagttgagctgcccggtgagtataatgttagttccaccttcaatgtctctgatttacctctttttgatgcagatggagaattcgatttgaggacaaatccttctcatgagggagagaatgatgaggacatgaccaagagcaagggcaaggatccacttgaaggacttggaggacctattgaca

SEQ ID NO: 2317 - DNA, 349 bp, Glycine max
  unsure (1)..(349): unsure at all n locations
atgcctacaaatgaggaaatccatcanactatcaagtttatggtgagtctcacagcaccaacactggatgggtttcatgtnttgttcttcgaacatcattggagtgtaatggggagagatgtctacaatttcactagagctttcttttaggatccaacaaaaattgctgaagtgaaccaaacttttttaactctgattctgaagaaatgtgaggtcaattctattaaagatatcagacctcttagactttgtaatgtgatttatgaagctatgactcgtcttatctctcaacgcttgagaccaatgatggtgaaattagtgggtcatttccaatctagccttaccccaa

SEQ ID NO: 2318 - DNA, 408 bp, Glycine max
tctgtccctgagaaactggttcccagaagacaacatggagtgtagattgctgtaaaccctagccttgcaacaagttctagggaagtagacacggagatggacaagaaaatccgcagtatggtgagtagcattttgaaagaagcctctgtgcctgaagctgatgaagatgttccaacatcttccaccccgaatgtttctatgcctgatgttgagaaagatgttccaacatcttccggcccaaatgatgaagtactctcttcctccagcaaagagagatcaacagaggaagatgatcaagccgcagaggagacccctgcaccaagggcaccagaacctgctccaggtgacctcattgacttagaagaagtcgaatctgatgaagaacccattgccaacaggttggcacct

SEQ ID NO: 2319 - DNA, 409 bp, Glycine max
  unsure (1)..(409): unsure at all n locations
atgttctgttatcaccgtaacattaaattcaatgttaattataaccctatcaaccatttaaagctagtatatctcatcatcaggaatatctggngttaggaatttcctgggatctttacttatttcttcatagtttagggttgatttcaccctttctggcactggcatgagaggaataatgctatctctatcgattacaccatcaataattccgtattccactgcttcaattggagacatatatttatccctatcaatatctctttgcacttgttcaaatgagcgtccagtgaaacttgatataattcttgtgatattattcttgttgtgcataacttctttagcctgaatttctacatctatagcttgtccactagcacctcctagagggtgatgaatcataattcgt

SEQ ID NO: 2320 - DNA, 433 bp, Glycine max
  unsure (1)..(433): unsure at all n locations
agctattnccatgggtcgagcggtcttataatatattatggaatgcaggcacaggcaccactccatttgagataaccttcgggcggaagtcctttaattttccagaatacattgcggggattgcaaaggtggaagctatggaagatattctatcagaaagggaggccaccttctaggcaattcgaaagaagctcttgaaagctcaagaacgcatgaagacatatactgatatgaagcgccgggaggtcaattatggctccgatgactgggtcttggtcaagctccgaccatatcaataaacatctgctaaaggaacacaggccattacaggcaaattggtgaagaggtattactggccattccaaattaaagagaggataagcccagtggcataccgcctacaattgccgaacggagcgcgaaatcaccctgt

SEQ ID NO: 2321 - DNA, 500 bp, Glycine max
  unsure (1)..(500): unsure at all n locations
tacctcgacaccaacagtgacaatggcagcgagagtggcagtgagaaagaagagtcgcanaaggaaccaataatattaaggtgtggaattgcgagactggcagtgacaatggcagcgagatgcggaggcacggagttgcgatgaagacgatgacgcgggcgacactagagttgcggcagagacttgaatgaattagggcgtggagccaataatatttttaaaaattgagtcgttaacatcggtttttccatcaaaaccgatgttaacaaagtgatgtttacgttaacatcggttntttttataaaaaaaaaattgatgttaacttataatttaccaacatcggttntttcaaaataccgatgttaaggaagtgatgttaaccttaacatcgattntntaagaaaatcgatgttaacttatcattntccaacatcgganttttgaaaacggacgttgcgtntcatgtaacatcggttctcaaaaccgatgtaacctactat

SEQ ID NO: 2322 - DNA, 421 bp, Glycine max
  unsure (1)..(421): unsure at all n locations
gacactatgaaactaagcctatctagttataatggattcactggaggaatagtggacactacactattcanaaagggctagaaaggaaanttgttgattgttcaaatctatgtagatgacataatctttggtgcaaccttagaaaagatgtgcaaagagttttctgggctaatgaaaggtgaatttgaaatgagtatgatgggtgagttaaagttcttgctagggcttgaaatcattcagaaagatatgatggatatttatccttcaagaaaaatacacaaaggacatacttaagatgttcaaaagggatgaagccaaacctatggctattcctatgtatccttctctagtcattgataaggatgaaagaggtaatgatactcgtaaaaagataactgctagtagaccagatattgtattt

SEQ ID NO: 2323 - DNA, 310 bp, Glycine max
  unsure (1)..(310): unsure at all n locations
tttaaatttatgatttaattnnttttgaggtggagttgatattgagaaggaggaantaanagatttgagggtaaatnntttttaaggggaagaaaatgatgnaatnttttntaggaagggannagtnattagaagtatgagnaagagggtttaagagaattgggttagagntgntgaaaaagggggtagggtttttatgaanntnaagatagatttttgagnnnatggannaatgttgggttnaattatttttgtanatattaaantaggatggtattatatttggtnnttgtatttagggttnnataat

SEQ ID NO: 2324 - DNA, 344 bp, Glycine max
  unsure (1)..(344): unsure at all n locations
atcaaatcttatcttatccagattgtattccatccagactttattccgtctagattttatttcgtccagattntattttatccatcttatcttatcttgtccagattttattttatttcgtttatgggcttggacttaaaatagatttgtaagctntgtggctaagaacctcatccatacattttttaatagtatgctctctttattttcttttgatatactttgtgttttaacgacttgaattcaatatgaatttgtttatcaattatttgtggagttgtacattacttatatgaaattttataagtttattgttttagttagatttcactacgttctaaaat

SEQ ID NO: 2325 - DNA, 453 bp, Glycine max
  unsure (1)..(453): unsure at all n locations
agcttccattgttcaatttcgagtgtctcgatatattatgcgcctgaatcggacctccgaatgaaaagttatgaccatttgaatttctcgagagctacctttgttcaatttcgagcgtctcgatatattatgcgcctgaatcggacctccgagtgaaaagttatgaccatttgaatttctcgagagcttccgatgttcaatttcgagcgtcttgatatactatgcgactgaatctgacctccgtgcgaaaagttatgaccattttaatttctcaagagcttccgttgttcaatttcgagcgtctctatatgtgatgcgcctgaatcagacctccgagtgaaaagttatgaccatttgaatttctcgagagcttccgttgttcacatttgagcgtctcgatatattatgcgcctgaatctgacatccgagtgaaaagntatgaccatttgaatt

SEQ ID NO: 2326 - DNA, 225 bp, Glycine max
  unsure (1)..(225): unsure at all n locations
ntagttgacagatatgttaaccaagggacttcccacggagtatcttcaagaaccttattgcaagctgtgaatgatagatatgcattcaccagcttgagggggagtgttgtgatacattccataattaacacagattntattatgtacagattctattccattgtatttctttccttaattaggttgcttgcagcatataaataaatcttgtattcacttctttgt

SEQ ID NO: 2327 - DNA, 449 bp, Glycine max
  unsure (1)..(449): unsure at all n locations
tgcgaggctgcaagtgtagcatatatgcacaacagcctcaccgtagaaatcccacgtgagagtgaaaactcaacagctatgagaatgttgtctctctacgacaacattgctagaagacatgttcccgccaaactgggacagttctctgcgatggtggttcttgatttgtcggagaacaagaatagtggaccgctgccaaccgatgccagcaagggacgtacactctaggacttggtcgctcttgataacatgttttctggcgagataccacacagttatgcgaactgcatggtgctgtcgaagtacaaagtgatctgcaaccgtatggaggggtccattcccgctggactcatcaggttgtgacacgatacaatcattgatttgagtagcaacaactntaccggtccggctcctgagattaacggacattctagaaaattatctgagct

SEQ ID NO: 2328 - DNA, 456 bp, Glycine max
agcttacatctaggaaaacactggcttagaatgatgtgcttcatgttccctctatcaaagttaaccttatttctgtagcattgtggggagaggttggggtaaagatatcctttgagtctaataagatagttatgactaataataatgtatttatggggaagagatattgtgatcagggtgtctttgtactcaatgtttctgaagtgattaatgagaatgcatcttcttatgcttacttgattgattcttatgatatatggcatgctagattaggacatgttaatccaacttatgttatgaaattgcaacaatcatgtttaattaatatgcatgagaaacacagtaagaaatgttaaatatttgttgaatcaaaattaactaagaaatcatgtccttctgtacaacatgaaattgaactgctaggcttaattcattatgatcttgcatatttaaaac

SEQ ID NO: 2329 - DNA, 384 bp, Glycine max
  unsure (1)..(384): unsure at all n locations
tgcagacatgggacatcgtatagtatatatgattcacgatcttgggacagacggttttcaacaagcacatgcacccttgtatgacaaaatacaaagtcattcaaagaagtctgtgtattcgaggtgcacatctttcacatagttgtcagcggtgttaagtctggccaacttgaaggcatgatttgcatggagtgacaagagcttcatcaaattgtttgtgttattgaanagcatgctttctgaggataacacattgccgaggaatcactatgaggcatagaagattgtatgttccgtgggaatgcagtaccagataatctatgcatgccctaatgattgtagtttgtacataaatgattntgtagagatgcgtacatgtcccat

SEQ ID NO: 2330 - DNA, 402 bp, Glycine max
tgcctacaacaatctttaaatatttatgtaggaataataaatcaaagaagttactaatgacaaaaaaatcaaagaagttaaatataaatttaattttgatcaagaaatgacaaatgaaaattaatgtgtttttgaaattgccaagagctgattgaaaatgtaaatttatgcacttcgattcaaaggtcaaggtaaaaaagaaatagaacattacatgtaaatttaatgaaaagaataattgaattgttttggttaagatgacgagttagaaaggaggaagtgaaattttcaaataacttttttatataaaactattcaaggatgatataaaaactatttttaaaatagttttagctgagtgtcattaaaataattgttttattgaaaaatagtagtagatgt

SEQ ID NO: 2331 - DNA, 433 bp, Glycine max
  unsure (1)..(433): unsure at all n locations
ctcagtagtagtataattggcttgggcatcatctaaagtcctagaagcataatatatcaccctgcgcaatttatcaattntttgagcaaggacagcccccaatgcataatttgatgcatcacacataagctcaaaaggggctgtccaatcgggtgcctggatgatgggggtggtagtcaacgctcttttgaggcaatcaaaagcctctttgcatctgtcattaaagtcaaactccacctccttttgcaacaagttggacagtggaagggctactatgctaaaatcccttacaaagcgcctgtagaatcctgcatgaccaagaaaagatcgcacctctcgcacacaagaggggtaaggcaattgtganataacagaaatttntgcaggatctacttcaatacccttattggaataatgtggctanaactatacc

SEQ ID NO: 2332 - DNA, 368 bp, Glycine max
tgaatcacaaatctgaacctgtcgacagactctgtggtttatgctcctctgccgaccaccacacagacctttagccttctgtgcaacaatttgaagcaattgaacagcttgaagcttatgctgcaaacatctacaatagacctcctcaacctcagcagcagaatcagtcacaacagaacagaacaattatgacctctccagcaacaggtacaatctcgggtggaggaatcatcccaaccttagatggtcgaatgcttcaccacagcaacaacaacaacaacaaccttattttcagaatcctaatggcccaagcataccatacgttcctacaccaatccagcagcaacaacagcaacagccctagaaac

SEQ ID NO: 2333 - DNA, 491 bp, Glycine max
  unsure (1)..(491): unsure at all n locations
tctanactntatacaagaatgaagctctgataccacttgttagacaagtggcctcagatatcttaagaagggggggttgaattaagatattccaaactacttccccaattaaaaatctatttcactctttactcaagttatgaattcccttaatgacaatcttcttaaatattgattcaaataaaacaatttgaatatgaatataaagcaataataaataaaggagattaagggaagagaaagtgcaaactcagatntatactggttcggccacacccttgtgcctacgtccagtccccaagcaacccgcttgagagttccactatcttgtaaattccttttacaagttctaaacacacaaggacaatccttcctttgtgtttagaattcctttacaacaagagactcacagtctcttaatccgttagagaatgaggagaagaagaagaataaatctctctagaaagagatggatttacagaatgagactc

SEQ ID NO: 2334 - DNA, 297 bp, Glycine max
  unsure (1)..(297): unsure at all n locations
aactctttntatagcagatttgttggtgctacttcacaaccccttgaactacttcacattgatttatttggtccctctagaactatgagtttaagtggaaattactatgtctcggtaattgtggatgattactcaaggtttacttggaccttgtttataaaaactaaaaatcaagcttttgatgttgttcgcaaacttgccaaggtgatccaaaataaaaaaaaaggtctttacggtgtttcatctagaagtgatcatggagatgaatttaccaatgagtcttttgacaacttctat

SEQ ID NO: 2335 - DNA, 456 bp, Glycine max
agcttcaagaaaaagatggcctcagcaaattccttatttccaaaaggtaattctatcaatagacctccaatctttaatggagagggttaccactactggaaaacccgaatgcaaatttttattgaggcaatagatctaaatatttgggaagccatagaaatagggccttatatacccaccacagtggaaagagtttcaatagatggtagttcatcaagtgaaagcataactatagaaaaacctagagatagatggtctgaagaggatagaaaacgagtacaatacaacttaaaagccaaaaatataataacatctgccctgggaatggatgaatatttcacggtttcaaatcgtaagagtgctaaggaaatgtgggacactcttcgattaacacatgaaggaactacggatgttaaaagatctatgataaatgcactaactcatgagtatgaatta

SEQ ID NO: 2336 - DNA, 462 bp, Glycine max
  unsure (1)..(462): unsure at all n locations
cgatgctgaggggtgcttgtttgatcggtcaactcattnttctgagtagtgcgttacacttttattatttgttcatttcaggttcaacactgtagcatatttgcagcaaatatggtggtttgaggtggatggggagttcagcttcccttttcctgctgatatttatactctctcctttaggcttcaccttggacgattttccaagaggcttggtcgacgtgtctgcagttatgaacatacccatggttgggatataaaaccagtgagatttgagttgtcaaccatggatggtcagcaagcatcatctgagtgctacttggatgaaactgaacctgatgatttacacggcaatcacaagcgtggacattgngtagattacaaggtgggtgagtttatcgtcagtggatcagaacctacaactaaagtaagattcttcatgatacagattgattgacacactct

SEQ ID NO: 2337 - DNA, 451 bp, Glycine max
  unsure (1)..(451): unsure at all n locations
agctaggctctagaccttgtcattggatcctataactcatgaagtgcttctaggcccttatactctttgaatatctcgagaatgaacaatggaacatctcgagtaattcaaatggtcataacatttcaatcgaatctccgattctagcacgtaatatattgagacacttgaaatcgaacatgaaagctctcggcaaattcaaatggccataacttttgactatatgattgaggcccatgatatttccagacgctcaaaattgaacaacggaagctcttgagaaattcaaatggtcataacttttcacttggatgtccgattcaagcgcataatatatcgagacgcttgaaattgaacacaaaagctctgaccaaattcaaacgaccataactnttcacatggataatcgattgatgcccatgatatatcgagacgctcgacaatgaacaac

SEQ ID NO: 2338 - DNA, 421 bp, Glycine max
agcttcctagacgactactccggatacaaccagatcagaatggatcctctagacgaggagaaaatgacatttatcactgcggatgccaacttttgctatagggtcatgcctttcggcctaaaaaacataggcacaacataccaacgactgatggatcgagtcttcaaacaacagatcagactaaacattgaggtatatatggacgacatggttggcaagtctcacagcataccccaacatgtggtagacctagaagaagtcttcagggaactccgcaaatatgacatgcacctcaaccctaaaaaatgtactttcggggttggcggaggcaagttcctcaacttcatgatcacacaccgagggattgaagccaaacctgacaaatgcactgtcatactggagatgcgcaacccagccaaca

SEQ ID NO: 2339 - DNA, 432 bp, Glycine max
  unsure (1)..(432): unsure at all n locations
agcttatgataaacttgagaaggtttgaacctcatattagttgtggatgatcttcatattctattgtagaaagcaatttatttttggcctcatgtctgttcagtatctttgaaattttcctgttagcataattactttaattttctcattagtaaatgatagatttataagccaagattatcatttcaaatatagaatagataattnttctttattgttctcatggcaattcttacactattaaaaaatatactttcaacatcaattttaaaaccgatgttgaaagtaccaatgttaaatgtaatattgttaacatcggttttgaaaaaccgatgttaacataaaaattctaacatcggttttcaaaataaacgatgttatatacaaagaactacaacaaaataagtgtatgcataatgaatattgacatcg

SEQ ID NO: 2340 - DNA, 498 bp, Glycine max
  unsure (1)..(498): unsure at all n locations
ggtgtagcactacccactgcagaagctgaatatattgcagctgcaagttgttgtgctcaaagtctctgatgaaatcctatcccccaagggcataggatagaagactccaagaagattgggccagagatgcaagagaaggccctaggattctcattagccttatggtagattntgggcccatgggctaagtatgagaccacttatctttgtacatattacattaatgtttcattatttttggcctttgtatttaggactccataatgtaggtagggtaccctagaaatgttggacttttcagcccttgtattttatggcacctagactagttntttgtattaagggtagttntgtaatttcattcgcattaagtgaatatttgatgtgtgtgttgngaaataaatttaatcgaattgggagaagcctaatccaattaaattntagagggggaggtgagcattngcttgctacacnccattgccacatcatatagtcaca

SEQ ID NO: 2341 - DNA, 380 bp, Glycine max
  unsure (1)..(380): unsure at all n locations
agcttgtggagtataagaagtcacagaattgtgttaggttggaaggtaaccgttttgtgttccctggaggtggcacttcgtttcccgaaggagtcgatgcttatgttaatgctctaaaacgtcttcttcccgtgcctttataatctggggatgtcaaaacaatgcttgatgttggatgtggggtgagtcancttctatatcttattatgctttctccttccttggattctctttctttattttctttcgtcctctcttaattgttcgccctgttatcatttcattcgccttcttttagcttgtacttttacatgttactacaagaggagtttcttgagcaacanagacagagaggcttttcaatcaaatgagagcttatg

SEQ ID NO: 2342 - DNA, 430 bp, Glycine max
  unsure (1)..(430): unsure at all n locations
agcttgtgaacaaggaagacatagatgatgtgataagagaggtgcaaatcatgaaccatctctcgggtcaatctaacatcgtggaacttaagggtgcctatgaggataaacaatcggtgcatttggtcatggaactttgtgcgggtggtgaactttttgatcgtatcattgctaagggacattacactgaacgcgccgcggcttcattgctgagaaccataatgcaaattattcacactttccattccatgggtgtcattcatagagatcttaagcctgagaatttcctcatgttgaataaggatgaaaattcacccgtcaaggtcacagattttggtctatccgtctttttcaaagaaggtttcccttaattctatttcatatattctctattattntttctctcttccacatctttttttttttcaat

SEQ ID NO: 2343 - DNA, 452 bp, Glycine max
  unsure (1)..(452): unsure at all n locations
agcttgccaagaaatatcatgttcttctagcttctgaagcagtcatcaagcaaattcctcgtcttttggggcctggtttaaataaggcaggcaagatgattgccttgctatttgctcttgattggttctgcgtaaaatatgtgagttctcaaaccaaataatgtcaataagagaaataccgcagaagctataaactgtagcttctgttgtgacacacgcccgattgggtaaaacaatcaaatagaacagtttcagtgtttcctgtttgtgttcttagcttggttccagaactttccttcacttatcttgaagaaacggtgtttcttttggcttctttgagtgtcttttatgatatgcattgtgatttacggagaacttattgatcacattctctgtatttatatccctgcaactntgtcaagagtagacgaatattgcactgatgataatac

SEQ ID NO: 2344 - DNA, 407 bp, Glycine max
  unsure (1)..(407): unsure at all n locations
agctngctaacccatggaagctcctataatctcccacactntntagggtgggccattcttggatggccttgattttctcaaggtccacttggaccccatttctaccaactacaaatcctaagaaaactatattatctacacaagaggtacacttctctatatttgcatagagggtgtttttcctaaggactgaaagaacttgcctgagatgtcctaagtgatcatctaggctcctactgtacactaaaatatcatcaaaataaacaactacaaatctacctaggaaatcccttaagacatgatgcataagcctcataaaggtgcttggtgcattagtgagcccaaaaggcatcactagccattcatacaaaccaaacttggtcctgaaaagcggtntccactcatca

SEQ ID NO: 2345 - DNA, 343 bp, Glycine max
agcttctgttgttcaattttgagcgtctcgatatactataagcctgaattggacatccgtgtgaaaagttatgaccatttgaatttctgcagagcttccgttgatcaattttgagcatctcgatatattataagcctgaatcggaccttattgtgaaaagctatgaccatttgaatttctcaacaacttccgctgttgattttcgagcgtgtctatatgagaatcgcctgaatcagacatccgaggtaaaagttatgaccatataaatttctcaagagcttccgctgttcaattacaagcgtgtcgatatgcgatgcgtatgaattggagatccgtgctgaaa

SEQ ID NO: 2346 - DNA, 654 bp, Glycine max
tcaaaattgataatggacaagaaagttctcagaaattttactctaccaactacatcagggttgtccaagaatgaagaattgaatttggaaaatgacaaatgacgagtcttggtgtcgatctttgtttctttcccaagttcttctgatctaaagtaaaaatctccaccgagtgacgtcgctagatcatgcatgaggtcatgcatcacaaaccatttccgatcatgcttgaggtcaggcatcaaaaaccatttccgatcagaccaactacttctatttgaacgttggaaaaatgatctcgaaaccaaatcatcaaaatactcatgaccaacctcttctaaagtcctaccatttcttggtttcttcaaaagatcttcggccatccacaacaagattaattcatttttttcaaactcgtaatcttgaggatacaaggaacaataaacaaagcacctttttaaatgtggagggaggtaatgataactaagtctcagtgctggaataactttacactcactttcagaaagttcccaaatgtcactattcagaatattattccaatccacgatgtcatgctttcttctcaacatgcctccaagcgactctgctgctaaaggcagtccatcgcactttttaacaatcttctttccatttttt

SEQ ID NO: 2347 - DNA, 593 bp, Glycine max
ttggagtttccaagtgccaattcgtcttcttctttagtccagtcttcttctggcttcaattcatcagtgggctttccttctgtgtccagcatcttgggatgttcccagcctttgatgacagctttccaggttctgctatccagtgatttgagaaaggccaccatccttgctttccagtattcatagttggtcccatccagaattggtggtctgttcactggtcctccttctttctccatgttcatcagaatttatctccctagatctcactcagtgatttcgagtgtctgctctgataccaattgaaattctgatactggggacagatgtcgtacaagatgtcacgacatcacacttcagaacatgcagattgtgtttgactgtatgaacagattaaacaagtaaataacacaagagaattgttgacccagttcggtgcaacctcacctacatctgggggctaccaagccagggaggaaatccactaaaatagtgttagttcaaggtctaacagccactgtttacaaccttctcacctaaccactacccgtgcgatctctacctaagagccactcttaaatatgagaaacccc

SEQ ID NO: 2348 - DNA, 555 bp, Glycine max
tgttgggttcaacttcaattaagcgctcggggcatcctatggactgagcgaaaaggctcaggtcatcaaatactacacatcttttaaagcacaaagcgaggatcggaacctcaaccctacgttcttttgaaagactacgatgagaaaattacagaggacatgaatccctgggggaaaccaagaagaacacacaaaaataaaaacaagcaacgacttccttaattgccccagatcttaagcgtagtatcgcttgacaacgtcggagttcacgggtgagggtagctcctcgacatccatgttggcgagcaccagggtccctccggagaaatccctttttacaacgaaaggcccttcgtagttcggggcccactttcctctattgtctttcagagcttgggagacttttttcaacaccaagtccccttcactgaacctgcgcgagcgtaccttcttgtcaaaagcattcttcactcgtttctgatataaacgcctgtggctcatggcggccaaatgcttgccttctatgagattaagctgatcgaaacgtgcctgagc

SEQ ID NO: 2349 - DNA, 539 bp, Glycine max
tgcccagagaaggagtccatggaggaaatgcttaccacctcaaaagacttttagcggtttctaatgactcctctgcggcttccacataatgcatagaggatgggaagctcaccaagatgtcttcctcgcctgatacgatgaccagatgcccttccactatgaatttcaacttttggtggagtgttgagggaacaactcctaatgagtggatccacgggcgccccaacagacagctgtagggagggttaatatccattatttggaaagtaacttgacaggtgtgagggcctatctgtactgggagatcgatctctcccctaacctctcggcgggtgccgtcgaaggcacgaaccaccgttgaactcggctttaagtgggaggcattgaatggtaatttctccaaagtgctcttaggcatcacgtttaaactggaaccattatcgatgagcactttggctacgatatggtgcatacacttgactgatacgtgcaaagctttattatgccctctcccctcggcggggatttcttcttccgcg

SEQ ID NO: 2350 - DNA, 604 bp, Glycine max
tgggctcttgcctcactcatcgcctttttggtttcatttctagctatcttatacttatcccaagtttcagaatttctacacctagaccactccttgaaacactccttttttactctaactttgctctgaacattttcattccaccaccacgattctttacccctaggtccaaaacctctagattcacccaacgtctctttagccactttaataatctcttgggacatcttgttccacatatcatttgcacttccttgtgattgtccacaccaaccctcccatatcttttgttggaagattccttgtttctcacccttcaagtgccaccatttgatccttggtgctaccataggacttcttctctttgccctatctctaattcttacatccataaccaacactctatgttgggtagtcaagctctctcccgggataactttacagttcaagcaatacttcctatcagacttcctgataaggaagaaatctatctgagaacatgtccctccacttttgtcagtgataagatgttcctctcttttcttacaccatgtattggctatagaaagatccaaagccttcggaaacttcaagatggatttac

SEQ ID NO: 2351 - DNA, 636 bp, Glycine max
tgcatgtcatcaagtaataatccccggacgaaattagggtatgacagttttccctctttacttgcctctcatcggagataagaggaaagcaaagataggacactgatttcgtccgtcctgccgtttccgtgatgacgactctcgtctctattccttcttttttcttctgcataaaacaaaatacaaacaacaacaagaacaacgaatataatatacatatacacatatacacatatccggcgaaggaaccgatccagaaaacaacagaataacgtgtttcccagtcaccagaggcttcgcgcttgacaatggaggacacatgaatagcgctaggcaataacattcatgaggctccgaaaaggggtgagaatggaggattgccttgagggtcctcacttaggcaatcatgaaaccagctccaaactcgaaagtggaggacacatgaacaaccctaagcaataacattcatgtggctcccgaaaagggtgagaatggaggattgccttaagggtcctcacttaggcaatcatgaaacacagtttcaaactcgaaagtggaggacacatgaacagccctaagcaataacattcatgtggctccggaaaacggtgagaatggacgattgccttgagggcc

SEQ ID NO: 2352 - DNA, 533 bp, Glycine max
cctatgatactcagcttcccaagtttaagttcttcctcaaaactgtcctaagcaatgttctttttgttctattaacaacttctgtttgcccatcggcttatgggtgacaagtggttgaaaataacaatttagtgcccaacttgtcccacaaagttctccaaaaatggcttaggaacttagagtccctatcactaacaatgctctttggcaaaccatggagtctcacaatctccttgaaaaacaaatcaaccacatgggaagcatcatcaactttttttacatggaataaaatgagccattttacaaaacctatcaacaaccacaaaaatggaatctctaccactgcttgcttttggcagccccaaaacataatccatggataaatcaatccaatgatactccggaatttgcaatggagtatacaattcatgaggctttaccttagactttgccttttacatacaatgcaatgttcacaaaatttcggctcatcctttttcatatgaggccaataaatatgttcttgtatatgt

SEQ ID NO: 2353 - DNA, 337 bp, Glycine max
  unsure (1)..(337): unsure at all n locations
tgtgcctctccactatgttccctcncctcactcttttgcgtcctccctcacgccctttgctcttgtcgcgcgcctatttgcttcttcatcttcgcctcctgtggtctcttcacttgcttctttatttagttccttctttcttcacttgcttctttatttagttccttcttcatttttgtttccctcggttcttcactttctctttacttccttcctcaactcaaggtgtgattttgtggttgttcactttggtggacacgccgccttcctgttttgtgctcctttcccggatatcctccttttctcgactgctcggcgctcgatctacgtggttcat

SEQ ID NO: 2354 - DNA, 391 bp, Glycine max
tgaggaagtgggttgtccaccaaatgcgagttcttacaacacaatgtttgtttcgctgtggagtagtggggacaaaattagagcattggggatgattttggagatgttgagcaacggtgttgatcctgataggatcacatataactcactgatatcaagtttgtgcagagatggaatggtggatgaggccattgggttgttggtggacatggaacggagcgagtggcaacctacggttattagttacaacattgttcttcttggattgtgcaaagcacacagaattgtagatgccattgaagtgctggctgtcatggttgacaatggatgtcagccaaatgaaactacttacacgttgttggtggaaggggttggatatcctggatggcta

SEQ ID NO: 2355 - DNA, 393 bp, Glycine max
tccattgttcaatttcgagcgtctcgatatattatgtgcccgaatcggttctccgtgtgaaaagttatgactatttaaatctctcgtgagcatctgtcgttcaatttcgagcgtctcgatatattatgggcctgaatctgacatccgagttaaaagctatgaccatttgaatttctcgagagcttccgttgttcaatttcgagcttctctatatgtgatgcgcctaaatcggtcatccgagttaaaaagttatgaccatttgaatttctcaagagcttccgttgctcaatttcgagcgtctcgataaattatgcacttgaatctgacctccgagtgaaaagttttgacccttcgaattgctccagacgctccattgttcaatttcgagcgtct

SEQ ID NO: 2356 - DNA, 449 bp, Glycine max
tgaggaagtgggttgtccaccaaatgcgtattcttacaacacaatgtttgtttttctgtggagcagtggggacaaaattagagcattggggatgattttggagatgtcgagcaacggtgttgatcctgaattgatcacatataactcactgttatcaaaatatggcatagatggatatggtggatgacgccattgggttgttggcggacatggaacggagcgagtggccacctactgttattagttacaacattgttcttattggattgtgcaaagcacacagaatttgagatgccattgaagtgctggctgacatggttgacaatggatgtcagccaaatgaaactacttacacgttgttggtggaaggggctggatttgattcatgctcaatcaacaaattgtattcatttatcaacagcgtttttcctttcatttgaactaaattt

SEQ ID NO: 2357 - DNA, 471 bp, Glycine max
taaaggaagtgaacgaattaccatgggcagaaatgtctccgattgattttaaatctgttcctcaaattcctggaaaatgcaaagattcacgtacattcagcataccttgtattatagggaatagtaagtttgacaatgccatgctagattcaggagcttctgttagtgttatgcctctgactatgtttaattctttatctctacgtcccttgcagtcaactgatgtggtaattcatttagctaatagaagtgtcgcctatcctgttggcttcataaaagatgttttagttagagttggtaaactgattttccctgttgattttcatattacgaatatcgaggatggatttcctcataaatcagtttctattcattctatgctgaccctttatgataactgctacaactaatattgatgtatatgcatgcacactatccatggagtatggtgatataaccggtcctttttat

SEQ ID NO: 2358 - DNA, 568 bp, Glycine max
tggtggctagttcatggcattaatgctccaatacttcaaaaggttgcctttaagctacttgcgcaaccttgctcatcttcttgttgtgaaagaaattggagtacatattcatttattcattctttaaagagaaacaagatggcaccacttagagctgaagatttagtatttgttcatagcaacctacgacttctctcaaggaatactccacaatatcatcaagaggaaactaaaatgtgagatgtaactggagatgattttgggttacttaatgaatgtggcattcttgaaatttctaatttgtctttagatgaaccacagttagagggtgtctttttcaatgatgattgctagtttgtagaattcttgaagacttgaagttgctaattcatcatcttgctttataattattcttttcgaaagaaacaaagtgtacaaatcgtataatgaggtctcttagtatttcttgtgacttattatcataggaaaagtttttttgagatgatgatgaatatataaatcttaactttcaattaagatcctttatgcatatcgctcatatttaatc

SEQ ID NO: 2359 - DNA, 579 bp, Glycine max
tttttcaatcttctgtaagggtgatgagcttttacaaaatgacgatgtctattgtacactgtttttctaccatgtttcagttgtatgtagcttgtgtcttcttcacagatggggcatgcaagatgacccttaacactgtaaccgctgaaattcttatatgctggaaagtcattaatggtacaaaatagcattgcacgcatttgaaaagtctccttgtgaaacccatcaaatactaaaacccccttatcccacaactttctcaggtcttcaatcaaccgacttaaataaacatcaatgtcatttcctggttgtcttgggcctgatatcatcatagacaacatcatgtattttcgcttcatgcacaaccaaggcggaaaattgtaaaatactaatagaactggccatgaactgtgttgagtgcttaaattgccatatggattcattccatcactggctagtccaagtctaagatttcttgcctctttgccgaaattcggatacaaactatcaatcctcctccactgggagcaatcagctggatgacggaccattccatcagaatttctcccatttgcatgc

SEQ ID NO: 2360 - DNA, 614 bp, Glycine max
tattgtagaactgctcaccaaaatatcaattgaattttttatgtacaattttattcaaaagaaacttggacaatgacaaagtacaaggaaataagaatgtactgattattcacctctctccttctctcagctcgttcaccacacttaaaactgaatccataatttggaagtgttcccaccctttgaggtttggcatcttctgtgttggaacttctaggaggattaaggttaaaacacaatatacacagcaccacactcaataataaatttaaataatagagacccagtagttccagattttcactcataaatatacaaacccaaaaaaggatacaaggaagattctgcttctccttgaactttatcaatgggttcttttctcgatgattttggttttgtcttctccctgtatccaaaacatcacagtccaccagttaaataataacaacaatctatctttctagcaatggaacatagacaagaaatacaagcattacatacactgatacttcagaagatgttgcatcagacttcaaaggtgctgagaaaaacaaagtgcaaaaactatcagggaatgcccaaactataaacttgatttcccaaaagagataaaa

SEQ ID NO: 2361 - DNA, 535 bp, Glycine max
tgcatcgacaggagcccagattccgtcgtttaccctgtagatagatagattttataacttagatggcatatttctcccaaatgcatcttgagtaaagtcccattgatatcgataaaattgctgtaatcaggctctacacatgcagggtgtcagagggttctcccagaggtcgtagttagggaaagtctcttctggcaatcccgtccgagtctggtgagtaacaacaacatcttctacaaaaggagcccaacccatatatggatccccaaaagacttggacattagccctttgtcaggcttaattgattttagacggtgacccatgtatctacgtgctccaatgatcaacttagcaaaattgcctccatgggtcatcacgaatacatttgacttcaagcacaccaagaaatcaagagctgccaggcttgtcacatgctttctgaaaccatctaactcctctttagttgccaactcctccttggaacctgttgcaaatgggggaaatattaattaccttgcaaaagaatcaaaaata

SEQ ID NO: 2362 - DNA, 608 bp, Glycine max
tgaagccaaaaggaaaaaagaacttgtagctgttcaatgtactctccataataaagtgtgttcaatgcaaagttaccactccattccatccaaccttgaggattgataaagccatcaagacaagtcttcattaaaactgttcttgaatattgcttccatggtcttcgaagataagtcctaaccgggttttgaaccagtctcaaatctgaagtagctgtgactcaagaattgcgaattgaaattccagtgttttagtttggatcagttctgccttgtgcagtgatggtgttgactatgttgggagggtttcttgcaaggtgttgcagttttgtaacacaacaacaacatgctacaggagatttccatcaacttccctgccacaggcgtttgggtaaaaacaaaatgttaagtcaactaatagccaggaaattccattacactttcacatgcacacagtaaaaagaaacaagttatatattcagagggtgattagaatcaatgaattttatatcccttctaaattcgtaccaaacaatttaattgtaagaaaataaggaatccaaaatatgtacttgactagacttatgatatagtggaataaatgatat

SEQ ID NO: 2363 - DNA, 628 bp, Glycine max
tccgttgttcaatttcgaacgtgtcgatatattatgcgccttgttcggttctccaagttaaaagttatgaccatttgaatttctcgagagcttccgttgttcaattacaagcgtctctatatattatgcgcctgaatcggacctccgagtgaaacgttatgaccatttgaattgctcaagagcttccattgttctatttcgagcgtctcgatatattatgcgcctgaatcggacatgcgagtgaaaagctatgaccatttgaatttctcgagagcttccgttgttcaatatcgagcgtctcgatatattatgcgactgaatctgacatctgaattaaaagttatgaccatttgaaattctcgagagcttccgttgttcaatttcgagcgtctcgatatattatgcgcctgaatcggacctccgagttaaaagttatgaccatttgaatttctcgagagctttcggtgttcaattcgagcgtctctatatattatgcgcctgattcggaacttcgagttaaaagtttgacccttctaatttttcggagcttccgttgttcaattacaaccgtcttatttttatgcgcctgaatcggactctccagtgaaaggttttacctttgaatttt

SEQ ID NO: 2364 - DNA, 605 bp, Glycine max
tgccagaataatgggttggatacagatcattctgggagggttggtcatctttgtaagccttttgagtctcactagattctactcagcaggatttttcctccacaatgaagatatatgccaacacttctacaatctgagggatgtttctgatggttttgatgtcaaatcattctctgatagagttggagaagtgatagacatgttggaagctttgcaggccaagcttgagtcaaaagttcaagaaatggagaaaaacaaaggcaccatgttggacaagaagtttctagaggatcaaatagttagccctcttcatagtgctaatgttgctctaaggcagattcgggttcccaaggttgatgaagggacgaactccacagtgaaggaggatcatttgatcaattttttcatcattgaggaaattagaaagtacataacccccaaggagaatagggttggtaagatcaacctatatggtgcagacaaggtttacaacacaataggccatgcttgtgttttgtacaagaaagagttagagaagtacatggactatgacattggctcctattgggatgatgattggaatttgctcagaagcctatgctaat

SEQ ID NO: 2365 - DNA, 373 bp, Glycine max
tcccagtttctaactcttcctaaaactgtcctaagcaaagttcccatttttttattaacaacttccatttgcccatcgggtcgtgggtgacaagtggctgaaaataacaatttattgcccaacttgctccactaagtcctacaaaataggcttatgaacttaaagtccctatcactaacaatgctccttggcaaactatggagtctcacaatctccctgaaaaacaaatcagccacatgggaagcatcatctatttatctacatggaataaaacgagccattttagaatacctttcagcaccacaaatatggaatctctaccattggttgtgttcggcagccccacaacaaaatccctggttaaatcaaatcc

SEQ ID NO: 2366 - DNA, 592 bp, Glycine max
tatagttattggagggagaataaaacaatccaaaatcaattgtacctttttgtaacgaagaattctttttgcggcttttagatgaggagaggtaggagcctccataaagcgacacacaactcccaccgcatatagaatatcgggccttgtattggttagataccttaaactccccacaagactcttgaagatcatggagtctaccttctctccttcatcaaactttgataacttcaagccaccttccataggtgtgttcacgggattgcaatcaagcatattaaatttcttcaacacttcttttgtgtacctttcttgtgagacaaagataccattctccgtttgcttcacttccattcccaagtaatatgacatgagtcccatatctgtcatatcaaattcacgagacatggactccttgaagtcttcaaacaaatttgggttattgccggtaaagataaggtcatccacataaagacaaataaataagacatcaccattattaaaagttttaacataaagagcataactcatttgacaacgaacaaacccattgtcttggaagtacttgtcaatgcgagtattccatgcc

SEQ ID NO: 2367 - DNA, 677 bp, Glycine max
  unsure (1)..(677): unsure at all n locations
tatatcagaaaattaaggccaaaaaggttattgaatgaagaacatgaactatttagacagcaaaacctagactacctaaactgggagcagcaggacaaacaattagtgtctttggcttctaccatcaatggcaccgagtcttcacacaaaaggatggttggaagatacttgaaacctaaccttttagaccaaagccaaaatcaaacaactaaaacagaaactaagtgtctaatagataggagcaatgaatgtatatttttgaaacataatcatagtaacacgaatgggtaagaaaaactaactggttttgaaacaaaattaactataatgacttagtatcgtcttagtctaatttaaatctccaaattcacagtaacacgaatgggtaacaaaacctattgttcagaaaaataatcatattgactagtctcatcttagtcaaatatcaatcatattagttagtctaactatggtttcgaaacatgagaatagagatagaccactgaacaatggattttcatcattaacagagaatagagacataccttcgatggcttccctggcagtcttaaagccaagcccaatggacttccaaaatcgattcccacccttttcgagactttntcctttcctagttctcttcgagctgcaaaagtgaccaaatgttaaaatgagga

SEQ ID NO: 2368 - DNA, 618 bp, Glycine max
tatggcggcaaagggtaagctaccaagcctgaagcatgttggtgttggtgtttgtgaacactgtatccttggaaagtagaaaaaggtcagcttctcaagggcagggaagactcctaaagttgaaaggctagaattggtgcacacaaatgtttgggagccaaccctagtgaaatctattggaaactcacgctattatgtcacctttatcgacgactctaccagaaaggtatgggtttattttcttaaaaataaatctgatgtgttttctgtgtttaaaaggtgaaaaacagaagttgaaaatcagacaggtctaaaagtctaaaatatgacaatggcggggagtatgatagtcaggagtttaaagacttttgttcaaaacatgggatcagaataatcaagacaatacctggaacacctgagcaaaacggtgttgcagaaaagatgaatagaaccttgaacgagaaagtgaggtgtatgcagatccaatttggcttgcctaaagcattctgggcaaaagcaataaacacagccacatatctcatcaatagaggaccatcagttcccttgaaatatcacgtcgcccgaagaagtatggtctgaaaaagaggttaaactttc

SEQ ID NO: 2369 - DNA, 663 bp, Glycine max
tatcgttattggagggagaataaaataatccaaaatcaattgtacccttttttaacgaagaattctttttgcggcttttagatgaggagaggtacgagcctccgtaaagctacacacaactcccaccgcatatagaatatcgggccttgtattgattagataccttaaactccccacaagaatcttgaagatcgtggagtctaccttctctccttcatcaaactttgataacttcaagccaccttccataggtgtgttcacgggattgcaatcaagcatattaaatttcttcaacacttcttttgtgtagcttccttgtgagacaaagataccattctccgtttgcttcacttccattcccaagtaatatgacatgagtcccatatctgtcatatcaaattcatgagatatggactcctcgaagtcttcaaacaaatttgggttatggccggtaaagataaggtcatccacataaagacaaataaataagacatcaccattattaaaagttttaacatacagagcatactcattttgacaacgaacaaacccattgtcttggaagtacttgtcaatgcgagtattccatgccctcggtgcttgctttataccatacaacgcccttgtcaatttcaagacttttccttcttgacccttgatgac

SEQ ID NO: 2370 - DNA, 641 bp, Glycine max
tagccctagaggggatggaccttttcaggttttggagagggtcaataattttgcctataggttggacctcccagatgagtatggaatcaacaccacttttaacatttcttatttaattccttttgcacgtggagctgatattgacgaggaggaactaacagatttgaggtcaaatcctcttcaacgggaagggaatgatgcaatcctccctaggaagggaccagtcactagagccatgagcaagaggctccaacaggattgggttagaactgctgaagaaggccttaggattctcatgaacctcaaggtaaatttcttagcccatgagctaaggttgggtccaattatctttgtacatattagactaggatgtcattatatttggtccttgtatttagggctccataatgtaggtagggtaccctagaagtataagatttttcagcccttgtattttagggtgattttaggcagtcttcttgctaagttaacctgcacattaaaaggatttcaaaaaaatgttcaagtgattgacgttagaaaaggacatttgcttcctaaccatagagcccatgttacaccatagagcacttcttaagtcttaagcataaactaacttgacaacagtaaagggaatttga

SEQ ID NO: 2371 - DNA, 587 bp, Glycine max
tcttatgatgcaaacgagttacccgctacctcatgcactcctctaatgttttattcatcatttctggcgctaaactgctgggagttggaagccatcttctcaattaaatttctggcttcaacaagagtcatgtcttcaagggctccaccactagcatcatctatcatactcctctccatattactgagtccttcataaaaatattggagaagaagttgctcccaaatcggatggtgagggcaactggcccatagttttttaaatctctcccagtattcatataagctccctccactgagttgtataatacctgagatatccttcctgatggccgcggtcctggcaacatgaaaaaaaaaatgctaaaatactctcttatagtcatcccaactcgtgatggaccttggagcaaggtaatacagccactcctttgccactccctctcaaaaatgaggaaaagcccttacaaatatgtgaccctcttggacatctgggggtttcatggtggaaccgacaatattaaattctttcacatgtttgtgcgagccttcacctgcaatgccctgaaactttcggaaccacatgga

SEQ ID NO: 2372 - DNA, 506 bp, Glycine max
ttgacgccatacaaacgacaataacttttttctcggatgtctgattgatttttttaacatatcgagacgctcgaaattgaaagctgaagctctgagccaatacaaacgaccataactttttactcggatgtctgattgagtcccgtaacatatcgagacgctcgaaattgaatgttgaacctgtgagccaattcaaacgacaataacttttttctcggatgtctgattgagtcccgtaacatatcgagacgctcaaaattgaatgttgaacctctgagccaattcaaacgacaataactttttactcggatgtctgattgagtcccgtaacatatcgagacgctcgaaattgaatgttgaacctctgagccaatccaaacgacaatagactttttactcggattgagtgatagcgtcccggaacatatcgagacgcttgaaattgaatgttgaacctgtgggccaattaaaccgacaataactttcttctccgatgtctgattgag

SEQ ID NO: 2373 - DNA, 636 bp, Glycine max
tcttatgatgcaaatgagtttgtagctacctcatgcactcctctaatgactatagcatcatttctggcgctaaactgctgggagttggaagccatctcctcaattaaatttctggcttcagcaagagtcatgtctccaaaggctccaccactagcagcatctatcatactcctctccatattactgagtccttcataaaaatattggagaagaagttgctccgaaatcggatggtgaaggcaactggcacatagttttttaaatctctcccagtattcatataggctccctccactgagttgtataatacctgagatatccttcctgatggccgtggtcctggaagcaagaaaaaaaaattgtaagaatactctcttaaggtcatcccaactcgtgatggaccttggagcaaggtaatacagccagtcctttgccactccctctaaagaatgaggaaaagccttcagaaatatgtgatcctcttggacatctgggggtttcatggtggagcagacaatatgaaattctttcagatgtttgtgcgagtcttcacctgccaggccatgaaactttggaagcaaatggattagtccagttttaagaacatatgggacatcctcatcagggtattggatg

SEQ ID NO: 2374 - DNA, 607 bp, Glycine max
  unsure (1)..(607): unsure at all n locations
tgtatgagtactgggaaagattcaagaaattgtgtgcaagttgtcctcactaccagatttctgagcaactccttcttcagtatttctatgagagacttagcaacatggagaggagtatgattgatgctgacagtggtggagctcttggtgatatgacccttgcagaggctaggaatttgattgagaagatggcttccaactcccaacaatttagtgcaagaaatgatgctattgttcttagaggattccatgaggcagccacggattgatcatcatctattgaaaataaaaagcttgaaggaaaacttgatgccttggtcaacttggtaactcaacttgccatgaatcagaaatctacacctgttgcaagagtctatggtctatgttcttctgcaaatcaccatacagatctttgtccttctttgcagcaatctggagtcaatgagcaacctgaaacttatgatgtaaacatttataatagacctcctcagtagcaaaaccaacaacaacaaaataattatgacctttcaagcaatagatacaatccaggttggaggaatcatccaaatctgagatggacaagtcctncacaacaacaatagcatgt

SEQ ID NO: 2375 - DNA, 488 bp, Glycine max
  unsure (1)..(488): unsure at all n locations
tgatccaactcaaccatggatagacaaaatatctaccagacaccgcatatactaaaagctctnacccttatcgcgattgaactactttaaggaagtaggggaatgaaagccccccataaccattaactgggaaccaagttcatgatcgcgtcaacgacattgttaccgtgtttgggaagtcccacaagaagacatcatcttccaacaacatgtggaagaaacgctcaatattctttgatctttcatactgggctgatctatatgtgcgtcactgtctacatgttatgcatgcggagaaaaatgtgcgggatagcttaatttgtactcttcttaaccttaaagggaagaaaaacgatgggttgaaatttcttcacgacttgcgtgacatgggaatacgagagcatttgctttccatatcacaaggtccgggaacatatttaccccctacatgccacacacttgtctacatcagagaacaaaaacttttg

SEQ ID NO: 2376 - DNA, 623 bp, Glycine max
tcatccaactcaagcatggaaagaaaaaagtatataccagacaccgaagatttctaaaagcttttcacccttatcgacgattgaaaaaagcttttaatggaagtcaggggaatgaaggccccccagaaccattaactggaaaccaagttcatgatcgcgtaaaggacattgtaaccgtgtttgggaagtcccagaagaagacatcatctcccaacaacatgtggaagaaacgctcaatattctttgatcttccatactggtctgatctatatgtgcgtcactgtctaaatgttatgcatgtggagaaaaatgtgtgtgatagtttaatttgtactcttcttaacattaaagggaagaaaaaggatggtttgaaatttcgtcaagacttggttgacatgggaatacgagagcagttgcatcccatatcacaaggtcggcgaacatatttacccccagcatgccacacactgtcaacagcagagaagaaaagtttttgtcaatgtctgcggaatgtctaagttccacaaggatactgttcaaatatcaagagcctttgtgccctcaatgatcttaagttggttggcttgaagtctcatgattgccatgtctttatgcgacaatta

SEQ ID NO: 2377 - DNA, 536 bp, Glycine max
tgactgcgtggagatacgaaccatgtgcctctccaagatacgagcagtcatatttacctcataacctaacacagctcatactttgctgtacccttatttacgtgactatatatatggaggaacgatggtttcttgatttaaacatacacactttgataaattctcaccttcggactttgactccagaggatgtcaagataatttatcgggaacaccgtgcaccatatatcttcaacatttgaccgtcaattcgattcatacttggtcacctgcagcctatttattgcatatggtaccttctatgatgcccacataaatacgtgtatcagaaaccatacgtattattctaaaatatatatgatgcacatcagtgaaacctccaagagtaactgtattggatacgtatccactacggatgtgtgaaacaaattggactattggcgtgcttcatataccttaccgggagttgctgcactaacactcttatgtatccaggtggagatcgatggagtccctatgatactgttgtcaagaaa

SEQ ID NO: 2378 - DNA, 419 bp, Glycine max
ccagaaaccatgggagttggctgagatttagaggacctacgtccttcaaagaagacttgttaagatgagcaataagagaggtgatttcaaaagaagaagagttggtgaagattatatcatcaacatacaccaacacataggttttagaggtaggtgtaaatcacatgaaaagagaagtatcactcttggctgaattaaatcccaaggacctcaaagtcaaactgagtttgtgaaaccaagacctggaggcctgtttcaagccataaagagctttgagcagtttgcatactttgtgtttgtcggatgaaacaaagcttggtggttgagtcatatatacagtttcttgaaggtctccatgcaaaaaggcattgttgatatccacttgatgaataggccattgttgagaaaccacaaaggac

SEQ ID NO: 2379 - DNA, 364 bp, Glycine max
gatgaagacgacagggaccaccgagggggttccaatgagccgcatgagggcgcgttttaggtccttgcctcttggatcctcgtccagctcgtgcacggttgggttcacacccatgccgcagaagagcctcttgatggcgtggcacatgcagcacgtgctcacgctgaatatcaccaccgcgctctccgacgccagcctctctatgcgctccagcgggtcccccactaccgccgccgccgcgttccgaggggccgccacgtagctcccccaccacgccgccgccgctgcttggtaatgcattctcagaagaattttatgtgatgaaagaatgacacgcacaatgtatgaaaatgagagtgagaat

SEQ ID NO: 2380 - DNA, 408 bp, Glycine max
  unsure (1)..(408): unsure at all n locations
agctntgagcaaattcaaacgacaataactntttatctcggatgtgtgattgagtcccgtcatatatcgagacgctcgaaattgaatgctgaacctatgagccaattcaaacgacaataactttttactcggatgtctgattgagtcccgcaatatatcgagacgctcgaaattgaatgttcgacctgtgagccaattcaagcgacaataacttgttactcggatgtcggattgagtcctgtaatatatcgagacgctcgaaattgagtgtttagactgtgagctatttcatacgacaataactgtctactcggatgtctgatagagtcccgtaatatatagagacgctggaaattgaatgttgaaactctgagccaattcatacgacaataactttttactcggatg

SEQ ID NO: 2381 - DNA, 337 bp, Glycine max
ccacaaaccatgggagtcggctgagatttacaggacctatgtccttcacttaaaacttgttaagatgagcaataagagaggtgatctcacaaacaccaagagttggtgaacattatatcatcaacatacaccaacacataggttttacaggtacgtgtaaatcacatgaaaagagaagtatcactcttggctgaattaaatcccaaggaccttaaagtcaaactgagtttgtgaaaccaagacctgcaggcctgtttcaagccataaagagctttgagcacgttgcatactttgtgtctgtccgatgaaacacagcttggtggttgagtcatatata

SEQ ID NO: 2382 - DNA, 324 bp, Glycine max
  unsure (1)..(324): unsure at all n locations
agcttgtaatcgattacacatataatgtaatctattgccagagcagattttcagaaaatattctcaacagtcacatctttttatgtggttcttgaatggctatcaaaggcctatatatatgtgacttgagacacgaatttgctaagagtttttcagaacaaaaaagtcttatcctcttataaagaaaaattgttttatcctcttacaaattccttggccaaattacttgtgattcaataaggaatttttgagtgctcaaatngttcaatntatctctttcaagagagatttcttcttttcttcttcttcattctgaaaagggat

SEQ ID NO: 2383 - DNA, 399 bp, Glycine max
  unsure (1)..(399): unsure at all n locations
tctccatctctacaganacaaacgtaacttcatcattcaactctgccattctgagctgatttagagtccttttggcatagacagtgaatgcaatagaggtaactattgccataatgaaagaaataatgttgtatacgatatccacaggagtcaagcggtgcttcccatactgtgcgtctgccaatgtctctattaaccgaccactgagagatggagaaaaagataaatctcaagatgagatgttagtttatttaacagaagtaaaaagataacacgttctaagctgatccacatctatatgactatatccatcagaagtcatatatgcttctcaacttctcaattctcattttcatacatgtggagctaacaaaaactcgggtacggtagggaactcat

SEQ ID NO: 2384 - DNA, 469 bp, Glycine max
  unsure (1)..(469): unsure at all n locations
agctnggttcgaatgactttntaatgaaaaattgttatcaaccgaactaatattttatggtttggtttggttcgatttttgtaatttttacaaaatattatttcactaaaatttataattttttttaatattttgaatcaaattacattaaaaaaattgttaataacaatctatgaaacttattaatatgttaaacattctaaaataaaaattttcaaaaatctcatctatttctaacatatcttaaaaaaatcatatgaaaaaaagtaatatgcattatataagtcttatatacatgacaataaaaaacattgtgaaactcaagtgatacatgcataaaatacataacactaaagtaatataagtattagtacaagtattatggtttgatttgcgttcaaaaacatataccgcaaatcgaactgaaccaatcattttgagaaaaacattcaaacaattcaaaaaaagt

SEQ ID NO: 2385 - DNA, 465 bp, Glycine max
  unsure (1)..(465): unsure at all n locations
agcttggtctctntntcatttctagtttagttatgaaacatgttcaagtttgtctctgttaagaggattataaaattcccacctatatatgatgtacatattataaaatgcagtgtttactaaaagatgcataacaactacacaatccctgtcactggcctaataataaaattttgaggggatgtctctttgattaatctggcataaattaaaaaaaattgaaagaaaagtataatacatttacagtgtaaatgttttggaagtatcataagcattttgattttagagatcgagaaataaaaaagatatatcagttataaaaatgtgtgtaaaagtaatatagtttactaatttgtcctgtacttttttgttctatgttttaaatagtgattctgtaaaacacaacataacactttttaaagaaagactaaaacaggacagagacatgtatgtctgatgtctata

SEQ ID NO: 2386 - DNA, 461 bp, Glycine max
gtaacaatctcaaaacttctcaacattgtcttaatgaccctcacattttgcattgatgcttcaccaaagaatatggtatgatctgcatatcacaggatactaatttccactgagcttcttcccaccaagaggcctttaaactgattttttttagagcttctctcattagacccgttaatccctcagccacaatattgaacaggagtggggctaacagatccccttatctaagtcctctttgagggaaaaattctgctaaaggactcttattgatcaatatggagacaaaagctgatctaaaacatcctgtgacccaagttatccactttagggtagaatcccatcctcctacgcatatataccagaatatcctcactaactgaatcatgtgccttctcatagtcgactttgaacaccaagcagctcatatcacctctcttcacttcctccacttcattggc

SEQ ID NO: 2387 - DNA, 385 bp, Glycine max
  unsure (1)..(385): unsure at all n locations
gcttgccgccatggagtnttccgactatgctcttgtgtggtggaacaagctacaaaaagagagagcgagaaatgaagagccaatggttgatacatggacggagatgaaaaagatcatgaggaagcgatatgtgccagctagttactcaagggacttgaaattcaagctccaaaaactaacccaaggcaacaagggggttgaggagtatttcaaggaaatggatgtgctcatgattcaagcaaagattgaagaagatgaggaggtaactatggctcgatttcttaatggtttgactaatgatatccgtgatattgttgagctgcangagtttgttgaaatggatgaatttcttcacaaagcaatccaagtagagcaacaattaaaa

SEQ ID NO: 2388 - DNA, 392 bp, Glycine max
  unsure (1)..(392): unsure at all n locations
tgaatgtgttactntgacactctctgatgaggaatacaccatagtccatagctctagaagcgccacacaaatgtggaacaccttagccataacatacaaagggtgctcacaggtaaaaaggaacaatattaaactaagactcctaacacataagtatgagatgtttagaatggaggaaggcgcagacatacaatgtatggttgaatgcttccaaaccattttaaacgagcttacagcatagtgtagaactcttgacaattatgataatattgataaaatactaagaagtttatcaagaaagtggagatcgtacgttacaactttaatagctataaagaatcttgatactctgtctctagaagaatgtagtggaaccttaaaggtcatgaaca

SEQ ID NO: 2389 - DNA, 354 bp, Glycine max
tgtgcctcttcaggtctggaatgtgaatgtagcatatagatctaaatacccttatgcgctttgctgatggcttctttccgttgcaagcttcaattggagtcttgtcgtttacagacttagttggacatctgttgagcatgtcaacagcatcagagactgctatagtctagaatgcgttacgtagattcgttctcttgagcagtcatctagccatctccataactatgccattctttatatcggacactccatattgttgacgagaatatgccactcgaagatggcgctcaatgccttaatcctcacaaaatgtgtcaaactcgcgagaggtgtactctttgtccaatcacttct

SEQ ID NO: 2390 - DNA, 315 bp, Glycine max
cttgcactattatatttattttggtaacagtatatattttgcctgaggtctggttattacgatgaagcaagaaatgttgcccaatcttcacgtgcttcacatcaatttgctcctttggtacatactgtggtcactacttatttactaatttatgatttaatctttcttaataatttacttatttctgacagctgacagagtggattaataaaggagggatggtaccagaagagattgcagctgctgcatctgatgaatgtgaaagaatgttgagaactggtgaccgggtaggtcgaactgcatatgacaagaaaa

SEQ ID NO: 2391 - DNA, 361 bp, Glycine max
  unsure (1)..(361): unsure at all n locations
tgcttctaaactttatacaagaatgaagctctgataccacttgttagacaagtggcctcagatatcttaagaaggggggcattgaattaagatatcacaatcttttctaaattaaaaattctattttgattttaacccacatcccaagatttctttcaaaaatgaactcctaaataattatgcaaattaatcttactgaatagaaacaataagcaatatacaatatacaataaaagagtttaagggaagaaagattgcanactcagaattatactggtttggcacacccttgtgcctacgtncagtccccaagcaacccgcttgagagttccactatcttgcaaaagtccttacaagttct

SEQ ID NO: 2392 - DNA, 472 bp, Glycine max
  unsure (1)..(472): unsure at all n locations
cgctgcatgcaagcttctacanaaatccttattaaagaaagacttcttgaaagggaggaccattatttactgtgaacaatttgctcaattgacaacaaggttagatcaaatttgttactaacaatctttatattatgtcattttcaatcaatcaattatattttttaattttctttaacacaggtccatcgtctacaaatttattctattgggtggggttctataacacataaactcaactttagaaaatgataaaaagagaatgattatctcaaatgatacaaaggtaatatagtgagattattttaaaatatttatgtactctaatttaataaatgcatatatttaattttaaattttctatcactttcatacaaaataatttttcaaagacaagacactatgaatgatgtgtataaaaaaaactaagaagactcattccaggttaataattattcaaatttatatcatt

SEQ ID NO: 2393 - DNA, 386 bp, Glycine max
ctcagctataatatatcgaatatgaacaacggaagctctcgtgagatttatatggtcataacttttcacactgacgtccgatacaggtttataatgtatcgatacactcgaaattaaacatcggaaactctctagaaattcaaatggtcataacttttcacacggatgtccgattcgggcgcataatatgtcgagaggctcgaaattgaacaacggaagctctagagaaattcaaatggtcataacttttcacacggatgtccgattcgggcgaatcacatttcgagacgctcagaattgaacaacggacgctctagagaaattcaaacggtcgtaacttttcacacggatgggcgattcaggctcatcatatatcgatacgctcg

SEQ ID NO: 2394 - DNA, 425 bp, Glycine max
  unsure (1)..(425): unsure at all n locations
ttgaatttctcaagagcttccgttgttcaatttcgagcttgtcgtcatattatgcgcccgaatcggacatccgtgtgaaaagctatgaccatttgaatttctagagagtttccgatgtttaatttcgagtgtatcgatatattataaacctgaatcggacctcagtggtaaatgttatgaccatttgtatttctcaagaccttccgttgttcaattctgagcgtctcaatatgtgatttgctcgaatcggacatccgtgtgaaaagcaatgaccatttgaatttctcaagagctctccgtgttcaatttcgaccctctcgacatattatgcgcccgaatcggacatccgcgtgaaaaggtatggccatttgaatntctcgagagcttctgatgtttaatttcgagcgcattgatatattataagc

SEQ ID NO: 2395 - DNA, 315 bp, Glycine max
tctgaataggacctccgtgagaaaggttatgaccatttgaatttctcgagagctttcgttgttcaatttcgtgcagctcgatatgtgatacaccagaatcggacatccgagtgaaaagttatgaccatatgaatttcttcatagcttccgttgttcaatttcgtgcatgtcgatatgtgaagcacctgaatcggacatccgagttaaaacttatgaccatattaatttcccgagagcctccgttgttcaatttcgagcgtctcgatatattaagcgcctgaatagcacctccgtgtgaaaagttatgaccatttg

SEQ ID NO: 2396 - DNA, 406 bp, Glycine max
agctctgctttaggggcaatgatacgaccactgataagcaatggaagcatgagaaaacatgtgggcgtgccctaggcctaagatttgacaaagagagtggagatctatacatagcagacgcatactatggacttgttgtggttggacctaatgggggactcgctacatcgttggcaacccatgttgaaagaaagcccattctcttcgcaaatgagcttgacattcataagaacggatccatcttcttcacagacaccagcaaaagatacaacagagtgtaagcctttattactcatatactatacatcatttgagtatattcatgcactcattattgctttcaatggattattattgtttacaacgtacttattacttgtttgcagcgcgcattctattatattat

SEQ ID NO: 2397 - DNA, 387 bp, Glycine max
  unsure (1)..(387): unsure at all n locations
cataccatctactatgccaacaaagttataaatgatgcacagatgaattatgctaccacagaaaaagaaatgttggcaattgtctatgcacttgaaaagtttaaatcttatttggtaggctcaagagttatcatctacactgatcatgcagctattaaatacttgctcaacaaggctaattccaaaccaagattgataagatggatttttttgttgcaagaatttgatttggtgattcgcgataaaaagggatcaaagaatgttgtagctgatcatctgtcaagattagtgaatgaggaagttacagcaaaagaagtcgaagtgagagatcaattccctgatgaatcanctattttaataagtgaaagaccctggtttgctgatata

SEQ ID NO: 2398 - DNA, 478 bp, Glycine max
  unsure (1)..(478): unsure at all n locations
ttaagtcacctgcggcatgcaagctntaagagcaattcctttctttntcttatcattctcctcatgttgattcaatctcatcaattccatttcatgttcgtgtaactttccaaacaaagcagcaagagacatgttagatagatctcgtgattcagtaatggctgttaccttgggttgccattctctgcttaagcatctcaaaactttattgataagatcttcatttggaaatgtttttcctaaagatgcaagatgattaattatgtgtgtaaacctcttttgcatgtcttgtatggtttcatttggattcattctaaataattcatattcatgagtcaaaatatttatcctagatcttttcacatttgttgttccttcatgggttacctgtaaggtatcccatatatncttttgcattttacaatttgatacactaaagtattcattcatcgctaaagcagatgtaattatatttttg

SEQ ID NO: 2399 - DNA, 438 bp, Glycine max
cttaagtcacctgcggcatgcaagcttggttcccaacgctttgttcagactctcctaaaatctagaggtgaatctaggatctctatcagacactatgctagatggcacactatgtaatctgacaatctcactaatatacagggaggtcaacttctccaaggaaaatctgatcttaatgggaatatccttagggaacacttcaggaaactctctgacaatagggaggtcacccatggaaacctttgtctctacttctaggttagacatgatcatgtagacttaagcatcttcttttaaagatgtcacaacttggttggcaaagataaacatcctatccttactcactccagaatcatcaaacactgcatttttattaaaacaatttaacaagacatggttggaagataactagtccattcccagaataacatcaatttg

SEQ ID NO: 2400 - DNA, 391 bp, Glycine max
  unsure (1)..(391): unsure at all n locations
tgtgttttcccttgtagaactactaactgcagtaacagattctcctgaaatctgttgagtcccacatcgagtagaagtggaaaggttgagcaccatataagtgaggagaagacccataaatctgagccttaaggttttgggttagagtgtgatgtcagatctccttatgtggtggctcgtggtccacaggtgtacccctcgaatctccccaacaattggtatctgagctgatggttcaagttggtgaccggctcagacgagtatgcaagtactgcaggtggccaaaatggctagcggcacagcgtgccccgcaggtggagcggngtggccagaatggctagcgggcacggcaagtaccgcaggtggccatggctatacttgtggatgataa

SEQ ID NO: 2401 - DNA, 256 bp, Glycine max
  unsure (1)..(256): unsure at all n locations
agctngatgctgcaaacttatctgtatccaagattggagagcacatgtcaggaggttctagtggcggctcctcagctggtggttctcacggaggcgaccaggctcccgaggcagaatacgatgaggagaagaagtaaggcgaggaggggtttgtatccacttctactgagttattttggctagagttagagatgaatcatcttttttcattcagcatatgatataaggtattttgtactacaaggctggagttcat

SEQ ID NO: 2402 - DNA, 450 bp, Glycine max
  unsure (1)..(450): unsure at all n locations
agcttccatcacanaatagctactaaggtcttgttgtcgagattnttctggccaacactttttaaagatgcccatcaccatgtcttaaagtgtgatcaatgtcaaagaatggtggatttcccgaaggaatgagacgcctcttcaaaaaattatggaggttgaagtttttgattgttgggttattgacttcatgggtcctttcccctcatctgctagtaataagtacatcgtggtagctgtagattactgtgaatgtatgtatacatgattctgatgatgtcaaaagaagaatcaaataaggctcatttgcttcaagattaatacaagattgtntcaacaaataaagccttgattcaagatgtcttcaagatcaagtcttgcctcacaatgaaaggtttcaagtcatccaaggcatatgtaatcgattaccaatacatgttgtcataccct

SEQ ID NO: 2403 - DNA, 424 bp, Glycine max
tttgtagataatgttaatgcttcacctgtaccgttgaatgtgttgtcagtgccatggttgttcttaatgtggggcatagatgtgattggggctatcgagcccatggcttcaaatgggcattgtttcatcctagtccccattgattacttcaccaaatgggtggaagctgcctcatatgctaatgtgattacgaatgtggtggttagattcatcaacaaggagataatttgtagatatgggttgcctagaaaaataatcaccgataatactactaacttgaaaaacaaaatgatgaaggagatgtgtggggatttcaagatccaacaccataattcgacaccttatcgacccaagatgaatggtgaagttgaggctgccaataaaaatatcaagaagctcattcacaatatgaggatgtcataca

SEQ ID NO: 2404 - DNA, 393 bp, Glycine max
agcttaccttcaattattgtgattcatggtatattgtctaattacacttcttacttattcatacaatactatgtttcagatttatccatacacttgttattatggataaaaataaatgaaatacttttacactcaatcttattactataaaaatctctattgaatctcactattacatttgattaccacattattataattaaaggatatataagggaggaaatactttataatgatcagaggagggaataaggtgaaaggaaagaagatatagggtcataatgtcatgcacaaccagtgtatctctttataccatgtataataatacatcagtctctttataccatgtacaactagtacatcaactatcttatacatttgctcaggccttta

SEQ ID NO: 2405 - DNA, 428 bp, Glycine max
  unsure (1)..(428): unsure at all n locations
gtgatggtgtcgagaagaaatcacatgtttgtcatcatcaaaaagggggagaatgtgaatgtatgtatacatgattntgatgatgtcaaaaaagaatctaacaaggctgcttcaaatgataagcatttgcttcaagaataattcaagattgcttcaacaaacaaagccttgtttcaagattcactaaagaccaagccttgccttaaaacaaagtgatttcaagacatgcaaggctctggtaatcgattaccaggaagtgtaatcgattaccacaagacggcgttgagaaatagctgttgaaaaaggttttgaatttgaattttcaacatgtaatcgattaccatatgtctgtaatcgattaccagcaacgaaactttggaaactcanattcaaaagtcataaccctctcaaatataactgtgtaatcg

SEQ ID NO: 2406 - DNA, 258 bp, Glycine max
  unsure (1)..(258): unsure at all n locations
ntntagcaattcagatggtcataacgtttcactcggatgtctgattcaagcgcataatatatcgagacgctcgagattgaataatggaagctattgagcaatcccaatggatataacttttaactctgaagatcgatagatgcacatgatatattgagacgctcggaaatgaacaacggatgctctcgagacactcgaatggtcataacttttaactcggacgcctgcttgagacgcattatatatcgtgacgctcta

SEQ ID NO: 2407 - DNA, 334 bp, Glycine max
  unsure (1)..(334): unsure at all n locations
agctttcagaaaatgtctatgccgagtgtataccattnttcttccatgtttcagttgtacgtagcttgtgttttcttcatagatagggcaatcacgatgtcctttaacactatatccactcaaattcccatatgctcgaaagtcattaatggtacaaaatagcattgcacgcaacttgaatgtctcatttcgatacccatcaaatacaacaaccctctcgtcccacaactttgtcaagtcttcaatcaagggactgagataaacatcaatgtcatttcctggttgtcttaggcttgatatcatcatagaacacataatgtattttctctacatg

SEQ ID NO: 2408 - DNA, 108 bp, Glycine max
attcttatgattgcctatgcgtggaccctcaagtgcaatcctccattcttccctctattccgagccccatgaatgtcattgcctactgctggtcatgtgtcctccacc

SEQ ID NO: 2409 - DNA, 259 bp, Glycine max
tcgacactatgatacattgtgcctcctcattgttgaatggagtagcttcaaaactgataatagacaagaaagatctcatacattgtgctctatcacaactatgccagttgaacaacctcttgatggcgtggcacatgcagcacgtgctcacgctcaatatcaccaccgcgctgtccgacgccagcctctctatgcgctccagcgggtcccccactaccgccgccgccgcgttcccaggggccgtcacgtatcttcccat

SEQ ID NO: 2410 - DNA, 304 bp, Glycine max
  unsure (1)..(304): unsure at all n locations
tcatactatttcaagaaactgaatncttggtctccatgttatcaaaaacaactctagcatctcttaacatccctgactttgaaagcatactaattagagaaggtgccacaagtctttctggctcaaaaccgagccttacaacccaagcatggatttgcattcctataaccaccggacccttgatggccaaagctgcaattacagtagaaacagtataatagtcacgtctgtatcccctaacttggatcagacagaacaattcccacacctgatcattaaatctattccatgaataacccgtgag

SEQ ID NO: 2411 - DNA, 463 bp, Glycine max
  unsure (1)..(463): unsure at all n locations
agcttcttcttcagactntgtgaacagtgtcttgttatttatcgaanaatcatccattgcatcaatgcttgaagaacctgctatgtgttggggaatattggggggtttcttccaaaggtgatttcatagggggaaagtctggtgcttgaatgaattgatatgttataggaccattcggtctatatcaaaaacttaccccaggacaacgggcgatggtgaacggaggctcgtaagtactgttcgacaactcgatttagcattttcgtctgtggatgataggcagagctcatacaaaagtttgtgtcgctgagttggaacaattcttgccaaaagtggctgatgaacaatgggtctcgatagtagaccaagctatgaggcattccatgaattttcccaacaatgtccatgaaaaggattgcaatagtgtgagtcgtgaagtgtgacttgagcttggccaggtgga

SEQ ID NO: 2412 - DNA, 278 bp, Glycine max
agcttaactctattcgcattcttatctctcttgctgctacacatcattaacctttatttcgataggatgtacagaatgctatcttgcatggtgacttacatgaagaggtgtatatagagcaatcacctgtgtttgttgcttaaggggtgtttggcaaggtgtgccgcttaagggagttgttaaatggcttgatgcaatcacctagatcttggtttgggagatttagtggtgtggtccttgcatttggactgaagctgagtcaaagtgatcatactgta

SEQ ID NO: 2413 - DNA, 400 bp, Glycine max
tcatcaaactacttggttcccgagggaaattctataaacagaccttctatctttaatggagtgggttaccactactggaaaacccgcatgccaatctttatagaggccatagatttaaatatttaagaagccctagaacaaggaccttatgttccctctataatagctgcaagtgcaacaatagaaaaacctagagcagattggactgacgaagaaagaagattagtaccatataatttaaaggccaaaaatattattacatctgccttatgaatagatgaatactttacggtttcaaatcggtaaagtgctaacgatatgtgggatacactacaagtaacacatgaaggcacaacatatgttaaaagatctagaataaacactttaactcgtgaatatg

SEQ ID NO: 2414 - DNA, 386 bp, Glycine max
  unsure (1)..(386): unsure at all n locations
agcttataaggtttgttgccagcagcattgaatgattcaatgaactccacattgtccttgaatatctggaaacgttnttccttctctgcagcatccttatatatttttccatattctgccatccaattttcatgtctttctcgcaaggctgtttgatgcagcttgcggngcatcacttgggaaatcccaactgcaaggaaaaggaatagggctaacatgtgttgctnttggccagtgaaagccatttcttaattatcagcaatgatcagttttgtaagaaaaggcttagttggtatatttgtgtaaagagagaaatgtgaattggtatgcattgaaatgaatgaatctggagggttatatagagatcatagtaccttatgctatgg

SEQ ID NO: 2415 - DNA, 312 bp, Glycine max
  unsure (1)..(312): unsure at all n locations
acacatattttatccatagcaacataaaaaatctctgcacggtaatgatgaagaataatgatagtccttccttctgctcttgaacgancccgaactggtatttcgtcatccatatttggtactagaatacttttagcaacacaaanatcttggacatccgcaaaaaaattattccagccactctctctcattgtgcccaaccgagctttgacaacatcaactaattncatggcattcacaatattaagaatctttctttgcaatatattttgaaagctcgttgtgataccaaacaactttaacattaacctc

SEQ ID NO: 2416 - DNA, 426 bp, Glycine max
  unsure (1)..(426): unsure at all n locations
cttgcgtaagaaccagnttatncaatggaacgatgactgtcatttgtattcggaangatcaaatgatgccttatgaatcctcctgtgcttacgccactagtgcctggaaggcccattatcctatacatgaatatgttggatgaatcaatggggtgtatgctggggcaacatgacgagtctggaaagaaggaacatgccatctattacctaagccagaagctcacatcatgtgaaatgaactactctttgcttgaaacgacatgttgtgccttggtatgggcagcccaccgtctaaggcagtacatgttgagctacaccactcttgtggtgtccaaaatggacccagtcaagtacatatttgagaagcccgctctttacatacggatcgctcggtgtaggttctgctatataatttgacatcgttat

SEQ ID NO: 2417 - DNA, 402 bp, Glycine max
  unsure (1)..(402): unsure at all n locations
ctgcaagcttgcttctacactaaagggtttccttttacatttaaatataaagactatcccataaaggtgtctattttatatatcactaatgtccataaattagggatgttacactgcggacaaaaaagtatattaataagaaaaaatgattgataaatagttatatgaaatggtaaaaaaattactatgaatatattcacattaaagtatcaaattccttgaaaggaaaattcaagttatataaatgatttcttttaatattatagttaaaactcccgtgcattgcacgggttttaattaagttcttgaacattttttaaaaaaaattttccctgaacataaaaattaattcataatttcttaaaaatatataacaaaatnttaagcaaaccacaaattaac

SEQ ID NO: 2418 - DNA, 405 bp, Glycine max
  unsure (1)..(405): unsure at all n locations
agctttgaccacaaccccgatcttatctctacctatttttactcaaccatttattgttgaaacagatgccttaggccaaggaattggtgttgttttgtctcagaatggccatccaattgcttttttctttaagaagctttcttctcgtatgcagaagcaatcagcttatgttcgtgagttgtatgcaattactgaagcagtggctaagttttgtcattacctttttggtcattattccattatctggacagaccaacgtagtctcaagcacattacggaccanatcattcaaacaccagagcaagagtccttgttacctaagcttcttgacttcaacttctcgattgagtataaacctggacccactaatncaagtgctgatgctntatcatggtctttctatat

SEQ ID NO: 2419 - DNA, 411 bp, Glycine max
  unsure (1)..(411): unsure at all n locations
agctnttgcctcanaacanagtgtttccaagagatcaagactttggtaattgtttaccagacagtgtaatcgattaccagaagacaattttgaaaaacagcttttaacaagggttttaaatttgaattttgaatcatgtaatcgattaccagatgtttgtaatcgattactagcaatgacacttcataaaatactttgaaaagtcatgacccttcaaaatataactgtgtaattgattaccagaaacctataatcgattaccagtgaaaaatttcagaaaaaagtttttgaaaagatacatctcttcaaatcattttgaaaagacacaatgggcctatatatanggtgtgttgactntataaagtaaagagagaattctagagaacttaattgtcaattctccaacaactc

SEQ ID NO: 2420 - DNA, 355 bp, Glycine max
agcttgagggtaaactttatcccttagtcaacctattaactcaacttgccatgaatcagaaatctacacctgttgcaagagtctgtggtctatgttcttctgcagatcaccatacagatctctgtccttctttgcagcaatctagagtcaatgagaaacctgaagcttatgctgcaaacatttataatagacctcctcagtagcaaaaccaacaacagtagaataattatgaccttccaagcaacagatacaatccaggttggaggaatcatccaaatctgagatggacaagtcctccacaacaacatcagtctgtccttttctttcagaatgttgctggtccaagcaagcctta

SEQ ID NO: 2421 - DNA, 391 bp, Glycine max
  unsure (1)..(391): unsure at all n locations
agtcacctgcggcatgcaagctttggtccaattcatacgaccataagttntgtcatggttgtacgatttaggcccatggtatatggagacactcgaaattgaaaaatgaaaggtctcaacatattcaaatggtcataacttttcactcaaatgtcagatgcaggtatataatatatagagatgctcgaaattgaacacggaagctctgctccaattcaaactgatatgaaccctcatggaacaagggctgacttaggatcgtctaggattaaaccttgatggaaaatgcggaaattgattaacgtaaggatggaacataaggtggttaatttcgtgggtcttaatcacgtggctcttggcataaaatggatgaatgggatgggtaaatgta

SEQ ID NO: 2422 - DNA, 208 bp, Glycine max
ttcttcacagatggggcatgctagatgacccttaacactgtaaccgctgagattctgatatgctggaaagtcattaatggtacaaaatatcagtgcacacatttgaaaagtctgcttgtgaaacccatcaaatactattaccccctcatcccacaactttctcacgtctgtcctcaacggacttagataaacatctatgtcatatgct

SEQ ID NO: 2423 - DNA, 407 bp, Glycine max
tcgtctgcgatgggtgtagttttatgatgtggtggcttgcggttgttgcggcggacagttttgatgatgagggtgaagaagctgacgaggaaggcatagacaacgagagtgcccagtgtctagatgaagacctagcgactaacaatgatgcagcccagatatatgtaccttttcttcttctttttatggtctcctttgcccaagagccacctatgttgggtctcaccaaagcaccttggtccagctcatggagattcggtggcggagtctatggtgtgaatctcaagcaggcctccccacagatccctactgtgcatactatattttcgatcccttatgataaacaccagactcacatactgctagtaagtactacctagtaactcgtatttctctcgttctaaact

SEQ ID NO: 2424 - DNA, 372 bp, Glycine max
  unsure (1)..(372): unsure at all n locations
ctcagcttgatcggaatttgcaccagaattcgtagctcgctctgttgatctttcacctttagtctacgtctacgactcagcgcgtcaaatagttncagagcgaactccttagagtccttcatcccttcaaaaaattaaacaaagcatacaaaactcttcaaacaaggagtgaaaatgacaaaccgattaaatgcacatgccaaacgcaagaatctgaactgaaatttgaaaaggaatcgtacctatgcattgcgcaaaatcagtgcgataaagataacccgtcttggcaagactatagaaatggctttgcacctcgttccaggcgtcagcgccattggatntactgctaataaatttcagtccacggagcgc

SEQ ID NO: 2425 - DNA, 329 bp, Glycine max
  unsure (1)..(329): unsure at all n locations
agctggcattcgatcatcggagccatagagagcatgatagcgctgaatacaacggtcctgcattntgctcagagctttggccaaagggtagcttatggcgaaaccgcccccaccataggccatgccgtaggagaagaatatgttctgcaagtgactctccgacaagctcccaatgtagtacatgtagttgtggtcgtacttgtttaaaatcctcagcagattgtccgtcacgaaaacggtgtcgtcgtcgcccatcacgaaccaccgcacgttcttgtgccccatacgcagcgtttccgtcacgatgcgcgatattcgaatcgcggagc

SEQ ID NO: 2426 - DNA, 448 bp, Glycine max
  unsure (1)..(448): unsure at all n locations
tcacgatctcacacgtcgaactacatgtatncttcattggaagatcttagaggggacatgcttaataaataactctgacactcaaataagtacatgaatgagttgagtatgaaattgaaaagggtgaaataagatctgatctttataacgtgagataggagtttcgagtccttgattgtaagagagttattacagtgatgtaacaactctagataattcctaacttggtaataatatatagtagaaaaatcatagcttggtaataatagttaatagataattcatcacttatagattatccaatggattatagataatccatttattatagataattcattactagtagataagtaagtacctgtaactttgataagaaataataacattatcactaagattcaaatatatagatatttgtaacaacatgttggccctatagctcgac

SEQ ID NO: 2427 - DNA, 341 bp, Glycine max
  unsure (1)..(341): unsure at all n locations
gtacgattgttgcccatggtatatggagacgctccgaaatgaaaaatgaaagttctcaagaaattcaaatggtcataacttttcactcaaatgtcagattcaggtatataatatatagagatgctcgaaattgaacacggaagctctgctccaattcaaactgatatgaaccctcatggaacaagggctgacttangatcgtctangattaaaccttgatggaaaatgcggaaattgattaacgtaaggatggaaaataaggtggttaatttcgtgggtcttaatcacgtggttcttggcataaaatggatgaatgggatggtaaaatgtacgttaagtgg

SEQ ID NO: 2428 - DNA, 442 bp, Glycine max
  unsure (1)..(442): unsure at all n locations
agctttaattaatcgcgtacagaattccaggcatttctgtcgttcaatgtctcttgttcccaatcccaaacacctcagaagtttattagcaaaagccagtctagcaaatgacatgtacatgacataacctttcaatttcgtgttcgtgtattatatatgcaaactgtgatggcatgtattcaattcaccctataaaaaacattccagtttctattcatgaaaatgaattatcatttctatacatatttttaatttaatttaatcaaaatacatggacatttacatcattttttaatcctataggaagagcattatatgttatgcatgaccaaactatcgatatatgtattggaatgattttaaaagatacaattgagataattntaattagtttataatctaaaattctttgcaccaataatatatcaaaattattattttt

SEQ ID NO: 2429 - DNA, 253 bp, Glycine max
ctggttcaaccttcttaacaggtactttatagctgcatggtctgtatgaacaataacacgagtaccaagtgaatatgaacgaaatttctcacgagcacaaactatcgctaatcgctcattctctgtgggcgtgtaatttacttgaacaacatccaaagttctggaagtgtgatagatcactcgaggtagcttatcaatctttctgagcaaggacagcccctaatgcgtaattggatgcatcgcacattatctc

SEQ ID NO: 2430 - DNA, 246 bp, Glycine max
tatacacacacacacacacacatatatatatatatatatatatatatatataatttgatcttaattaattattaccggtgggaagattaatgacataaaaataagaagtgtcatgatcatgtattcatgtggtacaagttttgatggaatagaactacatggagcaaatgggtacttgctggatcagttcctaaaggacaaagtgaacgacgaagatgatgagtacggaggtactatataaaatcg

SEQ ID NO: 2431 - DNA, 401 bp, Glycine max
gcttggaaaaaatcctcacacagagagtcattattagcatcgaatatgatatcgtccacgtatatctggatgattaagaattgactaccataatctttgtgaaacagagtagtatctacctttcctcttataaagccattttcaattaaaaatgaacttagcttttcatacaaagctcaaggagctatttttaaaatatacaaagccttgttaaatttgaaaacatgataagggtatatagaactctcaaaccccagggggctgttcacatcaacttcttccttgataagtccattgaggaacacactttttatgttcatttgatacaacatcataccgtgataagcaacacagttaaattggtttgtccagcttgtttctaaacactcactgagttctac

SEQ ID NO: 2432 - DNA, 371 bp, Glycine max
  unsure (1)..(371): unsure at all n locations
agctntacagcagatgcccctttactccatgttcttgaaggatatgttaacaaggaaacataagtatattcaccaggaaaaaattgtagtggaaggaaattgtagtgttgtgattcaaaagatccttccacccaagcataaagaccttgggagtgtaactattccttgttcaattagagaagtcactgtgggaaaagctctgattgactcgggagccaacattaatttaatgtcattctccatgtgcagaagggtgggagagatggagaccatgcccactaagatgactttacaactggttgaccgctccattaccagaccatatggagtaattaaagatgtgctggtcagagtgaaacattntatcttcc

SEQ ID NO: 2433 - DNA, 376 bp, Glycine max
  unsure (1)..(376): unsure at all n locations
agctntctatactaatgtcaaaattcaagaaagctctttgatctctgaggtttatgggataaaaatggtcattgaccaatcccttttctatgacttgacccaattatctagtgaaggtgtaccatttgaaggtacactgaatgatgattggaaatttgatttctctgtgcatgatgcccgccggttggtttgaaccaaccaagaggatatgactggaaggcttcttgctggatcattggcttttgaaagccatatccttcactatctcattgtgtgtattttacttccaagatcttcaaacctttgctcaggttctgaagacgatcttatagtcatgtgggcttttcataccggccgacaaaatgatttggcacac

SEQ ID NO: 2434 - DNA, 379 bp, Glycine max
  unsure (1)..(379): unsure at all n locations
agctntgaatgcactattcaatggagttgacaatatcatcttcagactgatcaacacttgcacagtggccaaagatgcatgggagatcctgaanatcactcatgaaggaacctccaaagtgaagatgtccagattgcaactcttggctacaaaattcgaaaatctgaagatgaaggaggaagagtgtattcatgacttccacatgaacattcttgaaattgccaatgcttgcactgccttgggagagaggataacagatganaagctggtgagaaagatcctcacatccttgcctaagagatttgacatgaaagtcactggcatagaggaggcccaagacattngcaacatgagagttgatgaactcattgggtctctt

SEQ ID NO: 2435 - DNA, 206 bp, Glycine max
agcttgaatcggacatccgcgtgaatagttatgatcttttgaatctctcaagagcttccggtggtcaatctcgatcctcttgacatattatgcacccgcatcggacctctgtgtgaaaaggcatgatcattcgtatctttcgagagcttccgatgtttaagtcccagcgtatccatatattattaactctgaatcggacctcagtc

SEQ ID NO: 2436 - DNA, 163 bp, Glycine max
tttcgagtgtctcaatatattatgcgcctgaatcggacctccgagtgaaaagttatgaacattcgaatatttcgagggctctcgttgattaaattccagcttctgtatatattatgcgcctgaatcggacctccgagtgataacgtatgaccattttaatatc

SEQ ID NO: 2437 - DNA, 413 bp, Glycine max
  unsure (1)..(413): unsure at all n locations
ataatggagacacatgaacatcgctaggcaatgactttcatggtgctccgaacaaaagtggagtatggaggattgccttgagggtccgcacttatgcaatcatgaaactcaactccaaactcgaaagtgaaggatataggaacagccctaagcaataacattcatgtggctccggaacgggatgagaatggaggattgccttgagggtcctctcttangcaatcatgaaactcaactccaaactcgaaagtggagaacacatgaacagccctaagcaataacattcatgtggctccggaacaggatgagaatggaggattgccttgagggtcctcttttangcaatcacgaaactcaactccaaacttgaaaatggagaacacatgaacagccctaagcaataacattcatgt

SEQ ID NO: 2438 - DNA, 382 bp, Glycine max
  unsure (1)..(382): unsure at all n locations
agcttcgaaatccaaagatctaatccaaggtagatgtttcataaatgggattcctttgcttgtgttgtttgattctggtgccacccattcctttatatcttggttgtgtgtagaaaaacttaagctttttgtgtcttctttaaataaagatctagtagtagagacccctactagtggttctgtgttaacttctgatgtgtgtttgaattgttctgtggagatttctggtaggatattcttgattgatttgatttgtttgcctttgagctagaatgatgttattcttagtatggactggttatcttccaaccatgtcttgttgaactgttttgaaaaagtgtggtgtntgatgattctggagtgagtaaggatatgatgttta

SEQ ID NO: 2439 - DNA, 354 bp, Glycine max
  unsure (1)..(354): unsure at all n locations
ctgatgcatctaccccgcagggcattggatagaatagtccaataacattggaccaaagatgcaagagaaggccctagggttctcatgagtcttanggtagatntcgggcccatgggctaagtacgagcccacttatctttgtaaatattagattaaggtttcattatttttgggccttgtagttagggctccataatgtaggtagggtgccttagaaatataggatttttcagcccttgtattttagggcacctagactagtttttgtattatgggtagttttgtaatttcatatgcactaagtgaatatttgatcgtgtggttggaaactaaattaattgaattggtagaagc

SEQ ID NO: 2440 - DNA, 364 bp, Glycine max
  unsure (1)..(364): unsure at all n locations
ctttgcgtaagaaccagtttatccaatggaacgatgactgtcaagtggcattcggaaggatcaaatgatgccttatgaatcctcctgtgcttacgccactagtgcctggaaggcccattatcctatacatgactatgttggatgagtcaatggggtgtatgctggggcaacatgacgagtctggaaagagggaacatgccatctattacctaagcaagaagttcacatcatgtgaaatgaactactctntgcttgaaaggacatgttgtgccttggtatgggcagcccaccgtctaaggcagtacatgttgagctacaccactnntgtggtgtccaaaatggacccagtcaagtacatatttga

SEQ ID NO: 2441 - DNA, 399 bp, Glycine max
  unsure (1)..(399): unsure at all n locations
agcttatccncacaagagtgcataacaactggtgagtctgcattgattataggaggctgaaccaggtaacccgaaaagatcatttccccctgccattcattgaccaaatgcttgagcgcttggcaggtaaatctcattatttttttcttgatggtttttctagttatttacaaattcatattgctcttgaggatcaagaaaagaccacattcacctgtccctttggcactttttcctataggaggatgccctttggcctatgcaacgcccctggtaccttctgtcgcaacctacccttttgcgggcaagcgaggcgaggctcacgggtgccttttccaaaggaggaaaatgcgcggagtcgtcaccaacgtttatttgtggaaaacgtcgaaaaaatcg

SEQ ID NO: 2442 - DNA, 396 bp, Glycine max
  unsure (1)..(396): unsure at all n locations
agctnggatttcctntgctccggatacctctcctttctcatgtgaacccaaacctaatctccgggttggaaaacaaccttnttgcgccccttgtttgcttgtttaacatagctctcatttctctttttaattatggccttgactctttcatggagctttttcacgtagtccgctttggcttgtccttccttatgcttaaaaactgaaatattaggcattgacaacaaatcaagaggagttagtggattgaaaccatatacaaccttcaaaggagaacaactagtggtgctatgcacagtcctattataagaaaattcaatgtgaggtaagcaaacttcccaatttttaagattctttttaaaagggtccttatcaaggtacccaatgtcctattca

SEQ ID NO: 2443 - DNA, 473 bp, Glycine max
  unsure (1)..(473): unsure at all n locations
tcaagctcgcttctacaatgatgatggagtntaaagaagacattatgaagatctttgagatgaccgacctcggtttgatgagttacttccatggcatagaagtaagtcacagaaatgaagggatattcatctcacaaaagaaatacacaaaaggcttacttaagagattcaagatgtatggttgcaaacctgctgctactccactcaaaacaaatgagaaactacagaagaatgatggagcaccaaaagtntatgcatcccaataccaaagtctaattggaagcctcctatatctgaccgctacacggcctgatataatgtatgctacaagtcttctatcaagattcatgcagagtccaagtcacatacactttggagcaggaaaaagaattttaggtatctacaacgaacaaaagagttccgtatatgggatactaccgataccaactcacaattacttggctacactgaca

SEQ ID NO: 2444 - DNA, 446 bp, Glycine max
  unsure (1)..(446): unsure at all n locations
agcttaacctctatacccttaatccanaactctattaactaaaccctaaactctaaggcttagacaccaaaccctatatttgaaaacccgaaacccttaacccaaccttntaagcccttaaccctaaaatataaaaaataaaccctaaaccctaatggtttagacaccaaaccccaaacctcaaaaccctaaaccataaacccttaaccctaaattctaatccctaaaccctaaactcagaattctaatacctaaacccaaaactatgcattataaaccctaaaccctaaactctaaaccacaagggttagacaatacaccatacatcttaaaccctaatcccttaaccctaaaatttaaatactaaaccctaaacccttaaccctaacctttaaacccttaatcctaaaatatcaaaaataaaccctgaaccctaaacctaaaca

SEQ ID NO: 2445 - DNA, 421 bp, Glycine max
  unsure (1)..(421): unsure at all n locations
cttgtccatntatcacatgtccagcaatcatactattctaaganactgaatccttgttctccatgttatcaaaaacaactctagcatctcttaacatccctgactttgaaagcatactaattagagagttgcacacaagtctttctgtctcaaaaccgagctttacaaccaaggcatggatttgcattcctatagccaccgcaccctgattggccaaagctgcaattacagtacaaacagtataatagtcaggtctgtatccctcaacttgcatcagacagaacaattcccacacctgatcattaaatctattccatgaataacccgtgagcaaggaattccacgacaccacgtctctgtcacccatctcatcaaaaactctcctcccatctctaacattccccgttntcgtgtacatatc

SEQ ID NO: 2446 - DNA, 418 bp, Glycine max
agcttgtcttttctcttctggtcaaaaatcatatttacgagaattattaatttgaattctgcgaaggacatttgggactacctcaaatcagagtattaaggtagtgtgcaaactaaaggtatgaaggcacttaacttggctacagaatttgagatgcaaagcatgaaggagacaaaaactatcaaaagttatgctgacaaacagttgagcattgcaaacaaggtacgtctccttggtaagggatttcctaacgaaaggatagtgcacaaaatagttgttactatacctgaaaaatatgaatccaaaatatcagcattagaggagtcaaaagaattgtcaaatatcaccctcggagaattggtaaatgctttacaggcacaggaacataggagaatgatgagacatcgggtggcaatac

SEQ ID NO: 2447 - DNA, 483 bp, Glycine max
  unsure (1)..(483): unsure at all n locations
agcttacggcccatgaaaatactccaaaacttaacttttaaaatatagcangaaacaaaccacaaataaaaatttcatcctcatctctaagaatgatcccacagtgtcaacttacatagtataaaaaaatctgtaagtttgttctagatagtgtttgaaatttagtaagatcaaattacatagttaaactcaaaaaaatgcttttggtctcttagccccctccccncggatatttggtcttagttttttattttcaaactgatgaattaaaaaccaaattttgaaatgactaatttatattttaacattaaatataaaaaaatatttacaaatcattattcaataatatttcattaattaaactnaatttgaagatatttntaaactaaaaaagacaaatacatgtggttggtatatttaatttaatattttttaattattaacacaacaacctttccttaaagagaaagtgattacaaattt

SEQ ID NO: 2448 - DNA, 389 bp, Glycine max
  unsure (1)..(389): unsure at all n locations
tctggtgggacatcttgactggctntccaatctgactattacctcatattctgccttcttctattttcagattgggaatgcctctaacagcacctttgtcaatgattttcttcatgcctcttaagtgcagatgtccaaatctttgatgccatattctgacttcatcttctctggagaatagacatgtggaggagtaactggtttcttgaggtgtccataggtaacagttgtcctttgatctgctgcccttcattaggacttcactcttctcatttgtcaccaagcattctgactttgtgaagtttacattgaatccttcatcacacagctgactgatgctgatcaagtttgcagtcagtcccttcaccagcagtacttttgtccagact

SEQ ID NO: 2449 - DNA, 457 bp, Glycine max
  unsure (1)..(457): unsure at all n locations
ctaagcttacatcttcctgagtagctgccattggttgtattgtagcacttttataccttctaaaggaacaagtatagctggtaaattgtttgtttgtctgtgatgaattcctatggtattctccttttatagagctaggaatcaggactagctagtattcagcagatacgtaatcaattagaaaagatatacctatatacatatcatgggtatagtcaatagtggggacgataacaaaaaaatgggaaagtgctaccgtgtattaaattcattttgattgctgcgtatgaatgcggagacattgcacatgagaaggatctaganaaaatatgaaaaaactnttccctatcaagaagaatcctcagagntaacaaatgtggaaaaataaatgatgtaagagattgcgtaaaccgtgtagagaagattcctctaatatactcgatcctcaatcaaatat

SEQ ID NO: 2450 - DNA, 227 bp, Glycine max
gctgtacattcaatttcgagcgttccgatatattacgggactcaattgtacatccgagtaattagttatcgtcgcttgaatttgctcagagcttcaacattcaatttcgagattttcgatatattacgggactcaatcagacatccgagtaaaaagttattgtcgtttgaatttgctcagcgcttccgtattcaatttcgagcgtctcgatatattacgggactcaa

SEQ ID NO: 2451 - DNA, 262 bp, Glycine max
ccttcatctcttcggtgtggcaagcttgttttcttttgtgttaggatatctacatcgtctgcctcagtcattgtggtgcagtttatatatctgttggacaacttcacttaatgccacattgatttaagatgaaatctaacatgatatcagagcttatagtccggcttagttctctctaccatgttggttgtaaaagcagcagtacctgagattctcattcagttgtttgctcttagaagagccctacatactactaatctca

SEQ ID NO: 2452 - DNA, 288 bp, Glycine max
  unsure (1)..(288): unsure at all n locations
agctctgaatgcactattcatgtttttgacaagattatcttcagactgatcaacacttgcacagtggccaaagatgcatgggagatcctgaaaatcactcatgaaggaacctccaaagtgaagatgttcagattgcaactcttggctacaaaattcgaaaatctgaagatgaaggaggaagagtgtattcatgacttccacatgaacattcttgaattgccaatgcttgcactgccttgngagagaggataacagatgaacagctggtgagaaagaatcttatatcct

SEQ ID NO: 2453 - DNA, 374 bp, Glycine max
ctgcataccccaaggatccattaggaaattacttgtgaaagagatccatgagggtgggctcatgggccactttgggatagacaagacccttgtcttcctcaaagaaaagttttattggccccatatgaagaaagatgtccataagcattgcactaggtgtgtggcttgtttacaagccaagtctacggtgatgcctcatgggctatacacacccttacccatcccatctgcaccttgggtagacattagtatggactttgtccttgggcttcctagaacccaaagaggtgtagactctatctttgtggtggtggatagggttagcaagatggcacactctataccatgccacaaggtggatgatgcttcccaca

SEQ ID NO: 2454 - DNA, 385 bp, Glycine max
ttcggagcgtcgcgatatattacgggactctattggacattcgagaagaacgttattgtcgtttgaatttgatacgagcttccgttttcaatatggagcatctcgatatattacgggactcaatcggacattcgaataaaaagttatcgtcgcttaaatttgcttagagcttctattttcaattcggagcgtctcgatatattacggcactgaatcagacatccatgctaaaaagttaatgtcgtttgaatttgatacgagcttccaatttcaatttggagcgccgcgctatattacgggactctattggagatcccagaaaaaagttatgtctcgttgaaattgatatgagctcccatattcaatttggagcgtcttgatatat

SEQ ID NO: 2455 - DNA, 379 bp, Glycine max
  unsure (1)..(379): unsure at all n locations
cttgatgccatggtcaacctagtaacttagcttgtcatgaatcagaaatctgcatctgcacctgtngcaagagtttgaggtctatgttctatagcagatcaccatatagatctttgtccttctttgcaacaatctggagtcaatgagcaacctgaagcttatgctgcaaacatttataatagaccccctgagcagcaaaaccaacaacaacaaatacaatctatggtggaggaatcatccaaatatgagatgggcaagtcctctacaacaacaatagcctgtcccttatttccaaaatgttgctggtccaagcaagccatatgttcctcctgcaatgcatcagtagtagtaacaacaacaacaaagacaacaagcaact

SEQ ID NO: 2456 - DNA, 422 bp, Glycine max
  unsure (1)..(422): unsure at all n locations
agctatagaagaccgnggaantatttattgttgtgtggnctggatcttctgttggactagtttgacccctttgcttgacaccatgtggcccaagtactccacctgngtttgggcgaaggaacatttcgagagcttaatgaagaactggccctgcaacaaaaccttgaaagccaattccaaatgaagtaaatggtcattgaaggagctactataaattagtatgtcgtgatgtggacatcaaagcccaagcccatgacaaccaccagccccaggcccatgactagatggaagcccaagacccaatacaaggcataggaagacccatgacaagagcaagagctaaaaaggcacaagatgctttggaacatatggtgattattctgagggtagttcaaatgcagggagaggcccaacacttggag

SEQ ID NO: 2457 - DNA, 416 bp, Glycine max
  unsure (1)..(416): unsure at all n locations
agcttggttcccaacgctttgttcatactctcccataacctagaggtgaatctaggatctctatcagacactatgctagatgacacaccatgtaatctaacaatcttactaatgtatagggaggccaacttctctaaggaaaacctaatattgatggggataaagtgtgcagatttggtcaatttgtcaacaataacccaaatagaatcaaaacctttgggggtcataggtagtcctaaatcgaaatccatggagataccgtcccacttccactgnggtatctctaagggttgtaacttacctgaaggtctctgatgtttatcttagccttatgganactaaacatgaatacacaaacttcctaaccactcttttatgtgggccaccaaaacattatctttagactctaatacatc

SEQ ID NO: 2458 - DNA, 416 bp, Glycine max
  unsure (1)..(416): unsure at all n locations
ctgatgtaaccattggagaggttaatgaaacaacgatatgatgctctccatgagaggttggatcaaatggagaatagagaccatatgaattgctcaagagcttccattgttcaatttcgagcgtctagatatataatgcgcctcaatcggacctccgagttaaaagttatgaccatttgaaatgctcaagagcttccattgttcaatttcgagcgtcacgatatattatgcacctgaatcggacctgcgagtgacaacttatgaccatttgaatngctcaagagctctcattgttcaatcttgagcgtctcgatatattatgcgcctgaatcggacctgccagtgacaacttatgaccacttgaattgctcaagagctctcattgctcaatttctagcgtctcgatatattatgcg

SEQ ID NO: 2459 - DNA, 377 bp, Glycine max
  unsure (1)..(377): unsure at all n locations
agctntcactcggaggcccgatttatgcgcataatatatcgagacgctcgaanatgaacaacggaagctatcgagaaattcaaatggtcaatacttcgaactcggaggtcctattaaggtgcataatatatctagacgctcaaaattttacaatggaagctctntggctatacaaatggtcataacttttcactcgaaggtccgattaaggcgcataatatatcgagacgctcaaaattgaacaatggaagctcttgagcaattcaaatggtcataacttgtcactcggaggtccgattcaggtgcataatatatcgagacgctcgaaattgaacaatggaagctcttgagcaattcaaatggtcataacttgtcac

SEQ ID NO: 2460 - DNA, 421 bp, Glycine max
agcttaagcacgagtaaattgctacatgcttaagttgtgtttaaggtgcatccttaaagtgtatgcttaagaaagttatgcaaaatgcttttttttttaaaaaaatggtattccaagtgtgataaaatgaaaattggttcatgatatgagtatttatatatagtatggagttaattgtatgctaatatcatgcacttcacattcatatgaggattttgatgtggtgattgtaaaaattcatggtgttggatgtcttactatgcttaacaaactattgatggattcataagtgtgatgaatatatgaatggttaacttatgatatggtaatttgatgaaatatcgttataatgaaaagataattatattgataagataattatgtaaattattgaatgtctgagttatgtcgggttaatttc

SEQ ID NO: 2461 - DNA, 374 bp, Glycine max
ccatgaatcagaaatctacacctgttgcaagagtctgtggtctatgatcctctgcagatcaccatacagatctctgtccttctttgcagcaatctagagtcaatgagaaacctgaagcttatgctgcaaacatttataatagacctcctcagtagcaaaaccaacaacagtagaataattatgacctttcaagcaacagatacaatccaggttggaggaatcatccaaatctgagatggacaagtcctccacaacaacatcagtctgtcctttctttccagaatgttgctggtccacgcaagccttatgttcctctctcaatgcagcaacaacaaagacaacaagcaggtgaggcctccttttcaaccttctta

SEQ ID NO: 2462 - DNA, 340 bp, Glycine max
  unsure (1)..(340): unsure at all n locations
cggacatcccagctngaggttaatctcaaagctctattatcatattcttgttagaggacttccaaagctatcgtatcaagattcattttgtgtagcttcccaaaaagggaagcaagttaaaagttcttttaaagccaaaaaaaatctttccacttctaggccttttagagctcctacaccttgacctttttggaccaaccaagaatacacccctctttggatgcangtatggtctggtcatagtggacgattacaccagatggacatgggttaggttcctaacccacaaggatgagtcttttgataccttttataaactttgtaaatgattcaaaatgaa

SEQ ID NO: 2463 - DNA, 185 bp, Glycine max
taccatcagatccgagtgaagcctgaggatatactaaagactgcttttaggacccgttatggtcactatgagtatctagtcatgctctttggtgtggctaatgctccaggtgtgtttatatacttcatgaataaagtctttcacccttacctagatagttttgtggtacgattcatagatgatat

SEQ ID NO: 2464 - DNA, 409 bp, Glycine max
  unsure (1)..(409): unsure at all n locations
gcttcanaaagtcaagcagaacagcttaaagaagaacaatgtggcgatctctgatgtaaccaatcatgctcggaaagaagagttagaaactggccgttaataatttgcatctgtaattacagaacttgatgttgcaaagcaagaactgagtaaaattcgtcaggggtatgatttatccttggaagcaagagtttctgctctcaagcaaacagcagaagctgaagatgcaatgaaggcaaacatggaaagagcatgtgaggtatcctaaagaaatttggttgtgcaggaatcagttgagaaaatgaatgctgaatctgtccaagcacatcaactgcaagaagagacattagccggacaaaaagttcttagacaatcatatgaagccatccttgaagaatcaaaaaagaag

SEQ ID NO: 2465 - DNA, 463 bp, Glycine max
  unsure (1)..(463): unsure at all n locations
gtcacctgcggcatgcaagcttgtccattggcaaagttacagaaggccaatttataaaaatgatctattcagtcaattattcttcaccatcatttttaattatctaaagttcattggttggatttaacattaacaattagtcagtcaagttcaagaggacttaattacatgggttaaagaatatgtatctttttttctccaaaaaaaaaataagtcccttgatgcatttcataagttaatggaaaataaaaggtgtagaagaaatgcnattaaaggtgataagccatagcaagtgtttgcagtttaccgcttgaactcangtgactgcttatattngtcaaactcttgcaaccattcttcatccgagaaaggagggagagtaccggtgaattccaatcagtcattgaagaccagatcggtgagtcttgtaaactcccgagcaccaccatgctgaacacccatg

SEQ ID NO: 2466 - DNA, 426 bp, Glycine max
  unsure (1)..(426): unsure at all n locations
cacggttgcaccggcctctctagtgatcctccaaagtgttatcctgttcaacactgcacatggagagtgagtcatcctccacatcaagcagtgcaagaattatatgcgactgtagattactaggtggacacgcttcatcgtcaagcatttctggtgcgtccaaagcattaacttgtaacctagcccgcttgattgcctcggcgtcaccctgaaggagctntgagatctgtggtccaaatgtccgagagaatatccatgagattttcaataaaaaggactaatgtactgaatgagaatatttctatggngatcaaacaagaagataaagttaacggctgcactatagaggtcagataccacattgattaggataagcaaaacgcagaaagtccgtccattgtccaggatatacactcaatatgcaac

SEQ ID NO: 2467 - DNA, 445 bp, Glycine max
  unsure (1)..(445): unsure at all n locations
ctatgctgcanacatntacaatagacttcctcaacctcagcagcttattcaaccacagcagaacaattatgacctctncagcaacagatacaaccctggatggaggaatcacnctaatctcagatggtctagccctcagaaacatcagcagaagcctggctccttcttccaaaatgctgctggcccaagcagaccatacattcctncaccaatccaacaacagcaatagccccagaaacagccaacagttgaggctcctcccgcaaccttcctcaaagaacttgtgagacaaatgaccatgcagaatatgcagtttcaacaagagaccagagcctncattcagagcttgaccaatcagatgggacaattggctacacaattaaatcaacaacagtcccagaattctgacaagcttgcttctcaaatctgtccaaaatccaaaaat

SEQ ID NO: 2468 - DNA, 437 bp, Glycine max
agcttcatctatggcagccaagttctcagcaacttttaaatataatctcctagatccgatcaattggttcagtgcgatcctgcacagcaatcccttctgagacatcggcgagtgatttgagattgcacttaattaaggcctcaacgaagtagcaggtttcatctttggtgttgccctcaggtacatccaccacaaaagattcaattaccagtgtacctggccttccatcaataatttctgggtggagggacatgatagatgagtagttctgaaagataagagatacaacttatgttaaaaaaaattattgtgtcaggtgacacggacaagatagcttaatcatttagcccaacttcttagacaggccgggaaaacaaaaatctatataattactcatggtggacgtaatgcttggtgcgtctttaatacatgaatat

SEQ ID NO: 2469 - DNA, 335 bp, Glycine max
  unsure (1)..(335): unsure at all n locations
agcttganattgaataatggaagctctcgagaaatataaatggtcataacttttcactcggattgccgattcaggtgcataacatatcgagacgctcaaaattgaacaacagaagctctcgagaaattcaaatggtcataagttttcacatggatatccgattctgtgttataatatatcgagacggtcgaaattgaacaacgactcgagaaattcaaatggtcataacttttcactcggatgttcgattcaggcgcataacatattgagacactcggaattgaacaatggacgctctcgagaaatacaaatggtcataacttttcactcggatg

SEQ ID NO: 2470 - DNA, 477 bp, Glycine max
  unsure (1)..(477): unsure at all n locations
tatcccaataacactatcaacatagtatgaatnctacactatgagaatcctaattactgatattctaatcatttaacaccttgaagggcatacatgatattaagtaacaaaagcaagcagaagcttctttcccattaccaagcaaatgttctattctagacagaacaaggagataaaatacacctgttaatagcaattgtccatttactgtctataaagtcagttgctgcaagtaatgcagctggccaagccaaagcagttaagagtgagctcaaaacagtcatcattgcccctcgtttcatagctccatcgcaagtcctgatgcaagtcacagcaatactaacatcattcacagcactactaataaactgantacttagttttataagcacccctaaacctacaacaattacttgaagtaagccaatcttgaattcagtgctcacagaatcagatcttgactccactgagtgatac

SEQ ID NO: 2471 - DNA, 492 bp, Glycine max
  unsure (1)..(492): unsure at all n locations
agctntgatataacatgatatagttcttcacctatacanatatattaaaatggagtgaaacatatactttntatcttagagaaataatggatactaacttattttattcaaaaaatttccaagtcgaatctaattgattgtgtggatgcatgtcatttgtgaagataattatatgtaggttatttcatatgtgtacaaagaaacttgtgctttatctttagggaaaatggcatcaactatcatatgcatgtgaagacaatttgcatatattgctcagttganagatggacacactaaagaggatagaacaaaacatatntcttctaaagtcttctacactcgatctttgaaggaatggtgatataaacattcaacaaatttgttcaagtgagaatataacagatntctntacaaagtcttttgctaaggagaactntntagtaatcggtacacaagaattgaacttcgtgtcttatagacaatcatctacat

SEQ ID NO: 2472 - DNA, 427 bp, Glycine max
  unsure (1)..(427): unsure at all n locations
tctaaactntatacaagaatgaagctcagataccacttgttggacaagtggcctcagatatcttaagaaggggggggggttgaattaagatatcacaaactattccccagttaaaaattctacttttaatttaacccaactacccaagattccttttaaacaagaactccttgataataatgcaaatttatcttactaaataaaaataataagcaataaatagtaaaggagtttaagggaagagaaaatgcaaactcagatttatactggtttgaccacacctttgtgcctacgtccagtccccaagcaacccgcttaagagttccactatcttgcaaaatccctttacaagatctgaaccacaccaggacaacccttcctttgtgttcagaattctttacaacaagagaaccttggtctcttaatc

SEQ ID NO: 2473 - DNA, 414 bp, Glycine max
ctgagcagattctatcgacaataactgtttacttggatgttcgatatagtcacgtaatatatcgagtcgctcgacatagaatacacaagctgtgagataattctgacgacaataactatctactcggatgtacgattgagtcacgtaatatatcgagacgcccgaaattcaatacagaaactctgagcaaattctaacgacaataatcttttacttggatgtccaattgaatcacagaatatgtcgagacactcgccattgagtacacaagctctgaggagattcagatataaataccctttgactcggatattcgattgagtgccgtaatgtatcgatacattcgaaatagaatacagatgctgtgagcaaattctaatagaaataactttatactcggatgtgcgattgagt

SEQ ID NO: 2474 - DNA, 225 bp, Glycine max
tatgctgtacacatgtattataaacctcctcagccgcgaaacctacagcaatagaataatcatgacctttaaagcacttgatactatcctagttggaggaatcatcctaatatcagatgggctattccttcacaaacacaacagtatatatctccttttctgaatgctgctggtccacgcaagccatatagttcttcttcaatgcagcaattgcaggaacaacaa

SEQ ID NO: 2475 - DNA, 467 bp, Glycine max
  unsure (1)..(467): unsure at all n locations
gtactattattttgtatacacagtttctacattaggaagccttgaaaataagctgaataattatgataagtaggccattatgtcacaactaagccttctaatctgtctttctgaacaaggtgctatttgtataaatgtctggcttgtttgtcacgtttagcttatgcatgtacttatacaccaatttctagagattctgcgaaaccatgaataataactatgactgcatagctatgccatgtaaatttacaatgtagttgttggatttcctttttaaagttattagtttaatttatgcatctattttgtttattggaagatgtgtatgtatgtcaaatcgggttatgatatcatatacatgatgtgtggaatacatntgtaatttcataaatctctcgtgatttcatctgatatatntgggatggaacatactagacttttaatgatgatcatttttatatgataag

SEQ ID NO: 2476 - DNA, 396 bp, Glycine max
  unsure (1)..(396): unsure at all n locations
atgcatgctaagctataagctctacaactgaataacacttggactcttaccattcttcctcctcacaaaactgccattgggtggtcgtgggtatataaaatcaaataaataaatgatgggtctatagaaagatacaaggcacatttagtcacgaaaggatacacttaaacagaggggtttggattatctcgataccttctcgccagttgcaaacctcaccaccattcatctncttttctagctntggttgctttccatcaatggcatctgcgacaactcgatgtgaataacgccttccttcacggtgagcttaatgaagagggttacatgcatgtnctctctggacttctagtcacaagcccgaaccacggttggtcgcttcaacgatctctatat

SEQ ID NO: 2477 - DNA, 456 bp, Glycine max
  unsure (1)..(456): unsure at all n locations
tatntaaacaatatataattgatgttntgtagtctatgatcaatgtacacatgtaacatgttatacctttcatcattcttccttcactttattcttatattactcttataaaatttatacataatgcttattttttatcaactttagtcgagtgatcagcctctaattttaaaaaatttccttacaaatatgttgataaataaaaaatattttaagttatacgaaatctttttatcttctttaataaaaaatgatataaaatatctttttgacaattatatttttaaacttagtttatgaaagaaataatttatttaaatatttctttaatgatttataaattggcgcaacccgtgaatgtgtgtctagttagttttaacagtcaaatacacgttctgtagtattaccacttaccagtgtaaatggctagttcctaaaaattctacaatacacttt

SEQ ID NO: 2478 - DNA, 381 bp, Glycine max
  unsure (1)..(381): unsure at all n locations
agcttatccaganatcgaagcactatgatcttctgctgaatattaggttgagaaacattctctaggaccctgagaacaatcatagggaaaaaaactccaatttctgccttcaatccagctctaaatcttgacaccagactgatgaaaatggagcatgacagttgaaacacaatcaaaagagttgaagcactgttcttcaacaaggatagacataagtactgcttgatggcgcctaaaaacctgctcatccacaaccaaatttaaccatcaggactatttttgtcatctggaaaaattatgaagtanaaaaaaaatatagtgtcaagtggtgtatagaacaaagaaagaaaatgttaatttgcattaatgatgagggacaaa

SEQ ID NO: 2479 - DNA, 390 bp, Glycine max
  unsure (1)..(390): unsure at all n locations
ggagggagaactggatgccttggtcaacctagtaactcagcttgccatgaatcagaaatctgcatctgcacctgttgcaagagtttgtggtctatgttctatagcggatcaccctgtggagcgggagcatctttaatgaaataatctggagncaangagcaacctgaagcttatgctgcaaacatttataatagaccccctcagcagcaaaaccaacaacaacaaatacaatctaggttggaggaatcatccaaatttgagatgggcaagtcctctacaacaacaatagcctgtcccttatttccaaaatgttgctggtccaagcaagccatatgttcctccctcaatgcatcagtagtagtaacaacaacaacaaagacaacaagcaac

SEQ ID NO: 2480 - DNA, 419 bp, Glycine max
  unsure (1)..(419): unsure at all n locations
agctntagaagaccgtggaattagccattggtgtgtggcctgtgatcttctgtggactagttngacccctttgcttgacaccatgtggcccaagtactccacctgngtttgggcgaaggaacatttcgagagcttaatgaagaactggccctgcaacaaaaccttgaaagccaattccaaatgaagtaaatggtcattgaaggagctactataaattagtatgtcgtgatgtggacatcaaagcccaagcccatgacaaccaccagccccaggcccatgactagatggaagcccaagacccaatacaaggcataggaagacccatgacaagagcaagagctaaaaaggcacaagatgctttggacatatggtgatattctgagggtagtcaaatgcanggagaggccaacacttggagt

SEQ ID NO: 2481 - DNA, 371 bp, Glycine max
gtctgcgccgggttaaagtcctacaacgatactcttcaaatattaagagccttgtgcagctgaagaagcttaacctactggggttaaagactcatgattgtcacatgttgatgcaacaattgttagccgtggtcatacgagacatattgcctaacaaagtcaggttagccataactcgcctgtgctttttcttcaatgccatgtgtagcacagtccttgatcctgtcaagtttgatgacctggaaaacaaggctacaattatactgtgccagctggagatgtattttcctcctgctttctttgacatcatggtccacttaattgtttaactggtcagagaatcaaatgttgtggtcctcgttatctgtgct

SEQ ID NO: 2482 - DNA, 379 bp, Glycine max
tgcacaacggaagcactcgagaaattcgaatggtcataacttttcactcggatgtccgattcgcgggcataactcatctagatgctcgaaattgaacatcggaagctctcgagaaattcgaatggtcataacttttcacacggatgtccgaatttaggacataatatatcgagacactcgaaattgcacaacggaagcactcgagaaatttgaatggtcataacttttcacacggatgtccgaatttgggacataatatatcgagacgcttgaaattgcgctaccgaagcactcgagaaattcgaatgatcataacttttcacacggatgtctgatttgcggacataactcatctagacgctcgaaattgaacaacgga

SEQ ID NO: 2483 - DNA, 395 bp, Glycine max
  unsure (1)..(395): unsure at all n locations
agctngngctctngcctcactcaccagccttttggtttcatttctagctatcttatacttatcccaaggttcagaatttctacatctagaccactccttganacactccttttttactctaactttgctctgaacattttcattccaccaccacgattctttacccctaggtccaaaacctctagattcacccaacgtctctttagccactttaataatctcttatctaccaaattgtgacatccgcgtgaaaagttatgaccatgcgaatttctcgagtacttccattgtgcaatatcgagcctctcgatatattacgtcccacattctgacatccgtgtgaaaagatatgaccattcgaatttctctagagcttccgctgttcagtttcgagc

SEQ ID NO: 2484 - DNA, 388 bp, Glycine max
  unsure (1)..(388): unsure at all n locations
acgacaattactttntactcggatgtctgaatgaatcccgtaatatatcgagacgctcgaaattgaaaacagaagctcatagcaattgcagacgacaataactgtgagcggcggaagataataaatatttccgcnanacaccgagacgctcgaaattgaatacaaaagctctgagcaaattccaacgacaataacttttaactcggatgtccaaataaaacccgtaatatatcgagatgctcgaaattgaaaacagaacctcgtagcaattgcaaaccacaataacttttaactcggatgtacgattaagtcccgtaatatatcgagacgctcgaaattgaaaacaaaagctctgagcaaattcaaacgacaattactttttactcgg

SEQ ID NO: 2485 - DNA, 306 bp, Glycine max
agcttgagcaaattcaaacgacaataactgttaactcggatgtccaaatgaaacccgtaatatatcgagacgctcgaaattgataatagaagctcatagcatatgcaaaccacaataacttcttactccgatatccgactgagtcccgaattatatcgagacgcttgagattgaaaacagaagctctgagcaaattcaaacgacaataacttttaactcggatgtccgattgagtcccataatatatcgagacgctcgtaattgataacgaaagctcgttggaaagtcaaaagacaataaatttta

SEQ ID NO: 2486 - DNA, 421 bp, Glycine max
  unsure (1)..(421): unsure at all n locations
agctatgagccatactattccaaactaaaacttctgtaccaaatcgacgaaaggtgttggaacttggatacatactgatgcttttggtattgcaaaaaaatggaacatcttagaatgtggattttggtctaactcaaccccaaaagctatctcttatggtgagaggtgccctccacttatatactctatcttggtactatcgctagtcaatgaaggacttggattgttttcaatacaccccctcacgtccaagcacttttgagcttggcgtgtggataacatggtgggtgaccctttgaatggatctaggataggctctaataccatcttagaatgtgggtttaggcctaactcaaccgcaacagctaactcatanggtgagggtttcctccacttatatactctatcttccactatctct

SEQ ID NO: 2487 - DNA, 421 bp, Glycine max
  unsure (1)..(421): unsure at all n locations
agcttggcaacatagttgacacggaagggatatctnctctatatagaagcataatatcatctgcaaaagtcaaatgagatagctgaatacatgcacaattgggatgaaatttaaaattggcatcatccttaagactgctcatatctctggaaaagtactccaaacaaagcacaaacagataagggaagagaggatccccttgtctaagaccccgctaccccttgaagtggccataaatggatccattgactgtgacactaaaggaaaaagggtcaacaaaaatacaccaatgaaaacatatttttgtggtgtaagtatataatagaatcatgttttttgtttgttaaatgatagcgaaaaagttatcgacggaaacaaaatttatntcatatatatacaaacatgtacaacgagtgaaatg

SEQ ID NO: 2488 - DNA, 485 bp, Glycine max
  unsure (1)..(485): unsure at all n locations
gggactagctagtgatggaatgaatccatatgacaatttaagcactcaacatagttcatggccagttctactagtaatttacaatttgcttccttggttgtgcatgaagtgaaaatacatgatgttgtctatgatgatatcaggcccaacacagccaggaaatgacattgatgtttatctaagtccgttgattgaagacttgacaaagttgtgggacgaggggattttagtgtttgatgggtttcagaatgagattctcaaatgtgtgcaatgctcttttgtaccattaatatcattctagcatatangaatttaagcagttacagtgttaagggtcatcatgcatgccccatctgtgaagaagacacaagctacatacaactgatacatggtagaaaaacagtctacactatgcatcgacgttttctaaaacctcatcacccttacagggcgatgaaaaagcattaatggaagtcagacatgaa

SEQ ID NO: 2489 - DNA, 464 bp, Glycine max
  unsure (1)..(464): unsure at all n locations
agcttatccatgcctccttagtggatgttgcatcanaaatcttctcgaacgcaccatcatctaatccttgatagatgaggaagagagctttcttgtctctctttcttgaatccttanaagtctattnttgtgcttggggtagtgaagtcactactagaaaataaggttttaacattggttatttaggactttcaagatcggttattaacaaatgttgaaagtaccgacgttgaaagtattaacgttaacatcagtttttgaaaactgatgttaacgtaaaataacaacatcagttatttaaataaccaatgttatataataagaattacaaaaaanaggtatatatgttcataccaacgttgacagttaacatcgattnttcattcaaaaccgatgtaacttccanacgttaacacgtttaacatcggttttttaaaaaactgatgttagttacaaacgttaac

SEQ ID NO: 2490 - DNA, 502 bp, Glycine max
  unsure (1)..(502): unsure at all n locations
ctgagaattcacccaagaggtttagattaatgcgtgaacttaatttgatatcatatattagatcaaacactactcattactagactaaaagatgtagctgatggtaaaaataaaattctgttaatttcctcaaagaattttagagttacaactaacttaagagtatggaaattaaattcatcatggagtactgtgagatgttaaattcatcaaattcttgttggaatcgcgttaaccaaattaaataaaatcaacacatcttataaagttttaaagtcaatatatagttgaaagtaaaaattaactgttgatcatattaagaattgcaaagggagaaagcatagcccttaaaagtctttntttttacataaaataaatagtaagtttagcattactactttctatacgtacattntacggataatttcatttgaaaaataatgctactcanaataaatgcatatatattaccattngctataaactattacaataattatgg

SEQ ID NO: 2491 - DNA, 423 bp, Glycine max
  unsure (1)..(423): unsure at all n locations
agcttcttagtttcagatgatgcagatgggcttgtagctacctcatgcactcctctaatgactatggcgtcatttctggcgctaaactgttgggagttggaagccatcttctcaattaaatntttggcttcagcaggagtcatgtctccaagggctccaccactggcaacatctatcatacttctctccatatttctgagtccttcataaaaatattggagatgaagctgctccgaaatctgatggtgagggcaactggcacatagtttcttaaatcgctcccagtactcatacaggctctctccactaagttgtctaatacctgagatatctttcctgatggttgtggtcctcggaagcagggaaattttttctaagaatactctcttaaggtcatcccagctcgtgatggaccttggagca

SEQ ID NO: 2492 - DNA, 331 bp, Glycine max
  unsure (1)..(331): unsure at all n locations
agcttgtatggtctanaacanaccccaagacaatggtacaagaagtttgaaagctttatgcacaacgaaagtttctagaagtgcaacgccgatcanttgtgtttctttaagagatataaatctagttatattattttgctactttatgtcgatgttatattagtagttggatcagacatggatgaaattaanaacttaaagatgcggctataaaaaaaaattgacatgaagcacttagatctagcaaagaagatccttggtatgcaaatcacgaaagataagtaaatagggattttgcagttatctcaggtaaagtacatcaatcgtgttt

SEQ ID NO: 2493 - DNA, 228 bp, Glycine max
gcgtctcgagatctgatgcgcctgagtcgaacgtccgagtgagaagaggtgaccatccaaatttgtcgagagagtacggtgctcaatgtcaagcgtactgatatattatgtgcctgaatcggacatgcccgcgaagaggcatgaccatttgaagttctcgagagcctacgctgtccaatgaacaacgtccgcacctgtgattgacctgaatcggtcctcgagcgcgtg

SEQ ID NO: 2494 - DNA, 428 bp, Glycine max
  unsure (1)..(428): unsure at all n locations
agctnggcttcattcctgccccacttctaatacttttatcattntctaaaggtttaattgcattttaagaaaattatgtgacaatttaaaagtaggagacaaaaaattgcggataagaatagattagatcatccgttaggtatctatggtctcaccaataataagcttatgttatatcatacttctttagaaaataaataggttaagaccttttaaaagtctatttagttaaaaaaaattggactctatcacttaaaaaatcttttagacataatagatcaatcttagtgttattattatattaaatttgttatgatatattgaatacttgtttatcggaaacatttgtttcaagacatcttttanttgcgaaaatgtaagagtgagaattattattntcatatcttttagaaggttatgacaatata

SEQ ID NO: 2495 - DNA, 440 bp, Glycine max
  unsure (1)..(440): unsure at all n locations
ctcagcttcacattcaacttcgagcgtctcgctatattatacgactcaattagacatccgagtataaagatattgtcggttgaattntctcagagcttcaacattcaatttcgagcgtctcaatatatgacgggactcaatcagacatccgagtgaaaagatattgtcgtcttaattggctcagagcttctacattcaatttctagcgtntcgatatatgaccggactcaatcaggcatccgtgtaaaaagatattgtcgtttgagttggctcagagcttcaacattcaatttcaagcgtctcgatatattacgggactcaatcaggcatccgatgtaaaagttattgtcgtttgaattggctgagagcttcaacattcaatttcgagcgtctcgatatatgaccggactcaatcagacatccgagtanaaagatattgt

SEQ ID NO: 2496 - DNA, 406 bp, Glycine max
  unsure (1)..(406): unsure at all n locations
agctntgagcaaattcaaacaacaataacgttntactcggatgtctgattgagtcctgtaatatatggagacgctcgaaattgaatgttgaagctctgagcaaattcaaacgacaataactctttactcggatgtctaattgagtcctataatataacgagacgctcgaagttgaatgttgaagctttgagcaaattcaaacgacaataactttttactcggatgtctgattgagtcccgcaatatatcaacacgctcgaaattgaatgttgaagctctgagcaaatncaaacgaacatatatctntaatcggatgtctgattgagtcctataatatatcgagacgctagaggttgaatgttgaagctctgagcaaattcanacgacaataactttcactcggatg

SEQ ID NO: 2497 - DNA, 412 bp, Glycine max
  unsure (1)..(412): unsure at all n locations
cttaaaggatatgttgactaggaaacccaagtacattcaccaggaaaatattggtgtggaaggaaattatagtgctgtgattcaaaagatccttccacccaagcataaagaccttgggagtgtaaccattccttgcttaattggagaagtcactatgggaaaggctcttattgacctaggagccagtattaatttaatgccattcttcatgtgcagaanggtgggagaagtggagatcatgcccactacgatgactttacaacttgctgaccgctccattaccagaccatatggagtaattgaagatgtgctggtcagagtaaaacattttatcttgccgacagactttgtggtaatggatatatgtgaagataatgacattcctgtaatttgggaaggccatcatgtaact

SEQ ID NO: 2498 - DNA, 305 bp, Glycine max
  unsure (1)..(305): unsure at all n locations
agcttgtagcatttgtcctttatgtgtcccaacatgtcacagtgagcacanttgggtctttctttcttgatgtatttccctttattgatatcacattggttctttgatgcagaattaacagaaaatactatattttctaaagtattggtgggtgggtgagtaaacaacaatctcctttgagcttcttcttgaaggattagggagaaaacattaccaattgaaggcaaaggatcagagatcaggatctgacctcgtatttgagagaaagaatcattcaaacccatcaagaatgacattacatactc

SEQ ID NO: 2499 - DNA, 413 bp, Glycine max
ttatctaatcattccaatccactcaaatcatacaattgcttattcaaatcattctcaaacattcatttcatgcaaaacaatccactgcatatcattttcaatcaattcactattcaaacacgctttatgtacaagcaaacaactcaaagtgctgaaatttaaataactgaaattaaaataactgaaatatgacaacgaaatcagctggaaatataaggtgtttaaccttcaccaaaacatcttcaatgactccatatggccttgtgatggagcggtcaactaactggagggtcatgcgtgtgggcattatctctatctctccaagtcgctggcacatggaaagaggcattaaatcgatactagcttccaagtctatgagagctttgcctacaacaacctcaccaatataacac

SEQ ID NO: 2500 - DNA, 445 bp, Glycine max
  unsure (1)..(445): unsure at all n locations
ttgagcatantcaaacgacaataactctctactcggatgtctgattgagtcctgtaatatatcgagacgctcgacatggaataccgaagctctgagcaaatttaaacgacaataacctttttactcggatgtctgatcgagtcccgaaatatatcgagatgctagaaatcgaatgtcgaagctctgatcaaattcaaacgacaataactttttactcggatgtccgattgactctcgtaatatatccagacgctcgaaatgcaatatcgaacctccgaccgattccaacaataataactttttactcggatgtccgattgagtcccgcaataatccgaacgctcgatattgaatgttgaagctttgagcaaatccatacgacaataactttctactcggatgcctgatcgagtcccgaatatatcgagacgctcgaaatggaata

SEQ ID NO: 2501 - DNA, 288 bp, Glycine max
  unsure (1)..(288): unsure at all n locations
agcttctacattcaatttcgagctcttcgatatattactgtactcaatcggacatccgagtaaaaagttattgtagttcgaatctgctcanggcttcggtattccatttcgagcgtctcgatatattacgggactcaatcggacatcagagtataaaggtattgttgtttgaatctgctcagagcttcggtattccatttctagcatctcgatatattacggcactcaatcagacatccgagtaaaaagttattgcagtttcaatatgctcacggcttcggtattcca

SEQ ID NO: 2502 - DNA, 373 bp, Glycine max
  unsure (1)..(373): unsure at all n locations
acctttagaaatttgaatctaaatttcacagtctataatcgactacagagtgtatataattgattaccagagttaaaattcaaatctcaaatatgaagagtcacaactctttagaaaacaactgtgtaatcgattacaccattctggtaatcgattactagtgaggaattttcgaaaataactcccaacagtcacatattntcaaatgtttttgaatggccatcaaaggcctatatatatgtgacttgtgacacgaatttctagagagagtttttctgaactgagatgtcttatcctctcaaagagattcctaggtcaaacacttgcatattcaataaggaatcttgattgattttaattgaatatccttctc

SEQ ID NO: 2503 - DNA, 423 bp, Glycine max
  unsure (1)..(423): unsure at all n locations
aatctgtacctatcacgagagtctgtggtttatgctnctctaccgaccaccatatagacctttgcccttctatgcaacaatctggagcaattaagcagcctgaagcttatgctacaaacatttacaatagacctnctcaacctcagctgcaaaatcaaccacagcagaacaattatgacctctccagcaacagatacaatcccggatggaggaatcacccaaatttcagatggtctagccctcaacaacaacaacagcctgctctttcctttcaaaatggtgctggtccaagtaggccatacgttcctnctccaatgcaacaacaacaaccacagtagcaacaacaatagagacaacaatcaactgagacccttctcaaccttncttagaggaagtagtaaggcaaatgacaatacagaatat

SEQ ID NO: 2504 - DNA, 496 bp, Glycine max
  unsure (1)..(496): unsure at all n locations
ttatcaatatatgggtctaacacanataattaaagggtttaaattgattatttctagagaagtagatgatttccctgaacacaatttttatttgataggtaatatgataaaattactgcgaaagttacgaacttagaaatgaagagtaatttgaagaaataactttatatctttgtgtactgactccaactgaattgtttggatgaaagaaatcattttatctactaatcatagacaaattggagtattaccaaatgatgcacgtattgccaatgtcgtagatataggtactttgagaatgtcttcttaaacaccaatggctctgatgggcagttttactagagaattttgtaaagttcaaacctttgaaactgattgaagaaggtaagagttcccagaaggtggagaatgcaagatcttgaagacaattagaatcgttatttacgaacaaatgtgggagctttgaggtgtgtgactgtgaatgacttgcacacat

SEQ ID NO: 2505 - DNA, 438 bp, Glycine max
  unsure (1)..(438): unsure at all n locations
agcttctaaactntgtacaagaatgaagctctgataccacttgttagacaagtggcctcagatatcttaagaagggggggttgaattaagatattccaaactgtttcccctaattaaaaatctatttcactntntactcaagttatgaattcccttaatgacaatcttcttaaatattaattcaaatgaagcaacttgaatatgaatataaagcaataataaataaaggagattaagggaagagaaaatgcaaactcagttttatactggttcggccacacccttgtgcctacgtccagtccccaagcaacccgcttgagagttccactatcttgtaaattccttttacaagttctaaacacacaaggacattccttcctttgtgntagagatcctttacaacaagagactcacagtctcttaatcccttagagaatg

SEQ ID NO: 2506 - DNA, 382 bp, Glycine max
  unsure (1)..(382): unsure at all n locations
agctnntggctttntcccagtcattgattcataacttgtccctgatgtaagctccattggagcttgtaggcctatgatcttcttcatcaatggattcctttgcttctcggaagatgaatggaagcggatgagtctagaagatgctcaccaccataggtggccatggataagagcttggaggaagaatgagatgaatgaagggagaggaagagaagagcatgannatttgtgctctaaaagagctctgaaatctgaagtttaatattcaaatgatcatagtttaaaaaatgcacacacatgacctctatttatagcctaagtgtcacacaaaattggagggaaattcgaatatcaattcanatttcacttgaatttgaaattg

SEQ ID NO: 2507 - DNA, 472 bp, Glycine max
  unsure (1)..(472): unsure at all n locations
ntattcaagacanagcaattaaagatattcaagatggatgatcaagacagtctatagagtcttagaaagggtatattaaataggaagggaattccaattgaagtagcaaaaggtttggccaagaattttaagttaaaaagtcttttacaagaaatttactctctggtaatcgattaccagaggatgtaatcgattaccagtagccaaaactgatttacaaacagctattaaaatttgaattcaaaatttgccctgtgtaatcgattaccatatatggtaattcanattntaaagcttgtaatcgattacacatatactgtaatcgattaccagagcagattttcagaanatattctcaactgtcacatctttttatgtggttcttgaatggctatcanaggcctatatatatgtgacttgagacacgaatttgctaagagtttttcagaacaaaaaggtcttatcctcttat

SEQ ID NO: 2508 - DNA, 511 bp, Glycine max
  unsure (1)..(511): unsure at all n locations
ngctntangaataagcttaagagacatcattattntgatagaattcaaattcacatgtccaagcctagcatgccacacatcanaacattcaacatttgcaacaagagaagaaatgctagatattctattaatagaaagaggcataagacttaacttaaacaaaccatcacaaatgtagcctttaccaataaaaacaccatgtctagtaataacaactctattggactaaaaaacaaccttgtatccttgttagactaacaaagaagtacttattaaaantttcctaatatcagaaacatgatagacttcatctaaaacaagaaaattccctagagatagctctagcttcacttgaccttctcctaacacatgtgtcatactcttattccccatgttcacagtacgcgtgcttgattctngatataaagaaaaatattttttttatcaacacacatatgataattagccccgagatctataaaccaatcatttgagttaaaacacaattaac

SEQ ID NO: 2509 - DNA, 437 bp, Glycine max
  unsure (1)..(437): unsure at all n locations
tactcagcttccaaccacgacgacggcgcgaagctcggcgaggacttcaaggttgtgaccgtcgacgacccgccggaanattgccttcacttctcggtgctctcggaggcgaacgagagcgacgcgccggaggttgatatccaacccgacgacgcggtggcgatgccgttctcttncggcacgacgggtttacctaaaggagtggttctcacgcacaagagtttaacaaccagtgtggcgcaacaagttgacggagagaaccctaacctctacctcaccaccgaggacgtgctcctatgcgtgcttncgttgtttcacatattctccctcaacagtgtgctnttgtgcgcgcttanggccgggagtgcggttttgttgatgcagaagttcgagattgggacgctgttggagctcatacagcggcaccgcgtgtcggt

SEQ ID NO: 2510 - DNA, 349 bp, Glycine max
  unsure (1)..(349): unsure at all n locations
tatgttcacctgctgcatttagatcaaaattcanaatcttcaatgctcaataggctttgtgccccaactcaataggtaagtgacaagntttgccatagataaattggaagggagtcagtcctataggagtattgtatgcacacgtagctttatctaatttttgagactagtccttccttgactgagcaactattttctccagaatcttcttgacttccctattagaaactttagctcgcccaatggtctaaggatggtaaggtgaggctaccttgtgtctaacactatagtgttggagaactttcttgagttggaatgtatagatatgagatcctctatcacttataaa

SEQ ID NO: 2511 - DNA, 427 bp, Glycine max
  unsure (1)..(427): unsure at all n locations
agctnntgaagtagatattatttattattataatacatgcttatctattngttaagtatgtnttgtagttagttaattgagacttgngggtgtatatcagtgttttatacttactactttgatttggttagtgtgtgtatattacatagagtttatattttattaattaattgacactaaagatgttatagttttgctatgatatgaatttgaaaattattcgagtcgatgtatatgtatatgggttgggtcttgtaaacattgctacgaatgtataatatgatatatgagaataagtgaagtatgcgatgaattgtgagctatgaactgtgtagtcacacaactataatactctttaagggcgacgagttcatgcgcaatgagttttgtgatgggcttcactatgggaactcgacgagttaatcac

SEQ ID NO: 2512 - DNA, 395 bp, Glycine max
  unsure (1)..(395): unsure at all n locations
tgcaagcttctctgaccaatatgatagatcaagataacagcagtagcggctgcaacaggagctgaatatgcaacagcaatccaaggacgcatacccaaacgaaaactaagttcccactcacgcgccatgtagcaagctacaccaagtaagaagtgtagaacaattagttcataaggaccgccgttgtataaccattcatcaacagatgccgccttccaaataggataaaagtgcaaacctatagccgcagaagtaggaataatggcaccagagatgatattgtntccataaagtagagatccagagacacgctcacgaataccatcaatatctactggaggggcagcaataaaagcgataataaatacagaagttgcggccaataaagtatgaat

SEQ ID NO: 2513 - DNA, 289 bp, Glycine max
  unsure (1)..(289): unsure at all n locations
agcttggatttccttgtagtagggaatctattcttctaagatggagccaaacccagtcaccctcattaagaactagctcttttcttcctctattgcctttagttgaatacaccttttgttggctctctatttgggtcttaaccctctcatgcatcttctttacaaattctgacctaagattcccttctttatgtataaaaaaagtgtccagtgggaggggaatgaggtctaacggtgtgaggtgatngaacccatagaccaacctcaaaggggacttgttggtggtttc

SEQ ID NO: 2514 - DNA, 332 bp, Glycine max
  unsure (1)..(332): unsure at all n locations
agctntacgggtatacagaacaacatataaagccctcatatgacttatctctttnccagnnggcctatggaaaatcttgtcacctacctattgagttggaacataaagctctttgggctttaaaatttacgaacttcaactcagatacaactggtgaacataggaagctccaactctatgaattggaggaactgatggttcaagcttctgagaattccaagctttataagcaaaaattaaaaatctatcatgacaaaaagctatcaaaaagaaattttcagcctagtcaacaactattgttatttaattctcgattaagattgtttccaggt

SEQ ID NO: 2515 - DNA, 408 bp, Glycine max
  unsure (1)..(408): unsure at all n locations
caagcttgaatgctctattcaatggagttgactagataatcttcagactgatcaacacatgcacagtggccaaggatgcatgggagatcctganaaccactcatgaaggaacctccaaagtgaagatgtccagattgcaactattggccacaaaattcgaaaatctgaagatgaaggaggaagaatgtattcatgacttccacatgaacattcttgaaattgccaatgcttgcactgccttgngagagaggatgacagatgaaaagctggtgagaaagatcctcagatccttgcctaagagatttgacatgaaagtcactgcaatagaggaggcccaagacatttgcaacttgagagtggatgaactcattggttcccttcanacctttgagctaggactctcggata

SEQ ID NO: 2516 - DNA, 135 bp, Glycine max
  unsure (1)..(135): unsure at all n locations
agcttggagtttccaagtgccaatnncgcctcttcntattccagtcttcttctggcttcaattcatcagtgggctttccttctgtgtccagcatcttgggatgatcccagcctttgatgacaggtttccatgttc

SEQ ID NO: 2517 - DNA, 409 bp, Glycine max
  unsure (1)..(409): unsure at all n locations
agcttgagggtaaagtctcacgattgtcacgtttcatgcaataattgttagccgtggctatacgagacatcttgccaaacaaagtcaggttaacgataactcgcctgtgctttttcttccattctatatgtagcacagtcattaatccagtcatgtttgatgagttgggaaatgaggccgcaattatactgtgctagttggagatgtattttccccctgctttctttgacatcatgattcacttggttgtgcatctggtcagagaaatcaaatgttgtggtcctgtttatctacggtggatgtacccggttgagcgatacatgaagatcttaanagggtatacaaagaatctatatcgtccagaagcatctattgttgagaggtacattgcagaagaaccattgaattt

SEQ ID NO: 2518 - DNA, 430 bp, Glycine max
  unsure (1)..(430): unsure at all n locations
agcttgccgccacggangtttccgactatgctcttgtgtggttgatcaagctacaaaaggagagagcaagagatgaagagccaatggttgatacatggacagagatgaaaaagatcatgaggaagcggtatgtgccggctagttactcaagggacttgaaatttaagctccaaaaactaacccaaggcaacaagggggttgaggagtatttcaaggaaatggatgtgctcatgattcaagcaaatattgaagaagatgaggaggtaactatggctcgatttcttaatggtttgactaatgatatccgtgatattgttgagctgcaggagtttgttgaaatggatgatttgcttcacaaagcaatccaagtggagcaacaattaanaaggaagggagtggctaagaggagttttaccaactttgattcttt

SEQ ID NO: 2519 - DNA, 317 bp, Glycine max
  unsure (1)..(317): unsure at all n locations
gctggaatcatntatctatctccgacagccattgtgtgagtcccgtctaggcagtctcagagaagaccgtgctcacagcgataaaaaatgagaaggaggagctgattactactcgggtggagaacagttggagagtctgcattgactataggaggctgaaccaggttaccaaaaaggaccatntccccttgccattcattgaccagatgcttgaacgcctgggcaggcaaatctcactactgtttccttgatggtncttctggttatatgccaaatactattgctcttgaggatcaggaaaagaccacattcacctg

SEQ ID NO: 2520 - DNA, 388 bp, Glycine max
  unsure (1)..(388): unsure at all n locations
gtctcacaatngtcacgtgcttatgcttcaattgntagccgtggctatacgagacatcttgccaaacaaagtcaggttagcgataactcgcctatngcttttcttccatgctatatgtagcaaagtcattgatccagccaagtttgatgacgtggaaaatgagggcgtaattatattgtgcctgttggagatgtatttcccctcctgctttctttgacatcatgattcactcgattgtgcatctggtcagagaaatcaaatgttgtggtcttgttatctacggcggatgtacccagtagagcgatacataaagatcttcaaggggtctacaaagaatatatatcgtctagaagcatctattatagagaggtacattgcagaagaagcc

SEQ ID NO: 2521 - DNA, 382 bp, Glycine max
  unsure (1)..(382): unsure at all n locations
agcttcttgtcaattcctcagcaataattaaatagggtatccacttctaatagcatcctccagtatgttgataagatcccttgcattggttatctttgttgcaactaacagcaactgcataacataccatgtanagttataattaaatatgaaggatgttaaaaaataataacaagttacagggaaaacagacaaatgtcacaccttacagttctcatatccaacgcgcatcttctcactgtcagtaacaaagtatggagaaatataaccacggtcaaattgcatcccctcgacaacatatagactgttatcagcactcttaccntcctcaagggtcacaacaccctttctaccaactctgctcaatgcttcagctatcata

SEQ ID NO: 2522 - DNA, 388 bp, Glycine max
  unsure (1)..(388): unsure at all n locations
acaacacttctcatggcacgagtgtcaacatgcactntataaaataatcatattggggtcgtgcctatttatgacacatacgtatttgcacacataaaaattttgtgtgaagcattttacgacacctatccatgtacatattttttgacanaccttttcatgctacatcctatatatatacacacacatctttttggaaggcttcttttgttacctactcacaaatacacatnatttgaaaaacacttttacgctacccatccaacactttgtangcacttcatgcatatatattcacatatgcaaggcatntattcaactntctgcaaggcatttatttcaccatttgcacggcatttcatgctatatatatttacatatatacata

SEQ ID NO: 2523 - DNA, 398 bp, Glycine max
  unsure (1)..(398): unsure at all n locations
agctntaagagaagttgcaagagaaaagacttattctctcaatgtggttgaaactggactcattgtatatgacaaagtcccttgcaaatcggctatgcttgaagcaacaactgcaccttcaagatagcagagtcaagaacagccactgaacaattggctgatttcaacaagattcttaatganttggaaaatattgaagtaaagcttgaagaagaggataaagctctcttgcttctgaattccttaccaaaatcctttgaacatttcaaggatgcaattctttatggcaaagatcaagacattaccctagaagaagtccagacctcaataaggaccaaggagatgcaaaaacggcaagactccaaatctgaggataatggtgaaagcctgaatatttc

SEQ ID NO: 2524 - DNA, 387 bp, Glycine max
  unsure (1)..(387): unsure at all n locations
caataacttctgaatcggatgtccgattgtttccttttgatatcgagacgctcgtaattgaaaacggaagctctaaganaagtcaaacgacaataacttctaacttggatgtccgattgcgccctgtaatatatcgagacgcttgaaattgaaaactgaagctctaagaaaagtcaaacgacaataacttttaactcggatgtcctattgagccccgtcagatatcgagacgctcgaaattgaaaacggaagctctaagaaaagttcaactacaataactcttaactcggatgttcgattgagtcctcgtatatatcgagacgctcgtaattgaaaactgaagctctgagcaaatcaaacgacaataacttctgactccgatgtccg

SEQ ID NO: 2525 - DNA, 335 bp, Glycine max
  unsure (1)..(335): unsure at all n locations
attcctcacaaaaacactattcccaagaaaaagtcctattgatccatgatcacgtgtgtaatctttgattcgataggaaatgacttgcagaatccagtcatgacatatccatggttcggaattaggatgaaacacttacctgtgtgagagtgatacactttgagtgattctctcttattttgttggacccaatgtttcctctacatggtcggttagaaacgaaacgctaacatccaaaatctcatttatggttatgtgaaaatntcatcagcatactctcctttccaataacacattgttttcatcaacaatatatgttgtttgatcagtagagg

SEQ ID NO: 2526 - DNA, 298 bp, Glycine max
  unsure (1)..(298): unsure at all n locations
agctngaaggtttgtacatgacctaatctttagttaatcgncnnnacctaaagcagtctttgtattcgtttataatgcatgaagatagatcagtcggagaacaattggatttgtttaataaactgattctagatcttgaaaatatcgatgtcactattgatgatgaggatcaaactctgttattgttgtgctctttgcctaagagttactctcatttcaaagagactttattgtttggaagaaactctgtttctcttgatgaagagcacgctgctctgaattcaaaggaattgaatga

SEQ ID NO: 2527 - DNA, 461 bp, Glycine max
  unsure (1)..(461): unsure at all n locations
agcttgaaattgaacaaaggaagctctcgagaaattcaaatggtcataacttatcacacggaagtccgattcaagagcatactatgtgaagatgctcgaaattgaacaacgaaagctctcgagaaattcaaatggtcataacttgccacacggaagtccgattcagacgcataatataccgagacgctcgaaattgaacaatgaaagctctcaacaaattcaaatggtcaaaacttgtgacacagaagtccgattcaggcgcataatatatcgagaagcttgaaattgaacaacggaggctctcgagaaattcanatggtcataaagtgtcacacggaagtccgattccgggggatagtatatcgagaaggtcaaaattgaacaacggaagctctcgagaaattcanatggtcataacttttaaacggtagtccgattaaggtgcataataaatcgagaag

SEQ ID NO: 2528 - DNA, 450 bp, Glycine max
actaagcttcaagaaaagatggcctcagcaaattcctcgtttccttaatgttaatttataaatagacctccaatctctaatggagagggttaccactactggacaacccgaatgcaaatatttattgaggcaatagatctaaatatctgggaagccatctgaatatggccttatatacccaccacagtagaaagagttgcaatagatgagagcttatcaagtgaaagcataaccatagcaaaacctatagatagatggtctgaagaggatagaaaacatgtacaatacaaccgtaaagccagaaacatagtaacatctgccctaggaatggacgaatatttcagagtctcaaattgcacgagtgctcaagaaatgtgggacactcttcagatatcacatgaaggaactacagatggtccaagacctacgataaatgcactaactcatgag

SEQ ID NO: 2529 - DNA, 289 bp, Glycine max
tctatcatatctaataattggcacatttatgtctaattgcccttttacttcattgtagtaaatttctaaggcatccattgcctaagaaatctcgggcagtaagtagacataactgtaacgtgaataatcatcaataatggtgataaagtatcattgctttctgagagaactaacatcaaaaggtccacaaatatcagtatacacaatttcaagaagctgagtgcttctctgagctccttcctttgcatgtcttgtctgctttcctctaatacaacgcacacaaatattt

SEQ ID NO: 2530 - DNA, 431 bp, Glycine max
  unsure (1)..(431): unsure at all n locations
attgaagctgacaggatcaacaatggttggttgaattatctccttagctgggaagacaccccatgtcacagcattaacatcagtttgacccacattagatntccagctcccgtctttattcacagccatataagttaaagatgttcgatccttgcatttatcaacaagtgcatccagcttttccttagagcagaagaactctacatatgccttctggtaaacatacccgcctggtccaccccagcctaggccaaatttcaaacaaaaatgaattagtgtatctcatatccaccaaccaatatggacaagatatgaataccctcagtcacaaattgcacccttttgagtacctttcaatcttcattatttgttntacaagaaaatatnagtaatataaagtggtacagccacacatctcactcaatactagt

SEQ ID NO: 2531 - DNA, 385 bp, Glycine max
acgcatcttaagcacctgcagctgcagcttcacttcccctatatggatggttgatcgttatatagatttgtacgcgtccagtctagtctctctaagccctgaaaccgtaactatggctatgttctgagattcgtcttttctgttgttcaaagatctctccgattccttttctttcgaagtggcattgcccaaagtcgaatcaaaggcttgacagggtcttcttagcccatgctaactagaatagttagtagcttataggatcccaaagcaataaccacagatggaggagcattcgtctttttaaccagttttcaaaaaccaagatatcctgcctatcccgaaaaacggactccctcaaaacaaaaagtagcttcatagcaagagt

SEQ ID NO: 2532 - DNA, 201 bp, Glycine max
ctggaagatgacatgcctttccatagactacccaataaggagacattcctatgggtgctttgtatgcagtccgatgtgcccagagagcatcatcaagcctggtactccaatctttcctgcttggctgcacaatcttctctaaaattctcttgatttcccggttagaaatttctgcctgcccattggtctgggggtggtatg

SEQ ID NO: 2533 - DNA, 426 bp, Glycine max
gctgtagggttaagtctcacgattgtcatgtgctcatgcaacaattgttagccgttgctatacgagacatcttgccaaacaaagtcaggttagccataactcgtatgtgctttttcttccatgctatatgtagcaaagtcattgatcctgtcatgtttgatgagctggaaaatgaggccgcaattatactgtgtcagttggagatgtattttccccctgctttctttgacatcatgattcacttgattgtgcatctggtcaaaaaaatcaaatgttgtggtcctgtttatctacggtggatgtacccggttgagcgatacatgaagatcttaaaagggtatacaaagaatctatatcgttcacaagaatctattgttgagaggtacattgcagaagaagccattgaaatatgttcataatacattg

SEQ ID NO: 2534 - DNA, 364 bp, Glycine max
attatttgtatgggttgaatgttgaattctggttgttcctggtgcggagatgatggtacagccggtgaaccagaagctgcagtttcttttggtgaggtagccatggaaaaacagagcgtttggaacgatttcgtaaatctcggaaaactattgggaaatgctggtaaaaacacgaatgccaagcagatataaatttgaatgaagaatgtagagaggcgtgtgaagcaacggtcgaatttgctttgtggtgaacgtgctattaatgttaagtgattcgtttgggcacgttcagattgcagtagctgctataattcctctagcagacaaatgcccagcttgcccctcagtttttcaaactgatttg

SEQ ID NO: 2535 - DNA, 415 bp, Glycine max
  unsure (1)..(415): unsure at all n locations
agcttanggtttatggatacttcactaatattagggtttacgagtttacgatttatgggttattgagtatttaaggtttagggtttatggtatttgacaaattatgattttttgttacatcccaaattaccaaataagggtatttgactagtaagggtttacggatacttgacaaattacggttacttgactaagtaaggtttacgggtatttgaaaaaattaggggtttatggttaattgacaaatcggggcttatgtgtatttaactaattacggttacttgaccaattaaggcgttagggttactttacaaatactgngttaggggtatttgactaataacggttaatgggtagttgagtaattatggtttattgttacttgaccaattaacgcttaggattatttgactaa

SEQ ID NO: 2536 - DNA, 391 bp, Glycine max
  unsure (1)..(391): unsure at all n locations
cctatagaaggttcgttcctaatttctctacaattgcatcacctctcaatgagctggtgaagaagaatgtggcatttacctgtggtgaaaaacaagagcaagcctttgctttgctcaaagaaaagcttactaaggcacctattctagctcttcctgacttttctaaaacttttgagctagaatgtgatgcctctagagtgggagttggagttgtattgttacaaggtgggcaccctattgcttattttagtgaaaaacttcatagtgccacccttaacaggggggttcatagaactaccaagaagtccccttttgaggttgtctatgggttcaatcccttaacaccgttagacctcanttccctccactagacacttctttatacataaag

SEQ ID NO: 2537 - DNA, 297 bp, Glycine max
tttcgagcatctcgatatatgacaggactcaatcagacatccgagttaaaagttattggcgtctgaattggctcagagcttcaacattcaatttcgagcgtctcgatatatgacgggactcaatcagacatccgagtaaaaagctattgtcgcttgaatttgctcagagcttcaacattcaatttcgagcgtctccatatgtgaccggactcaatcagacatccgagtaaaaagatattgtcgtttgaatttgctcaaagcatcaacattcaatttcgagcgtctcgatatattacg

SEQ ID NO: 2538 - DNA, 366 bp, Glycine max
  unsure (1)..(366): unsure at all n locations
gcttgagcaaattcaaacgacaataaccttttactcggatgtcntgatgagtcccgtaatatatcgagacgctcgaaattgaatgttgaagctcttagtcaattcatacgacacataacttttactcggatgtctgattgagtcccgtcatatattgagacgcttgaaattgaatgttgaagctctgagccaattcaaacgacaataactttttacttggatgtctgattgagtgccgtacatatcgagacgctcgacattgaatgttgaagctctgagccaattcatacgacaataaccttttacttggatgtctgatcgagttccgtaacattttgagctcttcgaattgaatggtgaagcttt

SEQ ID NO: 2539 - DNA, 362 bp, Glycine max
  unsure (1)..(362): unsure at all n locations
cgcttctacatctttggcaaggcatgtcatcttcctgtatagagcacanagcctactgngctgtaaagacttgcaacttctctatggaccaagctagagaagaaaggaagttgcaactaagtgagctagatgagatccgtttagaagcctatgagaattccaaattctacaaggagaagacaaggaagttccatgacagattcatagctaagaaggactctgtggttggacaaaaagttntattgtataactctatgctcggactcatgagtggtaagttaaggtcaaagtggattggtccttttgtggtgactaatgtttttccttatggtacagctgagatcaaaagtgaatccacagat

SEQ ID NO: 2540 - DNA, 482 bp, Glycine max
  unsure (1)..(482): unsure at all n locations
agcttcaagaattatggcctcatcaaactacttgtttcccgagggaaattctataaatagacctcccatctttaatggagtgggttaccactactggaaaacccgcatgcaaatctttatagaggcaatagatttaaatatttgggaagccatagaacaaggaccttatgttccctctataatagctggaagtgcaacaatagaaaaacctagagcagattggactgaggaagaaagaagattagtacaatataatttaaaggccaaaaatattattacatctgccttaggaatagatgaatactttagggtttcaaattgtaaaagtgctaaggatatgtgggatacactacaagtaacacatgaaggcacaacagatgttaaaagatctaggataaacactntaactcgtgaatatgaactttntaggatgaatgtaaatgaaagtatacaagacatgcanaagaggttcacacacatag

SEQ ID NO: 2541 - DNA, 387 bp, Glycine max
  unsure (1)..(387): unsure at all n locations
tcaatcacaactatngcgggctcctctaccatctctntatcccaattccagtccttggattcatcaactaccacatgtgtactcacgagcacttctttggttactggattaaacaatttgtaaccaccagtggcatgataacccagcagtatcattatctgacttatgctatctaacttctttctcaactgatcaggcacatgtttataacaaatanagccaaaatttttaaaatgactaaccactggtttgtgtncaaaccatgcttcttcaagtgtgatgttattgagcctttattgtgggctctcatttatcacatacactgcactggagatagcctctgcccatagaaaatttggcagcttctttccattaagcatgcatctg

SEQ ID NO: 2542 - DNA, 467 bp, Glycine max
  unsure (1)..(467): unsure at all n locations
cttgtctcatcaatcgactcaaccctttgccaccatcaagaacaagaatggtgctatgagatcctcttgcctaagtcccctttgaatattaaattctttactcgaactaccattcacaaggatggatattgatgcgaattcaactcctcatataatccacccaatctatttctcacaaaaacccaacctcttcatcatataatataaaaactctcaattagtcgattcatatgctttttcacaatcaactttaaataacaaacaatcttttttcctcctccttacatcattcaccacttcatttgcaacgagaaccccatcaagcaaanttcttcttcccataaaagcacattgcctttcatcaataacctgtcctaacactatttttagccttgtagctaacaatnttgagattaccttatacaagcaacctatcaaggaaatatccaaaagccttgaggattcac

SEQ ID NO: 2543 - DNA, 314 bp, Glycine max
  unsure (1)..(314): unsure at all n locations
ntgagccaattaagacgacaatatctttntactcggatgactgattgagtcccgtcatatatcgagacgctcgaaattgaatgttgatgctctgagccaattcaaacgacaataatattttactcggatgtttgattgagtcccgtaatatatcgagacgctcgaaattgaatgttgatgctctgagcacattcaaacgacaataactctttactccgatgtctgattgagtcccgtcacatatcgagacgctcgaaattgaatgttgaagctctcagccaattcaaacgacaacaactttctactcggatgtc

SEQ ID NO: 2544 - DNA, 332 bp, Glycine max
  unsure (1)..(332): unsure at all n locations
agcttcaacattcaatttcgagcatctcgatatgttacgggactgaatcacacatccgagtaaaaagatattgtcgtttgaatttgctcagagcatcaacattcaatttcgagcatctcgatacgtgacgggactgaatcagacattcgagtaaaaagttattgtcgtttgaatttgctcagagcatgaacattcaatntcgagcgtctcgatatattacgggactcaatcaaacatccgagtaaaagatattgtcgtntgaatttgctcacagcatcaacattcaatttcgagcgtctagatatgtgacgggactgaatcagacatccgag

SEQ ID NO: 2545 - DNA, 476 bp, Glycine max
  unsure (1)..(476): unsure at all n locations
agccttgacacgggtattcatgtttcatctaggccctttgagtgtgtgcattcaaatntatggggactatctagagtgaaaactcatggtggaagctcatactttctcaccatcatagatgatttctcaagaaaagtatggttgtatggtttgaaaaataagtcagaagcttttcaaaaattcagagaatgacatactcttgttggaaatcaacttggtacaaaattaaaagctttaaagactgacaatggcctgtagtntgtttcacagcagttcaatgagttttgcacgaaaataggcatcaaaaggcacaaaacagttcctcacacaccacaacagaatggtttagtagaaagcatgaataggaccattttggaaagagttagatgcatgctactaagtgcacgactgccaaagaacctttggggagaagctgcanatacaacagcatatttgattaatagatgtccttcatc

SEQ ID NO: 2546 - DNA, 297 bp, Glycine max
  unsure (1)..(297): unsure at all n locations
ctatacgagacatcttgcctaacaaagtcaggttcacgataactcgcctgtgctttctcttccatgctatatgtagcaaagtgattgatccactaatgtttgatgagttggaaaatgaggccgcaattatactgtgccagttggagatgtattttcccccttacttttttgacatcatgattcacttgattgtgcatttggtcacagaaatcaaatggtgtggtcctgnttatctacagaggatgtacccggctgagcgatacatgaagatcttaatagggatacaaaaatctatat

SEQ ID NO: 2547 - DNA, 428 bp, Glycine max
  unsure (1)..(428): unsure at all n locations
agcttagcatcattagttctaatgggcatgacttccacccattntgaaacataatcaactgctaggagaatgttaacataaccaaaagagacaggaaaatggcccatgaaatctatgccccagacatcaaacacctcatagaatagcataggttgctgaggcatttgttgtcgccatgtaagtgcacttcctgctctctgacactgctcacaagtgctacaaatcttccacacatctttaaagatggtgggccaataaaagccacagtcaagcactttgcgagctgtcctttgaacttccagtgcggaagaatggcanaactgcaggactgagtcagtctcatgatctgggatgcatcgtctaatgacctgatcactgcacaatttccacaagtaggcgtcatcccaaataaaatgcttagcatcact

SEQ ID NO: 2548 - DNA, 337 bp, Glycine max
  unsure (1)..(337): unsure at all n locations
gtcacctgccgcatgcaagctatggaagctcctgtcttagctttacccgattttactcaaccatnttatgttgaatgtgatgctagtggagttggcatcgtggctgttttgatacaaaacaaaaggcctatagcttatttctcggagaaattgggaggagccagattgaactattgcacctatgacaatgagttctatgccattgtgagagctcttgatcattggaatcattatttgcgttctaatcactctatatggcattcagatcaatagtcatagaagataataatgggcaccaaagttattccaagcttgctaatgggtgaattcttcaatc

SEQ ID NO: 2549 - DNA, 434 bp, Glycine max
  unsure (1)..(434): unsure at all n locations
agcttgtataanatatcatcaacacgagaacccttgtaggagtttgtgagcatgtctgccaattgatctttggagccgacaaaatcaatggtgatttctcctgagagtaccttctattgaacaaagtgaccatcaatctctatgtgtttaacctgctcatgaaagactgtgtttgaagcaatgtggagagcaacttcattttcacataatagtgtggtattctaaatgtctccaaattttatctattggagaagttgtgtaagccatgtgatctcgcatgcagcagctgccatgacacaatactcgacttcggcattggatcttacaacggttttctgctccttgcttctccatgagatcaagttccctccaataacgacataatatctagaagtagaccttctatctaatggtgatccttgccaatcagcatc

SEQ ID NO: 2550 - DNA, 346 bp, Glycine max
ttactcggatgtctgattgagtcccgtaatatatcgagacgctcgaagttgaatgttgaatctctgagccaattcatacgacaataactttttactcggatgtctgattgagttccgtaatatatcgagacgctcgaaattgaatgttgaacctctgagccaattctaacgacaataacattttactcggatgtctgattgagtctcgtaatatatcgagacgctcgacattgaatgttgaacctctgagcctattcaaacgacaataactgtttactcggatgtccgattgagtcgcgtaatatatctagacgctcgaaattgaatgttgaacctctgagccaac

SEQ ID NO: 2551 - DNA, 343 bp, Glycine max
  unsure (1)..(343): unsure at all n locations
agcttaaacattatactntgagcgtctcgatatattacgggactcaatcagacatccgagtaaaaagttattggcgtntgaattggctcagaggttcaaaattcaatttcgagcgtctcgatatatttcgggactcaatcagacatccgagtaaagagttattgtcgtttgagttggctcagaggttcaacattcaatttcgagcgtcccgatatattacgtcactgaatcagacatccgagtaaaaagttatngctcgttgaattggctctgagctccaacattcaatttcgagcgtctcgatatattactggactcaatcagacatccgagataaaaagta

SEQ ID NO: 2552 - DNA, 397 bp, Glycine max
  unsure (1)..(397): unsure at all n locations
catacgacaataactnnttactcggatgtctgattgagtcccgtaatatatcgagacgctcgaagttgaatgttgaatctttgagccaattcatacgacaataactttttactcggatgtctgattgagtcccgtaatatatcgagacgctcgaaattgaatgttgaagctatgagccaattctaacgataataactttttactcggatgtccgattgagtctcgtaatatatcgagacgctcgaaattgaatgttgaagctctgagcctattcaaacgacaataactttttactcggatgtctgattgagtgccgtaatatattgagacgctcgacattgaatgttgaacctctgagccaattcatacgacaataactctttactcggatgtctga

SEQ ID NO: 2553 - DNA, 240 bp, Glycine max
  unsure (1)..(240): unsure at all n locations
agcttaaacattatactntgagcgtctcgatatattacgggactcaatcagacatccgagtaaaaagttattggcgtatgaattggctcaaaggttcaaaattcaatttcgagcgtctcgatatatttcgggactcaatcagacatccgagtaaagagttattgtcgtttgagttggctcacaggttcaacattcaatttccagcgtcccgatatattacgtcactgaatcggacattcg

SEQ ID NO: 2554 - DNA, 393 bp, Glycine max
atctatgaacatcacacaataaaccccaatttgatactctaaggatccctacacatgttcattttaacccaaattgcaataaactcatcccttatctctaagcgggctcacgggtgcagctggcagggatatcaacgtctctagtggttccctaagatttctgaaatttttcctctgtttgctttgttagggtttccaagtgttagagagaaggagaagaaattggagcctccaattcactgtatatgttcaatgagaatttctccctccatagacattactttacaaatcccaacactagacatgtgtagagattagttccaaaggtggtgtccaaatttcactatgattcaacagttaacaaagcccgggatcgtagttttcttgggattg

SEQ ID NO: 2555 - DNA, 403 bp, Glycine max
  unsure (1)..(403): unsure at all n locations
tgccttggttaacctggttacctaactgactatgaatcaaaaatctgcacctgttgttagactctgtggtttatgctcctttgctgaccactacacagacctttgcccttctgtgcagcaatctgaagcaattgaacaacctgaagcttatgctgcaaacatctataatagacctcctcaacctcagcagcaaaatcagccacaacaaaacaattatgacctctccagcaacaggtacaagcccaggtggaggaatcatcccaaccttaatggtcgaatccttcacaacagcagcaacaacaacaacaaccttattttcaaaatgctgctggcccaagcagaccttacgnttcttcaccaatccagcaacaacaacaacaacaacaacaaccctagaaacaac

SEQ ID NO: 2556 - DNA, 433 bp, Glycine max
  unsure (1)..(433): unsure at all n locations
agctattaatttaaatgaaataatatgaatattttgacttaaaaaaaaggaagtctaatacagtatgcaatattagtatttgaatgtgaaaaaatgaaatgtggagccatgcatgtttaatggaaaatttaaaatgtactatcaaaatatatttacaactntaatttttattgtaattataatgtttgaaaatatatcttgtccctatattttacctcaattttggttttagtttagactttaaaaaacttgatttatttccttaatattagtgatagacgaagaaattaatcttacattataaatataatactcatatacataaatttgtggagacaatatttatactaattatagattttnttatattacattttagacaatgaaaacatacgtacatgcacacgaagcttgaacaaaatgagatcacttg

SEQ ID NO: 2557 - DNA, 386 bp, Glycine max
  unsure (1)..(386): unsure at all n locations
ctgagcanattcaaacgacaatancctttgactcggatgtcggattgagtcacgtaatatctcgagacactcggaattgaataccgaagctatgagcaaattcaatcgacaataaatctttactcggatgtccgattgagtcacgtaatatatcgagacgctcgaaattgaataccgaagctctgagcaaattcaaacgacaataactttttactcggatgtccgattgagtcccgtaatatatcgagacgctcgaaatggaataccgaagctctgagcaaattgaaacgacaataaatctttactcggatgtcggattgagtcacgtaatatgtcgagacgctcgaaattgaataccggagctctgagcaaattcacacgacaat

SEQ ID NO: 2558 - DNA, 391 bp, Glycine max
ctcgacccgggatccttaagcacctgcggctgcagcttaacattcaatttctagcgtctctatatatttcaagactcaatcagacattcgtgtaaagagttattgtcgtttgaagttgctcaaatcttcagtattcaatttcgagcatctggatatattacatgactcaatccgacatccgagttaaaagttattgtcgtttgactttgctcagaactttaacattcaatttcgagcgtctgtatatattacgggactcaatcacacatccgagtaaaaagttattgtccgtttgaatttgctgagagctctaacattcaattctgagcgtctcgatatgttacatgactcaatctgacatctcgagaaaaagttattgtcgttttaattt

SEQ ID NO: 2559 - DNA, 475 bp, Glycine max
  unsure (1)..(475): unsure at all n locations
agctntngtaaattagatggccatacctcttgtgccatagccaagtttcaatntctgtggtggactacatacacttctgatcactaatctgaatttcaattctaaatgttctgttggccgagagtggagattttaggacactcttcttgtctttatcaaaaactttcagcatgttgtccttcatctccattgtataacccttttcaagcaattgtccaaggctgagtaaattgcttttcatcttgggagcatacaagacatttgagatgcaggctttctttccatcttttctttgaatcatcacgctccctatcccttctgctgtaattgagctgtgatctgcgaatttcactatgcttttggaagtctcatcaagtgttgtgaaccactctcttctccctgacatatggttngagcaaccagtgtctaggtaccagaaaatagcacactgaagaatcatttttgtggaaccatc

SEQ ID NO: 2560 - DNA, 476 bp, Glycine max
  unsure (1)..(476): unsure at all n locations
agctngcactgcccaaagtggacaaccttccagaatacgttgaagccaccattgatgtcccttatgatgtcgttcagtatctcaaaaaagcctacgatgatttggaagaacccttgacctgttttctcaaatcttccaaagttgattggcatttctatgacccatatatgttacagttaccaaaaaggttcaaagagaaaaccaaatggtgtggaatagtaagccccggttgggcaccatagttgaaggtattgagccacaacgcagttggtggggttttgactcactctggttggacctctgtggtggaggttgtttataatgaaaaacctctagttttgttaatgtttcttgcagaccacggattgaactcgagggtgttggaagtgaagaagatggtgtattcaattcctaaggatgaacaagatggatcattcacgagtgatgcggtcgctaacttaataccgttggtatgg

SEQ ID NO: 2561 - DNA, 459 bp, Glycine max
  unsure (1)..(459): unsure at all n locations
agctntattcaagacanagaaattaaagatattcaagatggatgatcaagacagtctccagagtcttaggtagggtatattaaataggaagggaatttctaattgaagtagcaaaaggtttggccaagaaatttaagttaaaaagtcttttcaagagatttactctctggtaatcgattaccagaggatgtaatcgattaccagtggccaaaaatgatttacaacagctattaaaatttgaattcaaaatgtgcactgtgtaatcgattacacatatatggtaatcgattaccagcagttattgaacgttttatttcaaattntaaagcttgtaatcgattacacacatactgtaatcgattaccagaggagatttntagaaaatattctcaacagtcacatcttttcatttggttcttgaatggccatcanacgcctatatatatgtgacttgagaca

SEQ ID NO: 2562 - DNA, 445 bp, Glycine max
agcttccagctttccacctatatggatggtctgagcgtgaatacactttgtacgcgtccagtctagtctctctaagccctgaaaccgtaactatagctatgttctgagattcgccttttctgctgatcagagagctctccgaatccttttctttcgaagcggcattgcccaaagtctaatcacaggcttgacagggtcttcttagcccatgctaactagaatacttagtagcttatatgatcccacagcgataaccactgattgaggagcattcttcgttttaaccagttttcataaaccaagatatcctgcctatcccgaaaaacggactccctcatataaaacagtagcttcatatcaagagtggttttgactaatcatatgacaaatgctcggccgaagctagagctaagtggctgttcacggtaagtatggaaagcatatg

SEQ ID NO: 2563 - DNA, 436 bp, Glycine max
  unsure (1)..(436): unsure at all n locations
tttctntgagcaaagcanaggcttgctcttatttttcatcccaggtaaatgccacattcttcttcaccatctcattgagaggtgatgcaattgtagagaaattaagaatgaaccttctatagaagcttgctaacccatggaagctcctaatatctcccacactttttggggtgggccattcttggatggccttgattttctcaaggtccacttggaccccatttctaccaactacaaaacctaagaagactatattatctactcaaaaggtacacttctctatatttgcatagagtgtgtttttcctaaggactgaaagaacttgcctgagatgtgctaagtgatcatctaggctcctactgtacactaaaatatcatcaaaataaacaactacaaatctacctatgaaactccttagacatgatgcataacctat

SEQ ID NO: 2564 - DNA, 449 bp, Glycine max
  unsure (1)..(449): unsure at all n locations
agctcgacacatattaaccatattcaaggtctgtctaatgagtttgtccaaatgtctccatactagtcattggagttaacaaacttaacactaatttctttaaacaacaaattntctcgaacaaaatggcactcaatctctacatgtttggttcttttatgaaatactggattaaaggcaatgtgaatggctacctgattatcacaatacaacttcatttgtcgatcacantaatttaagtcttgaagaaagttgttaatccatgttggccagatcacaagtaattagagccacagctctatattttacttcttcacttgactggacaacaatattatgtttcttgatcttccaagagataatatnttctccaatggatacacaatatacagtggtggatcgtctgttttagggcaacctgcctaatcgcattacaatacctacatatt

SEQ ID NO: 2565 - DNA, 310 bp, Glycine max
  unsure (1)..(310): unsure at all n locations
ntcgagaaattcanatggtcataactnttcactcggaggtcctattcatgcgtataatatattgagacgctcgaaattgaacaacggaagctctcgagaaattaaaatggtcataacttttcactcatagatccgattaacgcgtataatatatcgagacactcgaagttgaataatcgaagctactgagcaattcaaacggtcataactgttcactcggaggtccgattcaggcacataatatatcaagacgcccgaaattgaacaacggaagctcttgagaaattcatatggtcatttcttttcactc

SEQ ID NO: 2566 - DNA, 437 bp, Glycine max
  unsure (1)..(437): unsure at all n locations
acaagtggcctaatgcaatcctaccccgcaagggcattggatagaagactccaagtagattgggccaaagatgcaagaaaaggccctatggttctcatgagccttgaggtagatntcacgcccatgggctaagtatgagcccacttatctttgtacatattagattaaggtttcattatttttgggccttgtatttacggctccataatgtacgtaaggtaccctaaacatgtatgatttttcacccttctattttcggcacctacactaatttttgattacgggtagttttgaatttacatgcattgtggaatattcatgtgcgtgttgggaaaaaactaattgaatgcgagaagcctatccagttaaatatagagggcgggagcatttgttgctacaccctaatgcacatcataagtacactttgtgatgcttac

SEQ ID NO: 2567 - DNA, 447 bp, Glycine max
  unsure (1)..(447): unsure at all n locations
agcttctntgagaanactttcttgagaagctagagtctagctacacacacccctctcataactaagctcacctccttgagaagcttccttaagaagattcctaaagaagctagagcttagctacacacacatctctaatagctaagctcacctccttgagatgagaagctagagcttagctacacaccccctataatagctaagctcacccccatgacaaanaaagatgaaaatacaaaaaaaaaagtccttactacaaagactactcagaatgctccgaaatacaaggctaaaaccctatactactagaatggccaaaatacaaggcccaaacgaaggagaaacctattctaatatntacaaagataagtgggctcatacttagcccatgggctcaaaatatactctaaggctcatgagaacactagggccttcccttggatctct

SEQ ID NO: 2568 - DNA, 352 bp, Glycine max
  unsure (1)..(352): unsure at all n locations
gaactactaactgcagtaacagttgcagcccaactatccggtagtgatgacaatagaatcaatgccttcacctcatcctcaaatntaatctgcacagatttcaattgggcaagaatagtattaaactcattaatatgatcagctacagagataccttctctcatcttgaggttgaacaaccggcgcatcaagtatactttgttggctgctgacggcttctcgtacatatctgataatgccttcattaagcctgcagtagtcatctcgttcacgatggtgaacgcgacgttcttggctaatgtcgatctgatcacgcccagagcctatcgatctagcaagttccattcttctt

SEQ ID NO: 2569 - DNA, 413 bp, Glycine max
tcttagtctcaactgatgaaaatgaattcgtggctacttcatgcactcctctaatgacaatagcatcatttctggcactaaattgctgggagtttgaagccatcttctcaattaaatttctggcttcagcaggggtcatgtctccaagggctccaccactggtagcatctatcatacttctctccatgttactgagtccttcataaaaatattggagaagaagctgctcagaaatctggtggtgagggcaactggcacatagtttcttaaatctctcccagtattcatataagctctctccactgagttgtctaatgcctgagatatcctttctgatggtcgtggtcctggaagcagggtaaaaattttctaagaatactctctcgacgtcagcccagctcgtgatggaccat

SEQ ID NO: 2570 - DNA, 385 bp, Glycine max
agatgctgctctatgctaaatttctgaaagatatgctaacttggaagaacaagtacatccatagtgacaccatagttgtggagggaagctgcagtgccgtaattcaacgcatcctttcgccaaaacataaggacccaggcagcgtcactataccttgttctataagtgaagtatttgttggcaaggctcttattgatttgggagccaatattaatttgatgccacttttcatgtgccaaaggcttggagagttggagataatgtctactacgatgactttacagttagcagatcgctccattaccagaccctatggagtaatagaggatgttttggctcgggtcaaacaccttatctttcctgctgacttggtggtaatggacat

SEQ ID NO: 2571 - DNA, 462 bp, Glycine max
  unsure (1)..(462): unsure at all n locations
gtcacctgcggcatgccagcttgcacagctgggtaatactccacacctttgatgttgaaacttttgttattttaagtacttaattctaattgccgtatttcatggaaaaccctatatttggtctagaatctacaattatgctaggctaattgtgactntagtgttacattgattagtttatttaatgcgttttggggaaaattactatgtgttatttttttttgactggatatatacgtgttaataaatattaatatgacttcacacgctaaaccaatactaagcaaacgggagatacaaaatttggtagatccaatgcttggaggggcttatgacgtgacaccagttaatagagtagcctttgctgcctccctttgcattagggcatctgcaacttgcagacctatcatgagtgaggtagctcaattatatatgttgcacaactttggtgttactttccta

SEQ ID NO: 2572 - DNA, 447 bp, Glycine max
  unsure (1)..(447): unsure at all n locations
agcttatatagcttcatattattgatagagacaaaataaatcatataattctatgaaatatataaatttacgtgatgttatataagttttttttaataatggattgttctgttttagtttttaaaattgaaataaattaatatgtgttgatttcatttgtattattttaaattaaaatgtgttcttagtctacttttttagcacgttgattttaatgtgctgcatacgaattgataatatttagcccatttgtgtgttttgtcactgttcgcaggaatcttactggaatcctcaaagtgggagcctcctgttccctacttcattaaacacttctcattatttatttatttattttcgtgaacaataagaattaaataattaataaaaaaaatgatcgatacaattagtttattactntgagtctatatattaacaatatggagtcat

SEQ ID NO: 2573 - DNA, 347 bp, Glycine max
  unsure (1)..(347): unsure at all n locations
cctttcttttctcatgtgcactcaaacccaatctccgggttcgaagacaaccttctttctccctttgatggcttgtttagcatagctcatacttttcctctcaatttgatctttgactctataatgaagcttcttcacatagtccgcctttgcttgaccttctttatgcttaaaaacagaaacattaggcataggcaaaagatcaagaggagttagtggattaaaaccataaacaacttcaaggcttaagaaagaagaatcatcggatgacgccgatcgaacatttcctaatatacatcatncaaatattattcatggattgaatagaacatacaatagccgacatc

SEQ ID NO: 2574 - DNA, 482 bp, Glycine max
  unsure (1)..(482): unsure at all n locations
cctataaatctaagcttacaatgtagttctacatctttgcagataatgcaaacaattggatttctcgggccagctttcttcttaactcaattgagccacgctaattctcctgtgatggctgttttgtgtatgacatgcagtcangtttgcttcttgttttgtatttgagatatttttaattctgagaaggcagtctctttgtaatcctaacataaaatctgcttatatttgtgtctcttcttatatgtatctggagaaagttacttaatacttgtataaagtttctttaatttaagtatctcacttcaataattttattatgattattagttcatactgcataatctgaanatntgactggcaaatataaatattcttggcaatggtgtcttggaacttctcttgatgagcataactacacattctcattttgctaagtcttcatataaagttagaaagtgttggttcatccattcattcca

SEQ ID NO: 2575 - DNA, 438 bp, Glycine max
  unsure (1)..(438): unsure at all n locations
agcttgtgctntaacctgcctcagtaatataagacacatgtgttaaggcgcctgcgacaataaactagctgtgtgtgtgcaagtctgaaggtgaatgttctttgtttcaattctttattccttattgttattgtcttaataaggttagaatagaaaagttattggaagaaaattaaggattagctcacctttgctgatttgaatagttcatcaagaacctcggacaaagttggatgtgcatgaactgcaaattntatgtcctgcattgtaccacaaaacggtgaaatttaccaaacaagcaggataaataagagtgaagactttgtgactattattagtaactaaatgccaatacacataaatgtggtagaaaaatttacctgaatacgtgtccctaatgcaattgcattggatgcttcatggatgagatctgctgca

SEQ ID NO: 2576 - DNA, 433 bp, Glycine max
gcagctcttagtctcaactgatgaagataaattcgtggctacttcatgcactcctctaatgacaatagcatcatttctggcactaaattgctaggagtttgaagccatcttctcaattaaatttctggcttcaacaggggttatgtctccaagggctccaccactggcagcatctatcatacttctctctatgttactgagtccttcataaaaatattggagaagaagttgctcagaaatctggtggtgagggcaactggcacatagttttttaaatctctcccagtattcatataggctatctccactgagttgcctaatgcctgaaatatcctttctgatggccatggtcctggaagcagggaaaattttttctaagaatactctcttgaggtcatcccagctcgtgatggaccttggagcaagctaatat

SEQ ID NO: 2577 - DNA, 456 bp, Glycine max
  unsure (1)..(456): unsure at all n locations
gctttggagtntccaagtgccaattcgtcttcttctttagtccagtcttcttctggcttcaattcttcagtgggctttccttctgtgtccagcatcttgggatgttcccagcctttgatgacagctttccaggttctgctatccagtgatttgaggaaggccaccattcttgctttccaatattcatagttgcttccatcgagaattggtggtctgttcactggtccgccttctttctccatgttcatcagaatttatctccctagatctcactctgtgatttcgagtgttggctctgataccaattgaaattctgataccaggggacagatgtcgtacaggatgtcacgacatcacgcttcagaacatgcagattatatgtgtccgtatgaacagattanactagtaaataacacaagagaattgtttacccagtgctgtgctacctcacctaca

SEQ ID NO: 2578 - DNA, 415 bp, Glycine max
  unsure (1)..(415): unsure at all n locations
gaagaaattgtagctnttccctctgttgtcttggactcagganaatatttcttcaaaaacttttccacaactttatcccaagtccttaagctattacctttgaatgaatgcagccacctcttggcttctctagataatgaaaatgaaaataagctgagccgaatagcatcttctggcacaccgacaatcttgacaatgttgcatatctcaatatatgttgccaagtgtgcatatgggtcttcattgngtagaccatggaacaaattgcctcgtattaactgaatcaaagaatgtggatatgtgatattgtgggcctgcacctctggccttgcaatgcttgtaaagaactgtggcacagcgatgctagaataatcttcaagggtcaccctgcttggttgctcttcaaccataatgt

SEQ ID NO: 2579 - DNA, 480 bp, Glycine max
tgcaagaagctctatgtaaaaagttgaagcttagttcatcttatcaccctcaaacagatggtcaaactgagagaaccattcagtctttataagaccttatgagagcttgtgtaatatgacaaaagggtatttgggatgagtatttacctctagtggagtttacccacaacaatacttttcatgctagtatacatatggctccatttgaagccttatatgggaggaagtgtagaacaccattatgttggtatgagactggtgagtctcttttgatagtgttgagtctggttgcatccaagtcacattggactgtaccaaacaagttaaattcctgaggttttgatgttaacaaagtataaattttaagtactaacctttcatgcttaagttacaagctatcttatctctgagatacaagcagaaaagcatgaacataaaggttctggacaataggcaaagtatcagtcattggatgatact

SEQ ID NO: 2580 - DNA, 448 bp, Glycine max
  unsure (1)..(448): unsure at all n locations
agcttgaagatgtgtaacctgccatcttctcatattagaactgatgtagctccattgaagcttgtaggccttggatcttcttcatcaatggagtcttttgcttcttaaagtttgatagcagcgtaatggagaaggagaagggtgattggagatgccacttcaaggagaagatgagtctataagaagctcaccaccataggaagccatggataatagcttgaaagtaagagaagatgaatggacggagagggagaaagggagcatganatttagtgcctctaaagaagtttgaactttgaagtttaattctcagatgatcaaagttgaaaaaatgcacacacatagcctctatatatagcctaagagtcacacagaattggagggaaatctgaatgtctattcacattttactagaatttgacattgaatggtggagccaaatttcact

SEQ ID NO: 2581 - DNA, 441 bp, Glycine max
  unsure (1)..(441): unsure at all n locations
agctnntaatttaattgtcataataattagtaattacactatattacaacaaagtaaatatggtatcctaaagtatntttactttntctaatcattatagtcaatctcgatgtctaattgtcccaaaataatctttgaaagcatatactattaattatctaggggttcgggatacatagacggtagtgttggaaatcttaatctttaatgtttattgattaaaatatattttttccttataaatataaaaatgtttgaattttttttttttgtaaaattttagtacatattttgtcctgataaaattgaaatgtatcacttttttgcttgaacataagtttggataaatctaaatctacgatgatgacctnnttacattgtatacatataaatgatgtaaaatgtgacattntttatatcggttgtgcatataaccgatgt

SEQ ID NO: 2582 - DNA, 472 bp, Glycine max
  unsure (1)..(472): unsure at all n locations
tacgtgaaagtagtataaagaaatactttagaagttaagttattcgatagtagaatctttatgacataaatagaatgcatggtcgaacattaaaataatggcatgtggtaggtcatacatacataatctttgtataacctgatagaatcaaatgaaaagtaagggatatattacaacataaacaagtatatgaattcatgtcatcagaatagaaatcaaaatattctttacaacataagataaatagctaaactaagctatgaactcgtttgagtagtctacgttggggaaattcttaanaatgagagtcttgtttgtcgaatctatanatnggcaggggtcctcctaatacatggatagacaagtgaaaattttcccaagatttacatcaacacacaagcttcnatccaatctatctcttcacaattanaatataatataacatatattcatattcatattaatatcatct

SEQ ID NO: 2583 - DNA, 448 bp, Glycine max
  unsure (1)..(448): unsure at all n locations
tatcacagactcatctatgaaggagaactctagttttcaggaccaattactttatttcaagggtcgtctattcaatacctgatcatagcttcaagtctagaaacattaacaagggtttatgtgaaatctatgtcttcttgtgggttaaagccttgagctactaacatagctttgttccttactaccttatcttgttcatccaatttatttctaaatgcccatcttgttcccaagatgcttttgttctcaggcttgngaacaagcatcttgacatcatttccagtgaactagtggagttcttcttccattgcaataatccaattattatatgtgattatttcatttatcatcttacgttctatttcaaacatganagcataagacataagatctttaaaatgatgatctggttttgactccttcagtctgatcttcaataatctgatct

SEQ ID NO: 2584 - DNA, 484 bp, Glycine max
  unsure (1)..(484): unsure at all n locations
ngcatacaagattctncttgcttgacacttcataaccttctggttgggttatatagatgtcttnctctaaatccccatgcaagaatgcagttttaacatctaactgctccaagtgaagattctctgcagctattatgctcagaataactctgatggtagtcatctttacaactggagagaagatctctgtgaaatcaattccttgtttctgctgaaacccttttaccacaagtctcgccttgtatcttcttctaccgttagattcttcctttagcctatagacccacctattctgtaacgctttctttccttctggcaatntagttaaagaccacgtcttattcttctgaagggatgtcatctcatctttcatcgctagctcccactcaataatgtcattcccttgtgtagcctcactgaaacattttggctcaccagcatcagttaacaacaaataatgcaatgaacgtgaatacctatctgg

SEQ ID NO: 2585 - DNA, 484 bp, Glycine max
  unsure (1)..(484): unsure at all n locations
taagccaacccctnttctcatacaaaacatgttgatgttttactctatcaatcaccaacaagttgaaacctaactatatgcaatgattaagaaaaacaaagaaaaagagcagggttgcctcccagtaagcgcttctttaacgtcactagtttgacgcatattacctcaaaggtcttgtaactacagaatggtggttaatctctcaatgttcccaccttgatacaacttcaacctctgaccatttactatccatgttctgcttggagtttctgattgcggattaaataattccactgctccatatggcttgacttccttgatggtgaatggtccagaccatttagactctatcttgcttggaaacaacttcaatcttgagttgaacaacaacacttgttatcttggcctagagtccttctttagcagcttcttgtcatgataagccttcactttttctctgtacaatcttaaagactcgtatgca

SEQ ID NO: 2586 - DNA, 400 bp, Glycine max
acacatatactgcaatcgagtaccatatctatatttcagaaaatattctcaaccgtcacatctttatatgtggatcttgactggctatcaaaggcctatatatatgtgacttgagacacgaatgtgctaacagttctttggatcacatacgtcttatcctcttaaacagcaaaatcgttttatcctcttacaaataccttggccgaaatacttgtgattcaataaagaattatttgagtgctcaaattgttcaatctatctctttcaagagagatctcttcttttcttcttcttcattctgaaaagggattaagagaccgacggtctctcgttgtgaaagaattctaaacacaaacgaagggtcgtccttgtgtgtctagaacttgtaaaaggaatttac

SEQ ID NO: 2587 - DNA, 266 bp, Glycine max
gcttataatgtatcgctacgctcgaaattaaacatccgaaactctttatatattcaaatggtcataacgctcctcacggatgtccgatgccggcgcataatatgtcgagaggctcaaatattaacaacggaagctcttgagaatttaaaatggccctaaccttgtaaccccgatgtccaactcacgctaatagtatatcgagccacttaacattaaacatgtgcaactttcacgaacattaaatggttataacttttcacaccgat

SEQ ID NO: 2588 - DNA, 455 bp, Glycine max
tcaacatcagaccacttcacaggtgctggaactattttatatggatctgatggggcctatgcacgttgaaagccttggaggaaagaggtatgcctatgttgttgcggatgatttctccacatttacctgagtcaactttatcacagagaaatcagagacctttgaagtattccaagagttgagtctaagactacaaagagaaaacgactgtgtcatcaagagaatcatgagtgaccatggcagagagtctgaaaacagcacgttcactgaattctgcacatctgaaggcatcactcatgagttctctgcagccattacaccacaacagaatggcatagttgaaaggaaaaacacgactttgcaagacgctgctatggtcatgcttcatgccaaagaacttctctattatctcttggctgaagccatgaacacagcatgctacatccacaacagag

SEQ ID NO: 2589 - DNA, 438 bp, Glycine max
  unsure (1)..(438): unsure at all n locations
tactaagcttaagccaattatacgacaataactntttactcggatgtctgattgatgtccgtaatataacgaaacgctcgaaattgaatgtttaagctttgagcccattctaacgataataactntttactcggatgtccgattgagtctcgtaatatatcgacacgctcgaaatngaatgttgaagctcttagcctatttaaacgacaataacgttttactcggatgtccgattgagtgacgtaatatatcgagacgctcgacaatgaatgttgaacctctgagccaactcaaacgacaataactntntactcggatgtcctgatgagtcccgtaatatatcgagacgctcgaaattgaatgttgaacctctgagccaattcaaacgacaataactttttactcggatgtctgattgagtcccgtaatatatcgaga

SEQ ID NO: 2590 - DNA, 378 bp, Glycine max
  unsure (1)..(378): unsure at all n locations
agcttaaacattatactntgagcgtctcgatatattactggactcaatcagacatctgagtaaaaagttattgccgcttgaattggctcaaaggttcaaaattcaatttcgagcgtctcgatatatttcgggactcaatcagacatccgagtaaagagttattgtcctttgagttggctcagaggttgaacattcaatttcgagcgtcccgatatattacgtcactgaatcggacatccgagtaaaaagttattgttcgttgaatttgctctgagcttcaacattcaatttcgagcgtctcgatatattacgggactcaatcagatatccgagaaaaaagttattgtcgtttgaattagatcatatgttcaacattca

SEQ ID NO: 2591 - DNA, 387 bp, Glycine max
tcgacctctatatttcttatccaagtccttattactactaatagacaaaccttcaggtggttgcacgtatattatctcactcaaatcaccattcagaaaagctatcttcacattcatttggtgcaactgcaaatcaatatgagctactagggccataatgattctaaaggaatcattcgttgatacaagagacaaagtctctttaaagtcaacactctccttctgcataaaacccttttacaccagtctagccttgaatatctcaatgttaccatataagcacttctcttcttgaagacccatctccaattgattgccttcaaattctaggtaattcaactagcttccatatgccattaactgacatacattgcatctcttcattca

SEQ ID NO: 2592 - DNA, 473 bp, Glycine max
  unsure (1)..(473): unsure at all n locations
tcatgatgaatcaagaatgatttaatgatcacaaagatgtatgactttaagctcanaagtcaagaacacttcatgataacaaagataatgatctcaagaatcaaagaatgagttcaagattgaatcaagaacacttcaaggttcaaaaggaaatttgatttctagaatcaagaatcaagtttcaagattcaagttccaagaatcaaaatcaagattcaagaatcaagagaaggctcaatcaagataagtattaaaaagttcttttaaaaactgagtagcacatgaatttttctcataaccttttatcaaagagttcttactctctggtaatcgattaccagattattgtaatcaattaccagtagcaaaatggttctcaaaaagctttcaactgaatttacaacgttccaattgatctcaaaatgctgtaatcgattacaatgatttggtaatcgattaccagtgtgtttgaa

SEQ ID NO: 2593 - DNA, 469 bp, Glycine max
gtcacctgcggcatgcaagcttcataaattcaatatataacatattatctgaatcgatatgatggtgacagggcgagtaacccatataaacaaatattgtggttcaaaattctagcttgtgagattgatatggtctaagaaaaggataacaagcacaagaaaatacttttatgaatgtgtaatcaggcgttatctaaagcaaaaaatgatatggagtatcaaatttgattgtcagactcagtagatatctaaacctaaatatgacataagaaacagtcagcacagagataaattccaacaaaagtaacatacgagcatggatcaatatgattatgatttgtgaacaaatagggaaagttttgaattctaatatacattgcgacaaaaatgattctagtggccacaaaatacatgataatcaacttttattggatcaagacagaatataacattcaaaaccacatatcct

SEQ ID NO: 2594 - DNA, 453 bp, Glycine max
  unsure (1)..(453): unsure at all n locations
cgctagaatgctntccaaaatctaagatacctatctaacactatataggtaggtatgccatgaagcttaagtatctccttattgtaaatgtctgctaatttgtccaatttgtatgtctccttaattggtaagaagtgagcagacttggttagcctgtccacaaccacccatatgacctctagacccaaacgagtttttggaaaacttgttacaaaatccctagaaattcattcccatttgcactcaagaactcctagaggttttaaagttcttggttttgaagttgttccttcttaatcaactctntaatgtcactaccgatctccaatctattcaacttcatgatcaatgcattcaaattcaagtccctaaactcctctatcaagttcatcttttacaccatcaagctagacatgtgcaaagacttcctactgagaggatcagccactacat

SEQ ID NO: 2595 - DNA, 385 bp, Glycine max
  unsure (1)..(385): unsure at all n locations
tgcataacccncacacctactctattacaaatcaccacaacccccaacgccagcgccaccttcaaccgaatcctcatcctccctttcttcacatcaattatataagacttcccatccttctcacccctccttcccttcactgccgtcaacatatgattctcctgcaaatcaagcacatagctaaccatcccactcaacaatatgtctataaatccaaaccccaccaacacaaacaatatagagaaaagcttagtggctgtactattgggagtgatatcaccgtaccctattgtgcacattgtcactatacaaaaatacaatgcatcaactataggatgagtctcagtagctgtaaaattatgacgattgaaccaataaatgacaa

SEQ ID NO: 2596 - DNA, 482 bp, Glycine max
cgagacttcaagatatgaactccttgttcctttgagcatttcatgcaagcttcacttaaggtaagggggagttttccacttcttgaaccttaacctttttgtctagcaaaatttatgtataaaacaagtttaaggtcttttgtaggattaaagttactttggatatgttggatcaagtggcctctgaataattaagaaggggggttgaattaattattactgaacctttactaattaaaaatgtacccttcttaggcttttactataatgttaagaaagtaaataacagaaatggaaacttaaccaaaagtaaaagcaataattaaagtgcacaacggaaaataaagagtgtatggaagaagaagacaaacacaagagttttatactggttcggcaacaacccgtgcctacattcagtccccaagcgacttgcggtccttgagatttcttttaaccttgtaaaatcctttacaagcaagatc

SEQ ID NO: 2597 - DNA, 481 bp, Glycine max
cgcttctcctgaatatcaaatgcattctgagaataagaaatggacaaataaggattggttagaagagcactaactaaaattaaattgaatttgaatttacgaatgtaggcaacattatgcaagagtgaggtattggttaagcaaatcgaaccaatggcaatgataggtataacatcattgttaggaagagtgacggttttatcataaacaagttggtaagatcgaaaatgatgaacggaacaagaaatatgaatgttggcaccagaatctaaaagccaacaatcatgaagaaaattagaagtggatgtaaaaaggatcataccactggcagaagacacaccttgagggatgacaacattggaagcatgactctctaaaagattcatcaatcggctatatcgttgggcagtaagtcgaaactgggaacccgagtcaccagaggaagatggtgagtaagacatatcaacagatacttgagcaa

SEQ ID NO: 2598 - DNA, 438 bp, Glycine max
  unsure (1)..(438): unsure at all n locations
gctgcagctatgacaaaaataatgcccccagatctttttacataccagatccattgcaagcatggcagaacccatatattgncgttgcaaaaggtacacaacaaggattcatcttcttatatgagactctgaaaggcttcgatggcatcattgaacacctgtgtaatacacaaaagtacaacaaagcagtaaacaaatcaaggcaataagaaaacaaaatataatacgattcctgctcctttctgattgcattttacagcaagtttgatacacacaaccaacaggggagacaacttcttaaagaggtcatgacgcttctgcatataaaaccaaactactgaatgtcggcaaaggcatctttctaagtattgaatctcacctaaaagagagtcaaataagtaccttatgccacattgtgaccaacagacgcaactttct

SEQ ID NO: 2599 - DNA, 344 bp, Glycine max
agtctcacgattgtcacgtgctcatgcaacaattgttagccgtggctatacgagacatcttgccaaacaaagtcaggttaacgataactcgcctgtgctttttcttccatgctatatgtagcaaagtcattgatccagtcatgtttgatgagttggaaaatgaggccgcaattaaactgtgccagttggagatgtattttccctctgctttctttgacatcatgattcacttgattgtgcatctggtcagagaaatcaaatgttgtggtcctgtttatctacggtggatgtacccggttgagcgatacatgaagatcttaaaagggtatacaaagaatctatat

SEQ ID NO: 2600 - DNA, 406 bp, Glycine max
tgctaacccatggaagctcctaatatctcccacactatttgtggtgggccattcttggatggcctagatattcttagggcccacttggaccccatttctaccaactacaaaccctaataaaactatattatctacacaaaaggtacacttctctatatttgcatatacggtgtgtctcctaaggactgaaagaactttcctgagatgtcctaagtgatcatactacgctccaactgtacactaaaatatcatcacaataaaaaactgcatatctacctattaaataccttaagacattatccataagcctcataaaggagctcggtgcattactgatcccaaaaggcatcactaaccattcatacaaaccaaacttggtcttgaaagcgaatttccactcatcacc

SEQ ID NO: 2601 - DNA, 431 bp, Glycine max
  unsure (1)..(431): unsure at all n locations
gctgggtctgatatttttatatttttatagttcaagcatcggtttgttacctcctacaagcctatttttaggcttgtgcccgacctttataaaagtctgtcaggttcgtcagttcatttaaagacatatttcatattagaacgtgtaaaaaacaataattttttaaacaaaacccaagaatttcattaaaaaataataagataatggttaaccacaagatatgggcaaaattttcctacaaacattacatgtgacatactaccaaagtcttttaagtttcaccaaaaggaaagagtctatattcttactacccatttatactacattaactaaaataatttaaatcatcaaactactaaaataatgttgtaatttaaataanataattataatattatatgccatattaatataatanttttatataacat

SEQ ID NO: 2602 - DNA, 361 bp, Glycine max
  unsure (1)..(361): unsure at all n locations
agcttgaggataaagacttcccaagctatntatcttctctctcagagaggctttttctcactctaagaagtggattcactcttatcttggatggataagaatgaaggctcctacccttatttatactactccatctccacaataaatggtggagatttcttgtatcataaggtgaagattaattctctagaatgctccacacattctaggagtttctacactcttccatatccttccataaggttccagaaagtttcacacatctctagaatattccagaggtttccacattcttccacaagcttctagagagttctacactactctagagctctccagagcgttctagaanattctacac

SEQ ID NO: 2603 - DNA, 312 bp, Glycine max
gcttctcgatatgttatgcgtctgaatcggacatgcgagtgaaaaattatgaccattttaatttcccgagagcttccgttggtcaatttctagcatctcgatacgctatgtgcctgaatcggacatgcgagtgataacgtatgaccatttgaatttctcgagagcttccgacgttaatttctagcgtctcgatactctatgcgcctacatcggacatgcgagtgaaaagctattaccgttttagtttctcgagagatgccgatagtcaatttcgagcgtctagacatggtatgcgcctgaatcggacatgcg

SEQ ID NO: 2604 - DNA, 257 bp, Glycine max
  unsure (1)..(257): unsure at all n locations
cccatgaatnggcgtttcgttcatgtgtcctgcaccttcaagtttggagctatgcgtagtgattgcttagtgaaattctccattcttaatcttttcggagccccatgaattgcgttntcgttcatgtgtgctccaccttcgagtttggagctatgcgtagtgattgcttagtgaaattctccattctcaatcttttcggagccccgtgaattgcgttttcgttcatgtgtgctccaccttccagtttcgagctatgc

SEQ ID NO: 2605 - DNA, 370 bp, Glycine max
  unsure (1)..(370): unsure at all n locations
agctntggagtttccaagtgccaattcgtcttcttctttagaccagtcttcttctggcttcaattcatcaatgggctttccttctgtgtccagcatcttgggatgttcccagcctttgatgacagctttccaggttctgctatccagtgatttgaggaaggccaccattcttgctttccagtattcatagttgcttccatcaagaattggtggtctgttcactggtccgccttctttctccatgttcatcagaatttatctccctagatctcactcagtgatttcgagtgcccgctctgataccaattgaaattctgatactggggacagatgtcgtacaggatgtcacgacatcacgcttcagaacatg

SEQ ID NO: 2606 - DNA, 419 bp, Glycine max
  unsure (1)..(419): unsure at all n locations
gcttacacagtttgtctttcttaaactngagtnttggaagacaattactaagtctttcctaactagattatttaaatgatgcatattaatgtgtgcagtcctacaatgctacaaccatgaatcatctattgtactcaccaagcaacttagctcatgaaaagatgcttgctcaacattcagcatataaatgctacttattctcttaccaatatggagagctttactggatatggcttcacttataagacaacaatttctattgaattcaatcttgaaacctttatcacaaagttggctaatgcttagaagattatgctttagtttatccacatataacacattctttatctgagtttcgtcttgattccctatacttccttctcccattatctttccttttgtattggnctcaaacatga

SEQ ID NO: 2607 - DNA, 419 bp, Glycine max
  unsure (1)..(419): unsure at all n locations
ntgcacgtatcagtcaagtgtatggaccatatcgtagccaatgtgctcatagataatggttccagtttaaacgtgatgcctaagagcactttggagaaattaccattcaatgcttcccacctaaagccgagttcaatggtggttcgtgccttcgacggcacccgccgagaggttaggggagagatagacctcccagtacagataggccctcacacctgtcaagctaccttccaaataatggatattaaccccccctacaactgtctgttgggacgtccgtggatccactcagtgggagttgttccctctacactccaccaaaagttgaaattcgtagtggaagggcatctggtcatcgtatcaagcgaggaagacatcttggtgagctgcccatcctctatgccctatgtgggagtcat

SEQ ID NO: 2608 - DNA, 319 bp, Glycine max
agcttgagggaaaacttgatgccttggtcaacctagtaactcagcttgccatgaatcagaaatctgcacctgttgctagagtctatggtctatgttcttctgcatatcaccatatagatctttgtccttctttgcagcaatttggagtcaatgagcaacctgaagcttatgctgcaaacatttataatagaccccctcagcagcaaaaccaacaacagtagaataattatgatctttcaagcaacagatacaatccaggttggagaaatcatctaaatctgagatgggcaagtcccccacaacaacaacagcctgtccc

SEQ ID NO: 2609 - DNA, 393 bp, Glycine max
  unsure (1)..(393): unsure at all n locations
catgctactatgaataactccaccacattaagcaacacctgccacttgagcagaattggccctagtgtaaaacagctaatatttgaactttgggtctaccaatatttattattaattntttaaagtaaaaaatatcacacatgttaattaaaagaccttacatattattattttctttaaagtaaaaaaatatattttaattnttattctaggtctcattttctattggaccgacacttcagttgagattaaaaatctcactaagagaatagctccaagtatttgtattgtagcatcactaacaacatcgtgtccattggttgcagcacacaggtattcacaactattcttcatgtncggaattagtgattngatcaaaatactaatcaacat

SEQ ID NO: 2610 - DNA, 392 bp, Glycine max
  unsure (1)..(392): unsure at all n locations
tctaagaagcttctttgagaagctagatccttatctatccacaaccctctattaactatattaacctccttaaaattaattacggataaaaataacacaacaaataatcaaacatcaaacataattactaataatatatatatatatatatatatatatgtatcagggtgttacataatggcattggatagaagactccaagaagattgggtcagcgatgcaagagaaggccctagggttctcatgagccttatggtagatttcgggcccatgggcttagtacgagcccgcttatctttgtacatattagattaaggtttcattatttttgggccttgtatttagggctccataatatangtaaggtaccctagaaatgtaggatttttcag

SEQ ID NO: 2611 - DNA, 352 bp, Glycine max
  unsure (1)..(352): unsure at all n locations
tgtaagcctaagatcttcatcatcaatggatgtccttgctttatggaagatgaatggcaacggaatggagaatgaagagagagaggagacaccacttcaacgagaagataagtctagaagaagctcaccaccataggaggccatggataagagcttggaggaagaatgagatgaatgaagggagaggaagagaggagcacgaaattttgtgctctaaaagagctctgaaatctgaagtttaatattcaaatgatcaaagttgaaaaaagtgcacacacatgacctctattttatagcctaagtgtcacacanaattggagggaacattgaatttcaattcaaatttcacttg

SEQ ID NO: 2612 - DNA, 314 bp, Glycine max
agctttatgcttaactatgtatgggcaaaatttattactgttgctcaagacatacaagtgaacttgtaacaaatcttctacacttggagtgatcacatgtagtcctcttgaacccttaccaaccactctgtcatcatgccgagactcaggaaggccaacatgtttagccttctctaaaaattctgaacaaaattcaatggcttcttctgcaatgtacctctcaacaataaaagcttctggatgatatagattctttgtataccctcttaaaatcattatgtatcgctcaaccgggtacattcaccggtgataaa

SEQ ID NO: 2613 - DNA, 366 bp, Glycine max
  unsure (1)..(366): unsure at all n locations
agctntgagcatttccttttacttttatntcactccatcatcatcactcacacatcanacactcactagctcttctaagngttctctggctctctctttcttttgggggatggagttcaacaagttcagaatcagaagctatgaggggcaatctgatagggctcaagtggaagatcttgagagaagatgcgaggtanggccatcagaaagcgtgtttctcttcacagacactatgggtgaccccatttgtaggatccggaacagtcccatgtacatgatgctggtaagtgatacacacacacaacaattactatgccactataagtcactaacttcatgggttttttcccttctcattatgtatat

SEQ ID NO: 2614 - DNA, 349 bp, Glycine max
agcttgtaggtcttggatcttcttcatcaatggagtcttttgcttcttgaagatcaatgacaacataatggagaaggaagaaagatgattggagaagccacttcaaggagaagatgagtcaagaagaagctcaccaccatatgaaaccatggataagagcttgaaggtagaagaagatgagtggagggagagaaagagcacgaatttttgtacttaaatgaggtatgaaatttgaagtgtaattctcaaatgatcaaagttgaaaaaaatgcacacacatgacctctatttatagcctaagtgtcacacaaaattggagggaaatttgaatttctattcgtatttcact

SEQ ID NO: 2615 - DNA, 379 bp, Glycine max
ttaaaagtttcgaaagaccaagttctatccatcacactattcaaccccccttctagtgtgtttcaatcacttcatatacctactcaccacgatgatttcttgtgttaggtcttgtcttgtgcacacaattgcatacatgagactacctacaacagtctcataaggaacacgaggcatgtattctctttatgattctaattgagtggcattgagtccagtgagatgaatggatgtagtcaaaggagtacaaactagttttgtggatgccatcccaaaatgattcaacactttctgaatgtattccttttgacatcaaattttttttcaggacttgacccctcttgatctccatgcccaaaatcttttatgcatctctcat

SEQ ID NO: 2616 - DNA, 371 bp, Glycine max
ctcggagatctgattcaggcgcataatatatcgagattctcgagaatgtacaacgaaagctctcgagaaattccaatgctcattatctttaactcggaggtctgatttaagcgcataatatatcaagacgctcgaaattgaacaacggaagctctctagaaattgaaatggtcataacttttcactccgaggttcgattcaagtgcatgatatatccagacgctcgaaattgaacaatagaagctctcgagaaattcaaatggtcataacctttaactcggaggtccgatttaggcgcataatatatcgagacgctcgaaatataacaatggaagctctatgggcaattcaatggacataacttttatctc

SEQ ID NO: 2617 - DNA, 353 bp, Glycine max
  unsure (1)..(353): unsure at all n locations
agaaattgggtgcaaattntaattcctttggctcgaaaaagttgactctggtacccggggacatctctcgtgaagacttgggattggaggattccattctaagggaagagatttatgatcaaacagatgtcattattaacttagctgcaacaactaactntgatgaaaggcatattgtatatactaaaacatcataggcttttatgcctatttaatggttttggtgccctggccttagttattattctcttgtttcttcttttaattactatctcaccttaaatttcaggtatgatatatcgttgggtctaaatacctttggtggtaagtatgtcatcaacttcgccaaaaat

SEQ ID NO: 2618 - DNA, 288 bp, Glycine max
cccaattcccaaacgccaagcccaggcgccttctttcttcaaaggccccttgtccttttgcgacctcaatttacccgccgcttgggttcggggacatgagcgccgtctacttggcggtgcccaaagaaagcgctggagcccgcggcgcggtgttcgcggcgaacgtgatggagaaaggaggactggcgaggaggaacaaggaaggcagagcgaggacagagagggaaattctggaaatgttggatcatcctttcttgcccacgctctacgccttcatacacgcgccta

SEQ ID NO: 2619 - DNA, 403 bp, Glycine max
  unsure (1)..(403): unsure at all n locations
ttgagcanattcacacgacaatataattttactcggatgtcttattgagtcccgtaatatatcgagacgctcgaaatggattactgaagatctgagcaaattcaaacgacaataaattttttactcggatgtctgattgagtcccgtcatatatcgaaaagctcgaaattgaatgttgaagctctgagcaaattcaaacgacaataactttttactcggatgtctgattgagtcccgtaatatatcgaaaaccttgaaattgaatgtagaagctctgagcacattcaaacgacaataactttntactcggatgtctgattgagtccgcgaatatattgagatgctcgaaatggaataccgaagccctgagcacattcaaacgacaataactttttactcggat

SEQ ID NO: 2620 - DNA, 234 bp, Glycine max
ctttggtattccatttcgagcttctcgatatattacgagactcaatcggacatccgagtaaaaatttattggtcgttggaattgcttagagcttcaacattcaattacgagcgttcggatatattacggtactcaatcagacatccgagtaaaaagttattgtcgtttgaattggctcagagcttcggtagtccatttcgagcttctcgatatattacgggactcaatcagaca

SEQ ID NO: 2621 - DNA, 455 bp, Glycine max
  unsure (1)..(455): unsure at all n locations
ntacaacacatgccactctactccaatntcttgaaggatattatcaaggaaacataagtatattcaccaggaaaacatcgtagtggaaggaaattgtagtgttgtgattcaaaagatcctctcccacccaagcataaagaccctgggagtgtaactatttcttcttcaattggagaagtcattgtgggaaaggctcttattgacctcggagccaacattagtttaatgccactctgcatgtgcagaaggttgggagagttggagatcatgcccactaagatgactntaaacctggttgaccgctccattaccagaccatatggagtaattgaagatgtgttggtcagagtgaaacattntatcttccagacagactntaaggtaatggatatctgtgaagatactgacattcctataatatggggaaggccattcatgttaactacaagatgcat

SEQ ID NO: 2622 - DNA, 328 bp, Glycine max
  unsure (1)..(328): unsure at all n locations
tctaaactntatacaagaatgaagctctgataccacctggtggacaagtggcctcaaatatcttaagaagggggggttgaattaagatattacaaattatttnccccaattacaaattctactttgattccaatacaagttccaagttcccttaaagatggatttctaaacaatgattcaaattaaacaatctgaatataaatggtaagcaataattaataaaagagtttaagggaagagaaagtgcaaactcagatttatactggttcggccacacccttgtgcctacgtccagtccacaagcaacctgcttgagagttccactatc

SEQ ID NO: 2623 - DNA, 474 bp, Glycine max
  unsure (1)..(474): unsure at all n locations
tatagatgcacccttaggataccacaatcctactntaatgtaccctntatgtacttaagaattctcttaacaactaccaaatgagtttctttaggattagtttgaaatctagtacatacacaaacgctatgcctaatatcgagatgactagcagttagatatagaagagggtcaatcatatctctatatcttgattcatctacatatttacatttctcaaccgggtcaagatagcatgaggtagccatatgtgttgttgactcttgagatttctttacaccaaaccttttaagtaaatcaatgcaatacttggattggttgatgaagattccactctctaactatnttatttggagtcctaaaaattaggataactcccncatcatgaacatntcanactttccttgcatggtctcagcanattctttgtacaagatattggtagtagctncagatataatgtcatctacatat

SEQ ID NO: 2624 - DNA, 293 bp, Glycine max
  unsure (1)..(293): unsure at all n locations
cattgttacttccatgaatattgatattgtatcatgcttaantatatgcatttgcttattctgatcattgcgtgttgtgtgattatttcttccatgcaggaacatgattcctatttgctgtgagagtgaaatgatgggcagcagcaccaactgaggtgagcttatatctcctttgttatgtcattatccattgttagggcttagctctaccgagttttaaaagattggctaagattntgttaaaacatcaccacttatacaatgaaggaaagctggagttgctgcacatgatg

SEQ ID NO: 2625 - DNA, 180 bp, Glycine max
  unsure (1)..(180): unsure at all n locations
gtctanggtcatgcctcaagggctatccacacccttacccatcccctcttcaccttgggtagacattagtatggactttgtccttgggcttcctagaacccaaagaggtgtagactctatctttgtggtggtggataggtttagcaagatgacactctttgatgcaagctccattggagc

SEQ ID NO: 2626 - DNA, 221 bp, Glycine max
gaaaataacaatttagtgcccaacttgctccacaaagtcctcccaaaatggcttaagaacttagaagccctatcactaacaatgctccttggcaaaccatggagtctcacaatctccttgaaaaacaaatcagccacatgggaagcatcatcaacttttttacatggaataaaatgagccattttagaaaacctatcaacaaccacaaaaatggaatctct

SEQ ID NO: 2627 - DNA, 374 bp, Glycine max
  unsure (1)..(374): unsure at all n locations
tgccgccacggagttntccgactatgctcttgtgtggtggaacaagctacaaaaggagagagcaagatatgaagagccaatggttgatacatggacggagatgaaaaagatcatgaggaagcggtatgttgcggctagttactcaagggacttgaaattcaagctccaaaaactaacccaaggcaacaagggggttgaggagtatttcaaggaaatggatgtgctcatgattcaagcaaatattgaagaagatgaggaggtaactatggctcgatttcttaatggtttgactaatgatatccgtgaatattgtgagctgcangagtttgttgaaatggatgaattgcttcacaaagcaatccaagtggagcaaa

SEQ ID NO: 2628 - DNA, 303 bp, Glycine max
acaaagaatgaagaacgcattcgacaagattgtgtgtttgcgcaacttccatgaaagggaccttgtgctaaaaaaggtgtcccacgctgttaaagataatcacaggaagtgggccccaaactacgatggacctttcgtcatgaaaaaggctttttccggaggggccctgctgcttaccaacatggatggcgaggagctacctttacccataaattctgatgttgtcaagcgatactacgcttagaatctggggcaattcaaggatatcgctgcatgtttttttatttttatgtgttcttcttg

SEQ ID NO: 2629 - DNA, 372 bp, Glycine max
  unsure (1)..(372): unsure at all n locations
agcttatacggtctaggatgtggntntgtgactaaattcaatntagacacaagtcttgcacttgccacattggtacaactccctccatcaatgatcatcatgcaaactttgccattgatcaaacatctagtgtggaaaatgttttctccatgaatttcctccattgacttcaattgatggccaagtaaccgcctaatcatcaacaattctccctccggtgttttctccacttcctcctcatcatcctcactctcttctcccttttcaacttcggactcactaatgtactctccgtctataagaatcatgactttcttgttagggcactcatatgcataattgtccaagccttggcactgaaagcacttcaca

SEQ ID NO: 2630 - DNA, 479 bp, Glycine max
  unsure (1)..(479): unsure at all n locations
ntnntattttagtagatgaagatgaatntgtggccacctcatggactcctctaaggataataccataatttcttgcactgaattgttgggagttggaagccatcttctcaatcaaattcctagcctcagcaggggtcatatcaccaagagctccaccactggcagcattaatcatactcctctccatgttactaagttgcctgatgcctagtactcatgcaagctctctccactaagttgcctgatgcctgaaatgtcttttctgatggcagtggtcctagatgcagggaagaatttctccgagaacaccctcttaaggtcatcctagctgaaaatggacctgngagcaaggtagtacaaccaatcttttgccactccctctagagaatgaggaaaagcctttagaaatatatgatcttnctagacatcanggggcttcatggtggaacaaacaatatggaactccttaagaaatctat

SEQ ID NO: 2631 - DNA, 247 bp, Glycine max
  unsure (1)..(247): unsure at all n locations
tgtgatgcggctgggaggggaatatgagcagtcttaatgcaaaataagcaacccattgcttattttagcaaagccttatctgacaataatttagcaaaatctgtctatgagaaggaacttatggcattggtccttttcattcaacattggaggcactactcgttaggaaaggaatttgtggtgtatacagatcacanaagcttaaaacactttctgcagcagaggatctcctctccggatcaacaat

SEQ ID NO: 2632 - DNA, 379 bp, Glycine max
  unsure (1)..(379): unsure at all n locations
agcttaatggatctgtaganaatgatactgcgccaaaaccgtttgatggcaaagatttccatgatcgtgtcaaggatatcataactatctttgggaagacataaaaaaaagcaccagtgagacacacatttggaagaaaaggtccattttctntgagcttccttactggtctgatcttgacattagacattgtatagacgtgatgcatgtggagaaaaatgtttgtgatggtttaattggcacccttcttaacattaaaggcaagacaaaggatggtttgaagtgtcgtcaagacttagttgacatggatatacgagagcagttgcatccaataccaaaaggttcgcgaacataccctaccccagcatgtcacacaatg

SEQ ID NO: 2633 - DNA, 420 bp, Glycine max
agcttgagggtaaactagatgccttggttaacctggtaacccagctggccttgaatcagaaatttgtacccgtcgcaagaatctatggtttatgctcctctaccgaccaccatacagacctttgcccttctgtgctgcaatctggagcaattgaatagcctgaagcttatgctgcaaacatctacaatagacctcctcaacctcaacagcaaaatcaaccacaacagaacaattatgacctctccaacaataggtacaatcccgggtggaggaatcatcccaaccttagatggtcaagtccttcacaatagcagtaacaacaacaaccttattttcaaaatgctgctggcccaagcagaccataccttcctccaccaatccagcaacaacaacaatagcagcaacaaccctagaaacagc

SEQ ID NO: 2634 - DNA, 279 bp, Glycine max
  unsure (1)..(279): unsure at all n locations
accatantcccacagtgagccagcatgtcatttcattcacatcaaaacccatgttcaatcccttatcagcaacattcaaaatattctcttccacataatggttccacacccaattcaccaaaggcacatgattatgctccccatcctggtaagtcttccttccacatgctatcttcaacacaacaaccccaaaaccgtacatgtcagattccttgctaaccctttctttctttacatattccggggccaggtacccatatggtccctccagctttgtct

SEQ ID NO: 2635 - DNA, 297 bp, Glycine max
  unsure (1)..(297): unsure at all n locations
aatgcttcttttttcacttgtgaagatgttcaaaagttggctatgaagatggttcaaactgagaaacatttggtatttccattggtttataaacttattgagctagctttgatattgccggtgtcgacagcatcccgtgaaagagctttttcagcaatgaagattatcaagtctaaattgcgcaataagatcaacgatgtgtggttcaatgacttgatggtatgttacaccgagcgggagatattcaagtcacttgatgatattgatattattcgaacatttaccgcanagaagtct

SEQ ID NO: 2636 - DNA, 425 bp, Glycine max
agcttctggtgggacatcttgacttgctttccaatctgacattcaccacagattctgccttcttctattttcagattgggaatgcctctaacaacacctttgtcaatgattttcttcatgcctcttaagtgcagatgtccaaatctttgatgccatattctgacttcatcttctttggaggatagacatgtggaggagtaactggtttcttgaggtgtccatatggtagcagtgtcctttgatctgctgcccttcattagaacttcactcttctcatttgtcaccaagcattctgactttgtgaagtttacattgaatccttcatcacacagctgactgatgctgatcaagtttgcagtcagtcccttcaccagcagtactttgtccagactaggaagtccatcatgagctagctttcccattcc

SEQ ID NO: 2637 - DNA, 402 bp, Glycine max
  unsure (1)..(402): unsure at all n locations
actatctgatattagctcctatagaagatagatacgaagactcctttatcttaccactacaaggctagatataacttttgcactgaatcaacttagtcaattcctatctgctcagaatgtcatcaagcagctgctcacagagtacttcgctatatcaaaggctcacttgcatgtggccttttctacccagcatcaaacgctcacaagctcacagcctacaatgactctaacttggccagttgcattgattttagaaaatccattactggatattgnttatacattggtcttttatcttaccactacaaggctagatataacttgtgcactgaatcaacttagtcaattcctatctgctcagatngtcatcaagcagtttctcacagagtacttcgctatatc

SEQ ID NO: 2638 - DNA, 359 bp, Glycine max
  unsure (1)..(359): unsure at all n locations
tcatgatggtgccaaaagagtcatcaagaatgtaaagcttgtactagaattgaagagaaatttgatttctcttagtgagtttaacaaacatggctatgtgttcaaaggggagaatgaagttatgaaagttctaaaaggctcatgatattcatgaaaggggtgcaaaagaatggcatgtattcacttattggagaagtggtaatgggatcagctgctacaacttctatcaaaaggttttcaaagactgaactatggcacagaagattgagacatgtaagtaggaggggctgattaaactgggaaaacataacctgctntgtggagataaagtggagaaacttgacttttgtgaacattgt

SEQ ID NO: 2639 - DNA, 326 bp, Glycine max
agcttggatttccttttagtagggaatctattctacctaagatggagcataacccagtcaccctcattaagaattagctctttccttcctctatagcctttatttgaatacacctttgtttggttcttaaccctctcatgcaacttctttacaaactctgacctagattccccttctttatgtataaaagaagtgtctagtggaaggggaatgaggtctaatggtgttaggggattgaacccatagacaacctcaaaaggggattgcttggtggttctatgaacccccatgttgtatgcaaattctacataaggaagatactcatt

SEQ ID NO: 2640 - DNA, 480 bp, Glycine max
  unsure (1)..(480): unsure at all n locations
ctaagcttgagaaaattcaacgacaataactntntactcggatgtcttattgagtcccgtaatatatcgagtcgctcgaaattgaataccgaagcgctgagcaaattcaaacgacaataactntttactcggatgtctgattgagtcccgtaatatatcgaaaagctcgaaattgaatgttgaagctctgagcaaattcaaacgacaataactttttactcggatgtctgattgagtcccgtaatatatcgagacgctcgaatgtgaatgtcgaagctctgagcaaattcaaacaacaataactttttactcggatgtctgattgagtcccgtaatatatcgagatgctcgaaatggaatagcgaagctctgagcaaattcaaacgacaataacattttactcggatgtctgattgagtcccgtaatatatcganaagctcgaaaatgaatgttgaagctctgagcaaattcaaacgaca

SEQ ID NO: 2641 - DNA, 412 bp, Glycine max
agcttctacattcaatttcgagcttttcgatatattacgggactcaatcggacatcccgagtaaaagttattgtagtttgaatatgctcacggcttcggtattccatttcgagcgtctcgatatattacgggactcaatcggacatccgagtaaaaagttattgttggttgaatttgctcagagcttctgtattccatttcgagcatgtcgatatattacgggactcaatcagacatccgagtaaaaagttattgtcgttgcaatttgctcagggcttctgtattccatttcgagcgtctcgatgtattacgggactcaatcagacatccgagtaaaaagttattgtcgtgtgaatctgctcagagcttctacattcaatttcgagcttttcgatatattacgggactcaat

SEQ ID NO: 2642 - DNA, 384 bp, Glycine max
  unsure (1)..(384): unsure at all n locations
agctntggagtggaaatatttgaaaatagtgtctagcgtgtaaatagaatagaatagaatattttcatgtctagttctacttttctttattatatattttttgtgaaactaaaagatgctctcttttattttatgccctgttttgtttatacacaaaatataaaatatattttttgcgttatactctgtcttattttaacacgttaatcaaatgcaatcttaaaaccactaaccaaagattatctaaaagcaaatgaaatgggagagaaaatggaataaaaaattgaaggaatctacatatatattgttaagtcatcgaagtctcacatgatggaatcttgaagaanagagcggctaatatctatctatctctctctctctctc

SEQ ID NO: 2643 - DNA, 453 bp, Glycine max
  unsure (1)..(453): unsure at all n locations
agcttagtacttggaactcagacattcgatcgactagcctgtctatgctaggaaaaaggtatgcatccttagggcacgccctgtaaagatcagtgtagtcgatgcacattcgccatttttgttggcctttttgatcatgatgaagttagcgagccaagtggaatacctaacttctttgatgaagttggcttggaggagcatgtctacttcttctctgactgttttgtgtcattcttctctcatcttactcttcttctatgatatcggtttggcttgggaacaaatagtgagcttatggcagataatgctggggtagattcccgacatgtcaaatggctgtcaagcgaataggtccgtgttcttgtgtangacatcaatgattcgtctatgcttatggctggtgaagtccctgttgagctgcgtacactacccgggctggggttcgagctgtag

SEQ ID NO: 2644 - DNA, 435 bp, Glycine max
  unsure (1)..(435): unsure at all n locations
ntgtgaagctcctgtnttagctntacccgattntactcaaccatttgaagttgaatgtgatgctagtggagttggcattggggctgttttgatacaaaacaaaaggcctatagcttatttctcggagaaattgggaggagccagattgaactattgcacctatgacaaagagttctatgccattgtgagagctcttgatcattggaatcattatttgcgttctaatcactttatattgcattcagatcatgagtcattgaagtatatcaatgggcagcagaagttgagtccaaggcatgctaaatgggttgaatttcttcaatcttttaatttctcttcaaaatacaaggatggtaagagtaatgtggtggctgatgcactttcaaggaggtatgctntaatttcaattcttgaaactcgtttacttggttttga

SEQ ID NO: 2645 - DNA, 445 bp, Glycine max
  unsure (1)..(445): unsure at all n locations
tgtcanaaacaaacatactaaaaggataaaacttaacaattaaagcatgatccattatcatcacatatatgagataccatgtaaaaatcatagataaagcaagtcctagaattctcataatagaacagctaataataataatcaattcattaaccatttcataaaagctcaatcatcacacactatcatcttcatcagtccatcaatcatcaaataacacaatatttctatgactcaacaagtaacatatcattttcaagtcgcaattatcaatgtacatgtctatctatcacaattaacccaaacacatcccttaacatagcacaattaacccatcttcatcggtccattcctgttagtcaccaccgataacctttagcactaggttgagggcccaccaagcaccctcaacttatgtgtctactcacatgcaatgtcattcatc

SEQ ID NO: 2646 - DNA, 350 bp, Glycine max
tcgattaccagaacgaaagaatgacaaacagctgctgactagggtttagaattggaacgttgaacatgtaatcgattaccatatgcatgtaattgattatcagcgactgcactttggaaattcagattcccagtcctacatgaaattctgatatccagtggacagatgtcgtacacgatgtgacgacatcacgcttcagaacatgcagtttatatgtgtccgtatgagacagattacacaagtaaataacacatgagaatcgttacccagctctggcagcctcacctacatctggtggctaccaaccgggaggaaaccactctaatagtgtagacaacgtcaacagccct

SEQ ID NO: 2647 - DNA, 468 bp, Glycine max
  unsure (1)..(468): unsure at all n locations
agcttgcctcanaataaaggatttcaaagtcatgcaatgctctagtaatcgattaccaggaagtgtaatcgattaccagaaggaaagaatgaaaaagagctgttgaaaagggttttgaatttgaattttgaacatgtaatcgattaccatatgtttgtaatcgattaccagcaacggaactttggaaattcaaattcaaaagtcataactgaaattctgataccaggggacagatgtcgtacaggatgtcacgacatcacgcttcagaacatgcagtttatatgtgtccgtatgaacagattaaacaagtaaataacacaagagaattgttaacccagttcggtgcaacctcacctacatctgggggctaccaagccagggaggaaatccactctcaatagtgttagttcaaggtctaacagcccctgtttacaaccttctcacctaaccactacccgtgcgatctct

SEQ ID NO: 2648 - DNA, 454 bp, Glycine max
agctgttaaaagatattacactccaataaaatttggactaagctttttaaattatcgtttgaagctaaaaaaaaatatagtttgtactcttacgtctttttaattaaagcttacgtataagtgcaagcaaacactatattagtaaaagcttataaactttcaaatagtaaaagttcatataattcacgtgtgcatatatatactgataaaaaaatattaactatacataacagaacttaataaattataactctatcttgaaaaactattaaatatttttttcaatgtttcctatacaaaattggcaatttctatctttagtttcctatacaaaatccaaacgataatatactacctgcttctcatatatttcaatgtttaatgttattgcacaaagattaaacaacatttaataaaattaaaattggtatacttagattaaaataccctcatt

SEQ ID NO: 2649 - DNA, 458 bp, Glycine max
agcttcatgcttatgtatgtatttcaaaacttcattactattgttcaagacatacaagtgagctcgtaacaaatcttctacacttggagtgatcacatgcagtcctcttaaacccttaccacccactctgtcatcatgccgagactcaggaaggccaacaggtttagccttctcattatattctgaacaaaattcaatggcttcttctgcaatgtacctctcaacaatagatgctcctagacaataaagattctttgtatacccttttaagatcttcatgtatcgctcaaccgggtacatccaccgtagataaaccgaaccacaacatttgatttctctgactagatgcacaatcaagtgaatcatgatgtctaagaaagcaggggaaaatacatctgcaactggcacagtataattgcggccttattttccaactgatcaaacttgacaggatcaat

SEQ ID NO: 2650 - DNA, 459 bp, Glycine max
  unsure (1)..(459): unsure at all n locations
ctaagcttaacatcagactacttcaggtgctggaactacttcacatggacttgatggggcctatgcaagttgaaagccttggaggaaagaggtatgcctatgttgttgtggatgatttctccagatttacctgngtcaactttatcagagagaaatcagacacctttgaagtattcaaggagttgagtctaagacttcaaagagaaaaagactgtgtcatcaagagaatcangagtgaccataggagagagtttgaaaacagcaggtttactgaattctgcacatctgaaggcatcactcatgagttctctgcagccattacaccacaacagaatggcatagttgagaggaaaaacaggaccttgcaagaggctgctagggtcatgcttcatgccaaagaacttccctataatctctgggctgaagccatgaacacagcatgctacatccacaacagag

SEQ ID NO: 2651 - DNA, 431 bp, Glycine max
  unsure (1)..(431): unsure at all n locations
aaactaagcttttattttataaatgaaataatttgggccatccatggactcctctaagataataccataatttcttgcactgaattgttgggagttggaagccatcttctcaatcaaattcctagcctcagcaggggtcatatcaccaagagctccaccactggcagcattaatcatactcctctccatgttactaagttgcctgatgcctagtactcatgcaagctctctccactaagttgcctgatgcctgaaatgtcttttctgatggcagtggtcctagatgcagggaagaatttctccgagaacaccctcttaaggtcatcctagctgaaaatggacctgngagcaaggtagtacaaccaatcttttgccactccctctagagaatgaggaaaagcctttagaaatatatgatcttcctagacatc

SEQ ID NO: 2652 - DNA, 414 bp, Glycine max
agcttgtgtcatacttcactgtgacaatcaaagtgtcattcacttggcaaatcaccaaatttaccatgagaggacaaatcatgtagatgtgaaactacacttcatcagagatgtgattgaatctgagaaggtgaaggtggagaaggtttcaacagaagaaaacctggttgacatgttcacaaagtccctatctagtgtcaagttcaagcactgcctggacttgatcaattttgaagatgcctaaggaagtctaatagaagtgcagccctgaatacaaagatatacacttgctggtttggaatcaaggtggagatttatggtgtgtgactcacaattacaaaaggcacaagtgtgaaggtttcaagtggtgctgtcataactaacttcagttattgaatctagttgtcataactg

SEQ ID NO: 2653 - DNA, 324 bp, Glycine max
  unsure (1)..(324): unsure at all n locations
ctaagctctcagcanattcaaacgacaataactttntactcggatgtctgattaagttccgtaatacatcgagacgctcgaaattgaatgttgaagctctcagcaaattcaaacgacaataactttttactctgatgtctgattgagtcccgtaatatatcgagacgctcgaaattgaatgttgaagctctcagcaaattcaaacgacaataactttttactccgatgtctgattaagtcccgtaatacattgagacgctcgaaattgaatgttggagctcttagcctattcaaacgacaattactttttactccgatgtctga

SEQ ID NO: 2654 - DNA, 456 bp, Glycine max
  unsure (1)..(456): unsure at all n locations
agccttggagtntccaagtgccaattcgtcttcttctttattccagtcttcttctggcttcaatccatcagtgggctttccttctgtgtccagcatcttgggatgttcccagcctttgatgacagctttccaggttctgctatccagtgatttgaggaaggccaccatccttgctttccagtattcatagttggttccatccagaattggtggtctgttcactggtcctccttctttctccatgttcatcagaatttatctccctaggtctcactcagtgatttcgagtgcctgctctgataccaattgaaattctgataccaatgccagatgtcgtacaggatgtcacgacatcacgcttcagaacatgcagattatctctgagtgtatgaacagattaaacaagtaaataacacaagagaattgtaacccagttcggccaacctccctacatct

SEQ ID NO: 2655 - DNA, 455 bp, Glycine max
  unsure (1)..(455): unsure at all n locations
cactagagaggacgtaagcttgtatcaaattcaaacgacaataacgttntactcggatgtttgattgcgtctcgtaatatatcgagacgctcgaaattgaaaacggatgctcgtagcaaatgcaaaccgcaataacttttaactcggatgtatgattgagtaccataatagatcgagacgctcgaaattgaaaaaagaagttctgagcaaattcaaacgactataactttttactcggatgtctgattgagtcccgtaatatatcgaggagctcgaaattgagaacagaagctctgagcataatcaaaccaaaataactttatattcggatttgcgattgagtcccgtaatatatgaagacgctccaaattgaaaacagaagctctgaacacattcaaacgacaatgactctttactcggatgtccgattgagtcccgtaatatatcgagacgca

SEQ ID NO: 2656 - DNA, 438 bp, Glycine max
agctttgagccaattcaaacgacaataacgtttttctcttatgtctgattgagtcccgtcatatatcgagacgctcgaaattgaatattgaagctctgagccaattcaaacgacaataactttttactcggatgtctaattgagtcccgtaatataacgagacgctcgaaattgaatgttgaagctctgagctaatacaaacgacaataactgttttctcggatgtctggttgagtcccgtaacatatcgagaccctcgaaattgaatgttgaatctctgagccaattcaaacgacaataaatctttactcagatgtttgattgagtgtcgtaacatatcgagacgctcgaaattgaatgttgaagctctaagccaattcaaacgacaatcaacttctactcggatgtctgattgagtcccgtaatatatcgagacgc

SEQ ID NO: 2657 - DNA, 456 bp, Glycine max
cttgatggtgtcgagaagaaatcacatgtttgtcatcatcaaaaagggggagaatgtgaatgtatgtatacatgattttgatgatgccaaagaaaaatcaaacaaggttgcttcaaatgataagcatttgcttcaagaataattcaagagtgcttcaacaaacaaagccttgtttcaagattcactaaagaccaagccttgccttaaaacaaagtgctttcaagacatgcaaggctctggtaatcaattaccaggaagtgtaatcgattaccagaagacagggttgagaaatagctgttgaaaaaggttttgaatttgaattttcaacatgtaatcgattaccatatgtctgtaatcgattaccagcaacgaaactttggaaattcaaattcaaaagtcataacccttcaaattataactgtgtaatcgattacacaaacattgtaatcgattacc

SEQ ID NO: 2658 - DNA, 475 bp, Glycine max
  unsure (1)..(475): unsure at all n locations
agctntctccactaagttgcctgatgcctgatatgtcttttctaatggtagtggtcctagatgcaaggaagaatttctccaagaacaccctcttaaggtcatcccaactgaaaatggacctgcgagcactgtagtatatccaatcttttgccactccctccagagaataaggaaaagcctttataaagatatgatcttcttggacatcagggggctatatggtggaacaaacaatatggaactccttacgatgcttatgatgatcttcacctacaagaccatgaaacttgggcagcaaatgtattagtccagtcttgagagcatatggaacaccctcatcaagatattgaatgcacaagctttcgtaagtgaaatcacgtgcatacatctccctatgagtacttatatgaggtggaagttgagccgtgctcttagtataaaaattagtagtggaatgttcaacatcagaatattc

SEQ ID NO: 2659 - DNA, 437 bp, Glycine max
  unsure (1)..(437): unsure at all n locations
tnggattttgtttggggtgttccaaacttaatttanggactatacttaattttgtgatatgtttgattactgtagaaaaaaggttcatttgattatatttatccaagaattttggactgtttcaaactcaattttgtgacattttgattattctaaaaagtaccttcacttggtcatatttatccaaaaaattaattatagattagtgaattgtttttcatgtaaatttaatgtttaccacattaacggttgaatgattttaaaaattgatcattaagtgattattatcgagtattctcatctatanaaatgaattaggcttatgattaacattatcaagatagactttcttttattgatattaacaatatanacatatcaaataagttgattatccaacgagacttganttttttatcagtaaatattaattatta

SEQ ID NO: 2660 - DNA, 366 bp, Glycine max
  unsure (1)..(366): unsure at all n locations
agcttctngacttgaacttccacttcatttctattctcactcccattcaccaactcgaccgcaacagcttctgcattgacgacactaacgaagccttggctgttaacttcatgctccagttgtataacctcctcgacgagcctcccaccgatgttgacactgcgctcacgttggccaagtctttgaaccccaaaattgtcacccttggcgagtacgaagcaagcgtcacacgtttcggctttgtcaaccgcttcaagactgcgtttaagtacttctctgctgtgtttgagtctctggagcctaatttggccgcggactcgccggagaggtttcatgtggagagtcttcttctcgggcggcgaatcg

SEQ ID NO: 2661 - DNA, 410 bp, Glycine max
tgaaggaaaactgaatgcattggttaacttggtaacctagctgtccttgaatcagaaatctgtacctgttgcaagggtttgtggtttgtgctcctctgctgaccaccatacagacctttgcccttccatgcagcaacctagagcaatcgagcagcctgaagcttatgctgcaaatatttacaatagacctcctcaacctcagcacaaaaatcaaccacagcagaacaattatgacctctccagcaacaaatacaaccctggatggaggaatcaccctaacctcagatggtccagccctcagcaacaacaacagcagcctgctccttccttccaaaatgttgctggcccaagcagaccatacattcctccaccaatccaacaacagcaacaacctcagaaacaaccaacag

SEQ ID NO: 2662 - DNA, 369 bp, Glycine max
  unsure (1)..(369): unsure at all n locations
ttgngttcgatggccccaatgacatctatcccccacatggaaaaaggccaaggggcggacataacattcagaggatgtggcggaacattgacattgtccgcgtatgcttgacatttatgacatttccttacatgggcgcagcaatcgctttccatagtgagccagtaataaccggccctaaggatcttcctggccatagcatgcccattggcatgtgtcccaaatgaacccccgtggatttcctcaatcatgcagtttgcctctttggcatctacgcatcgtatgagggtcatgttgtggtttcgtttatacaggatggtaccacttacaaagaaaccaatagccaatctccttaacgttcttttgtca

SEQ ID NO: 2663 - DNA, 470 bp, Glycine max
agcttcagcctgaatccataaagactgtgagcctttgattattcgaaattggaacagtgacaacccgatacattgtgaggccattaaagaaaaatcaggtcaatacaacaggggaccctatatgaatttgaaacaaagtataaaatttaagcaaacatgtttgacatagacacaaaattggaagagacgctggttaagtacctaatcataccaccataaactacacccctctgtggatctttccagcatctgaaaaggtcttgaatgagttcttctcgatgaggctgagcacaaaccagtcctgcatactttgttacttcaggccagtcctgggaggctacaacctggattaccgtaatcagtatatatcaaacatagggcatcccttagttgtatatatgagtttggaaatgcttacagcagcaatggatggacaagaatcctctcctgattctggatgaagtacatcg

SEQ ID NO: 2664 - DNA, 438 bp, Glycine max
  unsure (1)..(438): unsure at all n locations
agctngcaccaacaattggtattgctgttgatcatcgctttaagaaccgttctttggaaagtctgcaagctaatgtgcagaggctgaaaacatacaaggccaaattggttgtgttcccaagacgggcacagaaggttaaggtaatacagatgttcaattatctgttttgattgtgtgggcattttcttaattctgatatcatcatttctggtgaaaggtaaaaaggaatgatgtttgtgtgaaatctgactgttgttttattgtaggctggtgattctactcccgaggagcttgcaaatgcaacgcaagtccagggttctttcttgcctattgtgagggagaagccaactgttgaacttgtaaaggttacagatgacatgaaggctnttaaagcttattacaagcttcgacttgaacgcacaaacaaacgccattatg

SEQ ID NO: 2665 - DNA, 434 bp, Glycine max
  unsure (1)..(434): unsure at all n locations
gagcaaattctaacgataatagcttgttactcggatgtcctaattaattccgtaatatatcgagacactcaaaattgaaaccaaaagctctgagcaaattcaaatgacaataactttttactcagatgtctgattgtggccagtggtatatcgagacgctggaaattcagaatagaagctctgagcaaaatcaaacgacaataaatttttactgggatgtccgactgtgtcccatagtatatcaagacgctcaaaattcaaaacaaaagctctgagcaaattcaaacaacaataactttttactcggatgttcgattgtgtcccgtagtatatcgagacgctcgtaattgacaatagaagctctgagcaaattcgtacgataatagctatntactcggatgtccgaattaatcccgtaatatatcgagacactc

SEQ ID NO: 2666 - DNA, 470 bp, Glycine max
  unsure (1)..(470): unsure at all n locations
agcttctntgagaaaacttccttgagaagctagatcttatctacgcacacccctctaataactaagcttacctccttgagaagcttccttgaaaagattcctaaagaagctagagcttagctacacacacctctctaatagctaagctcacctccttgagatgagaagctagaacttagctacactccccctataatagctaagctcacccctatgacaaaatacatgaaaatacaaaaaaagtccctactacaaagactactcaaaatgcctcgaaatacaagggtaaaaccctatactactagaatggccaaaatacaaggcctaaatgaaggaaaaaacctattctaatatttacaaagataagcgggctcatacttagcctatgggctcaaaatataccctaaggctcatgagaaccctagggccttcccttggatctctgggccaatctacttggagtcttctat

SEQ ID NO: 2667 - DNA, 318 bp, Glycine max
  unsure (1)..(318): unsure at all n locations
tctagtctncaatttgaacgtctcgatatattacccgattcaatcggacatccaagtaaaaagttattgtcgtttgaatttactatgagcttcgattttcaatttggagcgtctcgatatattacaggactcaaccggacatccgtgtataaagttattgtcaattcaattttctcagagcttcggatctaaattttgagcgtctcgatatgttacgggactcaatcggacatccgagtataaagttattgtcatttgaatttgctcagagcttctagtctcaattttgagcgtctcgatatattacacgactcaatc

SEQ ID NO: 2668 - DNA, 424 bp, Glycine max
  unsure (1)..(424): unsure at all n locations
agcttccatttntcaattggagcgtctcgatgtattactttactcaatcggacatcctttgataatgttattgtcgtttgaatttgctacgagcttccgttttcaatttggagcatctagatatatttcgggacacaaccagacatcctggtataaagacattgtcgtttcaatttgctcagagcttcgattctaaattttgagcgtgtcgatatattacgggactctatcggacatccgagtaaaaagttattgtcgtttgaatgttctgcgagcttccgttttcaatttggagcgtctcgatatatgacaggactcaaccggacattcgtgtataaagaaattgtcatttcaatttgctcagagcttctagtctcaatcttgggcgcctcgatatattacccgattcaatcagacatctgag

SEQ ID NO: 2669 - DNA, 459 bp, Glycine max
  unsure (1)..(459): unsure at all n locations
aactaaaactaaacttaagataaagatggcctcagcaaactccttatttctcaaaaggaattctatcaatagacctccaatctttaatggagagggttaccattactggaaaacccgaatgcaaatttttattgaggcaatagacctaaatatttgggaagccatagaaatagggccttatatacccaccacagtagaaagaattacaatagatggcagttcatcaagtgaaagtataactatagaaaaacctacagatagatggtctgaagaggatagaaaacgagtacaatacaatttaaaagccaaaaacataataacatctgccctgcgaatgaatgaatatttcanggtttcaaattgtaagagtgctaacgaaatgtgggacactcttcgattacacatgaaggaactacagatgttaaaagatctaggataaatgcactaactcatgagtat

SEQ ID NO: 2670 - DNA, 428 bp, Glycine max
  unsure (1)..(428): unsure at all n locations
agcttgtagggttaaagtctcacgattgtcacgtgctcatgcaacaattgttagtcgtggctatacgagacatcttgccaaacaaagtcaggttaacgataactcgcctgtgctttttcttccatgctatatgtagcaaagtcattgatccagtaatgtttgatgagttggaaaatgaggccgcaattatactgtgccaattggagatgtattttccccctgctttctttgacatcatgattcacttgattgtgcatctggtcagagaaatcaaatgttgtggtcctgtttatctacggtggatgtacccggttgagcgatacatgaagatcttaagagggtatacaaagaatctatatcatccagaagcatctattgttgagaggtacattgcagaagaagccattgaatntttgttcagaatactt

SEQ ID NO: 2671 - DNA, 455 bp, Glycine max
tctagacaaaggctatcctcttctgaaacttccagatgacatttaccctctgctaaagctgaaaatggcgacgaggaatgacgagaagcagatcccatacgagagtgtttgatgctgatgtttcaaaagaaaagaaaaagcctaaagaaggtgataatgttgttgaagaagctccctcagatataccatctctaatagagttgaagtggatctaatatgaactaatgattcggtaattgattccctacttgttgtctaattttgcttgttcaatccgctgcttgtgacatcctctaccccacacatatatgtactaataataaaagaaataggaatgaggaattaattaaatgttttaaaacacatttaaataaaaacatttcaaaagagtaaaagattcacattcacttttctaatatcataatagaacttgtccaaataaataacaaaattat

SEQ ID NO: 2672 - DNA, 462 bp, Glycine max
  unsure (1)..(462): unsure at all n locations
agcttcaagaattatggcctcatcaaactacttgtttctctagggagattctataaatagacctcccatctttaatggagtgggttaccactactggaaaacccgcatgcaaatctttatagaggcaatagatttaaatatttgggaagccatagaacaaggaccttatgttccctctataatggccggaagtgcaacaatagataaacctagagcagattggactgaggaagacagaagattagtacaatataatttacaggccaaaaatattattatatctgccctatgaatagatgaatactctacggtttcatattgtcaaagtgataaggatatgtgggatacactacaagtaacacatgaaggcacgacagatgttaaaagatctangataaacactttaactcgtgaatatgaactntctangatgaatgtanatgaaagtatacaagacatgca

SEQ ID NO: 2673 - DNA, 434 bp, Glycine max
  unsure (1)..(434): unsure at all n locations
ttgngtggagtgacaaaagcttcactgaattgcttgtcatgttgaagaagatgcttcttgaaaataatatgttgctgaaaaatcactacgaggcaaagaatatcgtatgtcctatgggcatggagtaccagaaaatacatgcatgccctaatgattgcatattgtacagaaatcagttttccgacatgcacaaatgccccaaatgtggtgtatcacggtacaaagtaaatgatgatcaaggtagtcaacatgcaaccacaaccaatgatcgtccaacaaaggtgtgctggtatctttcaataattccaaggtttaagtgattgtttgctaatgaacatgatgccaaaaatcttacatggcatgttgatggcaaagaaagtgatggattgctccgacatctggctgattcaccccaatggaagaccattgatcga

SEQ ID NO: 2674 - DNA, 445 bp, Glycine max
  unsure (1)..(445): unsure at all n locations
ttgagccaattcaaacgacaataactttntactcggatgtctgattgagtcccgtaatataacgagaccctcgaaattgaatgttgaatctctgaccaaattcaaacgacaatagctttttactgggatgtctgattgagtcccataacatatcgagacgctcgaaattgaatgttgaacctctgagccaattcaaacgacaataacgttttactcggatatctgattgagtcccgtaatatatcgagacgctcgaaattgaatgttgaacctctgagcaaattcaaacgacaataactntttactcggatgtctgattgagtcccgtaatatatcgagacgctcgaaagtgaatgttgaagctctgagccaattcaaacgacaataactttttactcggatgtctgattgagtcccgtaatatatcgagacgctcgaaattgaa

SEQ ID NO: 2675 - DNA, 459 bp, Glycine max
  unsure (1)..(459): unsure at all n locations
agctnggtatccatgaggattcatataacaaggtaaagattgttgaattgctcaagtactactccaccaagagtggtgataagatgaggaaggtcagagtgaaatctactacatcacaggtgaaagcaagaaggtcattaagaactctccattcttggagaagttgaagaagaatggtgtactgtccaagacccacaaaatttatgtgacatcctacttggcccttacaaacacatgtcaaccttccacgtcagccctgctacaggagcacagacgcctgactcttagtagtcgggctccccaacaaataggttatctcaaacctaactaatattcaaatatatttgaatatcttatctattggcaggtattaaattatctataacatcatattatctacaaggtataaatgtatgattatcttctacctttgtctataatccaaatgtntatctctaa

SEQ ID NO: 2676 - DNA, 429 bp, Glycine max
  unsure (1)..(429): unsure at all n locations
agctntaaggtagatattgggcttatggttctttttctagcccacttatctttgtacatattagattagggtttcattatttttggaccttgtatttaaggctccatagtgtagggagggtatcctagtaatgtaggatttttcatcccttgtatattagggcacctagactagtttttgtattaggggtagttttctaatttcacatgcattaagtgcactatttgatgtgtgtgtgttgggagagaaatttaattgaattgggagaagcccaatccaactaaatattggaacttcctaaggnggaggtgagtatttgcttgttacaccccattgccacatcatatagtcacactctgtgcatgtccttcatgttntacatgcctcatgacacctaagcaaaactagcagagaatcttggacttgatc

SEQ ID NO: 2677 - DNA, 466 bp, Glycine max
  unsure (1)..(466): unsure at all n locations
agctataaatntatggtataagccataacaccatatattattacaaaggtaagaaaaagtcaaataaaacaatcaaactttcccaaagatggcactctttctacagctactccaagatgctatagaataaagtcaaagagattagcacaaaataggacaaatgaataaaatgataagttaacataaactcattgtcataatcttttatttatttttataattattacataactcccttgcttctaattccacttccaaacatatcctagatatttttttatttataaaacatnttttcataataattaatggatttaatcaacaaataactaacaatagaatntaataatttagttatgaaaaaaatatcaggagtacataatatttgccgttcntatttgagaaggacacaatatttagccagaactttaagacacacaatgattaaccattgagtaaacacata

SEQ ID NO: 2678 - DNA, 452 bp, Glycine max
actaagcttatggaaactttccaaagtcatctatctataactattccatacaagtacgcttaaatatgaagtttgtaagtgatggatgactgaaaaatacatcttatttatattgataatactaattaattcttttaggtcatgcttagatgtacataccatgcccaaacaacatctaaatctctatcattttggtgtgattcgattgagtattacattgctgttgatatctacttaattcttattttcatttatctaaaattaaagattatgtttttgaagcaatgcaatatttgtgtttgatatttctttatattctaagatgatatattatcggtagcaaccatacacatattattgctcttacttcatcttagtttaaaagaatttgcacaataaataataaaaatatttgttcgttactctcttagtaaactctaaaatataaaaat

SEQ ID NO: 2679 - DNA, 467 bp, Glycine max
  unsure (1)..(467): unsure at all n locations
agaaactcgagcttatatgacaatggtggataactcccaccttggaagctctgattatgtgatagtgctaaaatgaaggcctggtattgagattcatcaattattcttaggagtttcatttctattcaccatcaatgtaaaattttttgtattatcaatcaataaaaaatcatattagataattatcagaaaaatcaataaacttattatatatgacataatagtttaagattgataacaatgtaaaagtcaataaatactatgagtttctcaatgtttttagtcacaacttggcacttcccatggcaggtcacaaagctcatggatagggtggaaaaaacattcactaagcacttctacaactcanatcgtaataaagccatgagcatcttaagaccaaaagcaaaaagagaaagacatagagttacattttccacgggtaagcaccaagatattcatgtatatat

SEQ ID NO: 2680 - DNA, 442 bp, Glycine max
tgtccaccgtagcctttgccaatattgcattataaattattgatgtgaaactttaattatgatggaacaacaatgctaaaaatacttaagtttaagtaactgcacataaggtttgtccttctaagaatagttggagagtctgatattcttattaaaattgaaattggttttgcaattgcatgcaggcctgtatcaggggcttccatgaaccctgcaagaagtattggtccggcacttatcaaacatgtttaccaagggttatggatatacgtagttggtccaattgttggatccatagctggagcacttgcctataattttcttagatccccatacaagccaccatcagaataaaccacatggctggctttcttgaagagcagtgaataaaccacatgctgtctaataatgtacccagtgccaaaaaactcctcgctatatg

SEQ ID NO: 2681 - DNA, 437 bp, Glycine max
  unsure (1)..(437): unsure at all n locations
tgtgaagctcctgttntagctttacccgattntactcaaccatttgaagttgaatgtgatgctagtggagttggcattggggctgttttgatacaaaacaaaaggcctatagcttatttctcggagaaattgggaggagccagattgaactattgcacctatgacaaagagttctatgccattgtgagagctcttgatcattggaatcattatttgcgttctaatcactttatattgcattcagatcatgagtcattgaagtatatcaatgggcagcagaagttgagtccaaggcatgctaaatgggttgaatttcttcaatcttttaatttctcttcaaaatacaaggatggtaagagtaatgtggtggctgatgcactttcaaggaggtatgctttaatttcaattcttgaaactcgtttacttggttttgagac

SEQ ID NO: 2682 - DNA, 456 bp, Glycine max
  unsure (1)..(456): unsure at all n locations
agcttatatatatgtnttattaatatacttattttaatctgaacgtctttataattctgattgtatttatgtgctctcaatatattgatatattataaagttgaaaattatattcatccaatatgattttatgacttaacatgttaagaaagctaactagtaatattttttaatcacatatcacattctaatttgcataaaagagagacataaaatataataacacactttaatttatttataagaataatatagaataatataaaaaatattatgaaatcataacttttttgtaaacgaaaattagactctctttagttgtaggtccaatatcattgcacctttaaacgacgtttaagacctgaataganacatataatacatcgacctgatcaacatatgtgaattgctctaacttaatgatcacagtgttatagcaagtatcatcttcattct

SEQ ID NO: 2683 - DNA, 455 bp, Glycine max
  unsure (1)..(455): unsure at all n locations
gaaactaagcttcatcactttggcaagaacatttggaggagatcaagtagtggtcaatacaaatagagtaatggggacatagtaagtacttaatgagtcacatattttcatattatgatgcaacccattttgacatccaaattttaattntgtgtgtctactgcagtggctatatgcctattgaatatgcattgatggatcttttttaatcaaatctaatgtgttcagctttggtgtacttgtattggagataattagtgggggaaagaataaaaaatttcacaactctcagcatcatcaaaattttcttagtcatgtaagattaaagtctatattaatttccttatcttgatgtattatttcaagttgcaatcatccaatactaactgttgtgtcctaattaaacatgcacgattctctgattcggatagctataaatggaaatgttaaaaatt

SEQ ID NO: 2684 - DNA, 419 bp, Glycine max
agcttgccttgccccttgatatatatgaaggactcatggtcactatgaatgacaaattccttgggataaagatagtgtagccatgttttcaaagctcgtactaaagcatacaactccttatcataagttgaatagttaagggtaggaccacttaacttttcactaaaataagcaattggatggccttattgcatcaacacagcctcaatcccaacatttgaagcatcacactcaatttcaaaagatttttgaaagtttggcaacgcaagtatgggggcattagctaacttttgcttaagaacattgaaagcttcttcttgtttctctccccatttgaaaccaacattcttcttgagcacttcattgagaggtgctgccaatgtgctaaaatccttcacaaatctgctataaaaacttgc

SEQ ID NO: 2685 - DNA, 392 bp, Glycine max
  unsure (1)..(392): unsure at all n locations
gggatccttaagtcacctgctgctgcagcttgtttccaanacaagttaaattatttttctagtcttcacaacctaactctagctttctctttcccatgtcaactatgcaacttgcaatcaaaatgaatggccttcccaagattacaacgatgtcagtatcttcatagatatccatgaccacaaagactgctgcgaagataaaatgctttaccctgaccaacacgtcttcaatcactccatagggcctgcggatggagcgatcaactaattgcatagtcattcgagtggacataatctctaactctcccagtcttctgcacatggaagaggcatcaaattaatgatggctcacagatcaatcagagtctttctcctctctattgaacaaggat

SEQ ID NO: 2686 - DNA, 433 bp, Glycine max
  unsure (1)..(433): unsure at all n locations
tgcttaactatgtatggcaaaatntcattactgttgttcaagacatacaagtgaacttgtaacanatcttctacacttggagtgatcacatgtagtcctcttgaacccttaccacccactctgtcatcatgccgagactcangaaggccaacaggtttagccttctctaagtattctgaacaaaattcaatggcttcttctgcaatgtacctctcaacaatagaagcttctggatgatatagattctttgtataccctcttaaaatctttatgtatcgctcaaccgggtacatccaccgtagataaacaggaccacaacatttgatttctctgaccagatgcacaatcaagtgaatcatgatgtcaaagaaagcacggggaagatacatatccaactggcacagtataattgcgggctcatttccaactcatc

SEQ ID NO: 2687 - DNA, 359 bp, Glycine max
  unsure (1)..(359): unsure at all n locations
aatagtgtctagcgtgtaaatagaatataatagaatattttcatgtctagttctacttttctttattatatattntttgtgaaattaaaagatgctctcttttattttatgccctgttttgtttatacacaaaatataaaatatattttttgcgttatactctgtcttattttaacacgttaatcaaatgcaatcttaaaaccactaaccaaagattatctaagagcaaatgaaatgggagagaaaatggaataaaaaatcgaaggaatctacatatatattgttaagtcattgaagttcacatgatggaatgttgaaaaaagagcggtaatatctatctatctctctctctctctctc

SEQ ID NO: 2688 - DNA, 432 bp, Glycine max
  unsure (1)..(432): unsure at all n locations
ttcgtgttaatggacgtgaataatacttccgattaccatnttctctctctctctctctctttctctcttctgtgggaggacccttgggcctcgaataccaagcataacactgttctacaactgtggttggtgatcaggtacgagatatgaagtatgaagtggcgtgggagcggcgagcgcaaagtaattgttgatgatggcgagaaagattatacacataaaacataaagactggatttagaattatgaagataggaattaaatacggatcataatattctcttatagaacatttaatcaaaattgaataatatcagattatgaaaaaccattgaactttaattaataagataagaattaaattatattatctgatgcgataatataagtcacgtgatatctcataattacataatataaatcatatcaata

SEQ ID NO: 2689 - DNA, 408 bp, Glycine max
  unsure (1)..(408): unsure at all n locations
agctntctgtttcaattggagcgtctcgatatattactgtactcaatttgacatccgaatataaagttttcttcgtttgaatntgctcagagcttctgttctcaattccgtgcgtctcgatatattacgggactcaatcggacatccgagtaaaaagttattgtcgtttgaatttgttcagagcttctgttttcaattgggagcgtcttcatatattacgggactcaatcgcaaatgcgaatataaagttattgtggtttgaatatggtcagagctttctgtctcaatttcgagcttctcaatatattacgggactcattcggacatccgagtaaaaagttatcgtcgtttgaatttgctcagaacttctgttttcaatttcgagcgtctcgatctattatgggactc

SEQ ID NO: 2690 - DNA, 510 bp, Glycine max
  unsure (1)..(510): unsure at all n locations
ccttgccccatgatatatttgagggacttatgatcactatgaatgacaaattccttgtgataaaggtagtgttgccatgttttcaaagcccgtactaaggcatacaactcctaatcataagttgaatagttaagggtaggaccacttagctcttcactaaaataagcaattggatggccttcttgcatcaacacagccccaatcccaacatttgaagcatcacactcaatttcaaaagatttttgaaagtttggcaacgcgagtatggnggcattaattagcttttgctacaaacattgannagctcttctcgtttctctccccatttgaaacgcaacattttcttgagcacttcattgagaggtgctgccaatgtgctaaaatccttcacaaatcgtctataaaaacttgctaagccatgtgtcgcaacctacccttcagcgggagggcgatgcgtgactcgtcggatgcgtgttccacgaaaggaatacgcgcggagtcgccactaat

SEQ ID NO: 2691 - DNA, 254 bp, Glycine max
tattctcaacagtcacatctttttatttgggtcttgaatggctatcaaagacctatatatatgtgacttgagacacaaatttgagaagagtttttcagaacaaaaaggtcttatcctcttaaaaagcataatcagttcatcctcttaaaaaattcttggccaaaacactcgtgattcaataaggaattatttgagtgctcaaattgttcaatctatctctttcaagagagaatacttcttctcttcttctttat

SEQ ID NO: 2692 - DNA, 312 bp, Glycine max
  unsure (1)..(312): unsure at all n locations
cgttaatccatggaagctcctaatatctcccacactnnttgnggtgggtcattcttggatggccttgattntctcaagttccacttggaacccatttctaccaactacaaaacctaagaaaactatattatctacacaaaaggtacacttctctatatttgcatagagggtgtttttcctaacgattgaaagaacttgcctgagatgtcctaagtgatcatctangctcctactgtacactaaaatatcatcaaaataaacaactacaaatctacctatgaaatcccttaagacataatgcataagcctcat

SEQ ID NO: 2693 - DNA, 388 bp, Glycine max
  unsure (1)..(388): unsure at all n locations
caagactactacagtcatttctagattaacacaattaatcaagcagtcaaaacgatatagacaagattaaaaaatgtgactttataaaccataacatcctagacatgtccactgtagcaaagattaaaatatgaaatacaaataaccaagcatttaacagcaaggcttcactgatatgtaaacctttaaaacaagctccttggttgtgtgtgttgctatggaaacactacgctgcacaatactagacactatctctttgatagctctgtccattgcaatgggtaccgctctgtaaaaaaataacaatacgaaatagtaactcagacatatagattcgaaaaacaagcagaacattaaagtgagcaccatacctctganaatgcatttg

SEQ ID NO: 2694 - DNA, 480 bp, Glycine max
  unsure (1)..(480): unsure at all n locations
agcttgtaggcctnggatcttcttcatcaatggagtcctttgcttcccgatgatcaatggaagcggaatggagatggaaaaaagatgattggagacgccacttcaaggagaagatgagtcaagaagaagctcaccatcataggaagccatggataagaacttgaaggtangagaagatgggtggagggagagggagagaaggagcacgaaattttgtgtcttanatgaggtctgaactctgaagtgtaattctcaaatgatcaaagttgaaaaaatgcacacacatggttgttatttatagtctaagtgtcacanaaattggaggaaaatttgaatttctattcaaatttcacttcaatttgaaattgaatnntgtggagtcaaatttgaagccaacaattcactaattatgattagtgaatnttagttgtggttcagcccactaatccaaaatcaagtccaagattctccactaagtgt

SEQ ID NO: 2695 - DNA, 266 bp, Glycine max
  unsure (1)..(266): unsure at all n locations
agaatcaatgacaatgcttacaaagntgagctgcccggtgagtataatgttaattccaccttcaatgtctctgatttatctctttttgatgcagatggagaatctgatttgaggacaaatccttctcaagagggagagaatgatgaggacatgaccaagagcaagggcaaggatccacttgaaagacttggagggcctatgacaagggctagagcaaggaaagccaaggaagctcttcaacaagtgctgtctatactatttgaata

SEQ ID NO: 2696 - DNA, 524 bp, Glycine max
  unsure (1)..(524): unsure at all n locations
agcttccttaagaagattcctaaagaagctagagcttagctacacatacctctctaattgctaagctcacctccttgagatgaanagctagatcttagctacacaccccctataatagctaagctcacccccatgacaaanaaacatgaaaatacaaaaaaaaagtccttactacaaagactactcaaaatgccccgaaatacaaggctaaaaccctatactactagaatggccaaaatacaaggcccaaacgaaggaaaaacctattctaatatttacaaagataagtgggcccatacttagcccatgggctcaaaatataccctaaggctcatgagaaaccctgggccttcccttagatctctagcccaatctacttggagtcttctacccaatgcccttgcgggataggattgcatcattccctccaccttggaaaggatntgacctcanatcccgaggttcttcatactctgggctccttccctcaacacctggtaaaagaacanaaacatatgtattag

SEQ ID NO: 2697 - DNA, 415 bp, Glycine max
  unsure (1)..(415): unsure at all n locations
gcttgtgggaatttgtgatagtgaatttgccggagatgttgatgatatgaaaagtactaccagatntgtattttttatgggtgattgtgtttttacatggagttctaagaagcaaggcattgtgacactttctacttgtgaagccgagtatgtagctgcaacttcttgcacatgtcantgccattggctaagaagattgttggaggaacttcagttgttgcaaaaggaaagcacacagatctatgttgataatagatctgcacaagagcttgccaagaatccggtgtttcatgaacgaagtaagcatatagatacaacgtatcatttcattagagagtgcattaccaagaaagacatagaattgactcatgtgaaaactcaagatcaagttgcggatattntcaccaagcctctc

SEQ ID NO: 2698 - DNA, 411 bp, Glycine max
  unsure (1)..(411): unsure at all n locations
agctanacattatactntgagcgtctcgatatattactgtactcaatcagacatccgagtaaaaagttattgccgtttgaattggctcagaggttcaaaattcaatttcgagcgtctcgatatattacgggactcaatcagacatccgagtaaaaagttattgtcgtctgaatttgctcatagcttcaacattcaatttcgagcgtctccatatattacgggactcagtcagacatccgagtcaaaagttattgtcgtttgagttggcctagaggttcaacattcaatttcgagcgtcccgatatattacgagaatgaatcggacatccgagtaaaatgttattgtcgtttgacttggctcagagcttcaacattcaatttcgagcgtgtcgatatattacgggactcaat

SEQ ID NO: 2699 - DNA, 494 bp, Glycine max
  unsure (1)..(494): unsure at all n locations
agcntggtatctccttcttcactacatcaagaatcaccatgttgagtcttctctgtggctgtcttactggtttagctccatcctctaaatntattcgatgcatacatgtggatgggctaataccaggaatgtccgccagggtccagcctatagccttcttattcttcttgagaacagacaacaacttctcctcttgctcatcagcaagggaggcagatataatcactggaaaacttttgctatcatccaagtaagcgtatttcatatttgatggcagaggcttcaattctggtgtggtcggctggatagtggtagaaagagatggtttcttcacctgtacctcataaagaaagtcagaggtatgtgtacttcctanaatatggttagtcctatctgactctataaaatcaatctcaagaggtaaaacaccaccaccagacatgcaatcaatatcacttctagattcactctcagcatcagattcagacctatga

SEQ ID NO: 2700 - DNA, 231 bp, Glycine max
  unsure (1)..(231): unsure at all n locations
ttctcaaggtccacttggaccccatttctatcaactacaaaacctaagaaaactatattatctacacaaaaggtacacttctctatatttgcataaagggcgcttttcctaaagactgaaagaacttgtctgagatgtcctaagngatcatctatgctcctactatacacttaaatatcctctaaattaacaactacgaatctacctatgaaatcccttaagacatgatgc

SEQ ID NO: 2701 - DNA, 459 bp, Glycine max
  unsure (1)..(459): unsure at all n locations
agcttctgctccaggatatactntgagctactatggttattcttgataacaaaatgattaggcagtaaataatgtctctatttttgaactacaaggaccactgccaaaagctctttttcataggtagatagagattgttgcttcttgtttagtgtcctgttgaagtangcaatggaatgagagtcctacattaaaatcgcccttataccaaaacctgaagcatctacttcaaccacaaaatccttggaaaaattangaagagataagacaggagtagaagacagaaactattttatatgttggaaggctaatatcatcaaagaaaactagcaaaaattttctaaagaattgtttgaaaacaacattcataaggccttgataggttgcagtagcattcatgaagccaaatggcatgaacaggtattcataatgaccaccatatgttctgaatgcagtctt

SEQ ID NO: 2702 - DNA, 322 bp, Glycine max
tcaacattcaatctcgtgcgtctcgatatgttacgggactcaatcatacatccgagaaaaaagtattatcgtttgaattggctcacagcttcaacattcaatttcgagcgtctcgatatgttacgggactcaatcagacatccgagtaaaaaattatggtcgcttgtattggctcagagcttcaactttcaatttccagcgtctcgatatgttacgggactcaatcaaacatccgagaaaaaagttattgtcctttgtattggctcagagcttcaacattcaatttcgagcgtctcgatatgttacgggactcaatcacaca

SEQ ID NO: 2703 - DNA, 482 bp, Glycine max
  unsure (1)..(482): unsure at all n locations
agctngtaagccttggatcttcttcatcaatggagtcctttgcttcttgaagatgaatggcaatagaatggagaaagaagatgattggagatgccacttcaaggagaagatgagtcaagaagaagctcaccaccataggaatccatggataagagcttgaaggtaggagaagatgagtagagggagagggagagaaggagcacaaaattttgtgcctcaaatgaagtctgaactttgaagtggtaatttaaaatgatcaaagttgaanaaatgcacacacatgacctctatttatagcctaagtgtcacacaatattggagggaaatttgaatttctattcaaatntcactagaattcgtagagccaaaatttcactaattatgattaatgagatttagctatggtttagcccactaatccaagatcaagtccaatattctccactaagtgtgcttaggtgtcatgaggcatgtaaaacatg

SEQ ID NO: 2704 - DNA, 492 bp, Glycine max
  unsure (1)..(492): unsure at all n locations
agcttaataaatcaatctatggctngaagcaagcctcctgccaatggtatttgaagtttcatgatgtcgtcacttcatttggctntgaaaagaacatcatggatcaatgtatataccacaaggtcagtgggagtaagatttttttcttgtgttatacgtggatgacattntgcttgcaactaatgataagggtttgctatatgaggtgaaataatttctctcaaagaactttgatatgaaggatatgggaaatgcattttatgtcattggcattaagatccatanggaaagatctcgaggaattntgggtttgtctcaagagacttatattaacagcattttagagagatttaacatgaaagatngtcaccaagtgtagctcccattgtgaagggtgacanactcactctgagtcagtgcccgaaaatgatttgagcggaacacatganaatactccatatgctcagctgttggaagcctattatgctcata

SEQ ID NO: 2705 - DNA, 274 bp, Glycine max
  unsure (1)..(274): unsure at all n locations
tcgccgagtggagcggnctcttctncagcttcgactgcaccatggtctacctncgccagaaagatgacccctggaactccatcttcggcggcgccggcaccggcggattnctctccatgcgccagggcctncccgccagcgcccgcttcgctgagttcagcggcgtccttctcgctctcatcgaaggcgccggcatcatgctcaacaagttcctcatcgcgcagcaaccgatgccgatgattgtcgatgagcctcttccgnctaacgggctacc

SEQ ID NO: 2706 - DNA, 477 bp, Glycine max
  unsure (1)..(477): unsure at all n locations
agctngattaanatattntatntagttntggttcctctttcttgtatacttcttacacttctaatgtaccttggttatgtctcctttagcattttattctgataaacttattatccatcatgaaaaaagaaacctactcttttttagcagatttttgtttgctttgtatgatattaatgttggaacaggttggtcgaatgacattgggtggattattggctcttgggtacattgttgttgttagttacaagcgtgcctccacaactgtcaataatggcaanggttcaatgtctttagaaactattgatgttcttggtgagacgttcatggtgatgagaggaactaatagaaaggtatgtacttttttcctatcacactaaatttatgtccatntaaaatccaatcttcttgattgcatttactctntactttcaagttactcatcagtcatcatgttcactttatgcaaataatctt

SEQ ID NO: 2707 - DNA, 494 bp, Glycine max
  unsure (1)..(494): unsure at all n locations
agcttaataaatcaatctatggctngaagcaagcctcctgccaataggtattgaagtttcatgatgtcgtcacttcatttggctttgaaaagaacatcatggatcaatgtatataccaaaaggtcagtgggagtaagatttttttcttgtgttatacgtggatgacattttgcttgcaactaatgataagggtttgctatatgaggtgaaataatttctctcaaagaactttgatatgaaggatatgggaaatgcattntatgtcattggcattaagatccatanggaaagatctcgaggaattttgggtttgtctcaagagacttatattaacanattnttagagagatttaacatgaaagattgttaccaagtgtagctcccattgtgaagggtgacaaactcactttgagtcagtgcccgaaaaatgaatttgagcgggaacacatganaaatactccatatgcttcacgctgtggaagccttatttatgc

SEQ ID NO: 2708 - DNA, 235 bp, Glycine max
atacaatgcagcttggtatcaaatttgccgcacaaaggaatgagttacgtgatcttaccctactacaaagaagctgtggccattaacgtgccatgactccacagtgtcttcagtgttctcaaacacaacctctattaagcctccgaaatcggcttccatgacagaagtttgaatggagccaccactaccaatggggtagtcaaggatactttccaaggagaacaccccttggatc

SEQ ID NO: 2709 - DNA, 192 bp, Glycine max
catgagctttcccttaccaacttcaccaatagcattaccaccattctcttcatcatcttcctccttatcattcaactcattctcaatcttcccacttcccttctttttcttggtctggatataccctattagctaataagccaaaaccacagctcctgtcatctgactaataacaatgccagcaacagcacc

SEQ ID NO: 2710 - DNA, 253 bp, Glycine max
  unsure (1)..(253): unsure at all n locations
atgtctgatttagtcccgaaatatatcgaggcgctcgaaattgaatgttgaagctctgagcaaattcaaacgacaatatctttttactcggatgtctgattgagtcccgcaatatattgagacgctcgatattgaatgttgaaactctgagcttattcaaacgacaataactttttactcggatgtctgattgagtcccgtnatatatcgagacactcgaaatggaatgttgaagctctgaggatattcaaac

SEQ ID NO: 2711 - DNA, 327 bp, Glycine max
  unsure (1)..(327): unsure at all n locations
agcttcaacattgaatntagagcgtctcgatatattacctgactcaatcagacatacaagtgaaaagttattatcgtttgaaaatcctcagagcttcggtattcaatttcgagcgtctcgatatattacgggactcaatcacacatccgtgtaaaaagttattgtcggttgaattagctctgaggttcagaattcaatttcgagcgtctcaatagattaccggactcaatcagacatccgagcaaaaagttattgtcggttgaattagctcagagcttcacaatttaattttgatcgtctcaatatattaccggactcaatcagaca

SEQ ID NO: 2712 - DNA, 282 bp, Glycine max
tatgaccatttgaatttcatgagagcattcattattcaatttctataatctcgatacatcatgggcctcaatcatactcccatgtcaaaagttatggccgcttgaattggaccagagcttcaatgttcaatttcgaacgtctcgatatattatgtgcctgaatctaacatccgagtgaaaatattctaccatttaaatgtctagagagcattcgctattcaatttcgagggtctctgtatattattttcctaaatctgacattcgagtgaaaagctatgacc

SEQ ID NO: 2713 - DNA, 400 bp, Glycine max
  unsure (1)..(400): unsure at all n locations
gaggaaattcaaacgacaataccttttgactcttatgtcggattgagtcacggaatatctcgagacgcttgaaatngaataccgaagctctgagcaaattcaaacgacaataactctttactcggatgtccgatcgagtcacgtaatatgtcgagacgctcgaaatagaataccgaagctctgagcaaattcaaacgacaatacctattgactcggatgtcggattgagtcacgtaatatctcgagaccgctcgaaatgaataccgaagctctgagcgaattcaaacgacaataactttttactcggatgtgcgattgagtcccgtaatatgtcgagacgctcggaattgaataccgaagctatgagcaaattcaaacgacaataacttcttactcggat

SEQ ID NO: 2714 - DNA, 427 bp, Glycine max
  unsure (1)..(427): unsure at all n locations
agctataacattcaatttctagcgtctcgatatatttcgggactcaatcagacatccgagtaaaaagtaattgtcgtttgaatttgctaagagctgcggtattcaatttcgagcgtctcgatatattacgggactctatcagacatccgagtaaaaatttattgtcgtttgaatttgctctgagcttcaacattcaatttcgagcatcccgatatattacgggactctatcagacatccgagtaaaaagttagtgtcatttgaatttgctctgagcgtcaacattcaatttcgagcgtcttgatatattacgggactcaatcagacatccgagtaaaaagttatgggtcgcttgaattgttcagagattcaacattcaatntcgagcgtctcgatatattacgggactcaatccgacatccgagtaa

SEQ ID NO: 2715 - DNA, 420 bp, Glycine max
  unsure (1)..(420): unsure at all n locations
atcaatgactatgcttacaaagttgagctgctcggtgagtataatgttagttccaccttcaatgtctctgacttatctcttntttatgcagatggagaatccgatttgaagacaaatccttctcaaaagggagacaatgatgaggacatgaccaagagtaagggcaaggatccacttgaaggacttggaggacctatgacaaggggctagagcaggaaagccangaagctcttcaacaagtgtttntcatactatntgaatacaagcccaagtttcaaggagaaaagtccaaggttgtgagttgtatcatggcccanatggaggaggactaaatggcaccactttgtctcaatttagagtgttagttngctaaataatggccaatcccttgtaagtggtgacaaaatatgtttgggtaat

SEQ ID NO: 2716 - DNA, 161 bp, Glycine max
catagccttcttccttaattctctttgagagttctgctaagaattcatgcatatcacttgttattgggtggcatgtatctcctactaagaacacatgcacttgtcttttaatttcaatccatctcttacctggcttcttcactatccccctattgtgcata

SEQ ID NO: 2717 - DNA, 428 bp, Glycine max
  unsure (1)..(428): unsure at all n locations
catgcaagctngtgctattccaagttcattaatcatacctttattctcagatgcttccttcactccttcagttagggccatgtattctgcttcagttgttgaaagagcaacaactgattgttgatttgctttccaactgattgttgtaccaaacaaagtaaacacatatcctgttaaggacttccttgtgtctacatttcctgcaaaatctgcatctacatagcctgtgactactgcctcgtgtgcttgcttcttgtaccttanaccagctttcaaagaatccattagataccttaatgtccacttcacagcttcccaatgtgcgctttcaggatctcccatgaatctgcttataatacttacaacatgagctaagtcangtctgctgcaaaccatttcatacattatgcttncaacaccactggcat

SEQ ID NO: 2718 - DNA, 457 bp, Glycine max
  unsure (1)..(457): unsure at all n locations
tattccatgcaactaatataatatgatagatntgttatatcaatatgataccaataaatatgcagaataacaatatgatagcaatacatgatagatttgacataataatatgagtttgttagcacaaacacaggaataaagagaattctctcaaacaaaaagtaattggtacaaaaattcttatacatgtaacttccaaactaataaaggcttctctaatataatatgatagatttgacataacaaaatgataccaataaatctgcaaaacaacaatacgatacaaatacatgatagatttgacataataatatgagtttgttagcacagacacaggaataaagagaattctctcaaacaaaaagtaattggcactgaaattcttatacatgtatacttcaaactaatagaggcttctctaatgcaagctatttgtagctntcttaactaactacta

SEQ ID NO: 2719 - DNA, 237 bp, Glycine max
acctatggatgctaactcaagatcgtgtgtgggataattctctttcatgaatttgagttgtcaagaagcataagccactacctgtccccgctgcataagcactccacccaaacccatcttgaatgcatcacagtaccccacaaagggttcactcgggtcgggtaacactaaaactggtgcagtggtctacctttccttaaaggtacggaaactactctcacactggggcatccacac

SEQ ID NO: 2720 - DNA, 428 bp, Glycine max
  unsure (1)..(428): unsure at all n locations
ctaagctaagctccttaactgcacaaggctcnttaatattgaagagtattcttgtgggaccttgacccgacgaagacactaacaaaaacttatcttctcctttttggacaaagtatgacaagttggaggcaagtatatnntttttccaataaaccttggatgcaactgcgatcgtatacactgtcacatacatttttctctacatgcataacatcgatacaatgtctaacatctagatcagaccaatacagaagatcaaagaaaatggacctcttcttccatatgcaagtcttactttcatccttctttagggtattntcagatacagtattcaggtgttcaatccgctagaagacctcgtgaccagtcaatggtatcgacgcagtttcgtgctcttaacttncattaaaaagctttttcaatcgtct

SEQ ID NO: 2721 - DNA, 411 bp, Glycine max
  unsure (1)..(411): unsure at all n locations
ctgacttgctttccaatctgacattcaccacagattctgccttcttctattttcagattgggaatgcctctaacagcacttttgtcaaggattntcttcatgcctcttaagtgcagatgtccaaacctttgatgccatattctgacttcatcttctttggtggatagacatgtggaggaatagctcggttcttggggtggtcatangtaacaattggtctttgatctgcttgccttcattagaacttcactcttctcatttgtcaccaagcattctgactttgtgaagtttacattgaattcttcatcacacagctgactgatgctcatcaagtttgcaagcagtcccttcaccagcagtactttgtcagactaggaagtcatcatgaactagctttccattccaatgatc

SEQ ID NO: 2722 - DNA, 353 bp, Glycine max
  unsure (1)..(353): unsure at all n locations
ctcttttacaanttgataaaaacaaaaattatgcaaaaaaatgaattaggttatataattnttttttaaaaagaataattcagtaaataattataaaattatatggtttaaagaatttgtaacagtaatgaatgatataatgatgatcattactatcgtgtatatgtaataacataaaaatagatataagggttttctagacaactaacanaaaaagataaaagaacttttagattgaataaaaggataaaataaaatttcaaataaaatagtatggataatntaaaaaacaacttataaaataatttattttccataagttacttcaattagttaatggaaaataaactact

SEQ ID NO: 2723 - DNA, 203 bp, Glycine max
  unsure (1)..(203): unsure at all n locations
agcttaagaaacagntataggagttgtgggagaagttgtttgtgatatccagtgtgtctccatggggagcaccagtgttgntagcgaagaagaaagatgggaccatgaggttatgtgtagactatcaccaattgaataaggtgacgattaagaataagtaccctttgccttacctggtaggagcttatgtgtttagcaagata

SEQ ID NO: 2724 - DNA, 416 bp, Glycine max
  unsure (1)..(416): unsure at all n locations
aaataccttcatctgacttagcatcaaattttcctaagttatcttttccattattcaatacanaacatttacaaccaaagatatgaagatgtgagatgtttggttttctgccattgaacaattcatatggagttttctttaaaatgggtcttattaaagccctatttaaaatgtagcatgcagtgttaacggcttcagcccanaagtattttggaagaggagtatcatttaatanagttctagccatctcttccaaagatctattnttcctttcaacaacaccattttgtcgaggggttcttggtnngtgaaaagtatgctcaattccatgcttttcacaaaataattcaaattctttattttcaaactcacccncatgatcactcctaatagatataatcttgagaattttctta

SEQ ID NO: 2725 - DNA, 238 bp, Glycine max
tattccttagtcatatgccatgacaataaacaaatctcatggccagtcactagaatgtgtcggactttacttgccctaataatgtaagatttttcagcccttgtattttagggcacctagactagttttgtattaggggtatgtttgtaatctcacatgcattaagtgcactatttgatgtgtgtgtgtgttgggagataaatttaattgaattgggagaagcctaatccaattaaat

SEQ ID NO: 2726 - DNA, 419 bp, Glycine max
  unsure (1)..(419): unsure at all n locations
actaagctgctaccatggaactctaattctccacactnnttggtgtgggccattcttggatggccgtgattttctcacggtccatttggaccccatttctaccaactacaaaacctaagaaaactatattatctacacaaaaggtacacttctctatatttgcatagagggtgtttttcctaaggactgaaagaacttttctgagatgtcctaagtgatcatctaggctcctactatacactaaaatatcatcaaaataatcaactacaaatctacctatgaaatcccttaagacatgatgcataagcctcataaaggtgcttggtgcattagtgagcccaaaaggcatcactagccattcatacaaaccaaacttggtcttgaaagcagttttccactcatcaccctttttcatcctg

SEQ ID NO: 2727 - DNA, 314 bp, Glycine max
  unsure (1)..(314): unsure at all n locations
ccacgctcttgtggcgcccataccgttgcatcaacattcatcatgataagtgtgacacattntttttctcataatcgtgctactcactcgttaatcccacagattggaattgttcgcgctcagagaaaccaagcccaaaaccttaacaacttcacgcatgatgaacaagaagaatagattgggctgttagacaagtggcctcagatatctctaagaaggaggggttgaattaagatatcaaagactatntctcaattaagattttaactctcttcttgattaataattacccttatatgaatactcaaagatat

SEQ ID NO: 2728 - DNA, 251 bp, Glycine max
tgtactcatagatagattcaataatggttgcatacttatgatgcacatcaccattccctttaatcacatgaagatcatggagggagtatgaatgttttcttatgctcggccaacacattaaaaatattatatgatatatcttgtgtggaagtaggtcaacatttctattatcaaataaggagtttcaaattacatgcccaagtacttattacttcttgggttgtaattgtatttgaaaggcaaatatcaca

SEQ ID NO: 2729 - DNA, 257 bp, Glycine max
tcgcgttatatatcgagatccccggaattggtaacggaggctctgagaaatttctaacgacattaactttttactcggatgttcgattgtgtcccgtaatatatcgagacgctcgaaattcaaaatagaagctttgagccaaatcaaacgacaattacttttgactcggatgtccgatggagtcctgtaatatatcgagacactaaaaattgaaaacagaggcactgagaaaattcaaacgacaataactttttaca

SEQ ID NO: 2730 - DNA, 309 bp, Glycine max
  unsure (1)..(309): unsure at all n locations
agctngcacttatatatgaagcatcagatactaattattaagaatctatagaacctcgagatatgtacaactgcaaacaacaaggcatatgttattcattcaattattcaagtcttctaactagcaaacagaatcaacaacttaagaacaaaacctgaatcaaaatggaaatctttccatgtttattggaaggaccacccttaatttctaatggacatgatgtgcgtgccaacatctctagctcattctgttcttctttccgaacagcaatattctcanattcagatgaatggtgcaatcatgtaatca

SEQ ID NO: 2731 - DNA, 346 bp, Glycine max
  unsure (1)..(346): unsure at all n locations
tctcgatgtgtattaaattgcttatatatggattttcactccttagtctttaaagctacaataactaggatgtttggatattctctggatataacattgaattttctgattgaatttgtcctatggtgttgcacgtgcacctctacaacagaatagatgctctaaaggatcaacatggggcaacttacagtcttgagaagtgcatgatatcaatctgcattaatggaatctacataagagtagaacttggaggacaantgggttactatattgatgtccttgcatgctccacgaanaacttgtctganaccttaagagtcattatataacttataatccctgcaat

SEQ ID NO: 2732 - DNA, 318 bp, Glycine max
actccctactttgtcttacatggcacacaccctaactattcatcggtatgtatctttggttctaaatggtttccctacacttgggatgcacgacataacaaattcgaccctaaaacccttccttgtgtggttggtggatatagtgatatacataaaggatataaatactttcatccttctagtaagaaattttttatctcatgacatggttgttttgacgagtcattctttcaatataaaactaattggtatcatacaatttcctcttctacacagcatgtagttagcatatttgattcttggctacctcatactaac

SEQ ID NO: 2733 - DNA, 430 bp, Glycine max
  unsure (1)..(430): unsure at all n locations
agatactaagcttatgttggtcaagacagacttgagcatatataatactcctaactattgatgcatactaaattgcttncattcgttttcgttccatatcatttctaggacattgtgcgagactaaatttgtctcccttctgaattggaacgggtgatgctgagcacttttncatcctaaacctctctagtattttattgatatatgctttctaagacaagcctaacaatccttgtgatctatttcagaatatttctatccctatcacatagcttgcctcacccatatccttcatttcaaagttactagagagaaacttcttagtgtcatgaagaagactaaaatcattagttgcangcaatatatcatcaacatacaagattagaaaaataaccttacttccactggcctttagatatatacgccgatc

SEQ ID NO: 2734 - DNA, 405 bp, Glycine max
  unsure (1)..(405): unsure at all n locations
agctnggaacaggaagaatccatcagcaaagcacctatagggcttggatctatatgctacattcatattctagacatgaagaggcacaagcttgaagacaagactatacgaggtatcttccttgggtatagcaatatctctaagggctaccgtgtctacaacttgcaaactaagaaactcgtcatcagtcgagatgttgaagttgatgaatatgcttcttggaattgggatgaagaanaagtggagaagaacgttcttatacctgctcaactacctcaagaagaagatgaggaagaagacccaggtgaaccaccttcaccttcaccacaacaacaagatcaagaactatcatcaccagagtctactccaagacgagtaagatctttggtnacatatatgaaacct

SEQ ID NO: 2735 - DNA, 271 bp, Glycine max
  unsure (1)..(271): unsure at all n locations
agctataagaaattanatggtttaggtatctttttggngccgattcacgaacatcaactatttacccgatcaaaattaaacgacggaagctctcgagaaattgaaattatcataacttttcacacggaggtccgagtcatgcacatcacatatggagacgcccganattgaaccacggaagatctggagaaattcaaatggtcataactttgcacacggaggtccgattcaggcgcatcatatatggagacgctcgatattgaacaacgga

SEQ ID NO: 2736 - DNA, 427 bp, Glycine max
  unsure (1)..(427): unsure at all n locations
tgttggttttcgaaactcganttgttgcaaggatatcaccaaattcgtatgcattcctcaaacattgctacaacggcctttcgcactcaccacgaccactgagtttaaggttatgcccttcgggctatgcaatgctcattccacctttcaggcaacgatgaacatgcttttccagccattcctctgacgatttctaattgtcatctttgatgacattttaatttatagcatcacctttaatgatcatgttcttcatctgcaacaagcttttcacgttttgttggacaatcaatgcatcttgaagttgtccaaatgtacttttgctcagccacaggtggaataccttggccatgtggtctcccaacgaggggtggagccagtcacttccaaggtggatgctgtgcgccagtggcccactccgcactct

SEQ ID NO: 2737 - DNA, 455 bp, Glycine max
  unsure (1)..(455): unsure at all n locations
ggccgccacggagttttctgactatgctcttgtgtggtggaacaagctacaaaaggagagagcaagaaatgaagagccaatggttgatacatggacggagatgtaaaagatcatgaagaagcggtatgtgccggctagttactcaagggacttgaaattcaagctccaaaaactaacccaaggcaacaagggggttgaggagtatttcaaggaaatggatgtgctcatgattcaagcaaatattgaagaagatgaggaggtaactatggctcaatttcttaatggtttgactaatgatatccgtgatattgttgagctgtacgagtttgttgaaatggatgatttgcttcacaaagcaatccaagtagagcaacaattaaaaaggaaaggagtggctaagaggagttntaccaactttggttcttctagttggaaagacaaacgtaagaaagatg

SEQ ID NO: 2738 - DNA, 430 bp, Glycine max
  unsure (1)..(430): unsure at all n locations
agcttcagccaccataatctgatcatccgcaaagaataagtgtgagacattaacccaccgagaatggatgcgagttaccattctgaactgaatcttggatgagatgtgccaatctctgaatacacaacacaaatatatagggagagaacgggtccccctatcttctcccacacatgggggtgaaagaatcaaagggaataccattccaattaatcgccataaatgtggaagacatatgaacatgaatggcattagccatccaaggcggaataccaaccttgctgagggtatcaagagtaaaatcccattccaccttatcatacgccttttgaaggtccaaattcaacaccatgtaaccctccttaccacgcaaattctcaaaattaatgaagcatgacaaanaggttaatggagtatttttttttcaact

SEQ ID NO: 2739 - DNA, 249 bp, Glycine max
  unsure (1)..(249): unsure at all n locations
atgttgttgtggatgatttctccaagattacctggcgtaactttatcagagagaaatcagaaacctttgaagtattcaaagagttgagtctaagacttcacaggagagaaagactgtgtcatcaagagattcaggagtgaccatggcagagaatntgaaaacagcagggtcactgaattctgcacatctgaaggcatcactcatgagttctctgcagccattacaccacaacagaatgggatagttgag

SEQ ID NO: 2740 - DNA, 479 bp, Glycine max
  unsure (1)..(479): unsure at all n locations
agctttgcaagctggaatcatttatcctatctccgacagccaatgggtgagtcccgtctaggtagtcccgaagaagaccggccttacagtgatcaaaaatgagaaggaggagttgattcctactcgagtacagaacagttggagagtctgcattgactataggaggctgaaccaagtgaccaaaaaggaccattttcccctgccattcattgactagatgcttgagcgcctggcaggtaaatctcactactgtttccttgatggtttttctggttatatgcaaattactattgctcctgaggatcaggaaaagaccacattcacctgccccttcgccactttntcctataggaggatgcctttcggcctgtgcaatgcccctggtaccttccagcggtgcatgattagtattttcagtgatttaattagaaaatgcatagaggtggttatggatgatttcactgtatatggatcctctt

SEQ ID NO: 2741 - DNA, 456 bp, Glycine max
  unsure (1)..(456): unsure at all n locations
tgttggaatatatncgatcatgaaactacctttactttctcttaattcagagatcacagtagaatacgcccagttacctacgagtcaaaagacatctttacttggaagaatgaacatagttaaggtaaaaatgaactcatttcacctgaagcaagcaagtccttccatctattagaaggcgagttccagctgctgcttcctttgcatatatttatagcaagaaagtgaagtataaaaactcacgcagaattcagcatcttataccttctgtcgcgttccgccattgattacttaccattgcaacacatatgcctcgtcaaaattgtaaagcataacattcacgagaataaagtgaagtgcagtaacaacaaccattgatttaatatgcagcacacacatacaaaatctgaagctatgactacatttattgagctaactanacctaaacagaaattc

SEQ ID NO: 2742 - DNA, 478 bp, Glycine max
  unsure (1)..(478): unsure at all n locations
agcttgtcatcgattacacacatactataatcgattaccagaggagattntcaganaatattctcaattgtcacatcttttcatttggttcttgaatggctatcaaaggcctatatatatgtgacttgagacacgaatttgctaagagtttttcagaacaaaaaaaggtcttatcctcttaaaaagaaaaatcgttttatcctcttacaaattccttggccaaaacacttgtgattcaataaggaattatttgagtgctcaaattgttcaatctatctctttcaagagagattatttcttttcttcttctttattctgaaaaagaattaagagatcgagggtctcttgttgtaaagaaatctgaacacaaaggaaggattgtccttgtgtggttcagatcttgtaataggctcttacaagatagtggaactctcaagtgggttgcttgtggactgaacgtangcacaagggtgtgacc

SEQ ID NO: 2743 - DNA, 463 bp, Glycine max
  unsure (1)..(463): unsure at all n locations
gttcgattcctttctttntcttatcgttctcctcatgctgattcagtttcattagttccatttcgtgttcctgtaactttccaaataaagttgcaagagacatgttagaaagatctcttgattatgtaatagttgttacctttggttgccattccctgcttaaacatcttagaactttattaataagatcctcattgggaaatatctttcctaatgatgcaagatgatttactatgtgtgtgaatctcttttgcatgtcctgtatagtttcattaggattcattctaaacaattcatattcatgagttaaggtattcattctagacctctttatatttgttgttccttcatgggttacttgtaaggtatcccacatatcttttgcactcttgcaatttgacaccctaaagtattcatccattcctaatgtagatgtaattgtatttntggctttttaaatata

SEQ ID NO: 2744 - DNA, 448 bp, Glycine max
  unsure (1)..(448): unsure at all n locations
tacaatattgcttattacacatgagagatgaatatatatcaaattgcactcgtataactttgataagtcttacatcattnttataacttgatatagaatgtgattcttattaatcaacccgccgaattatatctatgcattattaaaatcatctatgtcaaagtttgtcaaaattgaataacaataataaggtaatcaaatgatttatattctaatatattttaaaatatttatattacgtcgactttaatatataagaacaagataacaagtgattttggattaatatcaaattttacatatgtgacctatgtgaaaaaaaaaaacttttaatccaacgatgagtcttaagaaaacatatccagttgaaagctataatatgatataaaaattatcacagctatatacatcgaattcgatctctcctctctatttctctctctatata

SEQ ID NO: 2745 - DNA, 428 bp, Glycine max
  unsure (1)..(428): unsure at all n locations
tcttagttntcgatgatgcagatgagtttgtggctacctcatgcactcctctaatgactatagcatcattcctagcgctaaactgttgggagttggaagccatcttcttaattaaattcctggcttcagcaggggtcatgtctccaagggctccaccactggcagcatctatcattcttctctccatgttactgagtccttcataaaaatattggagaagaagctgctcagaaatctggtggtgagggcaactagcgcatagttttttaaatctctcccagtattcatataggctctctccactgagttgtctaatgcctgaaatatcctttctgatggtcgtggtcctggaagtagggacatttttttctaagaatactctcttgaggtcatcccagctcgtgatggaccttggcagcaggtaatat

SEQ ID NO: 2746 - DNA, 464 bp, Glycine max
  unsure (1)..(464): unsure at all n locations
agcttggtagtttcatagggcttgagtcttaacttatccagctcattcaattgttgctacctgttgctacctacaagcctaagatcaaagtttataaactatagagcccacatggctttgtgaacaagttcaacaagcaaatggaaattcttgccataaactagactaaagggagacatcaaagtgggagtcttaaaggtttttttgtatgcccagagtgtggtcatccaattcaatgaccaattctttctagatgctctcacagttttctctaaaaccttctttagttacctattagatacctcaacttaaccaattgcttgagggtgataaaaagtaataaccttatgggtaacaccatatttagccaaaaggctatcaaacaatttaatgcanaagtgtgttcccccatcaccaatgattgctcaaggtataccacagagtgtaaaaatgttctatttcag

SEQ ID NO: 2747 - DNA, 447 bp, Glycine max
  unsure (1)..(447): unsure at all n locations
ctgcagcttactgaattgctggtcttattgaagaacatgtcttctgaacaaaacactttgccgaanaatcactacgaggccaaaaagaatttgtgtccagtgggaatggagtacaagaagatccatgcatgccctaatgattgcatattgtatagaaatgagtatgcagaactacagcaatgccccacgtgtggggtatcacgatacaaagtgcaacatgatgaattaactgatgatgcangaaccaaaaattgtcatcctgccaaggtgtgctggtatcttccaataataccaaggtttaagcaattgtttgctaatgcacatgatgcaaaaaacctttcatggcattcggatgaccgaaaatctgatggattactgcgacatcctgccgattcgccgcagtggaagacaattgatcgtttgtatccagagtttggggatgagcca

SEQ ID NO: 2748 - DNA, 346 bp, Glycine max
  unsure (1)..(346): unsure at all n locations
atgtgctcggatcgctcatgatgagcatggtttgaagcaagacttatagcataattattatcataaaagtacatcacagagggctcatcaaccccaaagtgaagaatctacttggtgaaccgatcgatttcactactaacagaagacaagacaccatatttctccttcgtggatgacttcgaaaccgtggataattccttaaaacncccaaaaagaaagttattttccaaatagacacacaagtcagaagtggatcttatggtatcaacacaacgggcccaatcagcatctgccaatgcagcgatggcgagagagtactgagcagggaacaacactccttgtccat

SEQ ID NO: 2749 - DNA, 428 bp, Glycine max
  unsure (1)..(428): unsure at all n locations
tactcagcttaacattcaatttcgtgcgtctcgatatgttacgggactcaatcacacatccgagtaaaaagttatggacgattgtatcggctcatagcttcaactttcaatgataagcgtctggatatgttacgggactcaatcacacatccgagtataaagttatggtcgtctgaattggcttagagcttcaacattcaatttcgagcgtctcgatatgttacgggactcaatcagacatccgagaaaaaagttatcgtcgtttgaattggctcagagcttcaacattcaatttcaagcgtctcgatatgttacgggactcaatcagacatccgagtaaaaagttatggtcgtttgtatcggctcagagcttcaacattcaatttcnagcgtctnnatatgttacgggactcaatcagacatccgag

SEQ ID NO: 2750 - DNA, 367 bp, Glycine max
acttaattagactgaagggacacttgacacactcaaactaagtaccccgtttgacaacatattcacatattttatacagcacgtcttgaccctcaacatatatggacaatgagaatcactcagccgtgattatcaccaataaactcacttaaggataattacttgattagaagtggctcaacatgattaaaaggtgtattacacaactggtaatcagccattgcagcagcacttcacttctcttttgacgtatgcaactatccaacactattagaaaatatgctttctacatcggttatttatgactttcaacatcggttcttgaccgatgttgaaagaccgaccgtgatagtattatcgataacat

SEQ ID NO: 2751 - DNA, 437 bp, Glycine max
  unsure (1)..(437): unsure at all n locations
agctngccattaattgtacatctggtgtggaaaatattttctctttgtgtgtcgtccagtggctgcatctgacttcacaagagccttctcaccattagcatatcaccctgcatagctttctcctcaagctcttcttccacctcttcttcttcactgatttcagattcactggtgatttctccatctgccttcatgatcatggttctcctggttggacaggcaaaagcaatatgtcctctgcctaagcatttgaagcattttatgtttctggtaccggtgttggatcatggggtagaattatgcttagttctagctactgacattccatgtgaagactgtgttgatgggctggatgagttgcctccctccttcttggatctgctggtccacgtctagttgaaggtgctggatgagttccttcttggctgcgcttttct

SEQ ID NO: 2752 - DNA, 472 bp, Glycine max
  unsure (1)..(472): unsure at all n locations
agcttcctaatgtgactatgactcataacatattttttgagagccaatcatgtaattgtgtacatatattagtattgtacattcaagaataattgaaacacattatagatagagaaaaagtgcattaagagagtgtgcattaagagagttgcattgtcttatatttttcttatatcataaaagtcttttcaattgtatgcctatttttttatgtctagataaattcgtgatgtaactaactacgaatattatgcaaaatatcatttaaaactttttcaatcaagaagaatcattaaactctgcatacaattataagtttgtaacaataaacagacaatattaaagaagaaaaataagtttatttgttgaacaagtttattttaatgtggtttttgatcttcatcgagaattcatacagtggataaaanacgtgacaattagaagtaatatagtggatttggtccatgtcttc

SEQ ID NO: 2753 - DNA, 433 bp, Glycine max
  unsure (1)..(433): unsure at all n locations
agcttgtagcatattcaaacgaccataacgtttaactcggatgtctgattgaggcccgtaatatatcgagacactcgaaattgaaaacagaagctctgaggaaattcaaacgactataactttttactcggatgtccgattgtgtcccgtaatatatcgtgacgctcgaaattgacaacataaggtctgagcaaattcaaaccgacaataacttntactcagatgtccgantgaggtccgtaatatatcgagatgcttcaaattgaaaatagtagctcctagcaaattcaaaacataataaatctttactcggatgtccgattgagtcccgtactgtatcgagacgttcgaaattgagaacagacgctctgagcaaattcaaacgacactaactgttntctcggatgtacgattgtgtgctttagtatatcta

SEQ ID NO: 2754 - DNA, 471 bp, Glycine max
  unsure (1)..(471): unsure at all n locations
tagtgaaaatgagttgtgtataagtgagactcgttgttgtttgtgaatgatctaatgttgttntatttctttgttttacatgtcttttcaaataaaagaaagaaatntttttgatttaattacacttttagcctctcaacttagcataattgaaatttgaagatcaaaatcacgaaattgtaaatctagatttgaatgtagaattagacctatttttgtttaaaatattcaaatgaacgctaagttctaacaaaaagaaaaatattactcctccctaagatttcatttcatctgtattgcatattaattattttttgactaaaatattttaaactattttctctcttctctaatggagattggaaaaagatgaatagattctcaataaacttaagaatatatttgaaaaaatattaacagtatagtcaaaattaatggtaataaataattaacttttctaataagcataaa

SEQ ID NO: 2755 - DNA, 437 bp, Glycine max
  unsure (1)..(437): unsure at all n locations
aaccgccgagccagatggaaaaccaaacaattggagagagattatggtgtcctcaaagccaattatgatgctcttaagcttaactttggcaccctcaatcaggacaacgaagccttacgaaagcaggtagaataataatacaacatagtataatatctagaagagttgattttgagtctaattaatttaaaataaaaagtataggtgaattttgagtgagaaaacaaacttcatgcctgaatttcctattannattttttctgggtcgtgcctttcaatctagaaactatgctcgatggatctaacctcatgcttgaaatgatcagtagttttctaattaagagctntcttctcttaatctaaccttcttttaataataaagaanaactcttgttgagaaaacgattatctaacaagaaatatttatatttgattat

SEQ ID NO: 2756 - DNA, 374 bp, Glycine max
tcgcatggagctacatcaaataaaacaccaaatagacttagtcccaggaacaagccttcctaataggctaacttataggactaatccacaagagaccaaggagattgaatcccaagttaaggaattgttggagaagggttgtgtccaatagagccttagtccttgtgttgtgcctgtgttgttggtgcccaagaaggatggttagtggagaatgtgtacagattgtacggccatcaacaacataactgtgaagtataggcaccccattcctaggctcgatgatatgcttgacgagttgcatggtgcacacatattttccacaattgatcttaaaagtggttatcaccaaataacgatgagagaaggtgatgagt

SEQ ID NO: 2757 - DNA, 403 bp, Glycine max
agcttatctccttgagaagctttcttaagaagattcctaaagaagctagagcttagctacacatacctctttaatagctaagctcacctccttgagatgagaagctagagcttagctacacaccccctataatagctaagctcacccccatgacaaaatacatgaaaatacaaaaaaaaatccctactacaaagactactcaaaatgcctcgaaatacaagctaaaaccctatactactagaatggcaaaatacaaggcccaaacaaaggaaaaaactattttaatatttacaaagataagcgggctcatacttagcccatgggctcaaaatctatcctaaggctcatgagaaccctagggccttcccttggatctctggtccaatctacttggagtcttata

SEQ ID NO: 2758 - DNA, 461 bp, Glycine max
ctcattacatggagactgaaaaagagagaataagctttattagtatttggtttcttttcagctcctactactttgatagctacgcctgtgacactgaaaaggattgagaaaacacgcttcttatttttatttatttatatctataagatatgagatagagagagctgcgattactattactattgagacatccaatacttgctcatctcaaagccattcctgccatagggatagtcttcaattgtgttctcaatctcagactgcgtgttcatcacaaaagggccatgctgaacaactggctcattaagtggttggcctccaatcagaacaaatctcaaaggctgtgaagagttattccatacgctgaggccatcaccttgagtcaaaacaaggacatggtgtggcacagttggggatgatgttggagacccgaacacttcttcaccttcaattatataaac

SEQ ID NO: 2759 - DNA, 473 bp, Glycine max
  unsure (1)..(473): unsure at all n locations
agctntatatttgtacccaacttcccatttagagtggtgtcttgtgagatctattggtgctngtccttggccatttaattgtcagaatatgaatatggctttagtttcatccttcttgtactcaaatgctagaaagagagttgtgaactatttgctgagatgtgaatcattcgggcttctaactttatatttttatgctatgatctctcagtggaagcaatgctaaagctgaagaccaatctctggaagcatggtaaatttgtcaataggaatacaccttttctctctcctgtaagcatattgctgctaggcatttttaaggttgataatgtacgatacaaatgggcaggcttgagcggaaactctctgagcaaaatatgggcgctcctcctagctatgaagaagctgtcagtgaatctcgcagccctcgtcacagtgaaaggtatgaacttttatactacagaaagcactta

SEQ ID NO: 2760 - DNA, 458 bp, Glycine max
cgcttctacagaaatatctttagtgctatataactcactggtttaattgactaccgcatttgtgtaatcgattacataagtcttcgagaagttatagatagatctaatgtagctccatgtagagcttgtagtccttggatcttcttcatcaatggagacctttgcttcttgaagatcaatggcagcgaaatggaggaggaggaggaaaggtgattggagacgccacttcaaggagaagatgagttaagaacaagctcaccaccataggaaaccatggataatagcttgaaggtaggagatgatgactagaggaagagggagagagggagaatgaggtctgaactttgaagtctaatttctcaaatgatcaaagttgaaaaatgcacatacaaggcctttatttatagccacacaaaattggagggaagattgaatttctattcaaatttcacttgaat

SEQ ID NO: 2761 - DNA, 462 bp, Glycine max
  unsure (1)..(462): unsure at all n locations
ntctatctcttctntaaataaagatttggtggtagagaccccaactagtggttctgtgttaacttctaatgtgtgtttggattgtcctgtggaagtttctggtaaaataattatgattgatctgatttgtttgcctttgagccaaattgatgttattctaggaatggactggttatcttccaaccatgtcttgttaaactattttgataaaactatggtgtttgatggttttggagtgagtaaggatatgatgttcatctctaccaaccaagttgtgtgatgaggacatgaccaagagcaagggcaaggatccacttgaaggacttggaggacctatgacaagggctagagcaaggaaatccaagaaagctcttcaacaagtgttgtccatactatttgaatacaagcccaagtttcaaggagaaaagtccaacgttgtgagttgatgagaatcctgaaact

SEQ ID NO: 2762 - DNA, 415 bp, Glycine max
  unsure (1)..(415): unsure at all n locations
tcaacattcaatatcgagcgtttcgatatattacgggactgaatcagacatccgagtaaaaagttattgtcgttttaatttgcttagagcttcggtattgcatttcgagcgtctcgatatattacgggattcaatcagacatcagagtaaatagttattatcgttttaacttgcttagagcttcgataatcaatttcgagcgtctcgatatattacgggactcantcagacaaccgagtaaaaagttattgtcgtttgaatatgctcaaagcttcggtattcaatttcgagcgtctcgacatattacgggactcaatttgacatccgagtaaaacgttattgtcgtttgagttttctcagagcttcggtatgcaatttcgagcgtctcgatatatttcgggactcaatcagacat

SEQ ID NO: 2763 - DNA, 449 bp, Glycine max
  unsure (1)..(449): unsure at all n locations
agctntgagcanattcaaacgacaatataattttactcggatgtctgattgagtcccgtaatatatcaagacgctcgaaattgaataccgaagctctgagcaaattcaaacgacaataactttttgctcggatgtctgattgagtcctgtaatatatcgagacgctcgaaattgaataccgaagctctgagcaaattcaaacgacaatcactttttactaggatggctgattgagttcactaatatatcgaaacgctcgaaattgaatgttgacgctctgagcaaattcaaacgacgataactttttactcggatgtctgattgagtccatgaatatattgagacgctcgaaattgaataccgaatctctgagcaaattcaaacgacaataactttttactcggatgtccgattgggcctcgtaatatatcgcgacgctccaaattgaa

SEQ ID NO: 2764 - DNA, 454 bp, Glycine max
  unsure (1)..(454): unsure at all n locations
ctcgagaaattcannatgtcataactnttcactcggaggtccgattcaggcgcataatatatcgacacccccgaaattgaacaatggaagctctcgagaaattcaaattgtcataacttttcactcagaggacccattcaggcgcataatatatcaagacgctcgaaattgaacaacggaagctctcgagaaattcaaatggtcattacttttcactcggaggtccgattcaagcgcatcacatatagagacgctcggaattgaacaacggaagctctcgagaaattcaaatggtcatagcttttcactcggaggtccgattcacgcgcataatatatcgagacgctcgaaattgagcaacggaagctgtcgagaaattcaaatggtcataactnttcactcggagatccgattcaggcgcataatatatncagacgctcgaaattgacaacgg

SEQ ID NO: 2765 - DNA, 395 bp, Glycine max
agcttccattgttcaatttcgagcgtctcgatatattatgcgcctgaatcggtccttcgagttaagacgtatgaccatttgaatttgtcgagagctctcgttgttcaatttcgagcgtctcgatatattatgcgcctgaatcggacctccgagtgaatagatatgaccatttgaatttgtcgagagcttccgttcgttaattttgagcgtctggatatatcatgcgccagaatccgactccgagggaatagctatgatcaattgaattgtcaagagcttcattggtcatgtcgagcgtctgatatattaagccctgaatctgcctccgaggaatagtaccaccatttgaatttctcagagcttccgttgttaatctcgagatcttgatatttatg

SEQ ID NO: 2766 - DNA, 462 bp, Glycine max
  unsure (1)..(462): unsure at all n locations
tcgtaagacgcctgaacataacatcactaaagctccttttcccttcttttattggagggcacaaccggttaaaaagagccttatctgactgtgttgactcatggaaaattcgggtatcaattgcagcagctagaagattgtttgctgcagttattgcatgaatatctcctgttagatgaagattgaattcatccatgggaataacttggctatagccaccaccagctgcacctnctttaattccaaaagtaggtccttgcgatggttgacgaaggcaggtgactacctaacaaaaagagataagatgggattatgtatccagcataactttgacatacgattaaagattgtagtttttcaataatatcttgaacccaaataaccagtgaaggcctaaatgatgaatgagcaattcctacatcctgtcatctcatcatcacataagcaaaaaaaanaaacaca

SEQ ID NO: 2767 - DNA, 232 bp, Glycine max
  unsure (1)..(232): unsure at all n locations
tcggttntaaatttcgagcgtctcgatatattacgggactcaatctgactttccagtgaaaagttattgtcgttagaatttgctgcgagcttccgttctaaatnttgagcgtctcgatatattacgggactcaatcggacatccgagtaaaacgctattgtcgttcgaatttgcaacgagcctctgttttcaattttgagcatctccatatgttattggactcaatcagact

SEQ ID NO: 2768 - DNA, 446 bp, Glycine max
agcttgcagcatatgctaacgacaatatcatttcactcggaagtccgattgagtcccgtaatatatcgagacactcaaaatttagaaccgaagctcgtagaaaattcgaacgacaataacatttcactcggaagtccgattgagtcccgtaatatatcgagacgctcgaaatttaaaaccgaagctcgtagcaaattcgaacgacaataacttttcactcggaagccgattgagtcccgtaatatatcgagacgctcgatatttaaaaccaaagctcgcagcaaatgctaacgacaataacatttcactcggaagtccggttgagtcccgtaatatatcgagacgctcgaaatttaaaaccgaagctctctgcaaattataacgacaataacatttcactcggaagtcgagtgagtcccgtaaatatcagacgctcgaaattaaac

SEQ ID NO: 2769 - DNA, 446 bp, Glycine max
  unsure (1)..(446): unsure at all n locations
tgctttaagactgtatattgatatctttagtatgcacaccatgtgttcatttccttcaactgagaaccccattgggtggtccatacaaacattctcctctaaatctccattcagaaaagcggatttcacatctatttgatgtagctccaagtcataatgggctactattgtcatgataatcctgaaagaatcctttcgtgagaccagtaaaatgtctctctataatcaatgtcatctttctgagtaaattccttagcaacaagtctagccttgtaacgttcaaagttgccatgagagtcacgtntagtcttgaagacccacttacaaccaactctcttacaaccccttgttaattctacaaggtcccaaacaccattatgttccctgaaatctatctcttctttcatggcatttaaccacttctcagaattatcacaacttatagc

SEQ ID NO: 2770 - DNA, 438 bp, Glycine max
  unsure (1)..(438): unsure at all n locations
ntatgctctagctctatgggtaggtgacaattntatcaaacacaagtctatattgagacataccaatgagagttttaaatgttgtcctataagcccaaagtgcatcatctagtttaattgcccaatctttcctagatgcactaactgttttttcaagaattatttttaactcgctattggacaattctatttggccactagtttgtgggtgatatggngttgcaagcttttgagtcacccatatttagccaagaggccatcaaacaacttattacagaagtcagtgcctttgtcactaatgatngctcgaggtgtgctaaatctggtgaaaatatttntctttgaaattntnttaccaccagagaatcattaatggggagtgctactgctttttccctcttagacatgtaatccaccacaacangtatatattcatta

SEQ ID NO: 2771 - DNA, 465 bp, Glycine max
  unsure (1)..(465): unsure at all n locations
acggatgcttgagcaattactgaaactccttccagcagcaatcataccttntaccccanaccaagcaccgtaagtgaagcatactccccaagaaccatacctgtttagcagtttaagtgattagaggtctactgaacagagaaagttcaatttcatgcagaaatagaagctggcagaaagaaagaaaaataacatagagtagaacatacttgagattcatgaatacccncaaaaaaacacttcaacgttataaacaatatcaatagaaaaggttatganaaaagactcccagatgggaggagcataccatgatccatctgaagcttgtattgtttcaatgaaggtagtggctttatcgatacaatgttgtatctcttctcggcgatgcccaggatataatttcctaaatgatgccaaagctcgaatcgctgctgatgtacattccacataactatacgccataca

SEQ ID NO: 2772 - DNA, 396 bp, Glycine max
  unsure (1)..(396): unsure at all n locations
ttgttcctgatagaatcattattgataatgcggctatatgaattgcaaggcaagtgaaagaaagggattcatgactntaaagctagatatgtcaaaggtatatgacaaggtggaatggaagtttatagaaagggccattttccatataggcttttcttanaaatggtagaacttaattttgaagtatttcacaatagtctcctttgttgctatatcaatggngagcattataggaaatntaagcctcacaaggcttgagcaaaaggatcctatatccncatactttntcattctttgtgttgaaacattgtcaacaataatctctcaggcaattcaagcaacagcaaattgtggtattatggtatgtcatagagctccaatggtctctcatgtact

SEQ ID NO: 2773 - DNA, 446 bp, Glycine max
agcaagagattaggtgcatatagagctccagatgtctcggaattgatacatacagacatttgtgggtcattacatacaccttcatggaatgatcaacaatattttatatcattcatagacgattactccggatatgcatacttgtttcttatacatgaacagtcacaatctctggatgtgttcaaaacatctaaagttgaaattgatgatcaactaaacaaaagaataaagtgtgtcatatctgaccgtggtggtgaatactatggtagatatgacgatttaggtgaacaacgtccggtgcctattgcctgtacctagaggaatgtggaatcgttccacagtacaccatgccagggtcacctagcatgaatggcgtggctgaaagatgaaacataactttaaggatatgtgaagaacatgatttgcattctaactaacatagtcac

SEQ ID NO: 2774 - DNA, 201 bp, Glycine max
  unsure (1)..(201): unsure at all n locations
agcttctcgatatattacgtcccatattcggacatctgtgtganaagttatgaccattcgaatttctctagagcttccattggtcaatttcgagagtctagatgagttatgtacgcgaatcggacatccgtgtgaaaagttatgaccattcaaatatcttgagtgcttccgttgtgcaatatcgagcgtgtcgatatatta

SEQ ID NO: 2775 - DNA, 278 bp, Glycine max
  unsure (1)..(278): unsure at all n locations
ctaagctaaacattcactttcgagcctcacttcaacattcaatttcgagcgtctcgatatatgacgggactcaatcagacatccgagtaaaaagttattgtcgnttgaaatggctcagagcttcaacattcaatttcgagcgtctcgatatatgacgggactcaatcagacatccgagttaaaagttattgtcatttgaattggctcagagcttcaacattcaatttcgagggtctcgatatattacgggactcaatcagacatccgagataaacgtt

SEQ ID NO: 2776 - DNA, 481 bp, Glycine max
  unsure (1)..(481): unsure at all n locations
gacactatgatactaagctaagaaatcttatatggtttanaacaagtgccctgtcaatggtactcttaagtttcatgggataatttcttcatttggttntgataaaaccccatggatcaatgcatataccacaaggttaacgagagtaaaatatgttttcttgttttatatgtaaatgatattttacttgcagccaatgatcggngtttgctacatgaggtgaaacaatttctctctaagaattntgacatgatgggtatgggtgatgcattgtatgtcattggtatttagattcatagagatagacctcaaggtattttaggttcatcataggaaacctatattaacaaaattttagagagattgcagatgaaagattgttcactaagtgtcgctcccattgtgaagggtgataggtttaatcagaaccaatacccaaagaatgactttaagagggaacaaatgaaaaacattccttatg

SEQ ID NO: 2777 - DNA, 264 bp, Glycine max
tttgatctggaggacatgttaatagcttcagctgaagttcttgggaagggaagttgtggaacaacatacaaagccatcttggaggatggaacatcagtggttgtgaagaggttaagagatgtggcaatggggaaaaaagagttttaacagcaaatggagattgtccacagactcgatcatcatcaaaatgtgattccccttcgtgcttactactattccatagatgaaaaactattggtttatgactactcaacagtcggcagt

SEQ ID NO: 2778 - DNA, 437 bp, Glycine max
  unsure (1)..(437): unsure at all n locations
gtgcaagcttgaagttatgatatatttattattataatactatgcttatctatttgntaagtatgttttgtagttagttaattgagacttgtgggtgtatatcagtgtnttatacttactatnttgatttggttagtgtgtgtatattacatagagtttatattttattaattaattgacactaaagatgttatagttttgctatgatatgattctgaaaattattcgagtcgatgtatatgtatatgggttgggtcttgtaaacattgctacgaatgtataatatgatatatgagaataagtgaagtatgcgatgaattgtgagctatgaactgtgtagtcacacaactataataccctntaagggcgacgagttcatgcgcaatgagttttgtgatgggctccactatgggaactcgacgaagttaatcactgga

SEQ ID NO: 2779 - DNA, 422 bp, Glycine max
  unsure (1)..(422): unsure at all n locations
tcgagtcctactagntctagtcctcttcatattatntattctgatgtatggggtccaacttcaataaattcaataaatggatattcctattatgtcatttttattgatttattttcacattatgtttgctggttgtatccaatgaaattcaaatccgaaatttccattatttttccagttnttaaatcctttgttgaaaaccaataaaatgtcaaaattaaaattttttatactaacaatgatgatgaatacattaagttacggtcgttccttctaacttatggaatttctcatttaacaactccccatacccgtgaatattacnggaattttgaatcgtaaaaattggtggacaagtggccttaataacttaaggagggtgaattaagttaaaaaatttctcgtttaattgacttctaaat

SEQ ID NO: 2780 - DNA, 363 bp, Glycine max
  unsure (1)..(363): unsure at all n locations
ctcaagcgcttccattgttcaatatcgagcgtctctatctattatgcgcttgaatcggacctccgagtgaaaagttaagaccatttgaattgctcaagagcttccattaaccaatttcgagggtctcgatattttatgttcctaaatcagacctccgagttaaaagttatgtccatttgaatatctcgagagcttccgntgtttaatttcgagcgtctctatatgtgatgctcctgaatcggacctccgagtgaaaagttatgaccatttgaatatctcgagagcatncgtggttcaatttcgaagcgttctatatgtgatgcgcttgaatcggacctccgagtataagtaatgaccatttga

SEQ ID NO: 2781 - DNA, 342 bp, Glycine max
  unsure (1)..(342): unsure at all n locations
ctcagcttcacatcagaccacttccagagtgctggagctacttcacatggtcttgatggngcctatgcaagttgaaagccttggaggaaagaggtatgcctatgttgttgtggatgatttctccagatttacctgcgtcaactatatcagagagaaatcagaaacctttgaagtattcaaagagttgagtctaagacttcaaagagaaaaggactgtgtcatcaagagaatcatgagtgaccatggcagagagtttgataacagcacgttcactgaattctgcacatctgaaggcatcactcatgagttctctgcagccgatacaccacaacagaatggcat

SEQ ID NO: 2782 - DNA, 305 bp, Glycine max
tgagcaacaaacccaggatgttgctccatataaatatcctcctcaagatcaccatggagaaaggcattcttaatatcaagctgatggaggggctagtgacggatagcagccatagcaagaaacagacgaacagtggtgagtttggcgacaggagagaaagtgtcacagtaatcaatgtcatatacctgtgtgtagcccttagccaccaagcgagtcttaagccaatcaaccttaccattgtgcccaactttaacagtgtagacccatctacaacccacagtggtcttatcaggaggaagagaaac

SEQ ID NO: 2783 - DNA, 389 bp, Glycine max
  unsure (1)..(389): unsure at all n locations
tctactcaaatgtgtatggaccatccaaattggatctcttggtgcaaatatgcattgtgtttccttcattgatgatttaactagaaaagtgtggatttatttgattaaaatgaagagtgatgtgtttgatgtgttcaaaaagttcaaaaggttgatttagaaacaaaataacaaacagataaaagtgttaagaacaaacgaaggtggtgagtatgtattagatgtgtttcgaaacttctatgaggtagaagtgatagtgcatgaaataacattatcctatactccacaacacanaggaactattgagagaaagtgtaacgacccgcctcgtcgctacgatatcacttactataaaatatgacattntcaattagaagtaaaagcttcat

SEQ ID NO: 2784 - DNA, 427 bp, Glycine max
  unsure (1)..(427): unsure at all n locations
gtatcttccaccaaagaaggattccaaagcttccacctccacctcctcttatagcccanaataagtcttcccccatggcttctctatcaagaattcttccattggcatcaacaattttagcatctaagacattatcaactccaaggccatattttctcatcatggctccatatgctcctcctgtgatatgccctccaatgcctaagcttgtgcaaaggcctgcagggaaaccatgaactgaactcttctcatatattctgtagtaaacttcaccagttgtggcaccagcttgaacccaagcagtgttgctttttacatcaacgtcgatgccgcggagcttgaccaaatccacaactatgaaggggctctcaatttcggagacgtacgaaattccctcatagtcatggcccgcacttcgcactctaat

SEQ ID NO: 2785 - DNA, 380 bp, Glycine max
agcttaacatcgaaatctggtaaagcttcttggctggtgcattagaggacatgatataatactagtatatgaatacatggttaatggcagccttgactcctttgtttttggtatgtaattgaagaatgctttgattagatgcactagcgttatttttttttttttaacttcagtcacatttaatttaccagcttatgaatcttgattaacttatctgctttgcaaataaaaaacagaccaaataaaaggtaaatttctggactggcctcaacggctcgacataatatttggaatagctagggggctgttgtaccttcatcaagattcccgattaatgattattcatagagatctcaaggcaagtaatcatttactcgatg

SEQ ID NO: 2786 - DNA, 494 bp, Glycine max
tgtacacatcttaaggctcaaggtcaaatattatataccctttctttatatttaccatgaaaatgacgtatcaatgagaaataaagcacaattaataagatggatcaattaagaaactgatttaaagtaaataaaataaaatttagttcttaaaaattaaattaatttatatatatatatatatatatatatatatatatatatatatgtgtatagataacttaacgtttgtaaatttcactccttaaaatattaaatattatttttaattaattataatattattttgatgatttgcaacactttttaatatatgctttttatattataattaatgagttatatgctttaattttatgcgttaaatagtttctatttaaatattctaaaaattcaaaattattaacatgaatattcatgaatatataaatactaccactaaatgagagtcatattcattattataagtctttaaagttccatattaaaaaata

SEQ ID NO: 2787 - DNA, 343 bp, Glycine max
  unsure (1)..(343): unsure at all n locations
cactcggagctctgattcangcacatcacatatatagacgctcgaaattgaacaacggaagctctccagatattcaaatggtcataacttttaacttggaggtccgattctggcacataatatatcgagacgcccgaaaatgaacaacggaagcacttgagaaaatcaaatggtcattacttgtaactcggaggtcccaatcaagcacatacatatagagacgctcgaacatgaacaacggaagttcttgagatattcaaatgattataacttttaactcggaggttcgattcaggcgcataacatatcgaaactcttctaattggacaatggaagctcttga

SEQ ID NO: 2788 - DNA, 516 bp, Glycine max
  unsure (1)..(516): unsure at all n locations
atactaagcttaacatcagaccacttccagagtgctggaactacttcacatggacttgatggggcctatgcaagttgaaagccttggaggaaagaggtatgcctatgttgttgtggatgatttctccagatttacctgngtcaactttatcagagagaaatcagaaacctttgaagtattcaaagagttgagtctaagacttcaaagagaagaggactgtgtcatcaagagaatcacgagtgaccatggcagagagtttgaaaacagcaggttcactgaattctgcacatctgaaggcatcactcatgagttctctgcagccattacaccacaacagaatggcatagttgaaaggaaaaacaggactttgcaagaggctgctanggtcatgcttcatgccaaagaacttccctataatctctgggcttgagccatgaacacagcatgctacatccacaacagagtcacacttagaagaggcactccaaccacactgtatgaaatctggaaagggag

SEQ ID NO: 2789 - DNA, 401 bp, Glycine max
  unsure (1)..(401): unsure at all n locations
aacacccgccttcctaatgctcgaccacttcctccactgtttaattttaaacctcagggtgagtttaagtactttctcatagatcagcacaatttattagtgaagtttatttggaatagctntatataaagccaacaatggatttatttcactacacacgtgatttgttggtgtgagtgttagtcctatgacgtgggccttgtgaggtcagggttatatagcaaattctgtaaccaaaacacaatgatagtggccattttagcacatacaagagtgaatgacaccagatttatctctntaatttcctgtntgttgttcattcatgcagaactttctggtgtaccccctgatgtcatcaatcggcttataccagagcatgcgcgtaaacagaactttattat

SEQ ID NO: 2790 - DNA, 359 bp, Glycine max
  unsure (1)..(359): unsure at all n locations
actattccttgcacaaagcttcattagtagcaccaaaaactatgtcatgaacataaatttgcacaagcaacaactcattgtttgatctcttgataaacagtgttttgtcttaacctcttacaaaagattgctcaattaagaaattgctcaacctttcataccaagatataagtgcttgtttgaaaccatacagtgccttttctagcttgtaaacatgattaggatgtttgaagtctacaaaacctagaggtttctcaacatatantctcttttcaatgtatccattgagaataacacttttcccatccatttgatataacttgaaacccataatacaagcnatagcaagaataacctaa

SEQ ID NO: 2791 - DNA, 388 bp, Glycine max
  unsure (1)..(388): unsure at all n locations
attccttcatctgacttagcatataattttcctaagttttcttttccattgtttaatacagaacatntgcaaccaaagacatgaagatgtgagatgtttggtttcctaccattgaacagttcatatggagttttctttaagatgagtcttattaaagccctattcatgatataacatacaatatttacggcttaagcccaaaaatattgtggaagtgaagtatcattcaataaggttctagaaatttcttctaaagatctatttttcctatcaacaacttcatttttgtgaggagtcctatgtgcagtaaaattatgtcaatgccatgcttttcacaaaatagatcaaattccttattttcaaactcaccccatgatcactcctaata

SEQ ID NO: 2792 - DNA, 373 bp, Glycine max
  unsure (1)..(373): unsure at all n locations
agcttacccaccagttgtgatttgtaattagtttatgcaaaaatgtaactgatgatgcggcaactaacatcaatatccaacgtataatataaaatgaatatatatatatagatagatagatatatacaactaattcctagaagtggaatgttgtacacacctgtggtttaacctctacattgttctggtcactcttgactgttactggttcatttgcaagcacactctcaagatgagcaaggagttccttagcttggcacgatccanagtctggatctgcatcctcatagcaccaaacaagtgcagtctgcttggcttcaatggtggatccatcagttgtttcagtgtatagattcattacaggttctgcaat

SEQ ID NO: 2793 - DNA, 493 bp, Glycine max
  unsure (1)..(493): unsure at all n locations
ttagagccacctgcggcatgcaagctngaagacaagactatacgaggtatcttccttgtgtatagcaatatctctaagggctaccgtgtctacaacttgcaaactaagaaactcgtcatcagtcgagatgttgaagttgatgaatatgcttcatggaattgggatgaagaaaaagtggagaagaacgttcttatactcgttcaactacctcaagaagaagatgaggaagaaaacccaggtgaaccaccttcacctccatcacaacaacaagaagagatggagtatccatacagaaaaatttgcaccagtagctcgtcttaataagacaaagctcaactctgatggcaccatacagaaacacaaggcgaggctagtagctaagggttacttacagcaacccggaattgactacaatgagacatttgcaccagtagctcgtcttgataccataagagctctaatagctcttgtgtcacacaaaggatggagtatc

SEQ ID NO: 2794 - DNA, 356 bp, Glycine max
acactataaaactcagctattatctcttctgtaataaagacttggtggtagagaccccaactagtggttctgtgttaacttctaatgtgtgtttggattgtcctgtggaagtatctggtaaaataattatgattgatctgatctgattgcctctgagccaaattgatgttattctatgaatggactggttatcttacaaccatgtcttgttaaactattttgataaaactatggtgtttgatggttatggagtgagtaaggatatgatgttcatctctaccaaccaagttgtgtgatgaggacatgaccaagagcaagggcaaggatccacttgaaggacttggatgacctatgac

SEQ ID NO: 2795 - DNA, 230 bp, Glycine max
  unsure (1)..(230): unsure at all n locations
acctgcctggcaccgacctgatatgtgattatcctgaagaacacctctgtgttccaaaccctgaatgagtctcctcacaatggcatcaatttccgcaacggctcgagtgattngagaatcatcatggccaacctggtgaccctgatgatcagggtcttcaaaatagagcgtaataaaggaaggaacttgatgagagggtaaatcgaaatagctgagaacagtgtctactc

SEQ ID NO: 2796 - DNA, 465 bp, Glycine max
  unsure (1)..(465): unsure at all n locations
taagctccttcaactgcataaggctctntaatattgaagagtatccttgtggaaccttcacccgacgaagacattgacaaaaacttatcttctccttcttggacaaagtatggcaggctgggggcaagtaaattttcttcccatcagacattggatgcaactgtgatcgtatacccatatcagctagatcttgacgggtattcaagccatccttcatcttgccttgaatgttaaagagcgtcccaataacactgtcacaaacatttttctccacattcataacatcaatacaatgtctaacgtcaagatcacaccagtacggaagatcaaagaanatggacctcttcttccatatgcaactctgactnttatccttcttttgggtcttcccaaatatagtattcaggtgtngaacccgctgatatacctgctcaccagtcaacgctatcagcgcaatatcatgct

SEQ ID NO: 2797 - DNA, 419 bp, Glycine max
  unsure (1)..(419): unsure at all n locations
agcttcgataatatttttttatatcctatcgtctatataatagtcttacgttactttattntagataagatatagaaataaatttataagcataatgtctttatcattaatttcccaatcagttaaagcatgtgtatttattcttccactcatgtaaaataaaataaaatattttttcttattctaaagtgagatgatgtctataattatatttgttcattagagacaaaaaatttctgtcaaaatatagattctaaataataagagtgaaaaaaagattatactactttctaagatgacatgttatctattatactaattattctaaaatttatatctaaagtatttntaatctacttaatagtgctaaacatatnntatgtaacaatgtataaaaagtaaccttttttaatttcata

SEQ ID NO: 2798 - DNA, 311 bp, Glycine max
  unsure (1)..(311): unsure at all n locations
ttacttgtgaaagagagccatgagggtgagctcatgggccactctgggatagacaagacccttgtcgtactcaaagaaaagntttgttggccccatatgaagaaagatgtccataagcattgcactaggtgtgtggcttgtttacaagccaagtctagggtgatgcctcatgggctatacacacccttacccatcccatcttcaccttgngtagacattagtatggactatgtccttgggcttcctagaccccaaacaggtgtagaatctatctttgtggtggtggacagggttagcaagatggcacactt

SEQ ID NO: 2799 - DNA, 343 bp, Glycine max
  unsure (1)..(343): unsure at all n locations
cacatggatttgatggggcctatgcgagttgaaagccttggaggaaagaggtatgcctatgttgctgtggatgatttctccagatatacctgggtgaactttatcagagagaaatcagaaacctttgaagtattcaaagagttgagtctaagacttcaaagagagaaagactgtgtcatcaagagaatcatgagtgaccatggcagagaatttgaaaacagcaggttcactgaattctgcacatctgaaggcatcactcatgagttctctgcagccattacaccacaacagaatgggatagttgagaggaanaacaggaccttgcaagaggctgctcgggtca

SEQ ID NO: 2800 - DNA, 412 bp, Glycine max
  unsure (1)..(412): unsure at all n locations
ntcgtttacaattacgagcgtctcgatatatttcgggactcaatcttacatccgagtaaaaagttattgtcatttgaatttgctcagagcttctgttttcaatttcgagcgtctcgacataatatgggactcaatcatacatcctgtaaaaagtaatcatcgtttgatttttctaatagcttctgttttgaattttgagcgtctcgatatactatgggacacaatcggacatacgagtcaaaagttattgtcgcttgaattctctcagagcttctgttttgaattacgagcgtctcgatatattacgggactcaatcggacatccgagtcaaaagttattgtcgttgatttatctcagagattcagttttcaatttcgagcgtctcgatatactactggacacaatcggaca

SEQ ID NO: 2801 - DNA, 243 bp, Glycine max
gtgctctaaacgaactctgaaatctgaagcttaatattcaaatgatctaagtgtgaaaatatgcacacacatgacctctatttatagcctaagtgtcacacaaaattggagggaaattcgaatttcacttcaatttcacttgaatctgaaattgaatttgcggagccatactttggagccaaaatttcactaattatgattagtgaagtttagttatgggtcagcccactaatccaagatcaa

SEQ ID NO: 2802 - DNA, 430 bp, Glycine max
agcttatgaccattcgaatttctcaagagtttccgttgttcaatttcgagcgtgtagatgagttatgtccccgaatcggacatctgtgtgaaaagttatgaccattcgattttctcgagagcttccgttgttcaatttcgagcgtctcgatatattatgaccccgaatcggacatctgtgtgaaaacgtatgaccattccattttctcgagagcttccgttgttcaatttcgagcgtctagatgagttatgtccccgaatcgaacattcgagtgaaaacttatgaccattcgaatttctcgagagcttccgttgttcaatttcgagcgtctggatatataatgttcccgaatcgggcattcgagtgaaatgttgtgaccattcgattttttcgagagcttccgctgttcaattacgagcgtctcgatata

SEQ ID NO: 2803 - DNA, 370 bp, Glycine max
  unsure (1)..(370): unsure at all n locations
ccttggttacatttgatagtctntacttgaatcttngaaaagcatatcaaaaccatttcctttcaggccctgatcaattcttgcaaatgccaccattgtaagctntgcttcttttgatgcttgaacttcattccattgttccttgcagcattcttgaacggcatgcacaatctcgtgacgagaagtataggctacgcaaatcaaaagaactctctggttgttgtgagcagtaactctcattgctttttccacagaagccctgacaggctcagtcaatagttgcaagtctccaatgaaatgtaatcgaacaccgtattcattgataagactnttcttgtgaagtaactcttcaatcttttcccgcatcaat

SEQ ID NO: 2804 - DNA, 321 bp, Glycine max
tcatttcagcgctcgcatatacgggactcgatctacatacgagagagaagatgttgtcgctagaatttgctctgagctctcaacattcagtctctagcgtctcgatatattacaggactcgctctgacatccgtgtagcaagttattgcacgatgaattggctctgaggttcaaaattcaatttcgagcgtctcgttatattacgggactcaatcagacatccgagtaaaaagttattgtcgtttgaattggctcagagcttcaacattcaatttcgagcgtcccgatatattacgtgactgaatccgacatccgagtaaa

SEQ ID NO: 2805 - DNA, 419 bp, Glycine max
  unsure (1)..(419): unsure at all n locations
gctttaagccaattcatacgacaatatctttntactctgatgtctgattgagtcccgtaatataacgaaacgctcgaaattgaatgtctaagctttgagccaattctaacgacaataacttcttactcggatgtccgattgagtctagtaatatatcgactcgctcgaaattgaatgtagaagctctaagcctattcaaacaacaataacgttttactcggatgtccgatttagtgacgtaatatatcgggacgctcgaaattgaatgttgaacctctgagccaactcaaacgacaataactttttactcagatgtctgattgagtcccgaaatatatcgagacgctcgaaattgaatgttaaacctctgagccaattcacactacaataatcttctactcagatgtctgattgagtcc

SEQ ID NO: 2806 - DNA, 378 bp, Glycine max
  unsure (1)..(378): unsure at all n locations
taccctgatgaggatgtcccatatgttcttaatactagactgatacacttgntgtccaagtatcatggttntgcangtgaagaccctcataagcatctaaaagaattccatattgtctgctccaccatgaaacctncagacgtncaaaaggtcacatctttctgaaagcctttcctcattctttagagggagtggcaaaggactggctatattaccttgctctaaggtccatcacgagctgggatgacctcaaaagagtattcttagaataaattttccctgcctccaggaccacgaccatcagaaaggatatttcaggcattangcaacttagtggagagagcttatatgaatactgggagagattaaaaaactatg

SEQ ID NO: 2807 - DNA, 454 bp, Glycine max
  unsure (1)..(454): unsure at all n locations
agctntntattntcagtagatgaagatgaatctgtggccacctcatggacacctctaagagcaatagcatcatttcttgcactgagttgttgggaattggaagccatcttctcaatcaaattcctagcttcagcaggggtcatatcaccaagagctccaccattggcagcatcaatcatactcctctccatgttgctaagtccctcatagaaatattgaagaaggagttgctcagaagtttggtggtgaggatagcttgcacacaatttcttgaatctttcccagtactcatacaagctttctccactaagtttcctgatgcctgaaatgtcttttctgatggcagtggtcctagatgtagggaagaatttctccaagaacaccctcttaaggttatcccagctgaaaatggacctgngagcaaggtagtatagccaatcttttgccactccct

SEQ ID NO: 2808 - DNA, 394 bp, Glycine max
  unsure (1)..(394): unsure at all n locations
tgctgtgtaactatgtataaaatttaatggaaaacctttcatttaaaaacaatcaagaaaataaactntcaataaatagacataaataatgggaacactaaaatgaggtaaagacggaaaaactaaaacaacacttacgacaagcttctaacagtgctttacaacaagatgcggngactggagaagatggcaattcgcgaattacatgctgaaaatgtatagaaataagaaataataataatgtatgaccaacataaaggaatcaatacttcagttttccatgagaataccttaacacagtcaccaacaacatgtgcatcctcgtctggagaaaactcaactnttnctgcaaccatatggcanacccaagagcataagaattgatgagtaattt

SEQ ID NO: 2809 - DNA, 462 bp, Glycine max
  unsure (1)..(462): unsure at all n locations
agctntanacctgagattggatagtttgcaatctctcattctaatctagaagtcgtagacaatcaacttcagaaaaaagaagaggagtattcagatgcaagaagtcatgaaagaagacgaagaggcgaaccaaggagagataatcatttggggagcattaagatgacaatccctaagttgaaggtaaaaatgatcctcaaatgtatttggagtgggagagaaaggttgaacatgtgtttgattgccataattattttgaggagaaaaaggttaaaccagttggtgttgaattcaccgataatgctagtatatggtgggatcaacttgtgactagtaggcacaggaatggtgaaaggcctattagtatatgggaggagatgaagaatgtcatgaggagatttgcacctagccactatcatagggatttgcacagattacaaactntaattcaaggttccatga

SEQ ID NO: 2810 - DNA, 398 bp, Glycine max
  unsure (1)..(398): unsure at all n locations
tctatatattagtaatattntntaaagaaaataactactacatatgtgttaaatatataataacttctaaaattntgtttttttttataagattttttttaaattatcatttgtattaatttttttattaaaatatccttaattatttgactataaatgctatagattaaaaagataaacacatttctctttcttataatgactggataagaagactaaggcacattaattattagatagaaagtaataaagttgaaaaggagaaatgatgagtccaataaatntaatattattaattaaattaattattntaaaaaaaaatacttaaaaaatcttatatttagatacagagataagatataagataaataaccaatttcatccttatagttttcact

SEQ ID NO: 2811 - DNA, 405 bp, Glycine max
  unsure (1)..(405): unsure at all n locations
agcttctttntccgtcattaattctcctcctctgattcctaatatgtttcatgcgttttatctttatattactcctctccctatctagataaagcaatgttaactataaaaactttggcaacttttagtaatatgagttgctttgctaactaccagggaagaactagagaaaatgtttgaaggtatgccagcagtattcactggaatgttaggaggagaagaactgtcccaagcatatgccagtggagatgtatttgtcatgccttcagagtcagagacgcttggttntgtagttttggaggcgatgtcttcagggatacctgtggtggcggcacgtgctggaggtattcctgatataatccctgcagatcaagatggtaaaactagctatctgtatgatccacg

SEQ ID NO: 2812 - DNA, 371 bp, Glycine max
  unsure (1)..(371): unsure at all n locations
gcttatcgtgaattgttgtcctggatgtgagaatggaatcgactgcttcattggtggaagagcccatgatgtagtgtggaagagctggtgggggctcgccgtaaatcacttcgaacggcatgagccccgcgcttgaatggaatgaggtgttgtacgaccattctgctaatggcaagatctagaaccagtccgtagggcgatggtgcacaaacgaacggaggtactgctcanagacacgattgatgacctctatctgaccatcagcttgtggatggtaggcggtgctcattcacaatgaggtgtcgctcatgcgtgataattcacgtcagaaatggctaagagagatggtgtctcggtcggagaccatactc

SEQ ID NO: 2813 - DNA, 393 bp, Glycine max
  unsure (1)..(393): unsure at all n locations
tcaagaaaaagatggcctcagcaaattccttatttccagaagggaattctatcaatagacctncaatctttaatggagagggttaccactactggaaaacccgaatgcaaatttttattgaggcaatagatctaaatatctgggaagccatagaaatagggccttatatacccaccacagtagaaagagtttcaatagatggtagttcatcaagtgaaagcataactatagaaaaacctagagatagatggtctgaagaggatnnaaaacgagtacaatacaacttaaaagccaaaaacataataacatctgccctgggaatggatgaatatttcacggtttcaaattgtaagagtgctaagaanatgtgggacactcttcgattaacacatg

SEQ ID NO: 2814 - DNA, 459 bp, Glycine max
  unsure (1)..(459): unsure at all n locations
agcttgtaggaagttcaaacgacaataacattnttctaagatgtccgattgaatcgggtaatatatcgagacgctcaaaattgagacttgaagctctaagataattgaaacgacaataactttatacacgggtgtccggttgagttccgtaatatatcaagacgctacaaattgaaaacggaagctcttagaaaattcaaacgacaataaatatttacacggatgtccgatagagtggcgtaatatatcgagacgcttcaaattgaaaaaagaagctcgtaggaaattcgaacgacaatatgtttttactcggatgtccgattgagtcccgtaatattaaaagacgctcgaaattgagagcagaagctctgagcaatttcaaacggcaataactttatactcgtatgtcctcttgagtcccgcaatatatcgagatgctccatattgataacagaagct

SEQ ID NO: 2815 - DNA, 460 bp, Glycine max
  unsure (1)..(460): unsure at all n locations
agcttgcattcatccattttttgatgaattgagggacccaaacacccgtcttcctaatgctcgaccacttcctccactgtttaattttaaacctcagggtgagtttaagtactttctcatagatcagcacaatttattagtgaagtttatttggaatagctttatataaagccaacaatggatttatttcactacacacgtgatttgttggtgtgagtgttagtcctatgacgtgggccttgtgaggtcagggttatatagcaaattctgtaaccaaaacacaatgatagtggccattttagcacatacaagagtgaatgacaccagatttatctctttaatttcctgtttgttgttcattcatgcagaactttctggtgtaccccctgatgtcatcaatcggcttataccagagcatgcgcgtaaacagaacttatntatggctntgcacacctagcaa

SEQ ID NO: 2816 - DNA, 444 bp, Glycine max
  unsure (1)..(444): unsure at all n locations
agcttgatgcacactgaactgatacagtgcattttttgaggaggaaaaaagatacaatcatgtaattagcagacaatatttaccatttattcatttcagcatcattgggataatgctgatacaccatttaaatttgcagtgcaataagtattcattcttacaggtcacataccatcaaactagagtaatgcacaacttattaaaaacataccagataacattgcctctgagtgtgttgatttctccattgtggcccaatacacgcataagttgagcacgatcccagctagggaaagtatttgtagaaaaccgtgaatgtatctgcacatatgcataccaaattgtcagtaatcatgattatattcttataacaaaataaaatagtgtagaaaatcaaatgcacaaatgttntttctctcaggtacaatacacagcatatattaa

SEQ ID NO: 2817 - DNA, 402 bp, Glycine max
gtggcctcagatatcttaagaaggggggttgaattaagatattacatactattttcccaattaaaattctatcaagttataaattcccttaataatgaacttcttaaatattgattcaaatagaacaatttgaatatgaatataaaacaataataaataaaggagtctaagggaagagatagtgcaaaaatagatttatactggttcggccacaccattgtgcctacgtccagtccccaagcaacccgcttgagagatccactatcttgtaaattccttttacaagttctaaacacacaaggacaatcctttctttgtgtttagaatatctttacaacaagataccctcggtctcttaatcccttagtgaattagaaaaagaagaagaatgaatctctcttg

SEQ ID NO: 2818 - DNA, 411 bp, Glycine max
agcttcggtattcaatttcgagcatttcggtatattacgggactcagtcgaacatacgagtaaaaacttattgtcgtttgaatttgctcagagcttcaacattcaatttcgagcgttttgatatattacggcactctatcggacatccgagtaaatagttattgtcgtttgaatttgctcagagcttcggcattcaagtccgagcgtctcgatatactacgggacacaatcagaccttcgagttaaaagttattgtcgtttgaatttgctcagagcttcggcattcaagtccgagcgtacggatatattacgggtctcaatcagatatccgagtaaaaagttattgtagcttgaagttgctcagagcttcaacattcaatatcgagcgtttcgatatattacgagactgaa

SEQ ID NO: 2819 - DNA, 457 bp, Glycine max
agcttccattcaataaatcgagtcctactagttctagtcctcttatattatttattctgatgtatggggtccaacttcaataaattcaataaatggatattcctattatgtcatttttattgatttattttcacattatgtttgctggttgtatccaatgaaattcaaatccgaaatttccattatttttccagtttttaaatcctttgttgaaaaccaataaaatgtcaaaattaaaattttttatactaacaatgatgatgaatacattaagttacggtcgttccttctaacttatggaatttctcatttaacaactccccatacccgtgaatattacggaatttttgaatcgtaaaaattggtggacaagtggccttaataacttaaggagggtgaattaagttaaaaaatttctcgtttaattgacttctaaatccccttttaaatctataag

SEQ ID NO: 2820 - DNA, 441 bp, Glycine max
agcttcactgaattgctggtcttattgaagaacatgcttcctgaacaaaacactttgccgaagaatcactacgaggccaaaaagattttgtgtccagtgggaatggagtacaagaagatccgtgcatgctctaatgattgcatattgtatagaaatgagtgtgcagaactacagcaatgccccacgtgtggggtatcacgatacaaagtgcaacatgatgaattaactgatgatgcaggaaccaaaaattgtcatcctgccaaggtgtgctggtatcttccaataataccaaggtttaagcaattgtttgctaatgcacatgatgcaaaaaacctttcatggcattcggatgaccgaaaatctgatggagtactgcgacatcctgccgattcgccagagtggaagacaattgatcgtttgtatccagagttcggcgatgag

SEQ ID NO: 2821 - DNA, 451 bp, Glycine max
  unsure (1)..(451): unsure at all n locations
tgcatatgatgcagacattcataatagtatccctcttcatcaaaaccaacaacagcagagtaagtatgatatttcaagcaacagatacaatccaggttggagaaatcatccaaatctgagatgggcaagtcctccacaacaacatcagtctgtccctcctttccagaatgttgttggtccaagcaagccatatgttcctcctccgatgcaacagcagcagcagcagtcacaacaaagacaacaagcaactgaggctcctcctcaaccttccttagaagagttagtgaggtaaataaccatccagaatatgcaatctcagccagagacaagagcctccattcagagtttgacaaattagatagggcagatggctactcagttgaaccaagctcagtcccaaaattntgacaaattgccttcacaaactatgcaaaatccgaaaaatgtgagt

SEQ ID NO: 2822 - DNA, 449 bp, Glycine max
  unsure (1)..(449): unsure at all n locations
agcttatcccatgtctccttaacggatgttgcatcataaatattctcaaatgcatcatcatctaatgcttgatagatgaggaagagagctttcttgtctctttttcttgaatcctttaaagtctcctttttgtgcttgggatagtgaagtcttatcttgcatctccttatagcctttttcaaccattttccaaacatcatgtgctccaagaagggacttcattttgatgctccaattatcataggtgctcccctttagaagtggaacttggaaggatgtcgctccattgcttgtcataactatagaggaatttcttatcagaacctaagctcagataccactttgttggaaaagagaatgttatatgaagtatntgaaagagatggaggaggagagaatatttgaaagaaggctagttcttatttcttgagaaatggtttggttttgac

SEQ ID NO: 2823 - DNA, 296 bp, Glycine max
  unsure (1)..(296): unsure at all n locations
tactaagcttagttacaattacgagcgtctccatatattacggggtactcaatcgtgacatccgagttaataagttattggtcttttgactcttcttagagcttccgttttcaattatgagcgtctcgatatattaataggctcaatangacatccgagttaaaacttattgtcgtttgatttttctctgaggttccgtnttcaattacgagcgtctcgatatccctccggacgcaattggacatccgagtgaaaagttattgtcaattacgagcatctcgatatattatgggact

SEQ ID NO: 2824 - DNA, 452 bp, Glycine max
  unsure (1)..(452): unsure at all n locations
agctntgagataattcaaacaacaataatatttgactcgaatgtccaattgtgtcccgtaggatatcgagacactcgtaattgaaaatggaagctctgagaaaaatcaagcgacaataacttttaactccgatgtccgattgagtcctgtaatatatcgagacgctcgtaattgaaaactaaagctctgagcaaattcaaacaacaattaattttgactcgaatgtccgattgtgtcccgtaggatatcgagacgctcataattgaaaacgaaagctatgagaaaattcttacgacaataacgtttaactggggtgtccgattgacgtctgtcatatatcgagacgctcataattgaacactaaagctctgagcatattcaaacgacaataacttttgactcggatgttccactgtgtcctgtatgatatcgagacgctcgtagatcaaaac

SEQ ID NO: 2825 - DNA, 376 bp, Glycine max
  unsure (1)..(376): unsure at all n locations
ntganaaccaacaggctccctctaattcatcgagtaactcatcaatggttggaattgggaatctgtccttgacggtaatgtcgtttaaagctctgtagtcaacgtaaaaatgccatgatccatcacgttttttgaccaataatacaggggatgagaatgggctaatgcttggaattatgccactccggagcatggtttctacctaagtttcgatttcttatttttgaaaataaggatatcgatagggtcaaacattgatgggttcagagttgggtatcaagtgtatggcgggattggtggtgtgggatggtgggagggtcattggtgtgtggaatacggtcacgaattgagtgagtaaacttggtatttctgggta

SEQ ID NO: 2826 - DNA, 453 bp, Glycine max
  unsure (1)..(453): unsure at all n locations
agctngccttgctccttgatatatatgagggactcatggacattatgaatgacaaattccttgggataaaggtagtgtcgccatgttttcaaagcccgcactaacgcatacaactctttatcataagtagaatagttaagggtaggaccacttaacttttcactaaaataagcaataggatgaccttctggcatcaacacagncccaatcccaacatttgaagcatcacactcaatctcagaagattcttgaatagttggcaacacaagtatgggggcattaattagcttttgcttaagaacatagaaagctgtttcttgtgtctctccccatgtgaaaccagcattattcttgagcacttcattgagaggtgctgccaatgtgctaaaattcttcacaaatcgtctatataaacttgctaacccatgaaaactcctcacctccggcactgac

SEQ ID NO: 2827 - DNA, 432 bp, Glycine max
  unsure (1)..(432): unsure at all n locations
agctttcgttntcaattacgagcgactcgatattctacgggactcaatcggacatccgagtgaaaagttattgtcgtttgaatttactcagagcttccgttttaaattacgagcgtctcgatatcctacgggacacaatcggacattcgagtcaaaagttattgtcgtttgaatttgcttagagctttagttttcattttcgagcgtcttgatatattacagggctcgatcagacattcgagttaaaagttattgtcgttagatttttctcagagcttctgttttgaattacgagcgtctcgatatcctacgggacacaatcggacatccgagtcaaaagttattgtcgtttgaatntgcttagagcttcagttttcaattacgagcgtctcgatatattacgagactcaatcggacatccgagttaaaagt

SEQ ID NO: 2828 - DNA, 440 bp, Glycine max
gagcttgtgcctcttctcgtgtggaatatgaatgttgcatatttatccaaagacccttaagtgctttgctgatggcttcttcccgttccaagcttcaaatggagtgttgtattttacagacttaactggacatacagatgagtatgtaaacagcatagtacaccgcttcagcccagaaagtgctaaggagtacctgtttcttgagcatcgatctaaccatctccataactgagcgaagctttgtatcggacactccatgttgttgaggagaagatgcgactgtcaaatggatcttaatgcacttcatcctcacaaaatctgtcaaactcacgagaggagtactctctgccgcgatcactcattagtacttggagtccgtttgcacttttgagtacaagaagggcctcgaacttattgaatactccaaagacttttgattt

SEQ ID NO: 2829 - DNA, 421 bp, Glycine max
  unsure (1)..(421): unsure at all n locations
agctngatcttttagttnttatctttaatctctaatccctgaacgaactcttctagtttgtaattcgaactttaattatcttttaattcgttcctaaagatagatcatcttatctgctgctaactgcacaataatccgttaaagatataacagatttatgtgtccagtattttcgggccagatgtcctggacatcgtatccgacatcgtggatcctgcagcttcacttcttttatcttgccttgtgcattgtgcagcaactccagtattttcgggcaagatgtcctggacattgtatccgacatcgtggatcctgcattgtgcattgtacagcaactccagtgttntcgggcaggatgtcctggacattgtatccgacatcgtgaatcctgcagcttcaattcttcatttgacatttcatc

SEQ ID NO: 2830 - DNA, 427 bp, Glycine max
agcttgtccatccacgatgtctccaatagaaaggttcactcctaaccatttgctcacacgaacatgaaattggacatcaccataatcaaatccatgtgtcccacactcaaagataagcttacaaaataattataattaaaacaatttaagaaacatcaattaactatgacataaactctatcatctttagatcatggtatttgaaagtaaataaaaccaataacatccagctcacataagccaaacatctcatattcaactatcatgaaacaattcaagaatcaacatcatgcatcaactatcaagcattatcaacatgagttcatcaatcatcatcaacatgaacaccaaacatcaacaccaacgacagactctactccatggatatttacaccacatgatgaattaaccaaagtacatcccttaa

SEQ ID NO: 2831 - DNA, 479 bp, Glycine max
  unsure (1)..(479): unsure at all n locations
tccttaagtcacctgcggcatgcaagcttctcatagtagccctccatgtcgttcccgaacactaatgcgagccccatcccgtgataatcacgcgcttctttgggtccttctgccgctgcgcggggacacctttggcgccaccgtggcggacacgaagaacacgcgcttcgcagaggtggtgcgtcgcttggcggcggcattgttggggccctaaagagggtccaagggagaaccgtggagggtgatgatcacgggaggacaggaggcgcggtagagagagaatgttctcgcggtggcattgttcgtcggagtctcgatggcatcggcattgttcgtcggagtctcgatggcgccgccacctacacatgaggttctcgcggtggtttgggggttggagatggggaggacangangcgcggtaaaaagagaatggaagggattttgtaattngtgattttagagagagaaataatctagct

SEQ ID NO: 2832 - DNA, 431 bp, Glycine max
  unsure (1)..(431): unsure at all n locations
gacacttgaaactaagctataagcntttgatngattactaactccaagaaagatgcanttttctcccttatcatctagctntgtcctcctttgaattggaatgtgggcataggcgacacacccaanaattctgaaatgacctactactggtctttgtccactccatgcttcctctggtgtcatattttgaacagcaagtgtgagtcttttattcaaaatatgaacgctccaatttacagcttcaggccagaaagttttggaaacactactccttgtcaaaaggcaacacaccatgttcataattgtgcaactcttcctctcacaaacaccattttgttgaggtgtataggcagctgtaagtttcctcttgattccatgggcctcacaaaaatttacaaattcatgtgagttgtattctccaccacgatctt

SEQ ID NO: 2833 - DNA, 454 bp, Glycine max
agcttatgtttggtcgagtacaaaattgcttccatttgttttcgttccagatcatttctaggacattgtgtgagactatatttgtctcctttctaaattggaacgattgatgttgagcacttttccatcctaaatatctctagtactttattgatatatactttctgagataagcctaacaatccttgtgatctattttagaatatttctatccctatcacatagcttgcctcacccatatcctttatttctatgttactagaaagaaacttattagtctcatgaagaagaccaagatcattagttgcaagcaatatatcatcaacatacaggattagaaagataaccttactcctactgaccttaagatatatacaccgatcaacagtatgttccttatatccaaaggaaacaatggtatcattaaacttcacataccattggcgggaagctt

SEQ ID NO: 2834 - DNA, 378 bp, Glycine max
  unsure (1)..(378): unsure at all n locations
tgtgcattcaatatcctaatgagggtgttccatatgttctcaatactggactaatacatttgcttcccaagtttcatggtcttgcaggtgaagatcctcacaagcatcttaaggagttccatattgtttgatccaccttgaagccccctaatgtccaagaagatcatatctttctaaaggcttttcctcattctctggagggagtggcaaaagattggttgtactaccttgctcccaggtccatctgcagctcggatgaacttaagagagtgttcttggagaaattcttccctgcatctaggaccactgccatcagataagacatttcangcatcaggaaacttactggagagagcttgtatgtgtacttggaaagat

SEQ ID NO: 2835 - DNA, 428 bp, Glycine max
  unsure (1)..(428): unsure at all n locations
cttggttatattntatttatactcttgtagaaggtataaataaaaagtaaccaatggctgctggttggttgcaggtatctgtttgtatatctctntataaatggatttgaggtaactcttgtatttttttttattagaaattaattctacttgtcatacataattatttaattaaataaattatttttataatgtgaacataacataatcttatatcagntgtatttattataaatataatttctttgttgataaaaaatgaaaactagaatttaatatcaagttatttttgttagcatttgacttatagtgagttaggttctccttttgtgatttaagatggaattcaataatagaaaaggtgaagaaaataaaataaaaacagaactaagttgaactcaatctcctcatgatagtctgctctaact

SEQ ID NO: 2836 - DNA, 451 bp, Glycine max
  unsure (1)..(451): unsure at all n locations
agcttatctatccagtcaagttcagctccctttctagaatattatgtgataggttgagatgcacgagcttgtggcagcgcctcaagtcctcaggaatctcatcagagagcgtgttctgagagagatcaagatgtgtgagttcagtgagctgcgagaaattcttaaatatctcaccagtgatgtcactattagaaaggtctatgcccaccaccctcttcgtagcactgcatgaaattcctttccattcacaaggattggagctattggtgttccaatatatgtaccctcctctgtctgcaagaattttgctggccaggtacaatttcagcttcagcagaacctctttgtctttgtccaaagattcccctacaacagctttacctgccaaaaccaaacacaaaagcaaaaaanaaaaaatcctcggtaaacacaaagacacaagtttataact

SEQ ID NO: 2837 - DNA, 353 bp, Glycine max
tccgttgttcaatttcgaggatctcgatatattatgtacccgaatcgtacatccatgtgaaaagttatgaatatttgaatttctcgagagttgtcgttgttcaattctgagagtctcgatatattatgtgcctgaatcggacatccgagtgaaaagttatgaccattggaatttctcgagagcgtcagttgttcaatttcgagcgtctcaatatgttgtgcgcctgaatcggacatccgagtgaaaagttatgaccatttgaatttctcaaagagcttccattgttcaatttcgagcgtctctatatattatatcaccgaatccgacagccgagttataaattatgacccatt

SEQ ID NO: 2838 - DNA, 452 bp, Glycine max
agctcgaaattgaataatggaagctctcgagaaatacaaatggtcataacttttcactcggattgccgattcaggtgcataacatatcgagacgctcaaaattgaacaacagaagctctcgagaaattcaaatggtcataagttttcacatggatatccgattctgtgttataatatatcgagacggtcgaaattgaacaacgactcgagaaattcaaatggtcataacttttcactccgatgttcgattcaggcgcataacatatcgagacactcggaattgaacaatggaagctctcgagaaatacaaatggtcataacttttcactcggatggccgattcaggcgcatcacatatcgagacgctcaaaattgaacaaccggagctctcgagaaattcaaatggtcataacttttaactcagatgtccgactcggggatgaaacatatcg

SEQ ID NO: 2839 - DNA, 465 bp, Glycine max
agcttgcaaatctgttttaaatcctgttggaccttgtggcctcaataatcttacgagggataggcttagaatacagaagaagcaacaacaatcaatttaacaatgttctttaaacatgcaagacacaattgattgcaacaaaataaataagataagggaagagaaaatgcaaacacaattttatactggttcggccacttcccgtgcctacatccagtactcaagcaacccacttgagatttccactatctttgtaaaatcctttacgaagtctgaaccacacagggacaacccatcccttgtgttcagatgctttacaacaagagactcacagtctcttaaccaatctcattgaataagaagaatggaagaagaattctctcttcaagagaagaatattacaatgaagatcatgtaagaatccttatagattttgcaagtgtttggtcaaggatttcttttgag

SEQ ID NO: 2840 - DNA, 456 bp, Glycine max
agcttggagtttccaagtgccaattcgtcttcttctttagtccagtcttcttctggcttcaattcttcagtgggctttccttctgtgtccagcatcttgggatgttcccagcctttgatgacagctttccaggttctgctatccagtgatttgaggaaggccaccattcttgctttccaatattcatagctgcttccatcgagaattggtggtatgttcactggtccgccttctttctccatgttcatcagaatttatctccctagatctcactctgtgatttcgagtgttggctctgataccaattgaaattctgataccaggggacagatgtcgtacaggatgtcacgacatcacgcttcagaacatgcagattatatgtgtccgtatgaacagattaaacaagtaaataacacaagagaattgtttacccagttcggtgctacctcacctaca

SEQ ID NO: 2841 - DNA, 379 bp, Glycine max
  unsure (1)..(379): unsure at all n locations
nggtggtggtctcttcatgagcagaatctggaggctgtagaaggaagccaaaaacagctgaatgctgttgtgagtcaattccacactgtatttcaggatcacatcatacttcctccccagaggtctcaagtgcatcagattaagttgttctcagatcagaacccagtccatgtaaggccatatagatatccacatcaccaaaaagaagagattgaaagacaagtacaggagttactggaggcaggggtaattcgtcctagcatgagtgctttttcaagcccagttatcttggttaagaagaaggatgggagttggaggatgtgtgtggactatagagctcttaacaaggccaccataccagataagtaccctataccta

SEQ ID NO: 2842 - DNA, 453 bp, Glycine max
  unsure (1)..(453): unsure at all n locations
tggcctccataagagaantttgtcttctccgcatcatanaagtttgattctctagttacatgctctacctccttaatttgtcaagttttagcagtggcctcaatgtacttgaagtgaatattaggatcctcactttacaagacagaacaaaaaaattactataattgaaaaacaaagtgaagcagaccaactagtgaactgaggtcatgttcactctacaataagaaagaattggagctcaagtatgcacccaagaaaaggtatagtccttcataagatttgaattgctcaaagagtttgatgcatgcatcaacacccacttgctcaaaatattccttagtggtatgtaaatcatgtactagtaagattcccttatagatgaattgtgaaattcaaaaaattaaatagaacatgaatcttatggcaacattatccaaaaacagtacctgcaca

SEQ ID NO: 2843 - DNA, 444 bp, Glycine max
tgtagacaaactatactagaagaaaaaaaaagtttaatagccatgttgaagtgtaaacctacacactttttttttttagttgccacataatattaaatcttaattatctcttcaacaaaaaggtaattagaattaaacacatgctaagcataaaataagaaaaatatgtttaagaaatcactatttgaaaagagttgttgtgtttaagaatttataacaattttttctcataaattactgactatttgaaaatcactaaaatgttgcgatatttctattttgattgaaaagattagctaaatgaagtaaagtagagattatttgaccatgaaagcgaaaaataattcttatattacttttttttttataaaaatacatttatcattcattattctttttaatttatttaaacaataaaaaatatatttcatccacacacaattc

SEQ ID NO: 2844 - DNA, 343 bp, Glycine max
  unsure (1)..(343): unsure at all n locations
agctnggatntccttntagtagggaatctatctttcctaagatggagccaaacccagtcaccctcattaagaactagctatnttcttcctctattgcctttagttgaatacacctttgtttggttctctatttggttcttaaccctctcatgcaacttctttacaaactctgacctagattccccttctttatatataaaagaagtgtccagtgggagaggaatgaggtcaaatgatgttatgggattgaacccaaagacaacctcaaaaggggactgcttggtggttctatgaacccccctgtagtaggcaaattctacatgaggaagatactcatcccaag

SEQ ID NO: 2845 - DNA, 417 bp, Glycine max
ctttgtgatgttgactatgttggagacaaagttgaaaggagaagcacaactggaagatgtcacttcattggtggaaaattggttgcattgatatgcaagaagcaaggttcaactacgttgtccattgttgaagcataacacatgctagctaccagctgttgtgctcaactactttggattaagtaccaacttgaggactacaacatctatgaaagtaaaattcccattttttgttataacaaagttgtcagtagtctttcaaagaatccaacattgcattcaagggcaaaaacatatagaaagtaagcatcattttataagagaccatgttcagaatgggacaatggatctacagattgtacccattgatgatctacttgctaatattttcacaaaacccctcgttgaggaaaaact

SEQ ID NO: 2846 - DNA, 301 bp, Glycine max
  unsure (1)..(301): unsure at all n locations
ttcgtcttcttctttagtccagtcttcttctggcttcaattcttcagtgggctntccttctgtgtccagcatcttgggatgttcccagcctttgatgacagctttacaggttctgctatccagtgatctgaggaaagccaccattctggctttccaatattcatagttgcttccatcaagaataggtggtctgttcactggtccgccttctttcttcatgttcatcaaaatatatctccctagatctcactcagtgatttcgagtgcctgctctgataccaatgaattctgatactgggac

SEQ ID NO: 2847 - DNA, 437 bp, Glycine max
  unsure (1)..(437): unsure at all n locations
agcttgtaactgtcagggaaaatgtcatctctattatcttgtaagcatagtgattagaattttatgattcctgattcgaatcctacattccgataaaattcagctacttattgattcatattattaatattagacgaatctcaatttttgtatcttacggtacatgaatgaatctgcacaatttcatatcatcaatacaaatcacatgattcaatagtttgattttcttttatttttctttcaccaattctcatgaaaagaattgaaaagtcatttaagtgaaattgataaatgaaaaggaattagaggaatatatttntaaaattgtcctatntgattatttcacaacattanttgtcattcatttattcagtgcatgcactgtatttgtctatttcagctgcttcatttttttctaaaataaaagcttcacaaat

SEQ ID NO: 2848 - DNA, 410 bp, Glycine max
gtacatgcctcatgacacctaagcacacttagtggagaatgttgtacttgatcttgaattagtgggctgaaccatggctaaaattcactaatcataattagtgaaattttggctccacaaatcaatttcaaattcaagtgaaatttgaatggaaatttaaatttccctccagttttttgtgacacttaggctataaaaagaagtcatgtgtgtgcattttatcaactttgatcatttgagaattacacttcaaagttcagacctcatttgaggcacaaaatttagtgttccttctctccctctccctccactcatcttctcctttcttcaagctcttatccatggcttcctatggtggtgagcttcttcttgactcatcttcttcttgaagtggcatctccaatcatctt

SEQ ID NO: 2849 - DNA, 433 bp, Glycine max
tagattgtaagcaatggcaagaaactatggaatctgaaattgaatcaatgaagatcaacaaagtatggactttagttgaagcttcaaaggatataaaaacaattggttggaaatgggtttacaagaaaaaggatattggagcatattggaaggttgaaacctacaaagtttgtcttgttgccaagggatattgtcaaaggaaggtatagattatgatgaaacttttcaacttttctcccgcggcaatgctcaaataaattcaaattcgtttttctataatagcatactatgatcatgaaatatgaaatggatgtggaaaatggttttccttaacgatgaactaaaagaagatgtgtatatgacacaacctaagggaatcacatccttgtctgatcataataaaagctacaagtttcaatgattcatttatgga

SEQ ID NO: 2850 - DNA, 380 bp, Glycine max
  unsure (1)..(380): unsure at all n locations
gcagctgaatatgcaccacttgctttcattcactgcttanatatccaaaatacacctgccacttctgacttatacttgagaaagtaatccaacacattctagtgaaatcatctataaagatgatgtaatatttactttttttaagcgaagtagtcctttgaggttcggccaaatctgcgtgaatcaattgcagcttctctgttgctctccacgttgattgtttgaagggtaatcttgcttgcttgccatattggcatgcttgacagcatggtaatttagaatctaagtgaggtaagccatgaaccaactcctttcgtttcatgttcaacacagttgcatgatgaaaatggtctaatcttttgtgccaagcttctgtacta

SEQ ID NO: 2851 - DNA, 392 bp, Glycine max
tgtgcatccaataccctgatgaggatgtcccatatgttcttaatactggactgattcatttgcttccaaagtttcatggccttgcaggtgaagacccgcacaaacatttgaaagaatttcacattgtctgctccaccatgaaacccctagatgtccaagaggatcacatatttctgaaggcttttcctcattcattagagggagtggcaaaggactggctgtattaccttgctccaaggtccatcacgagctgggatgaccttaagagagtattcttagaaaaagttttccctgcttccaggaccacaaccatcaggaaggatatctcaggtattagacaactcagtggagagagcctgtatgagtactgggagagattaagaaactatgtg

SEQ ID NO: 2852 - DNA, 458 bp, Glycine max
  unsure (1)..(458): unsure at all n locations
gcttgttgaagatcacagaaacttctttgctgttatcaatagttgacaatatttgctttaaagtactttcggtacatgaatctttgatttctaactatgttattcttttgggatgagattctctagaatagggattttttgcttggttattatttcactttttcaaaaataatgagttagttaggaatgtactaatgatgtaaaatagctctacactgtcattaaatttaaattattgtctataaagttaacaaatttattataaataataatttttgattggacaatgtaaaatgtctttattgtatcaatgcatagtcattcttctcataaatgaaattatgatgagaaactctagtaatcattcactcaattatcgtgagaattattaattctcacttcataaatattctaagaatctctttaggaaatatttntattctattgtagccatatgg

SEQ ID NO: 2853 - DNA, 409 bp, Glycine max
  unsure (1)..(409): unsure at all n locations
agcttcttcttgactcatcttctccttgaagtgatgtctctgatcatctntcttccttcttcattccgctaccattaaacttcaagaagcaaaggactctattgattaagaagatccaagtcctacaagctccacatggagctacatcagggcctgaatgactattgtttgtgaacaaactccttcagaaggctgagcttgataagctcttctatcttatccttcagagcactgcattgttttgttgagtggccatgcttgcaatgtgtcgcaacctacccttttgcgggcaagcgaggcgaggctcatgggtgcgtcttacacaggaggaaaatgcgcggagtcgccaccaacgtttattgaaaggaaaatgttagaaaaatccacaggaaacagtcatgaagaatac

SEQ ID NO: 2854 - DNA, 447 bp, Glycine max
  unsure (1)..(447): unsure at all n locations
agcttataananagtcaaagttatataaatatttatcttatgtcataatctgtgacgcatatgacgcatccactgaattaaatcacttttaatagcattttttctcccacttgctctgagtatttacattagagtacataagccttttaatatatgaaactctataatattctcatatgaatgactaaaacaaaagaaaatcaatctttttactattttattcacaatctaaatgtaatcacttactatgagtttaatccttaaatatatattcatatgattattctaagatttaaactaatatgattggaaaactgcatgcatnttgaatgaattatcttaaaaattggtagtttgaaggaattaatggtnttttagattaacaaaataatttaatcatttacgctccttgaaattcacactggaaatgacatgcttatgtaatac

SEQ ID NO: 2855 - DNA, 115 bp, Glycine max
tgatggggcctatgcacgatggaagccttggagggaagagtatgcctatgatgttagagatgatttcttcaaatttgcctgggtctactttattacaagaaaatccaaaaccttt

SEQ ID NO: 2856 - DNA, 348 bp, Glycine max
agcttagtaaagctaggcactaacatatctctttgctcggatgtctgatagagtcccataatctattgagacgctcgatattgaattctgaacctcacagctaatgtaaacgacaataacctgttactcggatgtctgattgagtcccgtaatatattgagacgatcgaaattgaattctgaagctctgagctaattcaaacgacaataacttttttactcagatgtctaattgtgtcccgtaatatatcgagatgatcgaaatctaattctgaagctctgacctaattcaaatgacaataacttcttgctcggatgtctgatagagtcccataatctattgagacgc

SEQ ID NO: 2857 - DNA, 390 bp, Glycine max
  unsure (1)..(390): unsure at all n locations
agcttaagctccttcaactgcacaaggctcttaatatttgaatagtatccttatggaaccttcacctgacgaagacgctgagaaaaacttatcttctcctttttggacaaagtatgacaagctaggggcaagtaaattttcttcccatcaaaccttggatgcaactgtgatcgtatccctatctcagctagatcttgacgggtattcaagccatccttcgtcttgccctgaatgttagggagcatcccaatcacactgtcacatacattnttctcgacatgcataacatcaatacaatgtctaacgtctagatcagaccaatacggaagatcaaagaanatggacctcttcttccatatagaagtcttacttttatccttcttttgggtc

SEQ ID NO: 2858 - DNA, 414 bp, Glycine max
agcttgatgcacaatttcattgaagagacaaatattactatatgaatataacatgtatataaaatgttgagataaattataaagactaagagaagaattatgacaaaaaaaatgagatgaatagtattggagttatgattatgatcatgtcgagctttgcacaagttaacaatgtacctattaaatttgggtgtgattccaaatgttgagaaaaatgtctagattcaatttccatttttccatatcaagtgtggttctgcatgtgtatgaaaaaatgtcataaaaagtcgaataagaatggtattcattctcttaccactttttaagggtgtgtaattattattttataatcgaattaattataatcttacatgttcttatcattgacttatttcttagatgctgatcatacat

SEQ ID NO: 2859 - DNA, 410 bp, Glycine max
  unsure (1)..(410): unsure at all n locations
tcagaattcaatntcgatcgtctcgatatattacaggtctcaatctgacatctgaggaaaaaagttattgtcgtttgaatttgctgagagcttcaacattcaattttgagcgtctcgatgtattacgggacttaatcagacatccgagttaaaagttattgttgtttgaatttgctgagagcttcaacattcaatttcgagcgtctcgatattttacgggactcaatcagacatccgagttaaaagttattgtcgtttgaatttgctgagagcttcaacattcaatttcgagcgtctcgatatattacgggactcaatcagacatccgagtaaaaagttattgtcgtttgaatttgctgagagcttcaacattcaatttcgagcgtctcgatgtattacgggactcaatc

SEQ ID NO: 2860 - DNA, 336 bp, Glycine max
  unsure (1)..(336): unsure at all n locations
catcacatgttttactatgtggcgatcgggcgatggtgcacaacaagttntttcacatccacaatgcgcgcataaacccaccatcccctgttgcccacctccaactgagcacacgtactcccacgtagcccatatcctcgtttctctcaacaccgggtcccgtaatatatcgagacgctcgaaattgaattctgaagctctgagctaattcaaacgacaataactttttgctcggatgtctgattgagtcccgtaatctattgagacgctcgaaattgaattctgaaccttagagctaactcaaacgacaataacttattactcgaatgtctgatt

SEQ ID NO: 2861 - DNA, 443 bp, Glycine max
  unsure (1)..(443): unsure at all n locations
tgccgccacggagttntccgactatgctcttgtgtggtgtttgttattatgcaagttgaagtggacgtttccattgggaaatacaatgataaggtactttgtgatgttgttcctatggaggccagtcacttacttttggggagaccatggcaatttgataaaagagccaatcatgacggttacaccaacaagatctctttcattacttttggtgttgcataaaaaatgtacaatgtaggtcggctaggtttttttgtgcgagctcaaccgacattttgtttcggccgaaactggcatgttcccatttattttggccaggaaaacattagcccacctcggcaaaaaaatatttgctatccgacttcatgcatatttcattcacggaatgaacttgaaactcattaaccgacatctggtcggaaatagcccgactgaacattccc

SEQ ID NO: 2862 - DNA, 372 bp, Glycine max
taacactaagaaagcagaagccatgattccagcaactgcctctggactcatttgtggagaaggcctgtgggctcttcccgcttccattcttgctcttgccaaagttaacccgcctatctgcatgaattttcttgcttcctagaacttgatcaactacatcaaaccaatgaatgccataattagttagttaattaatactactatatatgttagcaggtacacttcatacataaccaaaatgctataaatattccaagtgtctggccattgggcttaagaacattgtattattgcttactacaactctgtaggaaaagtcagttcctgttaattgatctctcggaagggaatttcttcttcacaggagtcata

SEQ ID NO: 2863 - DNA, 416 bp, Glycine max
  unsure (1)..(416): unsure at all n locations
gcttaaggacgacgaatntccagtagcaaagtacatcctagcacctccccaaacgtactcatcccagtaactggtagaattgtaaaatattgaagcctctgaactcccagcactgtacctgcctctctgatccctggaaaacttgaacagcgtggtcgcaccatgcaccagtttcttggaataggccttgttgtccttgaaaacaatggaagcagaagccaaggcagcagccatctcagccgcgagatcggaacaactgtggcattcagtcacagggcggtcatagtccatgtccttcggacgcatccagcaatagtgatcattcngactgtcaccaccagaagtatctccaagcccaacctgtcaaacaagcccaaaaaacataattgagaaacatctacccacagtcacaccac

SEQ ID NO: 2864 - DNA, 407 bp, Glycine max
  unsure (1)..(407): unsure at all n locations
tanacattcaacttcgagcatctcgatatattacgagtctcattcagacatccgagtaaaaagttattgtcgtttgaattggctcagagcttcaacattcaatttcgagcgtctcgatatattacgggactcaatcagacatccgactaaaaagttgttgtcgtttgaattcactcagaggttcaacattcaatttcgagcgtctcgatatatgacgggactcaatcagacatccgagtaaaaagttattgccgtttgaatttgctcagagcatcaacattgaatttcgagcgtctcgatatgtgacgggactgaatcagacatccgagtaaaaagttattgtcgtttgaatttgctcagagcatcaacattcaatttcgagcgtctcgatatattacgggactcaa

SEQ ID NO: 2865 - DNA, 350 bp, Glycine max
  unsure (1)..(350): unsure at all n locations
agctntgagcaaattcaaacgacaataatcctttactcggatgtctgattgagtcctgtnatttatcgacacgctcgaaatagaatgttgaagctctgagcaaattcaaacgacaataactttttactcggatgtctgatattgtcccgtaatataacgagacgctcgaaattgaatgctgaagctctgagcaaattcaaacgacaataacattntactcggatgtctgattgagtcccgtcatatatcgacatgctcgaaattgaatgttgaagctctgagcaaattcaaacgacaataactntttactcggatgtctgattgagtcccgtcacatatcgagacgctcg

SEQ ID NO: 2866 - DNA, 405 bp, Glycine max
  unsure (1)..(405): unsure at all n locations
tgtagggaattcaaacgacaataactctctactcggatgtcctattgaatcgggtaatatatcgagacgctcaaaattgagactagaagctctgagcaaatttaaatgacaataactctatacacggatgtccggttgagtcccgtaatatatcgagacgctcgaaattgaagacggaaactcttagaaaattcacacgacgataactttntactcggatgctcgacagagtgtcgtaatatatcgagggatgctccaaattgaaaacggacgctcgtatcatattcaagcgacaataactatgtactcggatatctgatagagtcccgtaatatgtcgagacgctcaaatattagatgcttagctctgacaaaattggattgacaataactttatacacggatg

SEQ ID NO: 2867 - DNA, 411 bp, Glycine max
  unsure (1)..(411): unsure at all n locations
ggctgcagctttagtctcaatttgagcgtctcgatatattactcgattcaatcggacatccgagtaaaaagttattgtcgtttgaattccctacgagcttcccttnntcaattggagcgtcttgatctattacaggactcaaccggacatccgtgtaaaagttattgtcaattcaattttctcagagcttcggatctaaattntgagcgtctcgatatattacgggactctatcagacatccgagtaaaaagttaatgtcgttggaatttgatacgagcttccgtattcaatttggagcatctctcgataaattacgacactctgtcgggcatccaagtaaagacttagtggccgttgaattttctaagagtttgcgtttcaattgggagcgtctcgatatattacgggac

SEQ ID NO: 2868 - DNA, 369 bp, Glycine max
  unsure (1)..(369): unsure at all n locations
tgaatcggacctcagtgtgaaaagttatgaccatttaaatntttgagagcttccgttgttcaattccgagcctctcgacatattatgcgtccgaatcggacatccgtgtgaaaagttatgaccatttaaatttcgcgagagcttccgatgttttatttcgagcgtatcgatatattataagcctgaatcggacatccgtgtgtcactatatgttataagcatttgaatttctcatgagcttgcgttgttcaattttgagcgtctcgatatgtgatttgcctgaataggacatccgtgtgaaaagttatgaccatttgaatctctccagagctttcgttgtttcatttcgagcatcttgacatattatgc

SEQ ID NO: 2869 - DNA, 338 bp, Glycine max
  unsure (1)..(338): unsure at all n locations
atggaatcaagcattatggatgcatggntgaccttattgggcagagcanggagattaaaagaggcttatgacttgatagtgagaatggcaatgaaacctaacgacacagtttttgggggaatgcttggagcatgccggattcattctgatatgaagatggcagaacaagtaatgaagttgatctgtgaagacnctgttactggtgctagttctcacaatgtgcttttgtcaaatatctatgcagcttctgaaaaatgggagaaagcttgaaggatgaagagcatagatggagggtctcagaggatacccggatgtagttcaataatcttcagtgactt

SEQ ID NO: 2870 - DNA, 477 bp, Glycine max
tatcaggcgatactatataatactgctgcttctagcgtacccgctattggtgctcatacaataccaaacttttatacctgttattactagctatattgaattctttagatcctgaatgtacaaccttcaaattgttgctcgttcccgtatatgttatttgcaaaaaataaaattaatctgaaacaattctagctgaattgctatcgatattattactcataccataacgaataacagctaaacaagtaatttaaaatgtaactgtcaaataatgtggtatctttttaattacaatcttacttcaatatctaattttgttaatctacttatgacgatctttaaatataaatatgaatttaaaggtgatctactgataatataaagtacttgctcatcacaaattatgatacctatcaatttaaatcttaacttaattctataagtattaattaacatataatacgacaaatttttaac

SEQ ID NO: 2871 - DNA, 370 bp, Glycine max
taaagtcttcctctattataacatggtcttcagggagaatttcgtgctggacccccagctaacaaaaccaacaagaacccatcaaaagaagccttcatcacctcagtaattacatgcgttatgactctatcatgcaccgtagacaatataatcttcaagcattggttaagctcctcaagaaaaggctcaattctcgtggatgaaacttcaccaacatacaggccatcccaaagaacataacgcagatcctggaaaatcactttgtatgccatggcctcggagagttgacggataccttccacagatgcagctttagaaagcttgaacttcaaccccttctctataccatcctcttttgttgatttagaat

SEQ ID NO: 2872 - DNA, 437 bp, Glycine max
  unsure (1)..(437): unsure at all n locations
ccgcagagtggatatctagncatgacattctttttttatgggaaaaaaaattatgtgaccatacttagtcatgacatcatcatagctgcactacactgcgagtacatatgtattttataattctaagagattcacaagcatctatgataatcacaatcataagcatgatgtaggttaagttttgataaatcttctcagttagttnttaattntttattaattgacaaaattatttctcagtctgataaataaattctttaatagattttatcattgtttaaaatgttacttacaaattaattcttttagaatactgactatntaagttcggatctttntatatgtttttttatcttcaatatatctattcaagtttgtagttattctttctaaataaatcaaccatgattttatcgaatctttcagatatttaatag

SEQ ID NO: 2873 - DNA, 360 bp, Glycine max
tggatttcctttgctccggagacctctcctctctcatgtttacccaaaaccaatctttgggttggaaaacaacctttttgcgccccttgtttgcatgtttagcataactctcattcctcttttcaatttgggcctagactctttcatggagctttttcacatagtacactttggcttgtccttccttatgctttaaaactgaaatattatgccttggcaacatatcacgaggagttagtggattgaaaccataaacaagctcttaaggagaacaagtagtggtgctatgctcactcctattataagcacattcaatgtgaggttagcgaactctcccattcttaagattctttttcaaaa

SEQ ID NO: 2874 - DNA, 378 bp, Glycine max
tgtgacggactataccaagctctatgaaccagggacggtgttatatctatatataggcttgctaagggtagagagaggaagactagagatttggatcaagtgaagtgtgttaaggatgaagaaggcaaagtcttagtgcatgaaaaagatatcaaggaaaggtggaaggcgtatttccacaacttatttaatgatggatatggatatgactctagcagtctagacacaagagaagaggaccggaactataagtactatcgtcggattcagaaacaggaagtaaaggaagcgttgaaaagaatgagtaatggtaaggcggtggggccagacaacatacctattgaagtgtggaaaactcttggagatagaggtcttgag

SEQ ID NO: 2875 - DNA, 327 bp, Glycine max
  unsure (1)..(327): unsure at all n locations
gatatattatgtccccgtatctgacatccgtgtcanaagttatgaccattcaaatatgtcgagagtttccgttgtgcaatttcgagggtctcgatatattatgccccatattctaacatccgagtgaaatgttatgaccatttgaaattctagagagcttccgttgttcaatatcgagcgtctcgatatattatgtaccacattccgacatccgtgtgaaaagggatcaccattcgaatttctcgagagcttccgttgttcaattttgagagtctagatgagttatattcgccaatcggacatccgtgtgaaaagttattaccattc

SEQ ID NO: 2876 - DNA, 428 bp, Glycine max
  unsure (1)..(428): unsure at all n locations
ntaatgtgttctcccttgtagaactactaactgcagtaacagttacaacccaactattcgatagtgataacaatagaatcaatgtcttcacctcatccttaaatttaatctgcactgactctaactggacaagaatagtattaaattcattaatatgatcagttatagagataccttctcccatcttgaggttgaacaaccgacgcatcaagtatactttgttggctgctgaaggcttctcgtacatatctgataacgccttcattaagcctgcagtagtcttctcatttacgatgttgaatgtgacgttcttggctaatgtcaatctgatcacgcaaatagcctatcgatctagcaagtttcattcttcttgcttcatgtcgtctggcttatcccctaataacggttgatacaacttcttctaatat

SEQ ID NO: 2877 - DNA, 275 bp, Glycine max
  unsure (1)..(275): unsure at all n locations
agctatcgagaaattcntaatggtcataactttaacattgaggtccgattcaggcgcataatatatcgagacgctcgaacataaacaacgaaagctctcgagaaattcaaatggtcataacttttcactcggatgtccgattcacgcgcataatatatcgggacgctcgaaattgaccaacataagctctcgagatattcaaatggtcataacttttcacatggatgacagattccagtccatgaatgatcgagacgctcgaaattgaacaacga

SEQ ID NO: 2878 - DNA, 413 bp, Glycine max
  unsure (1)..(413): unsure at all n locations
actctgtctgttacaataagtatgtggtcaagaaacaccacttgagccatgaaaccccgttccagtggagacaataattgaggttccaagggtgttagacatcatggttgcatggtaggcaaacatctcacacatgtggttcttcaacacttgaccaatgttaggtggcattttaccaccaagtatantggcttctgtccgcaatgctactgtgtgcattacttgcacagcttttagtgggaacttttcatgagctcgttctccacacaacattattccatcataaccttctcaaacagcaattgctatatttgatacctctgttctggttggagttgggtgaacaatcatgctgtctatcatatttgttgtcacaataacagacttttccatgctacaacacaagttgatta

SEQ ID NO: 2879 - DNA, 357 bp, Glycine max
gacaatggtagtgcaatcttgttgtagtcctggatgaatcccctatagaaacttgcatgtccaagtaaagaatgcacttcctgcacagaagcagggtgaggcgaagaagccataacatcaatcttggccttattgacctcaatacctctactagagaccaaattccgtaagactattccttcatgtaccataaaatggcatttctcaaagttaagaacaaagttattctcaatgcatcggtcaagaactctagagaagctatccaaacatacataaaaaaaggaaccataaatagtgaagtcatccataaacacctccatgcaactctccaataaaatagaaaagatacttaccatg

SEQ ID NO: 2880 - DNA, 462 bp, Glycine max
  unsure (1)..(462): unsure at all n locations
agcttaccatgagtattaaaaaacttcaaaactgcctaatactaaccttatcatgttatatcaaatagtcacgacaacactataatgtgtagagaggcacaatgtcctaacataaatcaatatgaccttctatcactataaaataaatgctcggtcatttatatttaattaaataaataaagagataatcatttcataacatacagtatactacaacacttccaaaatgcttagcaaagcanaatgctctacataaatcagtatagtattctattaacacaaaatatatattcttttatttatatttaaatattntaatcttacaaagatcatttaacaatagcacacagtgtacaccagttttcgatctggttgctactggtctgatttggttgagatggtatatntcagctcaattcatctaaataacagcagaaagtatgctatcagacaatgaaaata

SEQ ID NO: 2881 - DNA, 461 bp, Glycine max
  unsure (1)..(461): unsure at all n locations
agctngctntaagactgtatattgatttctttagtatgcacaccatgtgttcatttccttcaactgagaaccccattggttggtccatacaaacattctcctctaaatctccattcagaaaggcggttttcacatctatttgatgtagctccaagtcataatgggctactattgtcatgataatcctgaaagaatcctttcgtgagaccaagaaaatgtctctttataatcaatgtcatctttctgagtaaattccttagcaacaagtctagccttgtaacgttcaaggttgccatgagagtcacgtttagtcttgaagacccacttacaaccaactctcttacaaccccttgttaattctacaaggtcccaaacaccattantgtccctgaaatctatctcttctttcatggcagttaaccacttctcagaattatcacaacttatagcttgtgaaaatg

SEQ ID NO: 2882 - DNA, 382 bp, Glycine max
  unsure (1)..(382): unsure at all n locations
agctngatgatataagtgagaagtgcgtgtatgtggttcacgactcaagatccacggggtactagctctatcttccctataggagagggatcgtcataagtcgcgacgtctacttcgacgaagaagattgttgggattggactgctcgcgaagactagtatgactatcttccttattttgaagaagatgctgatatcgtacaactcatcatggaggaacatattgcaccacctgcctcaccgacacctacgctggatgaaacttgttcatgtgagaggactccgcgactaaggagcattgaagagattcttgagggaacccataacctaaacgacattaacctcttttgtctttcctgtggttgtgagcctctaatctctca

SEQ ID NO: 2883 - DNA, 452 bp, Glycine max
  unsure (1)..(452): unsure at all n locations
aagttcttcctcaacactgtcctaagcaaagttcccaaagtcctattaacaacttccgtttgcccatcggtttgtgggtgacaagtggttgaaaataacaatttagtgcccaacttgctccacaaagtcctncaaaaatggcttatgaacttagagtccctatcactaacaatgctccttggcaaaccatggagtctcacaatctccttgaaaaacaaatcaaccacatgggaagcatcatcaactnntttacatggaataaaatgagccattntagaaaacctatcaacaaccacaaaaatggaatctctaccattgcttggttttggcagccccaaaacaaaatccatggataaatcaatccaaggatactccgggaatggcaatggagtatacaatccatgaggctntaccttagactntgccctcttacatacaatgcaatgntcaca

SEQ ID NO: 2884 - DNA, 411 bp, Glycine max
agcttctagaccagcaattcttgtgcctccgtagtataaatgagttgcatcaacatcaggaaagatgccctctccaaagatatttttgcaaaggtccatatggtatctgcaatgcatgagaaaagaatcaacaaccgcacatattaaagaatagagtcctaatgaaatattaaataagaggaaagaatcctgtcaatagaggagtatataaagtgaacagtgaggatgacgaacttgctttgcatcaatttctgaggagcgtatactatcatttgatggagccacctgaaagaatgcaacttcagtgcaaacttgaaaccaccataatcgagtagaactgtcttcatcgatagcagatttcttcaagtactcctggtcataagtctgcacattaacacccaaggttccaat

SEQ ID NO: 2885 - DNA, 476 bp, Glycine max
  unsure (1)..(476): unsure at all n locations
ctgcttaattgctccaggttgctgcatggaagggcaaaggtctgtatggtggtcagtagaggagcacacaccacaaacccttgcgacaggtacagatttctgattcaaggccagctgggttaccaagttaaccaatgcatccagtttgccttcaagcttcttagtttcaaatgatgcagatgggtttgtagctacctcatgcactcctctaatgactatggcatcatttctggcgctaaactgctgagagttggaggccatcttctcaattaaatttctggcttcagcaggagtcatgtctccaagggctccaccactggcagcatctatcatacttctctccatattactgagtccttcataaaaatattggagaagaagctattctgaaatctgatggtgagggcaattggcacatagtttcttatatcgcttccagtactcatacangctctcttcactaagctgtctaatac

SEQ ID NO: 2886 - DNA, 390 bp, Glycine max
tgtagggttaaagtgtcatgaatgtcacgtgctcatgcaacaattgttagccgtggctatacgagacatcttgccaaacaaagtcaggttagccataactcgcttgtgctttttctttcatgccatatgtagcaaagtcattaatcctgtcaaatttgatgagatggaaaatgaggccgcaattatattgtgtcagttggagatgtattttccccctgctttctttgacatcatgattcacttgattgtgcatctggtcagagaaatcaaatgttgtggtcctgtttatttgcggtggatgtacccggttgagcgatacatgaagatcttcaaagggtatacaaagaatctatatcgtccaaaagcatctattattgagagggacattgc

SEQ ID NO: 2887 - DNA, 452 bp, Glycine max
  unsure (1)..(452): unsure at all n locations
agctntattcaagacaaagaaattaaagatattctagatggatgatcaagacaagtctctagtcttagaaatggtatattaaataggagggaattccaattgaagtagcaaaaggtttggccaagaaatttaagttaaaaagtcttttacaagaaatttactctctggtaatcgattaccagaggatgtaatcgattaccaatggccaaaactgatttacaatagctattaaaatttgaattcaaaatttgcactgtgtaatcgattacacatatgtggtaatcgattaccagcaatttctgaacattttaattcaaattttatagtttgtaatcgattacacatatactgtaatcgattaccagagcagattttcagaatatattctcaacagtcacatctttttgtgtggttcttgaatggctatcacagggcctatatatatgtgactt

SEQ ID NO: 2888 - DNA, 410 bp, Glycine max
  unsure (1)..(410): unsure at all n locations
tcttagttntagatgatgcacgatgagttgtagccacctcatgtactcctctaatgactatagcatcatttctggcgctaaactgctgggagttggaagccatcttctcaattaaatttatggcttcagcaggagtcatgtctccaagggctccaccactggcagcatctatcatacttctctccatattactgagtccttcataaaaatattggagaagaagctgctccgaaatctgatggtgagggcaactggcacatagtttttaaatatctcccactattcgtatgggctctctccactaagttgtctaatacttgagatatccttcctgatgcgtgtggtcctggaagcacggaaaattntttctaagaatactctcttaaggtcatcccagctcgtgatggacc

SEQ ID NO: 2889 - DNA, 388 bp, Glycine max
  unsure (1)..(388): unsure at all n locations
acacaccattcttggaaaagtcctattaatccatgattgcgcatgttatctttgatttgataggaaatgatttgcaaagtcaagtcatgacatatctatggttcagaattaggatgaaacatttgcctgtgtgagatttatacactttgagcgatttccctctatttcaactggacccaatgtttcttctaagcgctcatttagaaacgaaatgctaatatcctaaatctcatttgtggttatgagaaaattctatcagcatgctttccttcccaatagacacattgttttcttcaaaaatacatgttgtntgatcagttgaaagttgtttcttgctagcgtgttgcatttagtgaaaaacaccgagatacttagtctcgcctttcat

SEQ ID NO: 2890 - DNA, 493 bp, Glycine max
atgcgtgtaagtgaacaaatataacacatccaataacatgaggtggtaaataaaccatggaaggaaggatacaatgatcaaacaacacatctagaggccttctcaagttaagcacctctagaaagggttcgattaatcaaataaactgtagagctcacagcctcaccccataaatgagatgggacattaccatctatcaaaagtaatcttgtcacctctaatatatgtctatctttccttttagccacttcattttgttgtggtgaataagggcatgtagttcgatgcaagataccattaaagttcatgaactctattaattcagtcttaaaatatatccctcaattgtctaatctaatgaccttaatatatgtgttaaattgtgagctatcatctgatgaaaggaacacacaatatcacacacatcacttttatgtttaagcagatacacccaggttacccgagtacaatcatcaacaaaactgataaacca

SEQ ID NO: 2891 - DNA, 448 bp, Glycine max
  unsure (1)..(448): unsure at all n locations
agctngtatttccatgtcacgatattaccagagcccncttccatccaagatgatcctactccttctccccacattcaaactatccttgaccgttaccaccctttgtttcaaacacccaacacccttcctccgcaacgtgagacagaccaccgtatccatcttctaccacaagccacacctgtgaatgtccgcccctaccggtacccccatttccagaagcaggaaattgagaaacaagttgaaattatgctacaaaagggccttatacaacctagtaatagccccttttcatcgccggtcttgcccgtcaagaaacaagatggatcatggagattctgcgtggattatagggcgctcaatgctctcaccattaaagacaggttcccgatacctaccgttgacgaaatgttggacgaaatanggggtgctcattacttctcgaagctcg

SEQ ID NO: 2892 - DNA, 445 bp, Glycine max
  unsure (1)..(445): unsure at all n locations
ntccncaccacctttcttctagatattgttttagatagcggtttggtgtcacgaggaggcatagacaaatcactactttcggattcaggttgatcaatcttaacaggagaatggtctcgttgtcgctgctctctgaagaccatcaagagcttctgagccttctctcttcctctcgaggtcccattcactgatattgacaccaatgcaggtataaccccttcttgcaggaccatctgacaacattcctcactcctgttacacaaaattaggagacaagaagcagcttgttcctgctctatgggctcaccggtatctagtgtggaagccaacgcacttataagtccaggagccaacatcattttctctcttcctgcttgataaaccgccaacattatcaaaacagctatgcagttttctgtccacatgcaatcaccctggtctacaa

SEQ ID NO: 2893 - DNA, 438 bp, Glycine max
  unsure (1)..(438): unsure at all n locations
agcttcttcatcagtgcatcccttgaagaaaggaggctcataatcagctggctgcaggataaaacaattatattgtcaaatcaccctgtatataagtcagccctttgcttgggcataacagaatgctaaaatagtcaccagttgcatagcaaagtatgcatttcaagtctgggcaatgcagaaattcatagaaaggataaaaggagccgagatttgctattcatgttaaagaacataccgtcacatcatcatagtagaggagcttcatcagaatagtgcgctagggaaagaatgcagaaatcagagtttgtaatgattacttaaacttgaagagagaatattatgaaattatcattcagagcatttgaatttctttacctcttctggcattntctccagaagtctcatcaactgaaccagagttcggatcatcttaca

SEQ ID NO: 2894 - DNA, 413 bp, Glycine max
  unsure (1)..(413): unsure at all n locations
tactaagctggattcctttagtagggaatctatcctacctaagatggagcataacccagtcacnctcattaagaattagctctttccttcctctatagcctttatttgaatacacctttgtttggttcttaaccctctcatgccacttctttaccaactctgacctagattccccttctttatgtataaaagaagtgtctagtggaaggggaatgaggtctaatggtgttaggggattgaacccatagacaacctcaaaaggggatggcttggtggttctatgaacccccatgttgtaggcaaattctacataaggaagatactcattccaaggttgcctttcagaaaaccccttaanaagatggataaagacctattcactacctctcgttgacaatcagtttgtggatgac

SEQ ID NO: 2895 - DNA, 475 bp, Glycine max
  unsure (1)..(475): unsure at all n locations
tttaccacaattgacgacttgagctaatttagaacatctgaagcatagggcaatgacataccaataggctgcttcttctgctacacaacctgaaagtgaaagatgttgcctcaatttcaagagtgacattccaagtgtaaccacggaatggccattagcatttgtcaaggtgtatattatatttcattcacaatattttctttcgtagcaaaatggatttaattaaaaaagttaacattataattttaataacctcatgaatctgattataattaaatcattaagttttaattaatgattataattgtatattttcttttaaaatatactttctaaacaaaaagctaatttcagataagatattcttcaagataattaanaaatgactacaggcttttggttctaaatagggttcttctagtacgttaaagacatactactttagagtatnaaagtggtatttgctctaattatt

SEQ ID NO: 2896 - DNA, 418 bp, Glycine max
agctaggatttcctcttattagggaatctatccttcctacgatggagccaaatccagtcccccacattaagaactagctcctttcttcctctattgtctttagttgcatacacctttgtttggttctctatttggttaaccctctcatccagctcctttacaaactttgacctagattccccttctttatgtataaaagaagtgtcaagtgggaggggaattaggtctaaggatgttagaggattgaacctatagacaacctcaaaaggggattgcttggtagttctatgaacccccttgttgtaggcaaattctacatgaggaagatactcatctcaagacatatggttgcctttcagaagagcccttataatggtggataaagacctattcactacctttgtttgcccatcatttg

SEQ ID NO: 2897 - DNA, 416 bp, Glycine max
accctgcttcttggacaaaatcttcttttaaggtaaacacaaaatgtgatttgcaagtgaataacatgtgtgaggcattcaacaatgtaataatggagtatagagataagccaattattacactattggagggaatccgattttacataagctctataattgtcaagttaaggactatcctcatcacgtatgatggttcaatctatccaaaagctcagcaaatcattgataaatataaaaaagcatgtgaagcatggcgggcacattggcgtggtgatgttgatttgtctttatttgaggtgtcaaagggcatggaaaaatttgttgtcaatcttaaacaatagacatattatagaaagtgggagttaactagaaattcatgcactcattccataccatgcatgtggatcaatagt

SEQ ID NO: 2898 - DNA, 466 bp, Glycine max
  unsure (1)..(466): unsure at all n locations
agcttcaaccaaggagagatggaccatttcaagtgcttgaaagaatcaatgacaatgcttacaaagttgagctgcccggtgagtataatgttagttccaccttcaatgtctcagacttatctctttttgatgcagatggagaatccgatttgaggacaaatccttctcaagagggagagaatgatgaggacatgaccaagaacaagggcaaggatccacttgaaggacttggaggacctatgacaagggctagaacaaggaaagccaaggaagctcttcaacaagtgttgtccatactatntgaatacaaacccaagtttcaaggagaaaagtccaaggttgtgagttgtatcatggcccacatggaggaggactaaatggcaccactctgtctcaattttagagtggttaattngtctaaataatggcccaatccttgtaaagttggcagaccaaaaatatgttt

SEQ ID NO: 2899 - DNA, 367 bp, Glycine max
  unsure (1)..(367): unsure at all n locations
agcttcgaaatgaatgttgaagctctgagtaaattcaaacgacaatatacttttactcagatgtccgattgagtcctgtaatatatcgaaaagctcgaaattgaatgtagaagctctgagcaaattcaaacaacaataactttttactcggatgtctgattgagtcccgtaatgtatcgaaatgctcgaaatggaataccgaagccctgagcaaattcaaatgacaataactttttactcggatgtctgattgagtcccgtaatatatcgagatgctcgaaatggaataccgaagccctgagcaaattcaaacgacagtaactntttactcggatgtctgattgagtcccgtaatatatcgaaaagc

SEQ ID NO: 2900 - DNA, 454 bp, Glycine max
  unsure (1)..(454): unsure at all n locations
tatgagaattccaagctntataagcaaanagtaaaaatttatcatgacaaanagctatcaaaaaggaattntccacctggtcaataggtattgttatttaattctcgattaagattgtttccaggtaagatgaaatccaagtggtttggaccattcatcatcaaagaatttatgccacatgaagcagtgatactagaggatccaaccaccaaaaggacatggactatgaatggtagtaggatcaaacactacctatgtggagattttgagaggataatcattgttgtccatctacaagagacttgaaccacaacaaagatgttcagctagaaagacgttaaagaagcgctcctaggaggcaacctagtatttctaaaccttactctttaattntctttttgttaaatttcatatntgtgttatttaaatattttttggttaaaatatgtctaaa

SEQ ID NO: 2901 - DNA, 194 bp, Glycine max
  unsure (1)..(194): unsure at all n locations
cgttcatgtgtcctccatcttcgagtttgttgccatgcgtagtgattgcttaaggcaattctccattctcaaccctttntcggagccccatgaatagcgttctcgttcatgtgtcttccaccttctagtttggagccatgcgcagagattgcttagtgcaattcttcattctgaacccttttttctgaacccca

SEQ ID NO: 2902 - DNA, 407 bp, Glycine max
  unsure (1)..(407): unsure at all n locations
ctcaagcttgagtaaataaaacgacaataactntttactcggatgtccgattgagtcccgtaatatatcgagacgctcgtaattganaacagaaactctgagcatattcgaacgacaataacttttgactcagatgtccgcttgtgtcccttagtatatcgagacgctcgtaatagaaaacggaagctctaagaaaaatcaaacgacaataactnttaactcggatgttggatagagccccgtaatatatcgagacgctcgaaattgaaaacagaagctctgagcaaattcaaacgacaataacttttgattcggatgtctgattgagtcccataatatgtcgagacgctcgaaattgaaaacagaagctctgagcaaaattaaacgacaataactttttactcgga

SEQ ID NO: 2903 - DNA, 451 bp, Glycine max
agcttccatcaagaagatagagattagctacacatacctctctaatagctaagctcacctccttgagatgaaaagctagatcttagctacacaccccctataatagctaagctcacccccatgacaaaaaaacatgaaaatacaaaaaaaaagtctttactacaaagactactcaaaatgccccgaaatacaaggctaaaaccctatactactagaatggccaaaatacatggcccaaacgaaggaaaaacctattctaatatatacaaaggtaagcgggctcatacttagcccatgggctcaaaatataccctaaggctcatgagaaccctagggccttcccttggatctttagcccaatctacttggagtcttctacccaatgcccttgcgggataggattacatcatacttgccccaagaaccatctaaagatgtattgtcggaagat

SEQ ID NO: 2904 - DNA, 482 bp, Glycine max
  unsure (1)..(482): unsure at all n locations
agaaattcatgaaggtgctctaatgtctgaaatctatgggattaagatggtcattgaccaatccctattntatgatttaacaaaatttcctagtgaaggtgtaccttttgagggtgcactgattgatgaatggaaattcgatttctctgtgcatgatgcccgccggttggtttgcaccaaccaagcggatatgaccggaaggcttcttgccggttcattggcttttgaaagtcgcatcctccattaccttatagtttgcattntgcttcctagatcttcaaaccttgcctaggtttctaaagaagatctcattgtcatgtgggcctttcataaaggtttacaaatcgattgggcacatcttggtagatattgcatgcataaggcatngcgattgaatgccacattgccttatnctcatctnagtactctntttcttcaacacttcaacatccctcttgattctgaaccctatgttcaaatca

SEQ ID NO: 2905 - DNA, 443 bp, Glycine max
  unsure (1)..(443): unsure at all n locations
agcttggttagatatttaaatgaagtagaaaaaagtgagaaaaatataaatattataggtgataagaagaaaaacacagaaagaaatgatcagtattaataaagtattttaaaaaaataaaatatctaaaaatcattactcattaggtattgccctttaactatatattgaaattcaacactttnttggtgcttacggtgcacttgttgtgcttattaaacagaagaattaagaaagtatttctttttctaggctcatacttgctaaaaaaatcaagaaattaaaaaatatttaataagaagtatacatatttaataaattaatttaatttaaaacataaaattagttgttttttattttctatttgaattattgacaagtaaactaacacgtagtagacgatagtcaatgctgtgaggaagaagacgtgtgtggacaacctt

SEQ ID NO: 2906 - DNA, 452 bp, Glycine max
  unsure (1)..(452): unsure at all n locations
agctntcgcaaggcggngatgttcatgagcagatcagttcgttgccgtgtagtcatgatctacataatgtcagatcatattactttgtatgtatgacaaaaatgaaaccaagatttttggacctctcatttatagttatacaaggttgcatacctccatgcttgttccatccttagctatctgttgtgatggagcaaattcaacaatataatcagttacagatagaagccactcaatttcttttctccacctggcctttctttctgaggacattggctccagctttgattgttctccgaaaacagatgctgcattgaatcaggaaacaaattattgaatggaaatttcattgagacttgagagatcacatctcagttagtcacagttataatatgcatgtgctttgaattgaattgagatgactacactatctattaattntatagaaatca

SEQ ID NO: 2907 - DNA, 464 bp, Glycine max
  unsure (1)..(464): unsure at all n locations
agcttcttagtttcagatgatgctgatgagtttgtagctacctcatgtactcctctaatgactatagcatcatttctggcgctaaactgctgggagttggaaaccatcttctcaattaaatttctggctttagcaagagtcatgtctccaagggctccaccactggcagcatctatcatacttctctccatattactgagtccttcataaaaatattggagaagaagctgctccgaaatctgatggtgagggcaactggcacataattttataaatctctcccagtattcatataggctctctccactgagttgtctaatacctgagatatccttcctgatggtcgtggtcctggaagcaggaaattntttttctaagaatactcccttaaggtcatcccaactgatgatggaccttggagcaaggtaatacaaccagtcttttgccactccctctaaagaatg

SEQ ID NO: 2908 - DNA, 468 bp, Glycine max
  unsure (1)..(468): unsure at all n locations
tatgctgcanacatctacaacagacctcctcaacctcagcagcanaatcagccacaacagaataattatgacctctccagcaactagtacaatcccgggtggaggaatcatcccaaccttagatggtcgaatccttcataacagcagcaacaacaacaacaaccttattttcagaatgctgctgacccaagcagaccatacgttcctccaccaatccagcaacaacaacagcaacagcccagaaacaacaaacagttgaggctcctccgcgaccttcccttgaagaacttgtgaggcaaatgactatgcaaaacatgcagtttcaacaagagaccaaagctntcattcagagcttaactaattagatgagacaattggctacataattaaatcaacaacagtcctagaattctgatagattaccttctcaatctgtccagaatcccacaaatgtgagtgtcattacat

SEQ ID NO: 2909 - DNA, 486 bp, Glycine max
  unsure (1)..(486): unsure at all n locations
cgtattntatttattntaatcccaggaacatactccattgtcagaatctgcattggaaaaatagttaaattgtagataaatatgaaagatatcagaagtaacaatgggaaagatgcataactgctatattattatctatatgaaaactgaaggctaaacctgtggtgtggtataatcccagatgattgtagggactttcacataatccaagttttcaaagttacttgcaaatagttctgcattagcagcttccttggtgtaatcaatctcctgaaaattgcaatacatgttacattaacaggattagataaagttgaggatgtgaagaaaacacatganaacatcattctgaaacatgaacaagatccacaaattaacccctccaaacctgcaaatttgcttaagagntcctttatacattggctaacctataatacttgaaaagcaataatgttgttcaacgcttagacaacgactgatgacata

SEQ ID NO: 2910 - DNA, 386 bp, Glycine max
  unsure (1)..(386): unsure at all n locations
tccttaagaagattcctaaagaagctagagcttagctacacatacctctctaatagctaagctcacctccttaagatgagaagctagagcttagctacacaccccgtataatagctaagctcactcccatgacaaaaaacatgaaaataacaaaaaaagtccttattacaaagacaactcanaatgccccgaaatacaaggctaaaaccctatactactagaatggccaaaatacaaggcccaaatgaaggaaaaacctattctaatatttacaaagatatgcgggctcatacttagcccatgggctcgaaatctaccctaaggctcatgagaaccctagggccttttcttggatctctagcccaatctacttggagacttctagc

SEQ ID NO: 2911 - DNA, 390 bp, Glycine max
  unsure (1)..(390): unsure at all n locations
tgagaaaataacttttactatcaaagttgcttagtctatcantttggtagtatttcacgctgacatatactaactttcttcccaccctaacaacactatcttgttcacatcaatgatatcatcacctgggtctaatctgagaaagcctattcttccatattgcgtgaagaatcatatgaaacaagtcatacttaacaggaactttgtgccacangaagtgctgctgaaccttctttactcccaaatgcagtgccaggtacttctcttctgggatngagagaagtatgtctctgagacttgggacatccctttcacgaacaaacagggaaaatgcctnccacttcaatacctcanataaaggaggcacantaatatctgatatgataactg

SEQ ID NO: 2912 - DNA, 487 bp, Glycine max
  unsure (1)..(487): unsure at all n locations
taagataccacctaaggcaaagattttacctggagactcatcaaagactgcttaccaacgaagctgaacctaagagggagacaagtggagataactgacccaatgtgtccgctttgtaataattccgaggaggatgcagcacacctcttcttcagctgcagcaaggtcctccccttgtggtgggagtcactttcatgggttaagtcagtgagtgctttccccaaagaacccaaataccattttatgcagcatactatatcgaacgctacacgatcaaaggatatgagatggagctgctggtggatagccctcacaaggaccatatggcaacacagaaacaagctgttatttgataatcaaactnttaacgcaaccaagctgatggatgaagcacttcttcttttatggtcttggcttacagcaatggaaaaagaatttgatacacatttcaatcagtggtcctctaatctggcagatgcctttatgt

SEQ ID NO: 2913 - DNA, 364 bp, Glycine max
acctttgaagccactggttctacacccctgtgcgagacgaggtttccaaggtactccacctgagactgagcaaagaagcacttacacaacttcaaaacaaattgattttcgagcaatacctgaaatgtggtctctaaatgacgtagatgttcctcgattgacccactataaatgagaatgtcatcgaagaaaatgatgatgaatcgttggaggtaaggtctgaagagcatgttcatggtggcctggaatgatgatgatgcattacacaacccaaatgacattactttgaacttataatggccatggtgtgttcaaaagtctgttttgggaacatctgctgagtggatgcggatttgatggtatc

SEQ ID NO: 2914 - DNA, 455 bp, Glycine max
  unsure (1)..(455): unsure at all n locations
agctagcagcctagttgtagctntcacgctnntttctctaatcagtcaaatgctacacaattcatatactaaaagctaccaaatactcctacgtggcattgctagaaatcgatagccgtcaaccttctacgtgagatgtgcttaccttaccacattaaagctagtactttacagtttctaccatttgttgtctgactcttctctatatcctttatatttacttttaatatgggtaatttagtaattctagttaagataacaaatgatgataaagaaaaaaattaattaataaataattcagaatgggaataaatttacaaaacataaaatatgatgagacaaatattttttaaagcataatttgtctttggaaacttcaatgaatctcanattaattggaatgtaattatatttcgatagtagctgttagaaactctaatttatataatcgaaat

SEQ ID NO: 2915 - DNA, 439 bp, Glycine max
  unsure (1)..(439): unsure at all n locations
tatgctgcanacatttataatagacctcctcagcaacaaaaccaacaacaacagaataattatgacctttcaagcaatagatacaatccaggttggaggagtcatccaaatctgagatggacaagtcctccaacacaacaacaacaggctgtccctccttttcagaatgttgctggtctaagcaagccatatgttcctcctccaatacagcagcagtcaccacaaagacaacaagcgactganggcccctctcaaccttccttagaagagttagtgaggcaaatgaccatccagaatatgcaatttcagcaagagacaagagctttcattcatagtctgacaaatcaaatggggcagatggctactcagatgaatcaagctcagtcccaaaattctgacaaatggccttcacaaactgtgcataatccgaaaaatgtaa

SEQ ID NO: 2916 - DNA, 472 bp, Glycine max
  unsure (1)..(472): unsure at all n locations
tagcttgtcgaaaatactaaaactgtttaaggtccaacgcctttaatggtcctctntgcttttatcggntaacatggaccgttcaaaagcataaaatcaacatgtaactctaccacttttgcaagaactacgtaggtctgatttcctcatcgcaattgaggatacgtaggagcaaaagccccgcttttgtcgaccacccctagagatcgttaatggtccagtgccttaacgtttctcttctttcacaaccaagagatcgttaatggtctaacgccttaacgtttctctcctttcaaaaaccaaaagatcgttaatggtccaaaggccttaacgtttctctcctttccaaaaatcaaagatcgtttaatggtccaacgccttatacaactntagttcggtcaaaatatatcttacaaaanaggataaaaataacttaaccaacgtttagttctcaaagaactacgtaagtctg

SEQ ID NO: 2917 - DNA, 474 bp, Glycine max
  unsure (1)..(474): unsure at all n locations
ntntgactcctgattctntggaacttgcttaactctggattctntagcatcatcaaaataatcttggaagacattgcttccacaatagaaagttggactagctcatctaggtccctatatggaaggagttcaaccttgtccctcacttccatattaagcccactaagaaacctagctatgcttgttctttccccctccctaagtcctgctcttaaaaggagtagttccatttgttgtctatattcttcaacacttatactcccttgtctaagcctttggaacttgtccataagctccctttcatagtaggagggaatgtgcctcttcctaagggcactcttaagatcattccaatactctactggaggatccncatgaatccttcgttccctaacaagggaagtccaccaatagagggcatacccttgaaagctaagggtagctaataggaactttatctcttcactaatatga

SEQ ID NO: 2918 - DNA, 382 bp, Glycine max
tcacatgtttgtcatcatcaaaaatggggagaatgtgaatgtatgtatacatgatgttgatgatgtcaaaagaagaatcaaacaaggctcattctgcttcaagattaatacaagattgtttcaacaaacaaagctttgattcaagatttcttcaagatcaagccttgcctcacaatgaaaggcttcaggtcattcaaggcacatgtaatcgattaccaatacatgtaatcgattaccaatggttggaaagtgtgtaatcgattacacatcatatgtaatcgattaccagagagggatctcaaggaatatcgccaacagtcacatcttatcattcgaatactgaatgggcatcaaaggcctatatatatgtgtgacttgggac

SEQ ID NO: 2919 - DNA, 380 bp, Glycine max
agcttgtgccagaatccgcaatctacgccaagttgctgggactcgagactcaaatagactctgctttggctaggaagaaaatcgatgtgcaggagaatgttatgaaccctcgctgtgttaggaaaacgcttagagtttatgtttacaacactttttcgaatcacgtgaaagtggagcctgtgaagaatggtgtggaggagccttcttgggcgcttatgataaccggaagggtgttggaagatggtaaggattctgtggcggaagggatttcgacgaaggaatatccaaaattctcggctggtttcaagaagattaccatatacttggatcagggcttgtaccaggataaccatgttgttgtgtgggatagtgcccgttct

SEQ ID NO: 2920 - DNA, 404 bp, Glycine max
  unsure (1)..(404): unsure at all n locations
ctgagacaattcanacgacaacaactntntactcggatatctgattgattcccgttatataacgagacgctcgaaattgaatgtttaagctctgatccaattcaaatgacaataaattttttctcagatgtctgattgagtccaataatataacgagacgctcgaaattgaatgttgaagctctaagccaattcaaacgacaataactntttactacgatgtctgattgagtcccgtaacatatcgagacgctcgaaattgaatgttgaagctctgagacaattgaaacgacaacaactctttactcggatctctgatngagtcccgtcacatatcaagacgctcgaaattgaatgtggaatctctgagccaatttacacgacaatacacttttacttcgatgt

SEQ ID NO: 2921 - DNA, 413 bp, Glycine max
  unsure (1)..(413): unsure at all n locations
agcttcaacattcaatgtcaagcgtctcgatatattacgggactcaatcagacatccgagtaanaaggtattgtcgtttgaattggctcacagcttcaacattcaattccgagggtctcgatatattacgggactcaatccgacatccgagaaaaaaattattgtcgtttgaattggctcagaggttcaacattcaattttgagcgtctcgatatgttacgggactcaatcagacatccgagtaaaaagctattgtcgtttgaatttgctcacagattcaacattcaatttcgaggcgctcgatatattacgggactcaatcagacatccgagtaaaaagttattgtcgtttgaattggctcagaggttcaacattcaatctcgagcgtctcgttatattacgggactcaatc

SEQ ID NO: 2922 - DNA, 324 bp, Glycine max
  unsure (1)..(324): unsure at all n locations
tcanattatcatccanaagtatgttgctggatttaatatctcgatgcacgatatgtggttcacactccttgtgcaaataagctaatccatgagctgcaccctgngcaatcttgagtcttacatcccattttagagctgaatttccatcctcactctcatgcagccaatagtcaaggcttccattctccaagtaggagtaaattaacaatctgtcattgaaatgctgacaataacctttaagtgaaacaaggttcttatgttgagctcttgagagtgcctccacttcagcttggaattcacgttccacctgaccacagtaccctg

SEQ ID NO: 2923 - DNA, 362 bp, Glycine max
  unsure (1)..(362): unsure at all n locations
tacacccgcgctgtttgtattaatgatcatcgcttgtcttccttattatatattnngatatcatcattcattttggtgtctttcctctgtgggcatggcgattctgtcctaatttcttgtagaatgcatatagattcataattctacttgaggaaagttatttattagataatttaaatgtctttaatctaatattgattgctcgaatgttctcttataaagaagttaaatttttataatgcttaacacttaaaaatatagaatgttaattcccttctaaaaagtgagaaattgaaattttcttcttgataaaagagcctgataaaatatctgcgtatcttctttataacctccgctctctc

SEQ ID NO: 2924 - DNA, 342 bp, Glycine max
  unsure (1)..(342): unsure at all n locations
acctgtgccactctttacatattatggaattcgactttntgaataaatatgcattgtcttaaacgtttcataatttgttgatatagattattatgctaactcatttaaaagatattaaaaaattatataaactaacacatcaattattgaatttagtttatataacgattaggatgataataataatggtcggaaccaacaaaaagataaaataactattaataagaaataaaaatgaatatattttactgtttgggtattgtgtatctagaatgagcatgatccaataataaaaaaaaaaaaagtgagcatgacttcgatccgatgaacttgatttgtctt

SEQ ID NO: 2925 - DNA, 381 bp, Glycine max
  unsure (1)..(381): unsure at all n locations
ngcttcttgcaattccaagacactagagagcttcttaataggtggcatgtcgcacttgtactnttttttatctaatttgcatcctgcaaaatcagaatctgaaaaacctgttatgcttaaggagatacctttgggatacaacaaacctacattggttgtgcccttaagatacttaatgatccttttaacaacaactaagtgagattccttaggattggactggtatcttgcacataagtaaacgcttagcatgatatccagtctacttgtagttaagtagagaagtgatccaatcatacctctatatcttgattcatccactgatttacctttctcatctaaatcaaggtaggttgatgtagccattggagtatatgcttc

SEQ ID NO: 2926 - DNA, 354 bp, Glycine max
gagcttatatatatcgaggcgctcgatattgaacaatggaagctcttgagatattcaaatggtcataactattaactcggatgttcaattcatgcgcatcacatatagagacgcttaataatgaacaacggatgctctccagaagttaaaacgcgattaagtattcacactgacgtccgattcaggcttataatataacgcggcgctcgaaattgaacagcggaagctcttgagaaattctaaagtcataacgttaactcggatgtccgatatatgcgcatacatatagagacgctaagacacgaacaactgatgctctcaagatattaaaatggccacaagtgctgacactga

SEQ ID NO: 2927 - DNA, 388 bp, Glycine max
  unsure (1)..(388): unsure at all n locations
ttcatcattaatatacacgtcattcaatattctacactcatttatccaacataattgctatattttaatcaattactgtcaaacacactttttgacagcaacactaaagtgccatggataagacttgaggaagaagagataatgaaggagaggagagaaaagcacggaatttgtgctctaagagagctctgaaatctgaagtttaatttttaaatgatcaaagttgaaaaaatgcacacacatggcttctatgtatagcctaagtgtcacacaaaattggagggaaacttgaatctctattcacaattttcttgaatttgaaatcgaatttgtggagccaaattgtggaggcanaatttcactaattatgattagtgaatctaactat

SEQ ID NO: 2928 - DNA, 448 bp, Glycine max
  unsure (1)..(448): unsure at all n locations
agctaaaggaagtgaaagaattagtatgggcagatatgtctccgcattgattggtaaatctgttccccaaatccctgaaaaatgtaaagatccaggtacattcgacataccttgtattatagggaacaataagtttgataatgccatgctagatttaggagcttctgttagtgttatgcctttgtctattnttaattntctatctctaggtccttngcagtcaactaatgtggtaattcatttagctaatagaagagttgcctaccctgctggtttcatagaggatgtcttagttagagttggtgaactgattttccttgttgnattnntatatttgaatatggaggagggattntctanaggatcagttcccatcattctangcagaccttttatganaactgctataactaagatagatgtatatgcaggcacactatctatggag

SEQ ID NO: 2929 - DNA, 493 bp, Glycine max
  unsure (1)..(493): unsure at all n locations
gatccaagaaggcgtatattgcttgggatgactatgactcatccgatcgttcggagaaggagatcaatcttctatccaaagactatgaaagcgatgaanatatctctcaagaagattaagcaaaaagcaaaagtctgacttctaccttcaaagatctagtcacttgaattatgaaaaaggtaacatcaaaaccattctcttttaaatntagctgattggaatttntctttcaattaacttggttatatgatgactaacaaaatcttaattggttggcttggatgattgctatgtgcttatatgaatgattgagttattntctttcttaaagcatgaagtttaatattaaaacaaaccagtgatagtacatatgattcttgcatgaattttggataatatgtgatcattcatanaagttnttttaaaaaaatctattatggtatatatatttggattatataagagttttaaatataaatactttgactctttc

SEQ ID NO: 2930 - DNA, 464 bp, Glycine max
  unsure (1)..(464): unsure at all n locations
ctacatctntatctgggttacccaaatcattatagacatcataattatagatcctttcatgttccttgcgctctccggttccatttcctcttaaaatctccaactcttcttccctgtacttaactaatggacctggtgttgcacttggaagatatgtctacaatatatagatttcatgaattaatnttctcattcacaaaatgaaaataattaaaaaaatgttgtgacaatatacaattggaaataaatgagctaagtaaatcttgtaaacattaggaaaatagtacttagattcaaaactactagacttaccttattggcaaagaaaatgcgatcctttntgtcgtagtctttaaagttgtaaacccatgagttacaaacaaagtgaatggttccttgatttggaatgtcctcaagagtgacactgacaaggaagaactcatcactacgtatagttctgatgt

SEQ ID NO: 2931 - DNA, 413 bp, Glycine max
tccattgttcaatttcgagcgtctcgatatatcatgcgcctgaagtctacctcttagtgaaaaataatgaccatttgaatttctcgagagctttcactgttcaatttcgagcgtctcgatatattatgcgcctgaatcggacctccgagtgaaaagtaatgaccatttgaattgctccatagctttcattgttcaatgtcgagcatcttgatatattatgcgcctgaatcggacctccgagtggaaagttatgaccatttgaatttctcgagagctttcgttgctcaatttcgagcgtctcgatatattatgcgcgtgaatcggacctccgagtgaaaagtaatgaccatttgaattgctcaagagcttccgatgttcaatttcgagcgtctcgatatattatgcgcctgatc

SEQ ID NO: 2932 - DNA, 312 bp, Glycine max
  unsure (1)..(312): unsure at all n locations
agccttctctagatggattatgccagagacatatgtgtagatctgaagtccagatactctcgaggagatntattgagaatctttgatctgcaattcgtcaaggtgattgctcaattactgattatttcacacacctttgaagatttcgggagttgagtctaagacttcacagagaaaaagactgtgtgatcaagagaatcacgagtgaccatggcagagagtttgaaaacagcaagtttactgaatactgcacatctgaaggcatcactcatgagttctctgcagccattacaccacagcanaatggcatag

SEQ ID NO: 2933 - DNA, 369 bp, Glycine max
  unsure (1)..(369): unsure at all n locations
ntagagctngtttgtgggatgagggaagttggtattgtacaaagattttcttcaatcagttatgctctgcgggcttgtgggaacctttttatgcttaaagaaggaagatcatttcattcttacatgattaaaaatcctttggaagatgactgtagattgggcgtagaaaatgctcttcttgaaatgtatgttagatgtagagctattgatgatgcaaaattaattntagaaaggatgccgatacaaaatgagttttcctggactactatcatatctggatatggtgaatcanggcacttcgtagaagcactggggatcttccgtgatatgcttcgatattcaaaacccagtcagttcacattaattagt

SEQ ID NO: 2934 - DNA, 476 bp, Glycine max
  unsure (1)..(476): unsure at all n locations
tcatgcttaactatgtatggcaaaaattcattactgttgttcaagacatacttgtgagcttgtaacaaatcttctacacttggagtgatcacatgcagtcctcttgaacccttaccacccactctgtcatcatgccgagactcangaaggccaacaggtttagccttctctaagtattatgaacaaaattcaatggctttttctgcaatgtacctctcaacaatagatgcttctggacgatatagattctttgtatacccttttaagatcttcatgtatcgctcaaccgggtacatccaccgtagataaacaggaccacaacatttgatttctctgaccagatgcacaatcaagtgaatcatgatgccaaagaaagtagggggaaaatacatctccaactggcacagtataattgcggcctcantttccaactcatcatacatgactggatcaatgactttgctacatatagcatg

SEQ ID NO: 2935 - DNA, 383 bp, Glycine max
  unsure (1)..(383): unsure at all n locations
tggcctcaacagactacttatttccagaaggaaattcaatcaatcgacctccaatatgtaatggaaagggttaccactactggaaaacccgtatgcaaatatctattgaggcaattgacttaaacatatgggaatccataaaaatagggccttatatacccaccacagttgaaagaaccacacttgatgaaagcacaactagtggaagcacaacaatataaaaacctagagatagatggtctaaaaaggatggaagacgagtacgatataatttaaaagccaaatacataattacatctaccctaggaatggatgaatatttcanggtttcaaattgtatgagtgctaaagaaatgtgggacactctacaagtcacacatgat

SEQ ID NO: 2936 - DNA, 332 bp, Glycine max
  unsure (1)..(332): unsure at all n locations
cacctgagctgcagcttccttgttaattctgagcgtctcaatatattatgcgctctgaatcagacatctgagttgaatgttatgtccatttgaatttctcgagagctctcgatgatcaatttccagcgtctcgatatattatgcgccagaatcggacctacaagggaaacgttatgaccatttgaattgctcaagagctttcattgttcaatatccagcgtcttgatataatatgcgcctgaattggactctcggtgaaaagctatgaccatttgaatggtcaagagcttncattgtcaattttgagacgttcgatatatcatgcgcctgat

SEQ ID NO: 2937 - DNA, 415 bp, Glycine max
  unsure (1)..(415): unsure at all n locations
tcatatgattcangaagctcacanagcacctganagaagtttctttagactaaaattgcaatctaaattgtacatgtcaacagtttttcaccccaaaatttagtgtagcatgcctttcaattactgcaaataattacttcaccaattcaagttcgtcctacctttccaaatcaataaatactaaaagtgttattgttagttataggcaaatagaaattgatacatactgagtccattaactttgattaataccaaaaggcaaaacataacatgtctttaatagtaataaaagggttaccttcacatcgttgagaaagataaatttacatccattcagatgggctcagactgctatatccatgtcttctacaattatcctctcaagccaatcaccagattcttcaagtgcttttat

SEQ ID NO: 2938 - DNA, 413 bp, Glycine max
  unsure (1)..(413): unsure at all n locations
ctagccttaggttgtaccatgttgctcatgttgttcctcctatctctaatagtgaatccactatataggaagagcacatggctttggaagaggcaacaaatgaagggatttgactgaagggtccgattagaaatctttgattttcacaagaaaaggttgtcattttctacaacagtctaagtgcaatctatttagccaaggatcaattccatcatgaaaggactaaacacattaacatcaaatacaacttattcgtactaagaataaggtcaaagtccagaaagttaatacgagggagaatacaactgatatgttcatgaagcatgttccaagaagtaagtttatgcactgcctggatgtacttaatgtagatcgctagagatgaacaaagttacttgtaattcanaaatgta

SEQ ID NO: 2939 - DNA, 457 bp, Glycine max
  unsure (1)..(457): unsure at all n locations
gctaagcttcaagagaaatggcctcagcaaattccttatttccatattgaaattctatcaatagacctccaatctttaatggagagggttaccactactggaaaacccgaatgcaaattnttattgaagcaatagacttaagtatttgggaagccacataaatagggccatatatacctaccatagtagaaagaattacaatagatggtagcacatcaagtgaaagcataacaatagaaaaatctagacatagatggtctgaagaggatagaagatgagttcaatacaatctaaaagccaaaaacataataacatctgccctgggaatggatgaatatttcagggtttcaaattgtaagagtgctaaggaaatgtgggacactctacaattaacacatgaagggaactacagatgtaaaagatctanggataacacactaacccatgagtatgaact

SEQ ID NO: 2940 - DNA, 323 bp, Glycine max
tctggtctcaatttcgagcatctcgatatattacgggacttaatcttacatcctatttaaaagttattgcggtatgcatttgctacgagcgtccattttcaatttcgagcgtctcgatatattactggactcaatcggacattcaagcaaaaagttattgtcatttgaatttgataggagcttccgttttcaatttggagcgtctcattatattacgggactctgttggacattcgagtaaaaagttattgtcctttgaattggctacttgcttatgttttcaatttggagcgtctcgatatgttacgggactcattcggaca

SEQ ID NO: 2941 - DNA, 219 bp, Glycine max
  unsure (1)..(219): unsure at all n locations
agcttganatgaataatggaagctctcgagaaatatatatggtcattacttttcactcggattggcgattcaggtgcataacatatcgagacgctcaaaattgaaccaccgaagctcttgagaaattcaaatggtcataagttttcacatggatatccgattctgtgttataatatatcgagaccgtcgaaattggaccacgacttcggaaatccaatg

SEQ ID NO: 2942 - DNA, 500 bp, Glycine max
  unsure (1)..(500): unsure at all n locations
atctctaagcacctgcggctgcagctaatggatttctgaaaaaggacatcttttaatgtaagaatcgtgagttcaataatgagatttcaagaactttcaggtagaagaaaagatgaaggttataaagaatatacgcaaacattctgaaagtgttttctatccataagaaaatttcaatttttcacattttagaaggaaattaaaattccacgtttttagttctttaaaaatttaatttaaaattccaacatttaaatctttcataaaaaacatctaaataatgaattttagattaaaaaaatctaaattctctgataaattacttttttcatttaaaattttctatccaaacgcactctaatttcttngaataagtttctnttcattgtagaaaggacagccttaatttgtttgtccaccaatcttaatcaacttgataaaggagttatgatatattagtgcatgtaatattaagagataatgctcattatctgtacaag

SEQ ID NO: 2943 - DNA, 496 bp, Glycine max
  unsure (1)..(496): unsure at all n locations
agcttactcaagggattgtctgganactggcggatagaagagatggctgcctttccttctgcagtcttagactcggngaaatacttcttcataaaattttctaccaccccgtcccaagtcttaagactgttgtctttaaatgaatgtaaccatctttttgcttctccggacagtgaaaatgagaacaaactcagccacacaacatcttctggcacacctgcaagcttgattgtattgcaaatttcaatgtaagtcgctaggtgtgcgtacggatcttcattcggtaggccatgaaataaattgccttgtattaaatgaattanagaatggngataagtaatattatgtgcttgaacctctggccgcgctatactagtgaaaaattgtggcacaacagaactagagtagtcttcaaaggtcactcttctaggttgatcttcagccattatgtnggcctcaagtgccctggtgtagattcccttatctatggaaagat

SEQ ID NO: 2944 - DNA, 362 bp, Glycine max
  unsure (1)..(362): unsure at all n locations
tgtaatcgattacacacatactgtaatcgattaccagaggagaatttcatgaaatattctcaacagtcacatcttttcgtttggttcttgaatgaccatcaaaggcctatatatatgtgacttgagacancgaattgttaagagtttttcagaacaacaagtgtttattctctcaaaaagcaaaatcgttntatcctcttaagaattccttggccaattcaattgcaattcattaaggaatcatttgagtgctcagatggtaaaatctatctctttcaagagagattcattcttcttctctttctgattcactaagggattaagagaccgagggtctcttgttgtaaaagaattctaaacac

SEQ ID NO: 2945 - DNA, 512 bp, Glycine max
  unsure (1)..(512): unsure at all n locations
agcttgcatctattcttaattatataaaaagactcttataatggatcataagttgaatacttactatttccatgcatgtggaagcttctntgtcttgttatagtagcaggcaaggcaatgatacaaatcttctagaatttcatatttttattattaattaagacttgatcaatcttacattaattgaatttaccgtggtgatcatgtgcgtgtatttggtagatctagctagtgaatgtttataccaaactgaatgatcaaagtgtttaagtaatatccaatagattagttttatctttaatatagtcatccctagactntattctatcatttgtcttaaattgatatattaatgatcagtggaatatcgattaacacanaagcatctatttattgacccagatcaaatgctttaggtgactntgggaattgctaattaacctanggttggaatttcataggaataaggttgnngaaaaatcggtactatggagtcataatcctcgatctct

SEQ ID NO: 2946 - DNA, 405 bp, Glycine max
  unsure (1)..(405): unsure at all n locations
tcttagtttcagatgatgcagatgggtttgtagctacctcatgctctcctctaatgactatggcatcatttctggcactaaactgctgggagttggaggccatcttctcaattaaatttctggcttcagcaggagtcatgtctccaagggctccaccactggcagcatctatcatacttctctccatattactgagtccttcataaaaatattggagaagaagctgttctgaaatctgatggtgggggcaactggcacatagtttcttaaatctctcccagtactcatacaggctctctccactgagttgtctaatacctgagatatccttcctgatggctgtggtcctggatgcagggaaaatnttttctaagaatactctcttaaggtcatcccagctcgtga

SEQ ID NO: 2947 - DNA, 487 bp, Glycine max
  unsure (1)..(487): unsure at all n locations
actaagcttacacatttagcttcagcaatcaatcattntctactgcactntatctaaatttcccacacttcacaatccacatacaccattcatgacgaaagtccaatgtcaaccaactgagctgaactaaaccccttcattaaaaaattgaaagaaaatttatatcttgtctcaaaaattaaggaaatgtttggtttggttgttttctatagaaaatgataatgaaatgtgtttggttggatttttaaaaacataggaaataaccagaaaataaaaacaataaaatattatttacagtgttttcagttgaaaaaacagaaatctcattctggataaaatgaaattgtgatgacaatcaatataatttcaagcaaatctaaaaatataaaaagacaagaagtcaatatatcatacacnttttaatattttatttcataaanacagaaaacgagaagtcaaatcanacatattttcagaattataatct

SEQ ID NO: 2948 - DNA, 485 bp, Glycine max
  unsure (1)..(485): unsure at all n locations
caatgccaaanatcattaatatatatgatatatattntatagaattgtgagatntatcaattttcaatacaaagtaatgtaatatacattttacataaatgacatctttagctctccacttaatgtttttccaaaagcgtagttcatttattattataggtaattctttataaacactgtctacactagttaaatataaatatctatttgtagaagaaaaaaaatataaatctcaaagagagagacaagaagataagaaagaatataaaataagatgattgatgtgtgatggaaaaaaataatgaatttttttatgaataatataattcaataacatatacatgtgtttcccctgtgaaaatagatatattcccgtaaatccttaggtgttagcatgatgtatttnntatgaacactaattgtttttgngatgattacagatatgncaaactgatctggaatttaagcttaacatgatgagtgat

SEQ ID NO: 2949 - DNA, 348 bp, Glycine max
  unsure (1)..(348): unsure at all n locations
acttcaatctaagcttaacattcaatgtcgagggtctcgatatattacgggactcaatctgacatcctttanaaaagttatngncatttgtatttgctgagagcatcaacattcaatttcgagcgtgtcgatatattacgggactcaatcggacatccgagtaaaaagttattgtcgtttgaatatgctcagagcattgggattcaattttgagcgtctcaatatattacaggagtcaatcagacatccgagtaaaaagttattgtcgtttgaatttgctcagagcttccggattcaatctcaagcgtgtcgatatattacaggactcaatcagacatccgagttaaa

SEQ ID NO: 2950 - DNA, 418 bp, Glycine max
  unsure (1)..(418): unsure at all n locations
agctngagatatcctggctttgccacaatccatatgagttgatcacttcttgatgtagctccatgtggagcttgtaggccttggatcttcttcatcaatggattcctttgattcttgaatatcaatgttagcggaatggagaaggaagaaagatgattggagatgccacatcaaggataagatgagtcagtcaagaagaagctcaccaccatatgaagccatagattagagcttggaggtaggagaagatgagtggagggagagaaggagaagaagcacgaaattttgtgcctcanatgaggtctgaactttgaagtgtaattctcaaatgatcaaagttgaaaaaatgcacacacatggcctctatttatagcctaactatcacacaaaattggaggggaaattgaatttctattca

SEQ ID NO: 2951 - DNA, 484 bp, Glycine max
  unsure (1)..(484): unsure at all n locations
gctcgagatgaggaagtgtcaaagccttctctagatggattatgccagagacatatttgtagatctgaagtccagatactctcgaggagatttattgagaatctttgatctgcaattcgtcaaggtgattgctcaattactgattatttcacaaagttaagaataatttgggatgaacttgaaaattatagacctaatgctacttccacatgtgtaaataaatgtacatgtgatgctctcctatgtgttatagaaagaaaaacacaagatcatattatgcaatntttgagaggattaaatgatcaattcattaatgttaggtctcacaatttaatgatggatccactgcgtataatttacacaaacttttcctacatcgtgcaacaagaaagacatnatatggggatgaatcatattggaacattagaatcctaggatatcatgnataatgcagcaagttctacatctaatcatagatgttctt

SEQ ID NO: 2952 - DNA, 404 bp, Glycine max
  unsure (1)..(404): unsure at all n locations
tctgttgtcaatttcgagcgtctcgatattntacggtgttctatctgatatccaagttaaaagttattgtcgtgtgattgttctaagagcttcccttttcaattacgagcgtctcgatatattacgggacacaatcggacacccgagttaaaagctattgtcgtttgaatttgctcagagcttctattttcaattacgagcgtctcgatatattacgggactcaatcggacatccgagtaaaaagttattgtcgtttgaatttgctcagagcttctgttttcaatttcgagcgtctcgatatactacgggacacaatcggacatccgagctaaaagttattggccgttgaatttgctcagagcttctattttcaattacgagcgtttcgattactacgggactc

SEQ ID NO: 2953 - DNA, 221 bp, Glycine max
tctctaagtgacctgaggctgcagcttaacatagaccacttcaggttatgaacttcttacatggacttgatggggcctatgcaagttgaaagccgtggaggaaagaggtatgcctatggtggtgtggatgatttcttcagatttacctgggtcaactttatcagagagaaatcagaaacctttgaagtattcaaagagttgagtctaagacttcaaagaga

SEQ ID NO: 2954 - DNA, 246 bp, Glycine max
ctcggatgtccgattcaggcgcataatatatctttacacttgtatttgaataacagaagctctcgagaaattcgaatggtcataacttttcacacggatgtccgattcgggcgcataatatgtcgagacgctcgcagattaacaacggaagctctcgagaaattccaatggtcctaacttttcactcggaggaccgattcaggcgcataatatattgagacgctcgaaattgaacaacggaagctc

SEQ ID NO: 2955 - DNA, 197 bp, Glycine max
gcttctcgatacattatgcgcctaaattggacattctatgttaaggttatgacaatctgaattgctctagagattccattgttcaatatcgagcgtctcgatatattatgaatgtgaatcggacctccgcgttaaaagctatgaccatttgaatttctcgagagctgtcgatgttcaatgtacagcgtttctatata

SEQ ID NO: 2956 - DNA, 416 bp, Glycine max
  unsure (1)..(416): unsure at all n locations
tcaattntcaattcggagcgtctcgatatattacaagactcaattggacatcctttgataatgttatagccgntggaatttgctacgagcttccgntttcaatcttgagcatctagatatattttgggacacaaccggacatccgagtattaagacattgtcgtttgaatttgctcagagcttcgattctaaattttgagcgtctcgatatattacgggactctatcggacatccgagataaagttattgtcgtttgaattttctgcaagcttccgttttcaatttggagcgtctcgatatatnacaggactcaaccggacatctgtgtatatagtaattgtcgtctcaatttgctcagagcttctagtctcaagtttgagcgtctcgatatattaccagacttatatatacatcc

SEQ ID NO: 2957 - DNA, 279 bp, Glycine max
  unsure (1)..(279): unsure at all n locations
agcttctagtctncaatttgagcgtctcgatatattacgggactcaaccggacatccgngtataaagttattgtcatttcaatttgctcagagcttctagtctcaattttgagcgtctcgatatattacccgattcaatcggacatccgtgtataaagttattgtcaattcaattccattagaggttcaggacctaattttgagcggctagatatacctaccgacttaacctgacttacgtgtatcatagttggcgtattcgaatttgctccgagcttc

SEQ ID NO: 2958 - DNA, 274 bp, Glycine max
  unsure (1)..(274): unsure at all n locations
agcttgaacccatgtgcaatgtcggtcatcctantccccaagaaagatggcacgtggaggatgtacatagattgtagacccatcaacaacatcattatgaggtatagacatcctatccctagactaatgatatgttggatgaacttcatggttcttgtgtcttctccaacatagatttgaaaagtgattaccatcaaattacaatgagagaaggtgatgaatggaaatttgtttctaaactaaagttggacttatgaatggttggtcatgcctt

SEQ ID NO: 2959 - DNA, 491 bp, Glycine max
  unsure (1)..(491): unsure at all n locations
gaccatagaaactaagcttcaaaatatggcctcatcaatatactagtntcccgaaggatattctataaatagacctcccatctttaatggagtgagttaccactactggaaaacccgcatgcaaatctttatagaggcaatagatctaaatatctgggaagccatagaacaaggaccttatgttgcctctataatagccggaagtgcaacaatagaaaaacctaaagcaaattggactgaagaagaaagaagattagtacaatataatttataggccaaaaatattatgacatctgccttatgtatagatgaatactttatggtttcaaattgtaaaagtgctaaagatatgtgggatacactacaagtaacacatgaaggcacaacagatgtgtaaagatctacgatatacactctaacgcgtgagtatgaactctctatgatgaatgtanatgaaagtatacaagacatgcataagaagttcacacaca

SEQ ID NO: 2960 - DNA, 421 bp, Glycine max
  unsure (1)..(421): unsure at all n locations
ggatcttaagtcacctgcggctgcagcttcatagaaagttcgctcctaatttctctacaattgcatcacctctcaatgagctagtaaagaagaatgtggcatttacctgtggtgaaaaacaagagcaagcctttgctgtgctcaaagaaaagcttactaaggcacctgttctagctcttcctgacttttctaaaacttttgagcttgaatgtgatgcctctggagtgggagatggagctgttttgttacaacgtgggcacccaattgcttattttagtgaaaaaattcatggtgccacccttaactaccccacctatgataaagagatgtatgccttaataagagcactccgaactttggaacattaccttgtttccaaggaatngtcattcatagtgatcatcaatcacttaagttcatt

SEQ ID NO: 2961 - DNA, 446 bp, Glycine max
  unsure (1)..(446): unsure at all n locations
ctgctctattcaagctctcccaanatctagaggtaatcctatgatctctatcagacactatgctagatgacacaccatgtaacctaacaatctgactaatatacagggaggtcaacttttccaaagatggataggcaaatggtacttattcttaaccgtcaccttattcaactagcggtagtctacacacaacctcatggtcccatctttcttcttcactaacaacactggtgctccccatggagacacactgggtctcacaaactgcttctctaactggttcttaagctcggctaactctataagatacatcctataaggggctatggatacaggtccaaccncaggtactaagtctttggaaaactctatctctctctcgggtggcagaccagatatatcctcaggaaactctntgacaacagggagagcacccatggaaacct

SEQ ID NO: 2962 - DNA, 352 bp, Glycine max
  unsure (1)..(352): unsure at all n locations
tgtctattttgggcattccggcctccaccattctggtctttcttgggtcgtgaacaatctctcttagggtgtcccttttttncacaattaaaacatgttatgcctatatcgggacaattcgaggagatgtgccctggcttaccacacttgtaacaaatgatatgagtggagaacgtattggggttgctaccggtaccacctgcaaatcccctatcaacagtcctctgattgtcatggcggntaccatattgcttaagaggaatcaaatatgggtttcctcgatgttgaagcccattctttttgttcctcattggacctgtactcttatagtaagccgccctgtctcgggagt

SEQ ID NO: 2963 - DNA, 399 bp, Glycine max
  unsure (1)..(399): unsure at all n locations
tgcatgatgcatngaaattcttatggtgattgtgtatgatctggataagctaatgatgaaatggcgttactattaatcttattggtagatattttatgtaccaattctgttcaaatggaaaggagatgtagtttttttgtttgtaatagttaatatgttggtttgatagacttggatgatgctacctcaagtatgaggttctttnttgttntagattagtttatatcatctggtgatttcagnttatattattaatatatttgtaggactaccaactatattaacgttagattaaaaattaagccaaattatatattaaggccttgtttagcctattatagaaggtgtgttatttattttctggtaaaaacaactatcanaggaatattaaaggtttat

SEQ ID NO: 2964 - DNA, 428 bp, Glycine max
agcttctcaaagatgtacttaaccaggtccatcttggatatcaaccaggtggtatggctcagcatgtattgtcttagacggtgggacgcccagactaaagcacaacacgttctttcgagcagggagtagttcatttcataggccgtgaactttttactcaagtagtagacagcgcgttctctcttcccggactcgtcatgttgccccaacatacatccaatcgactcatccaaaatcatcatatacaagatgagaggccttcctggtaccaacgacataagcacgagagggttcatgagacactgtttgatccttccaaacgcctcttgacaatcctcattccaacggacggattggttttgcgtaagaagtggaataacggctcacaattagcggtgagttgtgatatgaatctggcaatataattc

SEQ ID NO: 2965 - DNA, 431 bp, Glycine max
agcttctaaactttatacaagaatgaagctctgatatcacttgttggacaagtggcctcaattatcttaatagggggggttgaattaagatacacaaactattcccaattaaaatttaaccctttttttggattaacactgcacccttaatatgaattactgaaaagacaactcaaaatgaacttcttttatgaaaaagataaattgaaataaataatagaagtttaagggaagagagaatgcatactcagattctatactagttcggccacgttctgtgctaacgttcagtccccaagcaacccgcttgagatttccactatcttggtaaagaacttttacaaactgtgaaccacacagggaccccttctcttgtgttcagatatgcttacaacttaagagacccttggtcttctaaacagatctctttg

SEQ ID NO: 2966 - DNA, 431 bp, Glycine max
tcttagtttcagatgatgcagatgggtttgtagctacctcatgcactcctctaatgactatggcatcatttctggcgctaaactgctgtgagttggaagccatcttctcaattaatattctggcttcagcaagagtcatgtctccaaaggctccaccactggcagcatctatcatacttctctccatattactgagtccttcataaaaatattggagaagaagctactccgaaatctgatggtggaggcaactggcatatagtcttttaaatctctcccagtactcatacaggctctctccactgagttgtctaatacctgagatatccttcctgatggctgtggtcctggaagcacggacaatttctttctaagaatactctcttaaagtcatctcagcttgtgatggaccttggagcaaggtaatacag

SEQ ID NO: 2967 - DNA, 402 bp, Glycine max
agcttcttattatcaacagatgaagatgaatccgtggccacatcatagactcctctaaggacaatagcatcatttcttgcactgaattgttaggagttggaagccatcttctcattcagattcctagcctcaacaagagtcatatcaccaagagctccaccactggcagcatcaatcatgctcctctccatgttgctaagtccctcatagaaatattgcaaaaggagttgctcagaaatctggtggtgaggacagcttgcacacaatttcttgaatctttcccagtactcatacaagctctctccactaagttgcctgatgcctgaaatgtcttttctgatggcagtggtcctagatgtaggaagatattctccaagaacaccctcttaagtcatcccaact

SEQ ID NO: 2968 - DNA, 389 bp, Glycine max
  unsure (1)..(389): unsure at all n locations
cactgctcagtctgattggctcacaccctttcattggaatggatcatcaagattcatacacgcatttgtctaccttcttggagttgtgtagtaccatgggagcttttggcaaaaatgctaaagttgtctacctcaaagctttcccattctccttggcaggtaaagcaaagacatggctccaatcacatctaaacaaatgcctcaacgcttgggaagaggtggtagaaaacatcattgcaaagttctttcctctatccagattcatcaagatccattgctactttntcccaaagatctgatgaacctctctgtgaaacatgggagagattcaagtctttgttgcagaggtgcctataccatagtnttgatgatgttgcacaactacatat

SEQ ID NO: 2969 - DNA, 482 bp, Glycine max
  unsure (1)..(482): unsure at all n locations
agcttagccttggttgtaattatgttgcttatgtagctccccttatctctaacattagagacttaagaaataagtttaatggagatatatgtgtcgatagcataaaattatttagaattgtcaatcaattacaaatcagttttgtatgattttaaagataattattataaaatgataaacgtatcacatataatgagttggaattggataacgatgtaagaacgttttactattgtcaatacatgacctatttttttagatgaaatttgaataaacttcttcaaaaacacttatagaaaaagaaaataagatgatgaaatatataagtttctatataagatatttttttgtctagacaacaagtatcttcaattagagacaatcttgttcgagtaagatagaactactatgaacaacacaactcttctctcaagtatttagtgtatttgcanacggaagatttaaactcgagatctcttaat

SEQ ID NO: 2970 - DNA, 366 bp, Glycine max
  unsure (1)..(366): unsure at all n locations
ntgaagcaggagttagagcatatgttattaattcatgatcttcttggctctcatgaatatcaaatattccattgtgtgccaaacagcgcatgatccgctgcacaaaacaagccttatccgctgcaatctgtagagttgagaccaactcacgaagagtaatgggtttgacatggttgtgtatcatgtctggaatacctagttgcacaacccatttaagacacatagatgttaggctaccatatagctgcatgtacaaaaggttntggccctcaaagagctcaattgcttcttggttattcattgaagccattattgcaagcgatatttaatntgcttaaactcgttcgcttttttccatgactagca

SEQ ID NO: 2971 - DNA, 433 bp, Glycine max
  unsure (1)..(433): unsure at all n locations
agctntagatgcctttaaaggttttaaggctgaagttgagaaacaatgtggaaaacaaattaagatcgtgagatcagatagaggtggggagtactatggtagatacacagaggatggacaagcaccaggttcatttgcaaaatttcttcaagaacatgggattgttgcccaatacactatgcctggttctccggatcagaatggtgtggcagaacgaagaaatngaaccttattagacatggtgagatgcatgaggagtaatgtaaagcttcctcaattttttgtggattgatgctcttaagacggttgcgtatatattaaaccgagttccaaccaaggctgtctcaaagacacctttnagttattgaagggttggaaaccaagtttgcgatatatancgcgttggggatgcccgtctgaagtaagaatttat

SEQ ID NO: 2972 - DNA, 456 bp, Glycine max
ggatcctctaagcaccgcggctgcagcttaagacaaccttctctactgttggctacttcaacttcaacttcagacaactatttgtctaatgtagctcctgttgtcaataaaaatgttagtgtagcttcgaattctgtaatctcatctcctaacaatgctagtctttggcatgctaggttaggtcatcctaatagtcatgtcatgaagctagtattcaatcattgtaatatttcttcatctaataaattctttcagacttttgctccttatgctgtatgggaaagtctcagattgtctcatagattgctatctaacacctctacttctgtttaatctcctttggaacttgtctacacaggtttgtggagaccttctcatttgacatctatgttggttttaaatactatgtgccctttattgatgcattttctagatacacttggatatttcctatta

SEQ ID NO: 2973 - DNA, 458 bp, Glycine max
  unsure (1)..(458): unsure at all n locations
tctggtgggacatcttgacttgctttccaatctaacattcaccacagattctgccttcttctattntcagattgggaatgcctctaacagcacctttgtcaatgattntcttcatgcctcttaagtgcagatgtccaaatctttgatgccatattttgacttcatcttctttggagaatagacatgtggaggagtaactggtttcttgaggtgtccatatgtaacagttgtcctttgatctgctgcccttcattaagacttcactcttctcatttgtcaccaagcattctgactttgtgaagttacattgaatccttcatcacacaactgactgatgctgatcaagttcgcagtcagtcccttcaccagcagtactttgttcagactaagaagtccatcatggactatctntcccattccagtgatctntcctttagagccatctccaaatgtcacat

SEQ ID NO: 2974 - DNA, 448 bp, Glycine max
  unsure (1)..(448): unsure at all n locations
tccagaagcatttcattatcaagataatactattaaacaaaccccacactttccttcacaaagaaaggcgaaagaaaggaagaaaaccaaaaactttccacaagtaaaacaggcatacaacactgatcaataggataatcagataaaaacttactgaaattgtgattactccctctttgccaactttctccatagcttttgcaatcaactcaccaatttctctctctccattagcagatatcatcccaacctatcaattcaaattcaaaattcaaaaacagaaattaaagttaaaacccagaatccttattatcatctcctgcaatatacaagaagaggctctagcaaagtatgatcgacaaacctgcgctatttcttcagatgtgctaatcatcctagctcttgctttcaaatntgtgaccacagcatcgacagccatacttatacc

SEQ ID NO: 2975 - DNA, 427 bp, Glycine max
  unsure (1)..(427): unsure at all n locations
agctntagcacttctgtagggtttcacggctttccatcagctcagataaatctgccatatactcagtcggtattaggcctcatgagctttctcatatttagcatcttactggatttagcttgggtggcttcccttttagatacttgggtgttccctttttatcatttagattaaatgtatgccactatgctccattgattccaagattactggcctgattcacggatggagcacgaagctctatcttatgcaagtaagctagagttgatcagagcagttattcaaggaattgtgaatttttggatggagaattttcctttgcctcaatctgttctggaccgaatcaatgcttctgcccgtaatttctgtggagcaaagcggatattaggcaaaacaagcccttggttgcttgatcagtagtttgttc

SEQ ID NO: 2976 - DNA, 256 bp, Glycine max
  unsure (1)..(256): unsure at all n locations
tcacagcacctttgtcaatgattntcttcatgcctcttaagtgcagatgtccaaatctttgatgccatattttgacttcatcttctttggaggacagacatgtggaggagtaactggtttcttgaggtgtccataggtaacagttgtcctttgatctgctgcccttcattagaacttcactcttctcatttgtcaccaagcattctgactttgtgaagttacattgaatcttcatcacacaactgactgatgctga

SEQ ID NO: 2977 - DNA, 410 bp, Glycine max
  unsure (1)..(410): unsure at all n locations
tcatacttcacaaaatatatatatgtatggttaggtagaatgataccttggatatgcatgtatgtaacaaaaaaatacttcacaaaatatatatatgtatgtttaggtagaaagataccttggatatgcatgtatgtaacaaaaaaatacttcacaaaatatacatgtatgtttaggtagcaagataccttggatatgcatgtatatagcaaatatatctcacaaaatatatatatgtatgtttaggtagcaagataccttggacacgcatgtatatagcaaaatacctcacaaaaatatacatatgtttaggtagcanaatacctcatggaaaaagaaggaatgaaaaaagaaaataataagaataaaaagttgtctagctaanaaataacatgctcgtgagaatagat

SEQ ID NO: 2978 - DNA, 404 bp, Glycine max
agcttcaacattcaatatcgagcgttttgatatattacgggactgaatcagacatccgagtgaaaagttactgtagtttgaagttgctcagagctaatgcattcaagtccgagcgtctcgatatactacgagactcaatcagacatcctagtaaaaagttattgtcgtttgaattagctcaaagcttctgtattcagcttcgagcctctcgatatattacaggactccatcagacacccgagtaaaaaagttattgtcgtttgaattttctcagagcttcaacattcaatttcaagcgttccgatattttacaggactcaatcggatagccgagcaaaagatattggtgttgaattgctcagagcttcggtattcaattccgagtgtctcgatatatgacggga

SEQ ID NO: 2979 - DNA, 482 bp, Glycine max
  unsure (1)..(482): unsure at all n locations
taggacctatgatactcagcttaacatcagaccacgaccagggtgctggaactacttcacatggtcttgatggggcctatgcaagttgaaagccttggaggaaagaggtatgcttatgttgttgaggatgatttctccagatttacctgagtcaactttatcagagaaaaatcagacacctttgaagtattcaaggagttgagcctaagacttcaaagagaaaaagactgtgccatcaagagaatcaggagtgaccatggcagagagtttgaaaacagcaggttcactgaattctgcacttctgaaggcatcactcatgagttctctgcagccattacaccacaacaaaatggcatagttgaaaggaaaaacaggactntacaagaggctgctagggtcatgcttcatagccaaagaacttcctataatctctgggctgaagccatgaacacagcatgctacattcacaacagagtcacact

SEQ ID NO: 2980 - DNA, 445 bp, Glycine max
agctttgaattctcatagtagtttcgtttcaaacttcagaggttctaaaatctagtcgtatcatatatttctcgtcaagacaaataaattatctatgattctgaaatgtatgcagcataaggttgtgatctaggtgtccatgaatgaccacaaattaatgatctagattgcggttggactttcacgttagaaaagtcactttaaattcaaagaaaatatcagcttattatccttaggactgatttaccaatctttaggactaatttattataacagaatagaaaataagatatttacctaattttataatattatctaattatagttgcatgataaatttattaatttcgtataattagctcacaaatcgtcttacagttgttttaaattgataataagatattgtattttaccataacaatatataatcattaaactcaattaa

SEQ ID NO: 2981 - DNA, 335 bp, Glycine max
  unsure (1)..(335): unsure at all n locations
agcttctaaactntatacaagaatgaagctctgataccacttgttggacaagtggcctcagatatcttaagaagggggggggggtgaattaagatatcacaacttatttcgccaattacaaattctatttatctttctatttcagctataaattcccttaataatgagtttcttagatattgattccaatagaacagattgaatatgaatataaaacactaataaataacagagtttaagggaagagaaaatgaacactcagatttatactggttcggccacacccttgtgcctacgtccaggccccaagctacccgctagagaggtccactatc

SEQ ID NO: 2982 - DNA, 329 bp, Glycine max
  unsure (1)..(329): unsure at all n locations
tgcaagcttttgcaagctggaatcattcatcctatctctgagcgtcaatgggtgagtcccgactaagtagtcccgaacaagactcgcctcacagtgatcagaaatgatatggaggagctgattcctactctggtgcagaatagttggacagtctgcattgactataggaggctgcacctggttaccaaaaaggaccattgtcccctgcctttctttgaccagatcgcttgaacgcttggcaggtaaatcctactactgttaccttgatggtctctctggatatatgcaaattactatcgctcctgaggatcagganaagaccacattca

SEQ ID NO: 2983 - DNA, 456 bp, Glycine max
  unsure (1)..(456): unsure at all n locations
agcttggaaagggaggctttggttatggctcctattnntcactgtcaatgatggacagacactaccatagtggaatgtcagttgaagaagcagttgatctcgttgataagtgcattatggagatcagatccaggctcgttgttgcaccaccgaactttgttattaaaattgtggacaaggatggtgcaagagagtacgcatggcgtgaatctgtccaggatgttcctgttccttcagcttgagtaactctgttcctaattttcattggacttatttcttttcgatttgccctgcttttatcttgctacaatttttttactggtcttgtaatgtctctgaaaatcatggtctatagatgctctaaaggaagacagtttatcatttgaattaaatatgcacgatggctagttctattcataaatgaatgtatgacattgtgtgaagtacgcttgactt

SEQ ID NO: 2984 - DNA, 212 bp, Glycine max
  unsure (1)..(212): unsure at all n locations
gagtcttctctgtggctatcttactggtttagccccatcctctaaatntatccgatgcatacatgtggatgggctaataccangaatgtctgctagggtccagcctatagccttcttatgcttcttgagaactgataacaacttctcctcttgctcatcagcaagggaggcaaatataattactggaaaacttttgctatcatccaagtaag

SEQ ID NO: 2985 - DNA, 445 bp, Glycine max
  unsure (1)..(445): unsure at all n locations
agcttatgctgcanacatttataatagacctccacagcagcaaaaccaacaacagcaaaatacttatgacctttcaagcaacagatacaatccaggttggaggaatcatccaaatctgagatggacaagccctccacaacaataacagcatgtccctccttttcagaatgttgctggtccaagcaagccatatgttcctcctccaatgcagcaacaacaacaacaacaacaacaacagtcacaacaaagacaacaagcaactgaggctcctcctcaaccttccttagaagagttagtgaggcaaatgaccatccagaatatgcaatttcagcaagagacaagagcctccattcagagtttgacaaatcagatggggctgatggctactcagatgaaccaagctcagtcctaaaattctaacaaatttccttcacaaactgtgcgg

SEQ ID NO: 2986 - DNA, 455 bp, Glycine max
agcttgtttgctacatccaagtataaatgatttgatattataagtataaacctattcaaaacttctgttcaaaatattaaaataactttacttgaaattttgaacctctgcacttgtttttaattagctaattccaatcttctggagatatgtattttggtttgtttatatttttctttaagatgagcttcatgtaaatgataaaccttattcttgtattgagattcaatttgctctattacacattgtttgacctaatcagataaactaaaaccatccttatgtcatacgttttcatggaaaagtaaaaatttattactatgaacatacattgtaaaaaaaaattggcaaacataagtaatattcaaatatataaataaatgagatataattcacctaattatatagtaaccttcatatgtcgccacatttgatgtacatcatgctgactaatt

SEQ ID NO: 2987 - DNA, 432 bp, Glycine max
  unsure (1)..(432): unsure at all n locations
agctntaaacattcaatttgagcgtctcgatatattacgggactcaatcagacatccgagtaaaaagttattgtcgtttgaattggctcagagcttcaacattcaatttcgagggtctcgatatatgacgggactcaatcagacatccgagtaaaaagttattgtcgtttgaattggctcagagcttcaacattcaatttcgagggtctcgatatattgcgggactcaatcagacatccgagtaaaaagttattgtcgtttgaattggctcagagcttcaacattcaatttcgagcgtctcggtatatgacgggactcaatcagacatccgagtaaaacgttattgtcgtttgaattggctcagagcttcaacattcatattcgagcgtctcgatatattacgggactcaatcagacatccgagtaaaaagt

SEQ ID NO: 2988 - DNA, 266 bp, Glycine max
  unsure (1)..(266): unsure at all n locations
ccttcacccgacgaagacactgacaaaaacttatcttctccttcttggacaaagtatggcagggctggggcaagtaaattttcttcccatcagaccttggatgcaactgtgatcgtatacccatatcagctagatcttgaagggtattcaagccatccttcgtcttgccttgaatgttaanggagcgtccaatgacactatcacnagacattttntccacatgcataacatcaatacaatgtctaacgtcaagatcacaccagtac

SEQ ID NO: 2989 - DNA, 434 bp, Glycine max
agcttatgctgcacacatttattatagttcttcacagcaactaaaccaacaacagcgaaatacttatgacctttctagcaacagatacaatccaggttggaggaatcatccaaatctgagatggacaagccctccacaacaataacagcatgtccctccttttcagaatgttgctggtccaagcaagccatatgttcctcctccaatgcagcatcaacaacaacgacaacgacgacagtcacaacaaagacaacaagcaactgaggctcctcctcaaccttccttagaagagttagtgaggcaaatgaccatccagaatatgcaatttcatcaagagacaagagcctccattcagagtttgacaaatcagatggggctgatggctactcagatgaaccaagctcagtcctagaattctaacaaatttccttcac

SEQ ID NO: 2990 - DNA, 454 bp, Glycine max
  unsure (1)..(454): unsure at all n locations
agcttgtttcccaactcanagctcttctcaagggtcttcacttgttccatgttaagcctccttttcttctctccagcctgtgatccatcatcagacaaatcttcctcagcattagcttcttctccaagctcaatccctgaaaatgacatagatctcttgcctagaaaggatgctcctcctgcatcaacatttgaaacattggtattaggccacataacataatattgcactattggttggtgtttttgtgtctaaaagagagtaccatggtactcttgaggtgcacatgaagttataattgagttgagtgaaggtggaggttgatggtcatcttggtgaggtgtttgtagcatgaaatntgctgggaagaaagccatatcattgctagtctatgcttgcctctgatcttcaattgctgaatgatattctgatcaccatgtgnatgctgatgctc

SEQ ID NO: 2991 - DNA, 449 bp, Glycine max
  unsure (1)..(449): unsure at all n locations
agcttgacaganatctgcagccgaaccacctgtttctnttcctgcattccacccaccttgatcattaccttttccctgtttatcatgtgatgaagagactggagcattccaattgttttttgttccccagccagatgacccactcccatccttagttggttggcttttccacccaacatcctgattagcatcaatatctgaagtaccatcagggtttccaacttctttgactccacttttaaaaccattgccaccaccccatccaattgatgacgtttgatttgactttntgacactgttccaaccagaagactcctcttcagaagccttggttgtattccaattgcttttgctgtcccttgctgaggattgatttccattcaaattgttaggtttgtcattccaattgctattctgattgccatcacccatgcttccagttntatgct

SEQ ID NO: 2992 - DNA, 316 bp, Glycine max
agcttcagaattcaatttcgagcgtctcaatatattacgggactcaatcagacatccgagcaaaacgttattgtcgtttggattagttcagagcttcagaattcaatttcgatcgtctcgatatattacgggtctcaatcagacatctgaggataaaagttattggcgtttgaatttgctgagagcttcaacattcaattttgagcgtgtcgatgtattacgggacttaatcagacattcgagatataagctattgctgcttgaatttgctgagagcttcaacattcatttcgagtcgtcctttattttacgggac

SEQ ID NO: 2993 - DNA, 396 bp, Glycine max
agcttgaaattgaacaaccgaagctctccagatattcaaatggttatgacctatcacacgaaagactgattcatgcgcataatatatcgagacgctcgaaattgaacaacggaagctctccagaaattcaaatggtcataacttttcaaatggaagtccgattcatgcgcataatatatcgcgaagcttgaaattgagcaacagaagctctcgagaaattcgaacggtcataacttatcacactgaagtccgattgaagcgcataatatatcgagaggctcgaaattgaacaacggaagctctcgagaaattcaaatggtcataacttgtcaaacggaagtccgattctggcgcatactatatcgagaagcttgaaatggaacaacagaagctctc

SEQ ID NO: 2994 - DNA, 449 bp, Glycine max
agcttgtagtggtccttgaagttgttttatcgtcatggtttctaaatctttggtttcctcgattgtcacaacaatgtgttcaaatttgggatctaacaagcgtagtatattctccataatttttacatcttctaacttctcaccatttctttttagttgatttgaaacaacgagaattcttgagaaataattgaaaatggactctaactctttcatatgtaaggattcaaactcacctagtaaagtttggagacacaccttctttactctgtcttctcctttgtgggaggattgaagcttatcccatgcctccttagcagatgttgcattagaaatcttctcgaacacatcatcatctaatgcttgatagataggaagagagctttcttgtctctctttcttgaatcctttaaagactccttttgtgcctcggatagtgaagtctcatc

SEQ ID NO: 2995 - DNA, 341 bp, Glycine max
gcttcaatctgatcactaagatgatgcaatcttattccgcaagggcattgggtataagactccaacttgatggggcttcagatccaagggaaagccctagggatctcatgagccttaaggtagatatccagcccatgggctaatgatgagcccgcttatctttgtaaatattacaatacgtgctttcttcagctgggccttgtattgctgagcactctagaactatatggctttagccttgtatttcggcgcattcttagtagtcattggagtaaagacttttttctgtattttcatgtcttttgccatgggggtgagcttagctaatattgtgggtgtgt

SEQ ID NO: 2996 - DNA, 313 bp, Glycine max
  unsure (1)..(313): unsure at all n locations
ctcggatgtctgattgagtcccgcaatatatcgagacgctcgaaatggaataccgaagctctgagcaaattcaaacgacaataactctntactcggatgtcagattgagtcccgtaatatatcgagacgctcgaaatggaataccgaagctctgaacaaattcaaacgacaataacattttactcggatgtctgattgagtcccgaatatatcgagacgctcgaaattgaataccgaagctctgagcaaattcaaacgacgaatcacttttactcggatgtctgattgagtcccgtaatatatcgagacgctc

SEQ ID NO: 2997 - DNA, 426 bp, Glycine max
  unsure (1)..(426): unsure at all n locations
agcttctacattcaatttcgagcttttcgatatattacgggactcaatcggacatccgagtaaaaagttattgtagattgaatttgctcatggcttcggtattccatttcgagcgtctcgatatattacgggactcaatcggacatccgagtaaaaagttattgttgtttgaatttgctcagagcttcggtattccatttcgagcatctcgatatattacgggactcaatcagacatccgagtaaaaagttattgtcgtttgaatttgctcanggcttcggtattccatttcgagcgtctcgatgtattacgggactcaatcagacatccgagtaaaaagttattggtcgttgaatttgctcagagcttctacattcaatttcgagcgtttcgatatattacgggactcaatcagacatccgagta

SEQ ID NO: 2998 - DNA, 451 bp, Glycine max
agctgtgtatggtagagatccacctactctggtgagatatcaaccagacatcactgatgttccaactgtgtaggagcaattgactgctagagatgaatttttgagacaattgcaggataatttgatgaaggcttatacatatatgaagaatcaggctgataagaaaagtcaagatgtcaatctacaggtgggagacttggttctagttaaactactaccatacaaacaacattcagctgctcttagaaagaatcataagttgggaatgcacttctttggcccctttaaaattctggccagagtaagagcagtggcctacaagttagagttacctgcagaagctagaatacataatgtcttccatgtctctcagctgaagttgtttaaaggaacaccaggagaacagtacttgcctttacctttaactacaacagaaagtggaccaattatt

SEQ ID NO: 2999 - DNA, 452 bp, Glycine max
  unsure (1)..(452): unsure at all n locations
caagcttcggaaatgatttctatacaaaagttagtcgtatgaagcgactaacaacattcatatccatatattataagaacaactaatcaacctttgggtgatccataaatgtcttataataatgaacttcaattaacccataaaccaataatctataatttagcatccattctatgggtaattgaaataaaattgtcactaatttggaattaaacaaaacatacagatttgaccactgtggtgatcacaaatctatcatatatttaatccaaattactttatccaattttaaattgaaattgacgtaagggagagatattgaatttcaattcaagacattcaaaaattggattcaaggcattccaaactcgaaaacaattataatatgcacaacggaaaatcaaatggtttgaataattntccaattggaatcagattcatacaatgtatgg

SEQ ID NO: 3000 - DNA, 369 bp, Glycine max
  unsure (1)..(369): unsure at all n locations
tttgatggtgactctaatgtaagcaacaattatgttcccattaaggctagaggaaatgaaactntaacccggtattcaaatgctggattntccagcattcttactttctcatggatgagtcctttagtaactctaaggaatgagaagactttagagcgtgaggatctcccacatcttgctactaatgacagtgtggatgggattttgcaactcttcaaacaaacttgagtcagagtgtggtagtgtgataacaaccctacganaatatganggtactgcacagatgaacaacactatgctagtgtgataacaacccttcttacnactatcaatcaaccctgcttctagtgtatggttgtgataacacta

SEQ ID NO: 3001 - DNA, 440 bp, Glycine max
  unsure (1)..(440): unsure at all n locations
agctntntcctcatgaaacaagtcgaacctgatctgctggtcttctatggccatttatagtttcctcttccccatgtctaccacacggcttactgtagacataaaaggtcttccaagaattatgggaatgccaacatcttcttcaatgtctatcactacaaaaccagctggaaatatcaaatgtttgaccctaaccaaaatgtctataatcactccatagggtcttgtgatggagcgatcagccaactgtaaggtcatacgagtgggcattatctctaactctccaagtcaccgacacatggagagtggcattaaattgatactggctcccaagtcaatgagagtcttgcctactgtaacctcaccaatagaacatggtattgtgacactacctggatctttatgcttcaatggaaggatacattgtatgaatgcactgc

SEQ ID NO: 3002 - DNA, 127 bp, Glycine max
  unsure (1)..(127): unsure at all n locations
tctatcaactggagcatatgtttnctcataatntatactctcttcttgattatatcacttggctactaatcttgccttatttctaataactatgccattntcatctaatctgtttctaaacacccat

SEQ ID NO: 3003 - DNA, 443 bp, Glycine max
  unsure (1)..(443): unsure at all n locations
agcttccgttntcaatttggagcatctatcgattaattgcgacactctgtcgggcatccgagtaaaaagttattgttgtttgaattttctaagagtttccgttttgtatttgaagcgtctcgatatattacgggactcaaccggacatccgtgtataaagttattgtcattacaatttgttcagagcttgtagtctcaattttgagcgtctcgatatattacccgatttaatcggacatccgagtaaaaagatactgtcgtttgaatttgatacctgcttctgttttcaatttggagcatctcgatatattacgagactctctcgaacatccgagtaaaaagttatcatcgattgaatntgctacgaccttccgttttcaattcggagcgtctcgatatattacgggactcaaccggacattcgtgtataaagttattgtcat

SEQ ID NO: 3004 - DNA, 410 bp, Glycine max
  unsure (1)..(410): unsure at all n locations
agctttaaagaatgatttcatctattatgaggctttgtccactcttttgggatcctcctagggttgaaacaaagtagcacctatctatagaagtaggcccaagatttaattactggagaaccaaaatccaataaatatataaacattaaaagtcatataaattagttatgcgtttttaaaatgatctaagaacatataatagaaaatccatatacatagaagatattaaacatttttttaaaaacccaaagttataaatgacaatcctcaatttcatgtcaccaagaatgttcatgaatttataaaaaaattgctatatatgttttcttttttacgagaaatcctattagttatatttgaaaaatcaacttatatattntgaacagattatgttactaaataatgtttat

SEQ ID NO: 3005 - DNA, 457 bp, Glycine max
  unsure (1)..(457): unsure at all n locations
agcttgttgcactagcataaacaaggagttgagcaactgcttctggtcttgggtgtcatggcaatcctttggcatgaaaaattctaaaacaaaatcagcggaggcactccggagtggaatgcccagagcagcatgcaagccaaacatgttagcatgatgtgccagaggatactccgccttgctgaaggaagtaatgtcatttgcaaaacaaggtttggtggttgtgaaagctgtcccaactactccttgcccccccaaaaggtggcactcagagcacgcttccaggaaacccattagctctacatccgccacaaaactagcagcatacacagtcgacacataattcatctcatcgtttgaatgcccacatccactctntcctgcttgttggatgcagggagcccatgtcagagctaaaggcaagttatgcgccttgcatacacacgtcaaaacttgt

SEQ ID NO: 3006 - DNA, 449 bp, Glycine max
  unsure (1)..(449): unsure at all n locations
agcttcttacatagtccgcctttgcttgaccttctttatgcttaanaacagaaacattaggcataggcaaaagatcaagaggagttagtggattaaaaccataaacaacttcaaaaggagaacaattagtggtgctatgaacagctctattgtaagcaaattcaacatggggtaaacaagcttcccaagtttttaagttcttcctcaaaactgtcctaagcaaagttcccaaagtcctattaacaacttccgtttgcccatcggtttgtgggtgacaagtggttgaaaataacaatttagtgcccaacttgctccacanagtcctccaaaatttttttaggaacttagagtccctatcactaacaatgctccttggcagaccatggagtctcacaatctccttgaaaaacaaatcagccacatgggaagcatcatcaactntnttacat

SEQ ID NO: 3007 - DNA, 427 bp, Glycine max
atacttaagtcacctgctgcatcaagcttctacatgctgaatgaccttttatactgatatggcaaatctcaaggccacatgagttattcttgagggactcacttgccatcagaagaagaaatcctttaaggatgctaatcattatgtgtgggatgatcctcactggttcaagattggagcaaataacttgatcagatggtgtgtcattgaagtggaagccaagagcattctttggcattgtgacaattcaccttatgggggccattttaatggagaaagaactactgccattgtctctaacaagtatttttctggcccataatactcatagatgcacatttgtgtgtgaaacaacatgagtaataccaaagaacaagaggaatctcatgaacgaatgagatgcccctgaacaacattattgaagttg

SEQ ID NO: 3008 - DNA, 351 bp, Glycine max
  unsure (1)..(351): unsure at all n locations
gccttcgctgaccttctntatgcttaattacagaaacattaggcataggcaaaagatcaagaggagttagtgggttaaaaccataaacaacttcaaaaggagaacaattagtggtgctatgaacagctctattgtaagcaaattcaacatggggtaaacaagcttcccaagtttttaagttcttcctcaaaactgtcctaagcaaagttcccaaagtcctattaacaacttccgtttgcccatcggtttgtgggtgacaagtggttgaaaataacaatntagtgcccaactngctccacaaagtcctccaaaaatggcttaggaacctagagtccctatcactaacaatgc

SEQ ID NO: 3009 - DNA, 371 bp, Glycine max
gatctctaagtcatctgaggcatgcaagcttctgttatgaatttcgagtgtctcgatatactacaggacttaatcggacattcgagtaaaaagttattgacattcgaatccgctcataacattcgttgtcaattacgagcgtctagatatattaaagggattcattcggacatccgagtaaaaagttattatctttttattttgctcagagcttctggtttcaatttcgagcatctcgatatattacaggactcaatcggatatccgagtcaaaagttattggtcgttggatttgctacgagctctcggtttcaattacgagcgtcttaatatgctacgggacacaatcggacatccgagaaaaagttatt

SEQ ID NO: 3010 - DNA, 266 bp, Glycine max
tgcatatatagctacagacgtcttgtaattgatacatacgaacatttgtgggccatttcatacactttcatggaatggtcaacaatattttatatcattcatagacgattactccaaatatacatacttgtttcttatatatgaaaagtcacaatatctggatgtgtttaaaacatttaaacttgaagttgaaaatcaactcacacaaaaataaagagtgtcagatttgaccgtggcggtaaatactatgacagatatgacaattc

SEQ ID NO: 3011 - DNA, 395 bp, Glycine max
  unsure (1)..(395): unsure at all n locations
aagcttattgtatgcgatttaccaccacacatgatcacaaaattcatgtttatctagtttatcaccacctaacagattttgtttctcaagttcatgtaatcctctttcactaacatgacctaatctcaaatgccagagttttgttttatcaatcaatgtattactagctaccgatgcatgtccaataatagtggaaccttcaagaataaacaagccattacttntattcttgttacccttagctatgattaaagatccatttgaaatcttaagaacaccatttggaattctagttgcatatcctagatcatcaaacatgtttatggaaataagattccttttgagcttttgaatgtaccttacatctttcagtagatactctctggtatcaaaca

SEQ ID NO: 3012 - DNA, 305 bp, Glycine max
  unsure (1)..(305): unsure at all n locations
tcacagttcaatttgagcgtctctgtaatattacgggactcaatcagacatccgagtaaaaattcattgtcgtttggattggctcagagattcaacattcaatttcgagcgtctcaatatattacgggactcattcagacatccgagtaaaaagttattgccgtctgaattctctcagagcttcaacaatcaatttcgagcgtgtcgatatattacgggactcaatcagacatccgagctaaaagttaatagtcgttgaattggattaaacttncacattcaatttcgagcgtcttgatatatta

SEQ ID NO: 3013 - DNA, 321 bp, Glycine max
  unsure (1)..(321): unsure at all n locations
agctttctgttttctacaagcaacttaaccttttttntattcttattgcgcatatgctattccttcgtggattctcaacatctccgttaccattgtggacgtcgctgtttgggtattcctcacctactatgtcattggatttgatccacacgttgggacgcaaacaaactactttaaacatttaggagcatgcgaatgttgttgcttctactaatatgcctgctacttatgatgtgacttcttgaattatgcgcaggctcttcaccccgtacctcgtgctattaattgctagccagacggcttcgggactattcctaagta

SEQ ID NO: 3014 - DNA, 361 bp, Glycine max
ctctctcaattgcacaaggccttaatatttgaagagtattcttgtggaaccttcacccgacgaagacactgacaaaaacttatcttctccttcttggacaaagtatggcacgctgggggcaagtgaattatcttcccatcagaccttggatgcaactgtgatcttatacccatatcagctagatcttgacgggtattcaagccatccttcgtcttgccttgaatgttaaggagcgtcccaatcacactgtcacaaacatatttctccacatgcataacatcaatacaatgtctaacgtctagatcacaccagtccggaagatcaaagaaaatggacctcttcttccatatgcaactctgac

SEQ ID NO: 3015 - DNA, 459 bp, Glycine max
agcttgacccttacgagtcagtttagtcaaaggtatagccatcttggagaaaccttctatgaatcttcggtaatatcttgctaaacctagaaaactcttaatctcaaaaacagacttaggactctcccacttaagaacaacttctatcttagagggatccacagctatacccccttgagatatcacatgccctaggaaactaactttctctaaccagaactcacacttggactacttagcatagagttgtcggtccttaagggtatgcaacacaatcctcaaatgttcttcatgttcctctctagtcttggagtataccaaaatattcgttatcaatactaccacaaaactatcaaggtaaggatgaaaaactctattcatgtagtccatacagactcctggagcattagtcacaccaaagggcatgactagatactcatagtgactgtaacgcggtct

SEQ ID NO: 3016 - DNA, 406 bp, Glycine max
  unsure (1)..(406): unsure at all n locations
agcttcaagaaaaagatggcctcagtaaattccttatttgcggaagggaattctatcaatagacctccaatctttaatggagagggttaccactactggaaaacccgaatgcaaatttttatcgaggcaatagatctaaatatctgggaagccataaaaatagggccttatatacccaccacagtagaaagagtttcaatagatggtagttcatcaagtgaaagcataaccatagaaaaacctagagatagatggtctgaagaggatagaaaacgagtacaatacaacttanaagccaaaaacataataacatctgccctaggaatggatgaatatttcagggtttcaaatcgtaagaatgctaaggaaatgtgggacacttcttgattaacacatgaacgaacta

SEQ ID NO: 3017 - DNA, 413 bp, Glycine max
  unsure (1)..(413): unsure at all n locations
agctttgctgcnacatttatatagacccctcatcagcaaaacctacaacagcagaataattatgacctttcaagcaacatatacaatccaggttcgaggaatcatccaaatctaagatgggcaagtcctccataacaacaacagcctgtccctccttttcagaatgctgctggtccaagcaagccgtatgttcctcctccaatacagcagcagtcacaacaaagacaacaagcaattaaggctcctcctcaaccttccttagaagagttagtgaggcaaatgaccatccagaacatgcaatttcagcaagagacaagagcctccattcagagtctaacaaatcagtggggcagatggctactcagttgaaccaagctcagtcccaagattctgacaaatggccttcacaaact

SEQ ID NO: 3018 - DNA, 333 bp, Glycine max
  unsure (1)..(333): unsure at all n locations
tacatgacatctgaattcatgtacagcanatctccatgcattcttagttggaacatgggcgctagagtggcaagggcatcgaccatctgattttcctctctaggaatgcgatgaaatgatatgtcatcaaagagctccatcaatttcctaatgtaagcctggtaaggcaccaatttggggcgtctggtctcccatttacccttcaactgatgaattaccaatgtcgagtccctgtataccttgagtaacttgaccctaaagtcgactactactcggatcccaagggcacatgcctcgtactccgctatgttgtttgtgcatttgaagcccaac

SEQ ID NO: 3019 - DNA, 406 bp, Glycine max
agcttaacattcaatttcgagcgttccgatatattacaggaatcaatcagacatctgaataaaaagttgttgtcgtttgaatccgctcagagctttcgtattccatttcgagcgtctcggtatattacacgactcaatcagacatccgagtaaaaagtgatcgtcgcttgaatctgctcacagcttcaacattaaatttcgagcgttccgatatattacgggactcaattacacatccgagtaaaaagttattgtcatttgaatttgctcagagctctcatattccatttctagcgtctcgatatattacgagactcaatcagacatccgagtaaaaagttattgccgcttgaatatgctcacggcttcggataccatttcgagcgtctcgatatatacgggactc

SEQ ID NO: 3020 - DNA, 421 bp, Glycine max
agcttcttagtttcagatgatgcagatgggtttgtagctacctcatgtactcctctaatgactatggcatcatttctggcgctaaactgctgggagttggaggccatcttctcaattaaatttctggcttcagtacgagtcatgtctccaagggctccaccactggcagcatctatcatacttctctccatattactgagtccttcataaaaatattggagaagaagctgttctgaaatctgatggtgggggcaactggcacatagtttcttaaatctctcccagtactcatacaggctctctccactgagttgtctaatacctgagatatccttcctaatgctgtggtcctggaagcagggaaaattgtttctaagaatactctcttaaggtcatcccacctcgtgatggaccttggagc

SEQ ID NO: 3021 - DNA, 336 bp, Glycine max
  unsure (1)..(336): unsure at all n locations
aaattgagaatggaatgctgttgatggtagataacaagtctgctataagccttgcatataatcctgttgctcatggaaggagcaagcacattgagactagatttcactacttaagagatcaagtgtacaatggaagatggaggttggatttttgcagatttgcagatcaacttgcagacattntgacaaaacctttgaagaaggagaggtttgaagatttgaggagaaagatgggacttagaagctcaaatgacatctgaattaaggaggagtgttagataaaaagataactcagatgattagttagttagttctatcacttggtgtgtagttagt

SEQ ID NO: 3022 - DNA, 357 bp, Glycine max
  unsure (1)..(357): unsure at all n locations
ntgacanattcgaacgacaattacttntaactnggatgtcttattgagtcccgtaatatatcgagacgctcgaaattgaatgttgatggtcgctgcaaattgaaacgacaataactttctactctgatgtctgattgagtcccgtaatatatcgagacgctcgaaattgaatcttgatgctttgagcaaattcaaacgacaataactttttactcggatgtctgattgagtcctgttatatatcgagacgctcgaaattaatacgaaagctatgagcatattaaacgacaaaattttttactcggatgtctgagtgagtctcgaatataacgacacgctcgaaactgaatgtgatgc

SEQ ID NO: 3023 - DNA, 374 bp, Glycine max
  unsure (1)..(374): unsure at all n locations
taataataataatttctattattattattaaatgaaaaaatttcaaaaagaaggagactcaagctaaaaagataatgcaaccaattaatatttccaaggaaaaaaatgttttgtaaagatattttcagacaatttaaatatttttgtttgactatattagtataaatcatctttaattcatacattttttaatattatgttctctttttttcattttcttttgatatactntgtgttttaacgacttggattcaatatgattntgtttatcaattatttttggatttgtacattacttacgaaattgtataagtttctttattttagttagtatttcactagaatgtaaaatatataattgatcaaaacatctt

SEQ ID NO: 3024 - DNA, 353 bp, Glycine max
acatgatcacaaaatccttgtttatgtagtgtatcacttcctaacagatattgtttatcaagttcatgtaatcctctttcactaacatgaccgaatctcaaatgccagagttttgttatatcaatcaatgtattactagctaccgatgcatgtgcaataatagtggaaccttcaagaataaacaagccattacttttattcttgttacccttagctatgattaaagagccatttgaaatcttaagaacaccatttggaattctagttgcatatcctagatcatcaaacatgtttatggaaataagattcctattgagctttggaatgtaccttacatttttcagtagatactc

SEQ ID NO: 3025 - DNA, 367 bp, Glycine max
attgacctgaaatgttgtttagtgagagatcaaggtgtttctaaaaatttcttttttcccatgtcatttggtatccctccagacagatgatttctagacaagttcaaaaaccgcaaagcagatagcttggaaatttcagatggaattgctccagacagcttattacttgaaaggtcaatcattctcaccaatatcagattgtctctgtactctaactcatctcctttgggaactaagacaagagtttccttgtagtggttataactgaagtcagagccatatgaataacttaaagggttggcaaagaagtcatcttcaccagccattgtcttcatgtcatccaaacaatttggaatggatcctgaca

SEQ ID NO: 3026 - DNA, 385 bp, Glycine max
ctcatggggtatctgtctcaacttgagtctttgctgctaacacgaccaccgcttttcacgatatattccttcaacactgcaaaaatgctctacaatgaaattcatagacatgggaaataaccaactttctgacacaataccacaatggatgtgggaaatgcaatatctaatggttctttgtctaagatcccacaatttcaatggcagtattactcacaagatgtgtcaactttcttcccttacagtgctggatcttggcaataacagcctgtcacgatccattccaaattgtttggatgacatgaaaacaatggctggtgaagatgacttctttgcacacccttcaagttattcatatggctctgactttagttataaccactac

SEQ ID NO: 3027 - DNA, 389 bp, Glycine max
  unsure (1)..(389): unsure at all n locations
gctaatatatcgagacgatcaanattgaacaacggaagctctcgtgatattaaaatggtcataagttttaactcggatgtccgattcaggagcttcacatatcgagatgcacgaaattgaacaatggaagctctagagaaattctaatggtcataaattttcacacggaggtcctattcaggcgcttaatatatccagacgctcgaaattgaacaatggaagctctcgagatattcaaatggtcataacttttcactcggatgtccgattcaggtgtatcacatatccagacgcttggaattgattagcggaagctctagagaaattcaaatggtcataacttttcacacggaggtcctattcaagcgcttaatatatcgagacgctcg

SEQ ID NO: 3028 - DNA, 305 bp, Glycine max
  unsure (1)..(305): unsure at all n locations
ngagaatggagaattgcactaagcaattattactcatagctctttactcgaaagtggaggacacatgaacgatnacacaattcatggagctcctgaaaaagggtagataatggagaattacactaagctatcactacgcatagcttcaaactcgaaggtggaggacacatgaacgataacgcaattcatggtgctccgaaaagattgaaaatggagaattgcactacgcaatcactacgcatagctccaaacgcgaaggtggaggacacatgaacgaaaacgctattcatggngctccgaaaaga

SEQ ID NO: 3029 - DNA, 281 bp, Glycine max
caatggcaaacactccatccacctaccttgttgctctatacaacacgctcgaagtagatcctctatagtctgaatacttcgttcagtctgaccatctgtttgaagatgatcacttgaactaaccttcaacttctgtcccaaggcttcatgtacactcgtccaaaatcgccaagtgaaccttggattcctgtcagatacaatactcgaaggaattccctgctaccttactacttccttgatatacaacttcactagcttttccattctatacctcatattca

SEQ ID NO: 3030 - DNA, 444 bp, Glycine max
  unsure (1)..(444): unsure at all n locations
tgngattctcataaacactgagtctanactcatncaactgttgcaacctgttactacatacttaggatcaaaaattaccaacattaaaacccacatgggtttgcacttaattgagtaagctcattgggacctgtaggcctaagatcttctttatcgatgggatcctttgcttctttggaagatgaatggcagcggaatagagaaggaagagagagaggagacgccacttccaggagaagatgagtctagaanaagctcaccaccatangaggccaaggataagaagctggaggaagaangagatgaatgaanggagagggagagaagagcacgaaattntgtgctctaaaagagctctgaaatctgaatttaatattcanatgatcaannagtttcaaaaatgcacacacatgacctttatttatagcctaagtgtcacacaaa

SEQ ID NO: 3031 - DNA, 393 bp, Glycine max
  unsure (1)..(393): unsure at all n locations
tatatagaaggtttgttcctaatttctctacaatttcctcacctttcaatgagctggtgaagaagaatgcggcatttacctgnggtgaanaacaagagcaaagctttgctttgctcaaagaaaagcttactaaggaacctattctagctctttctgacttttctaaaacttttgagctagaatgtgatgcctctggagtgggagttggagctgtattgttacaaggtgggcaccccattgcttattttagtgaaaaacttcatggtgccaccctcaactacctcacatatgataaagagctttatgccttaataagagccctccanacttangaacattaccttgtntccaaggaatttgtcattcatagtgattatcaattacttaagtaca

SEQ ID NO: 3032 - DNA, 434 bp, Glycine max
  unsure (1)..(434): unsure at all n locations
tcttagtttcagatgatgcagctgagtttgtagctacctcatgcactcctctaatgactataacatcatttctggcgctaaactgctgggagttggaagccatcttctcaattaaatntctggcttcagcaggagtcatgtctccaagggctccaccactggcagcatctatcatacttctctccatattactgagtccttcataaaaatattggagaagcaactgctctgaaatctgatggtgagggaaactgacacatagttttttaaatctctcccagtattcatacaagatctctccactgagttgtctaatacctgagatatccttcctgatggctatggtcttggaagccagggaaattttttctaagaatactctcttcaagtcatcccagctcgtgatggaccttggagcaaggtaatacaattag

SEQ ID NO: 3033 - DNA, 406 bp, Glycine max
agctatgaatgctctatttattggagtcgaccataatatcttcagactgatcaacacatgcacagtggccaacgatgcatgggacatcctgaaaaccactcatgaaggaacctccacagtgaagatgtccatattgcaactattggccacaaaattctaaaatctaaagatgaacgacgaagaatgtatttatgacttccacatgaacattcttgaaattgccaatgcttgcactgtcttgggagagacgatgacagatgaaaagctggtgagaaagatcctcatatccttgcctaagagatttgacatgaaagtcactgcaatagacgaggcccaacacatttgccacttgagagtggatgaactcattggttctcttctacctttgagctacgactctcggata

SEQ ID NO: 3034 - DNA, 425 bp, Glycine max
  unsure (1)..(425): unsure at all n locations
atacacgaatgaagctctgataccacttgttagacaagtggcctcagatatcttaagaaggggggttgaattaagatattgcaaactatttccccaattaaaattctatttcaatttcaatgcaagttgcacgttcccttaaaaaatgaacttttaaataatgattcaaaaagaacaatctgaatataaatataaagcaataataaataaatgagtttaagggaagagaaactgcaaactcagatttatactggttcagccacacccttgtgcctacgtccagtccccaagcaacccgcttgagagttccactatcttgtgaaattcttttacaagttctgaacacacaacgacaatcattcctttgagtttagatntctttacaacaagagaccatcggtctctcaatcccctttgagaattta

SEQ ID NO: 3035 - DNA, 434 bp, Glycine max
caactcattgttgatagaacatcgaccctcattgttgatattgttcgaagaatgtcagatttttctataagacatatggcctccacattgtctgctgccttgaacattgcaaagaggaaagaaaaagttagatctttggaagcatttacaaattctagaataataggaggactttatatttataaattattctaccttattatctgacataactctaatgaaatctttaaaatcccacaacctgctccacttccatggcttcctaggtgatttttctctaacaatatacttgcccaaatcgcacaacaactcatgcatttgaatccacctcgaatccatggttatgagtgatttatcaacgagaacttgtacgccatattcgggaattaatccacgaaaatctataacttccttcacatatttcacaggataat

SEQ ID NO: 3036 - DNA, 376 bp, Glycine max
  unsure (1)..(376): unsure at all n locations
agcttcaacaccggaatcttgtacagctccttgtttgttgcattacaggaaaacaaaaattactattatatgaatacatggttaatggaagcctggactccttcatatctggtacgtaatatatgaatcatgcctaaattacgttcacttgtgttctattctttaagctaatactcagcaccttattaatcttgaatatctaatactgaacaataattcttaactctttcagataaaataaaaagtaaattactggattgccctcaacgcttacacataatacttggaattcctagggggctttcgtatnttcatcaagattctcgattaatgattattcatacagatctcaacgcacgtaacattttactcgatg

SEQ ID NO: 3037 - DNA, 429 bp, Glycine max
  unsure (1)..(429): unsure at all n locations
agcttgcttctacaatctcccctttntgatgatgacaactctaacatcaagacacacatacacacacttttgtctagtcgattactcacttaattntccattctncccctttgtttttgagtttatgcttcacttgaaattaagttaattacttatgtgagttcttgatttaatccctatttctcttcgcctttggcatcaacaaacagccatagtgcataacaagtataaaacatttatatactattaatcattcacaagacattcattgaagaatataaaccaatcatgaagcaagaaacatgaatagatcaaatatataaaaaccacatagtcatataacataattcataattgttcaatcataccatgcaaataaagaaatactaaattgttcaaatgtcaaaatatagccaaatacacggctag

SEQ ID NO: 3038 - DNA, 389 bp, Glycine max
  unsure (1)..(389): unsure at all n locations
tatctaaatgcaccctatagtgtattacttttcacatgtatttgtgtatctatgtttgatcatgattttttgccaccccctgcacgtggttatcaaggtggcagagttatgttgggccttgtgttggtatgctttcaatcgacaaacaatcttctgataaccatttgataacccacccaaagattgcagatagacctgtgcctattgataattctgacattatttcaaagggaaataactgtgacagcaataatttagatattcatcgaatgttggaagagggtacagactatgttttagttcctgaaaaagtgtgggaaaggctgttggaatggtaaatttattatataaatatgttgctttttaatttggaaaanatgaatgatctt

SEQ ID NO: 3039 - DNA, 413 bp, Glycine max
taaagatccaacctctatgatgcaatcctaccccgcaagggcattgggtagaagactcaaagtagattgggctagagatccaagggaaggccctagggttctcatgagccttagggtagatttcgagcccatgggctaagtatgagcctgcttatctttgtaaatattagaataggttttcccttcgtctgggccttgtactttggccattctaatactatagggttttagccttgtatttcgaggcattttgagtagtttttgtagtaaggaattttttttttattttcatgtttttgtcatggggtgcgcttagctattatagagggtgtgtagctaagctctagcttctcatctcaaggaggtgagcttagctattagagaggtatgtgtatctaagctctagcttcttt

SEQ ID NO: 3040 - DNA, 417 bp, Glycine max
  unsure (1)..(417): unsure at all n locations
agcttcaaatatcttacttgattcgttaagcaaatctcatttatctaatattntactagtcatattggctcttctaacattcctttttggtgatgacagaattaccatgcaaaactttctgcttttggcttggcaaaagatggaccacctggtgataagagccatgtctctacaagggtaatgggcacatatggctatgttgctcctgaatatatggccacaggtacctaagtttgtggagtacttagcttatgaacactttagttggtcatacaaacttctatacatatcctgccttctaaattattgcgcaccaaccatataatacattaccgaaaataagacacccttatcaattctttntcaagccatcggggagctttntagcttcttttttttcccttcattaacaagcac

SEQ ID NO: 3041 - DNA, 419 bp, Glycine max
  unsure (1)..(419): unsure at all n locations
ctgagagttcactcataatttaattcatcggtctgtctacgatgtttattaaaagggggagaaacatgtgcgagggattctaattgctgtcctatttgaacatgtctcagtaaagagattagatccttcgggtagcgatattttgatgatgagtaatatcattttcaatgtattacaaaagagctctttttgtattttttatttatctaacgaaatgtcgatatcagagtagcaactcttangagatagttctatattgacttaaataagattggagaattaataagcgtagatccgggaattcccgatatatgtcaacctttcgaactatcgctgaatccatgagtaggcactagacagtctggtgaactgaaacatcttattatctatggagtatggtgcttaaattgattaatatt

SEQ ID NO: 3042 - DNA, 449 bp, Glycine max
  unsure (1)..(449): unsure at all n locations
ntgagccaattctaacgacaataaccttttactcggatgtccgattgagtcccgtaatatatcgacacgctcgaaattgaatgttgaagctctaagccaattcaaacaacaataactttttactcggatgtccgattcaatgacgtaatatatcgggacgctcgaaattgaatgttgaacctctaggccaactcaaacgacaataactttttactcggatgtctgattgagtcccgtaatacatggagacgctcgaaattgaatgtttaagctntgagcaaattcaaacgacaataactttttactcggatgtctgattgagtcccgtaatatatggagacgctcgatattgaatgttgaagctttgagccaattcaaacgaccataaccttttactcggatgtctgattgagtcccgtaatatatcgagacgctcgaattgaatgttg

SEQ ID NO: 3043 - DNA, 448 bp, Glycine max
actttagatcgctacaaagaaggacaaatatcagtatggaccaccttatggactcctctaagaacaatagcatcatttcttgcactgaattattgggaatcggaagccatcttctcaatcaaattcctagcctcagtaggggtcatatcaccaagagctccaccactggaagcatcaatcatactcctctccatgttgctaagtccctcatagaaatattgaagaagaagttgctcaaaaatctggtggtgagggcagcttgcacacaatttcttgaatctttcccaatactcatacaatctttctccaccaagttgcctgatgcctgaaatgtctttactgatggcagtggtcctatatgcaaggaagaaattctccaagaacaccctcttaaagtcatcgcaactgaaaatagacctgtgagcaaggtagtatagccacatctttc

SEQ ID NO: 3044 - DNA, 399 bp, Glycine max
ttgcccattgactttagatagctacaaagaaggacatatatcagtatggaccaccttatggactcctctaagaacaatagcatcattgcttgcactgaattattgggaattggaagccatcttctcaatcaaattcctagcctcagtaggggtcatatcaccaagagctccaccactggaagcatcaatcatactcctctccatgttgctaagtccctcatagaaatattgaagaagaagttgctcaaaaatctggtggtgagggcagcttgcacacaatttcttgaatctttcccaatactcatacaatctttctccaccaagttgcctgatgcctgaaatgacttttctgatggcagtggttctatatgcacggaagaatttctccaagaacaccct

SEQ ID NO: 3045 - DNA, 432 bp, Glycine max
  unsure (1)..(432): unsure at all n locations
tgagatggaacaggtcaaatgcgtgggataccaacttgtgtgttttcaccaacaacatgatggcaatcaatttccaagtgtttggcgtgtttgtgaaaaactggatttgcagctatgtgaagagcactttagttgttacaatattaatttaactgaggtacatgtgcattgaactttgagattagagaacaaatacataagtcattatagttcacaaacaacagagacaaatgctntatattatgggttgggataagtgttttgttttgtttgttgagaatgacaagtgggtgggaattacactttactacaacaatggaattggatccctgagtgcagagcagattcagaggatctctgcaagggtgaggcagtacggtaagattgaaggcaagaatgtcttgtattggttctagaaccacaaagctcgag

SEQ ID NO: 3046 - DNA, 441 bp, Glycine max
  unsure (1)..(441): unsure at all n locations
agcttctgatccacccaaggaggaatacatacatgttagagctcgccggcgtcaagcaacaaacagccatagccttgcagagagagtaagattntgtgagaacttatctgtaatgaaaatgaagtttttgtatgaagaattttaaattacattttcactgccggtgaggagggaaaagataagtgagagaatgaagtttcttcaagatcttgtacctggatgcagcaaggtggcttctaagtttgaacccacaaaattcactatgtcatattgttatttgcgtttatgtatcacatccttttaacattgctatttttactttctatgcttttacgtcactggcaacgcagtaatgctagatgaaatcatcaactatgtacagtcacttcaacgaccggttgaggtatggatgaacagcttatctccctattgcccacatgt

SEQ ID NO: 3047 - DNA, 264 bp, Glycine max
tatggtactcaatatcgagcgtgtgggtatttatgcgcctgattcggacatgcgtgtgaaatgttatgatcatttgaatttctcgagggcttctattgttcaatttcacgcgttttgatatattatacgcctgaatcgcacatgcgcgtgaaaagttatgacctttacgatttctcgagagcttccgttgttcaatttcgagcgcctagatatattatgcgccataatctgacatccgagtgaaaagttatgaccatgtggatt

SEQ ID NO: 3048 - DNA, 393 bp, Glycine max
tatcttatgacaattccaatctttataagcacaatgtacaaatctatcatgacaaacagctatcaaaaaggaattttcaccctgccccacaactattgttatttaattctcgattaacattatttctacgtaagctaaaatccaagtggtatggaccattcatcatcaaagaagttatgccacatggagcactgatattggacgacccaacccaccaaacgacatggatcgtgaatggaagcaaaatcacacactacctacgtggagatttcgagacgataatcattgttgtcccgctacaccacgcttgaaccacaacaaagacctccaactattaagacgttaaagaagtgctcctgcgacgccacctactatttctaaaccctacttttt

SEQ ID NO: 3049 - DNA, 332 bp, Glycine max
agcttgagaaaatcttttataaaaccatcggaagagttacatctcttgattttttattcataacttttcactggtcatccattactataaccatgtaatcgattacacaaaacattctatgaaaagatgtgactcttcacaattgaatttgaatttcaacgttcagatacactggtcatcgattaccaatatattgtaattgattacaccgtttaaaaaaacatttggaacgttgcaaattcacttaaaagcttttgaaatcaaactttaccactggtaattgattacacgtaattggtaatcgattaccagagagtaaatactctggtaac

SEQ ID NO: 3050 - DNA, 449 bp, Glycine max
  unsure (1)..(449): unsure at all n locations
tatgctgcanatatttacaatagacctcctcaacctcagcagcttaatcaaccacagcagaacaattatgacctctccagcaacagatacaaccctggatggaggaatcaccctaatctcagatggtctagccctcagcaacaacaatagcagcctgctcctttcttccaaaatgttgttggcccaagcagaccgtacattcctccaccaatccaacaacagcaacagccccagaaacagccaacagttgaggcccctccacaaccttccctcgaagaacttgtgaggcaaatgactatgcagaacatgcagtttcaacaagagaccagagcttccatttagagcttgactaatcagataggacaattagctacacaattgaatcaacaaaagtcccagaattctgacaagctaccttctcaagctgtccaaaatcccaaaaatgtcag

SEQ ID NO: 3051 - DNA, 420 bp, Glycine max
  unsure (1)..(420): unsure at all n locations
agcttgtgcattcaatatcttgatgacggtgctctatatgttctcaatattggactaatacatttgctgcccaagtttcatggtcttgcacgtgaatatcctcttaagcatcttaaggagtttcatattgtttgttccaccatgaagccccctgatgtccacgaagatcatatctttctaaacgctnttcctcattctctagagggagcgcgacaagattggttatactaccttcgctccacctccatttttagctgggatcaccttaacacggtgttcttggagaaattcttctctgcatctacgaccactgccatcagaaaggatatttcacgcattacgccactcagcgcacagaacctatatgaatactacgagagattacaaaactatatgccacctgctctcacactacatttc

SEQ ID NO: 3052 - DNA, 346 bp, Glycine max
  unsure (1)..(346): unsure at all n locations
tgtgggtggacgacgcatgaacganaacgcaattcatggngctccaaaaaagggttgaggatggagaattgcactaagcaatcactacgcatggctccaaggtccagggtggaggacgcatgaacgaaaatgcaattcatggggctccaaaaaagggttgaggatggagaattgcactaagcaatcactacgaacggctccaaactcgtgggtgaaggacgcatgaacgaaaatgccattcatggggcttcgaaaaagggttgaggatggagaattgcactaagcaatcactacgcatggctccaagctcctgtgtggaggacgcatgaacgaaaatcacattcat

SEQ ID NO: 3053 - DNA, 432 bp, Glycine max
  unsure (1)..(432): unsure at all n locations
agcttgaaattgaacaacggaagctctcgagattatcgagtgcgcatatattttacaccgatgttcgattcggcgaaataatatatcgagacgcacganattgaacaacggaagctctcgagaaattcgaatggtcataacatttcactcggatgttcgattccgcgacataatttatcgagacgcttcaaattgaacaaccgaagctctcgacaaattagaatggtcttaacttttcacgccaatgttccattccgggacataactcatctatacgcttcaaactgaacaacggaagctcttgagaaatttgaatggtcataagtcttcacaccgatgtctcgattggggacataatatatcaagacgattcaaattgaacaacgcgcgctctcgacacaatcgaatggccataacccttcacacacatgt

SEQ ID NO: 3054 - DNA, 407 bp, Glycine max
ctgcaagcttatataaatccgaacgccatactcacgtatatttcacaactgaaaagtgaatattgaacttatgaagtggtaacgggtgtcaatgtgcttacttcttttcatgaaagactggattctttgtcacagcgagtgctgatttattgtccacacatatttccataggttcttcttgtggcatttttaactctctcaacaagttccttagccaaattgcatgacaaacgcatgatgtggcaccgacatactccgcttcacaagttgatagcgtcactattgcttgcttctttgacatccaagtgaaagccctatctcccataaagaacacaacaccagtagtgctctttctatcatccaagtcttcactccaatcgctatcactatagcccacaatcgtataa

SEQ ID NO: 3055 - DNA, 391 bp, Glycine max
cgtagggttaaagtctcacgattgtcacgtgctcatgcaacaattgttagtcgtggctatacgagacatcttgctaaacaaagtcaggttagcgataactcacttgtgctttttcttccatgctatatgtagcaaagtcattgatcctgtcaagtttgatgagttggaaaatgaggccgcaattatactgtgccagttggagatgtattctccccttgctttctttgacatcatgattcacatgattgtgcatttggtcagagaaatcaaatgttgtggtcctgtttatctacggtggatgtacccggttgagcgatacatgaagatcttaatagggtatacaaagaatctatatcgtccagaagcgtctattgttgagaggtacattgca

SEQ ID NO: 3056 - DNA, 386 bp, Glycine max
gacctattaaactaagcttctctatatgtgatgtcctaaatcggtcatccgggttaaagttatgaccatttgaattactcaagagcttccgatgctcaatttcgagcgtcacgatattttatgcgcctgaatcggacatccgagtgaaaagttaagactatttgaatttctcgagagcttccgttgttgaatttcgagcgtctcgatatattatgcgcctgaatctgacatccgagttaaaagttatgaatatttgaatttctcgagagctttcgctggttaatttcgagcgtcacgatatattatgcgcctgaatcggacctccgagtgaaaagttatgaccatttgaatttctcgagagcttcccgtgttcaatgtccagcgtc

SEQ ID NO: 3057 - DNA, 243 bp, Glycine max
agcttgaaattgaacaatggaagctctccacagttttaaatactcataacttttcactcggaggccagattcagacgcataatatatcgagacgcttgcaattgaacaaccaaacgctcctcagaaattcaaatggtcataacttttcactccgacgtcccactctgcgcataatatatcaagatgcttcaaattgaacaaccacagctctcgaaaactccaacgcgctctaacctttcacat

SEQ ID NO: 3058 - DNA, 449 bp, Glycine max
  unsure (1)..(449): unsure at all n locations
gattctatagtcttaattgccaatgatgattaatttatcaatgatatagttaaagtttcacattttgcatctgggcattacttgtgaaaattatttataggtttaattactcatttgattntatagttccatcatttataccttttagtccctatagttgtaaagtgatttttttagtctttatgatttacattntaattgtcttttaatccttgtagtttgaaagtaattttttaagtcattataatttgtattttaatttctttataatccttatagtttgaaaatgatctttttaatccatatactttatattttaatttccttttagtccttatcattaaaatatgagtaatattatcaattataattaactacaaaaataataataagtaattcgtaactaatttatcgcaagataatttgaataatttntttaataattataa

SEQ ID NO: 3059 - DNA, 403 bp, Glycine max
  unsure (1)..(403): unsure at all n locations
tggacgctcctaatatctcccatacttnttggggtaggccattcttggatggtctttattttctcatggtccactttgaccccaattctatcaactacaaaccctaagaaaactatattatctacacaaaaagtacacttctctatatttgcatatagcgtgtttttcctaaggactaaaagaacttgcctgagatgtcccaagtgatcatctaggctcctactgtacattaaaatatcatcaaaataaacaactacaaatctacctatgaaatcccttaagacatgatgcataagcatcataaaggtgctnggtgcagtagtgagcccaaaaggcatcactggccattcatacaaaccanacttggtcttgaaagcggttttncactcattaccctttttca

SEQ ID NO: 3060 - DNA, 406 bp, Glycine max
gtgatccgcctctatatttgccacaattctatcttccctccatataatgagtttctggtgaagggtagatggcacagccccaactccatgaatccattctcttcctaataacaagttaaaattagccttggactgaatcaccaggaatagagttggtcgaactatactgcctacagcaacatctacttgaatggctcccaaagaatagccagttgtaccttcataattcgaaagcacaatgttgtgggcagatagatcagtgtcatgtttcccgattttgtagagcatatatcgaggcattaaattgacagccgctcctccatcaatgagcactttgttgattccaacattctcaacttttgctctgatgaaaagaggtttgagatgactcttcatctgaaaatct

SEQ ID NO: 3061 - DNA, 308 bp, Glycine max
  unsure (1)..(308): unsure at all n locations
tctaaaatgcccgattggtctgcctcagcaaatgtacaaaggggaccgctgtttggctgaccctcttcttcccattcaggttgggttgacccaaaaacgacatatatatttctgtcttatcccctcatcatccatatttccaatcatcacctatacttnttttaatgttaaataattacaaatttaaataagattaaaatattatttgattagttatttggacacttgccatttggttagttataacttaacatattatttttcattatacaatctatgttaggtttattctcatataatccttttta

SEQ ID NO: 3062 - DNA, 378 bp, Glycine max
agcttgtgcattcaatatcctgacgagggtgtttcatatgttctcaagactggactaatacatttgttgcccaagtttcatggtcttgcacgtgaacatccttataagcatcttacggagttccatattttttgttccaccatgaagcttcctgatatccaaaaagatcatatctttctaaaggttttttctcattctctggagggagtggcaaaagattggttgtactaccttgctcccaggtccattttcagctgggatgaccttaagagggtgttcttggagaaattcttccctacatctaggaccactgccatcacaacacacatttcaggcatcacgcaacttagtggagagagcttgtatgagtactgggaa

SEQ ID NO: 3063 - DNA, 423 bp, Glycine max
agcttcttatccaaggcactagaacgcccttgttgaggatcctttactccgacagcatctagggttcctcgaacaatgtgatatctcacactacgtaaatctttaaccctccccctcttactaagactacagaatattcttgtaaattatgtccaataccaagtatataagcagtaatttcaaatccaaacgttaagtgtactctactaactttatgtaaagcagactttggttttttgggtgtaataatggaaaagttgacagataagtcacccttattgccactctacagaaccatacatgagattttcacttcatatggctcctcgttcaattcttttgaagtcattggatctgtttcctagttcagtttgagaatctctcccctttttctaatttggtccgaagagtaactacgaccaa

SEQ ID NO: 3064 - DNA, 437 bp, Glycine max
  unsure (1)..(437): unsure at all n locations
ggctcgtcttgctgatatatgcagactnttctgatgatgaccgatgaacaattatggatcaacttgaaacttatgtgcttcaagtgagaagaaatgcttctttttccacttgtgaagatgttcaaagtttggctatgaagatggttcaaactgagaaacattcggtatttccattggtttataaacttattgagctagctntgatattgccggtgtcgaccgcatccgttgaaagagctttttcagcaatgaagattatcaagtctaaattgcgcaataagatcaacgatgtgtcaattgtatttgtaattaaattaaagtatacaagtaaactttaatattttagcttaaaaacatgaataccaataccacaatactattgataattgaatgaaattttaaaacattaataaaacaataattgttaattattaaat

SEQ ID NO: 3065 - DNA, 379 bp, Glycine max
ttcttctatgatcactcatgattataaagcggtgctccaaaaggtattgcctccatttcttaacagcagtggtaatcgcagtgagttcacgaacataagtggaggagctaagtaacctagcgcaaaactgtttgctaaaaaaatctattacgtgtcttccttacgacaccaccgtgcccatacccgaacccgaggcgtttgtctctaccatgaaggatttagtgaagtcaggaagtgctaagactggagaatgtgtcataccatgcttcaagtttttgaaggcaacgtcaacttcaacagtccacttgaactcttctttgttaacaggcatgagagtggtgctgccaaagtagcgtaccttcttatacatctatgataa

SEQ ID NO: 3066 - DNA, 230 bp, Glycine max
ttcgagcgtctcgatatattactggactcaatcagacatgcgagtaacacgttattgtcgttcgaaaattctcagagctttggaattcaatttcgagcgtctcgaaatattaccggtctcaatcagacatccgagtaaaaagttattggcgtttgaattagctctgaggttcagaatttcaattcgagcgtttcaatatattacgggactcaataatacattcgagcaaa

SEQ ID NO: 3067 - DNA, 455 bp, Glycine max
  unsure (1)..(455): unsure at all n locations
agctntngcaagctggaatcatatatcctatctccgacagccaatgggtgagtcccgtccaggtagtcccgaagaagaccggcctcacagtgatatanaatgagaaggaggagctgattcctactcgggtgcagaacaagtggagagtctgcattgactatatgaggctgaaccaagttaccaaaaaggaccattttcccttgccattcattgaccagatgcttgagcgcctggcangtaaatctcactactgtttccttgatgggttttctggttatatgcanattactattgctcctgaggatcagganaagaccacattcacctgccccttcaacacttttgcctataggaggatgtctttcggcctgtgcaatgcccctggtaccttccagcggtgcatgattagtattttcagcgacttcttaaaaaatgcatagaggtgttcatggatg

SEQ ID NO: 3068 - DNA, 444 bp, Glycine max
  unsure (1)..(444): unsure at all n locations
atatttctntgttctaatagtaactccaaccattttacagcttctaatgttatgattggtttggccacaccttccacatgtaaactcagccaatttcctctttagcttatgtcctgtgacattgtcctcatctacagatctccttctatttttcattggccttcctctttggaccctcttatgtggtggaacagggtgtgtatattgtgtctgggtccaatattgtggtatttggactggttcaatanaatgctggtatgtcttattataagcttctattgacagccactcatgacacatgtcctcaggcttcccttctttgtgagttattgttgcaatggcatgtcaacatggcatcccttcatcanagttgtaaaatcagcacacatgtatgttaggaatgaaaaaaaaaactataaagaacacaacctgtagttgcatact

SEQ ID NO: 3069 - DNA, 384 bp, Glycine max
  unsure (1)..(384): unsure at all n locations
gtggcatgtcccacttgtgctttttctatctaanttgcatcctgcacaatcaaaatctataaagcctgttagatttaaggaggtacctttgngatacctcacacccacattggttgtgcccttaagatacttaatgatcatattaacgaaaattaagtgagattccttaggattggactgacatcttgcacataagcaaacacttagcatgatatctagtctacttgtagtcaggtagagaagtgatccaatcatagctctacatcttgattcatcaacannatttaccttttcatctaagtcaaggtaggttgaagtagccattggagtagatgcttctttgcatttttccataccgaatttcttaattagttctatatagta

SEQ ID NO: 3070 - DNA, 454 bp, Glycine max
  unsure (1)..(454): unsure at all n locations
agcttctatagaggttnttgtggactgcttgtctatttataccagaataccttcagctacaatattgaaaagcaagggagctaggggatcttcttgtctcaaaccccttgtagggagaaatttcttagaagggcttgccttaatcaaaattgatataaaagctgagtggaggcaagctgatatccatgatctccattttgagcaaaatcccaacctgaacagcatgtagtccaaaaaagaccaagaaactgaatcgtacgccttttcaaagtccaccttgaagatcatcacaggtttcttatttctccttgcttcctcaaccacctcattgagaatcacaataccatgaagaatatgccctgctttaataaaggctgacttgctttcatcaattaacccattcattacagacctcaatctggtagacagcaacttggctataactntatacata

SEQ ID NO: 3071 - DNA, 434 bp, Glycine max
  unsure (1)..(434): unsure at all n locations
tgatcatacagctgcagagaggcggatccaaaaccactgtgtcgaacagtttaatagcgaagtggagctgctctgccagctgcgtcacccaaagatcgtctctcttataggattctgcaacgacgaatatgataacactgatgtgtactagtacacggtcaatggatctctaaatcgacacctacgaggtgaggataccgatgcactgccctggaataagaaggtagagatcttcatacgaatatangagcagcaagtggactacactaccttgacaccgacactaacaacattctattggatgataacatgcagccaaaactgacagatttcgaccttggcgacaccgagcatgtttatgtcaagcccaaaccaagtatagagagaatgataatatatgggaaatcatatcttatttatgagctacactcact

SEQ ID NO: 3072 - DNA, 417 bp, Glycine max
  unsure (1)..(417): unsure at all n locations
tgtggacattgtgcaatgggtgagaaaaatgacagactccaacaaggaatgagttcttaaagttcttgatcctagacttccctcaggtccacttcataaggtgattcatgttttttatgtaaccatgctatgtgttgaggaacaggcggtggagcggccaactatgtgcaaagttgttcaaattctgaccgagcttccaaaaccaccaagctcaaaacaaggagacttaacaatcatagaatcctctgtgtcattatcaaacagtttagagtctccaaccacggcatcaaaggaacccanagatcaacatcatcctcaatggccaccaaccgatctacttatcatttgaattttgagtgctcagttggagacaagggtgtgcgtcatattatttccttggattgggtagctatctat

SEQ ID NO: 3073 - DNA, 464 bp, Glycine max
agcttctgttcgtgcttaacagataattgaaagactattgtcttactccttgtgctgaattcacggtactcagctgaaatagcatagaatctgtaatcctcactggtttgaatacctgcagagatatcaacattcaaccaaacatatcttaatatcaattttaaacaaaagtaaacatgagcaacaataatagtataatacccgactattcaacatagcaatttagtttacctttgtcattagcgtctccattccattgaccagaggtgtggttccactccccagccacgttctcatcttttttccaatctgatttaacccatcgattttcccacccgtctggcatccacacaaagcacatgcacacgagttagaaaagtgggaaatactgatctaggattaaagaaaatacaaatgaacttcgaaaaggactacccgttgaggcgcaaggacaaataatattt

SEQ ID NO: 3074 - DNA, 326 bp, Glycine max
agtgcaattctccattctcaacccctttttctgagccccatgaattgcgatttcgttcatgtgtcctccaccttcgagtttggagctatgtgtagtgaatgcttagtgcaattctcaattctacaccctttttcggagcccatgaattagcgtttcgttcatgtgtccctcaccttcgtgtttggagctatgcgtagtgagtgcttattgcaattcttcattctcaaccattttcggagccccatgaatagcgtgttcgttcatgtgtgctccaccatcgagtttggagctatgcgtagtgattgcctagtgcaattctacattct

SEQ ID NO: 3075 - DNA, 450 bp, Glycine max
  unsure (1)..(450): unsure at all n locations
agcttaaaggaagtgaacgaattaggatgggcagatatgtctctgcactgattggtaaatctgttccccaaattcctgaaaaatgtaaagatccaggtacattcagcataccttgtattatagggaatagtaagtttgacaatgccatgctagatttaagagcttctggtagtgatatgcctctgtctatttttaattctctatctctaggtcccttgcagtcaactgatgtggcaattcatttagctaatagaagtgttgcgtatcctgttggtttcatagaagatgtcttagttagagttgacgaactgattttccctgttgattnttatattntgaatatggaagatggattntctcaaggatcagttcccatcattctaggcagaccctttatgaccactactagaactaagatagatgtttatacaggcacactatccatggagt

SEQ ID NO: 3076 - DNA, 396 bp, Glycine max
  unsure (1)..(396): unsure at all n locations
ttcctcttagtagggaatctttccttcctaagatagatcgattcccagtccccttcattaagaattagctcctttatttctctattgcctttagttgcatacacctttgtttgattctctatttggttcctaaccctctcatgcaacttctatacaaactctgacctagattccccttctttacgtataaaagaagtgtcaagtgggaggggaattaagtctaaggatgttagaggattgaacccattgacaacctcanaaggggattccttggtggttctatgaacccccatgttgtaggcaaattctacatgaagaagatattcatcccaagacttatggttgcctttcagaagatcccttanaagggtggatagagacctattcactacctct

SEQ ID NO: 3077 - DNA, 457 bp, Glycine max
  unsure (1)..(457): unsure at all n locations
gtcacctgcggcatgaagcttataaaaaaatatggcttcctaataggatgtgtactctctatgtaaggacagagatatgctntgctctgtgcactcttgaactatgttactatttgtgtgctcatgatcatggcgtcatatgtaatgaactttgtgcctttctcaatgcttctaattctgctgaaacctctatcattgtcggtcttttctttccattaagtctcaagcatattattgcaagatctgcaacagcaagaatgtcatctatacttgcgtccttgagcactctgtcatcaaaaattatacacacttggctcttcttcatcaatgaaatgaattgagcaaccagatcttgaccctcatcttcatataacaatgaagtatgctgtctcccagatatgagctgtacaagcacaactcccagagtatacacatcactcttatctgataattgact

SEQ ID NO: 3078 - DNA, 380 bp, Glycine max
  unsure (1)..(380): unsure at all n locations
cttgagcggttntcctctactcagttgaatccagtgtttcttctaatgctcattattaaacgaaatgcaaaatgtcttaatctcattattggttaagagaaattctatctttgtgctttcattcctcattcttcgcattatttttttggaaaaaatgtgtgttgttctgatcggtttgtggctttgtttctttaccatgcgtgcttgcattctagtgagaagtttcagaaacttcaaggtcttcagtcttttacattcacaagacttcaatgtcttctgtctgttacattccanatacttcaatgtcttttattttatacatttacaagacttcaatgtcttcttctttacatttcaaagacttaatgtcttttgctttt

SEQ ID NO: 3079 - DNA, 456 bp, Glycine max
  unsure (1)..(456): unsure at all n locations
agcttgtgttaatatgttctatagacactctntgtttctgttcttcttctttcacggcaaagtacttcaattccatatgcttagcacccgtagagtacttgtcgttcttagaaaagaatactgctgcggagttatcacaatacattttcagtggcctagcaatactgtcgacaattccaagccctgaaataaagttccgcagccaattagcctgaattgtagcctcaaaacatgctacaaattcagcttccatggtggatgcagcaacaactgattgttttgcactcttccatgatattgctcctccggctaagagaaatacaaagccaagagtggattntcttgtatccacacatccagcaaagtctgagtctgaatatccaatcacctctaggtgatcagacctcttatatgtaagcatgtggtcttttgttccctgtaagtatctcagaactt

SEQ ID NO: 3080 - DNA, 348 bp, Glycine max
  unsure (1)..(348): unsure at all n locations
ggcacgaaaatcattcactgatgaaaaagaatgacctaatccccacaaggactttcactggctggagaatatgcatcgattaccacaagcttcaagaagccatgaggaaagaccactttcttttgcctttcatggaccaaatgtaggagaggcttgtgggacaagcttattacaacttcttgtatggatactctggatataatcaaattacggtggaccccaaggatcaggagaagacgaccttcacatgaccttntggtgtctttgctttagaggtgcatgttggcatattttgtagatatggtggagaaaagtatcgaggtattcatggatgatttctcggtatat

SEQ ID NO: 3081 - DNA, 462 bp, Glycine max
  unsure (1)..(462): unsure at all n locations
tatgctgcanacatctacaatagacctcctcaacctcagcagcanaatctttcacaacagaataactatgacctctccagcaacaggtacaatcccggatggaggaatcatcccaaccttatttggtcgaatccttcacaacaacagcaacaacaacaaccttactttcaaaatgctgttggcccaagcagaccatacgttcctncaccaatctagcaacaacagcaacaacagaaacaacaaacagttaaggcccctccgcaaccttcgcttgaagaacntgtgaggcanatgactatgcanaacatgcagtttcagcaagatatcaaagcctccattcagagcttaactaatcagatgggacagttggctacacagttaaatcaacaacagtcccagaattctgatagaataccttctcaatctgtccagaatcacanaaatgtgagtgccattacattg

SEQ ID NO: 3082 - DNA, 477 bp, Glycine max
  unsure (1)..(477): unsure at all n locations
atgaattaaaaaaatctaanaaacacattatatatccagcaaagtatatttctttgttggtgaaatgatccggaagcaaaacctcaaatctgattggtcagtatctactttaattgttgatgtaagcaagttcacagtgtgatgagcaacaaatttctcatcatgtactccaccatgatgatgagaagacagatcgacttaaaagtccagagctcagagctattcctctggccagaatgttgactactagacccctacacatgataaataaccacaaaaaatgtntttttatataaatgtttgccaattaatcaccctcaatgtatcacttgataaatggtttttataaatggcatgcacttncggataccaataaatgagtgtgtaaagacatagctgattccaaacctggataatatagggctccatttggtgcaacaattcatacccctactggtggaaataattcaagtcaca

SEQ ID NO: 3083 - DNA, 502 bp, Glycine max
  unsure (1)..(502): unsure at all n locations
taagctctgcgtgncctctgggctcaaaatcccaaaacaaatccctcttattactagctattttgaattctttagttcctgaatgtacaactttcaaattggtggtcgttcccctctttggtttatgcaaaaaatgaaatcaatatcaaacaaaacatgcatacaattgtcatcgttattgctacttgaaccataaggaataacatctaaagaagtactttaaaacgtttatctattttttttggtattttttgaattacaatcttacttcaatatctaatattttaatgtacttaagtggaggatgttgacgaagagaaggagaatgaagaaaataatttaaagaagattaaggaagtgtcacatatttttctccttagcaaggaagtgtcacatgaatgctcgttggtgaacaagcataatggcatttggatgacagagcctgatgagatcacaaaggaggagtattatgctttctacaagagtctcaccaatgactgga

SEQ ID NO: 3084 - DNA, 506 bp, Glycine max
  unsure (1)..(506): unsure at all n locations
aaagttattcaaaataagaaaaatctcacaattatttccataatgagtgatcatggnggtgaatttgaaaataaagaatttgaactattttgtgataagcatggcattgaacataacttttctgcacctagaactcctcaacaaaatggagttgttgaaaggaaaaataggtctttggaagatattgctagaaccttattaaatgacactcctcttccaaaatatttttgggctgaagccgttaatactgcatgctatatcatgaatagggctttaataagacccattttaaagaaaactccatatgaattgtttaatggtagaaaacccaacatatcacaccttcatttatttggttgcaaatgctntgtactatacaatggaaaagataacttaggaaattnttatgcaaaatctgatgaaggcatctatcttggatattcattgcannagtaagcatatagagtatataacanaagaactatgatcatagaagagtctattca

SEQ ID NO: 3085 - DNA, 279 bp, Glycine max
acgacaataaatacttactcggatgtctgtatttttcccgtaatacatcgagacgctcgaaactgaatgttgaagctctcagcaaattcaaacgacaataactctttactctgatgtctgattgagtcccgtaatatatcgagacgctcgaaaatgaatgctgaagctctcagcaaattcaaacgacaataactttttactcggatgtctgattaaagtccgtaatacatcgagacgctcgaaacagaatggtgaagctctcaaccaattcaaacgaca

SEQ ID NO: 3086 - DNA, 416 bp, Glycine max
  unsure (1)..(416): unsure at all n locations
agcttaagaattctatttcgatcgtcccggtatatttttggtctcaatcagatatccgagntaaaaagtattgtcgtntgaattaactctgagggtcataattcaatttcgagcgtctcaatagattacgggaccgcatcatacattccagcaaaatggtattggcgcttgaattaactcacaacttcacaattcaatttcgatcgtttcgatatattaccggactcaatcaaacatctgagtaaaaaagctattgtcgtttgaatttgctgagagcttcaacattcaatttcgagcgtctcgatgtattacgggactcaatcagacatccgaggaaaaagttattgtcgtttgaattggctctgaggttcaaaattcaatttcgagcgtctcgatatattacgggactcaatcac

SEQ ID NO: 3087 - DNA, 482 bp, Glycine max
  unsure (1)..(482): unsure at all n locations
agcttgtaaggttaaagtctcacgattgtcacgtgcttatgtttaattgttagncgnggctatacgagacatcttgcccaacaaagacaggttagcgataactcgcctgtgctttttcttccatgctatatgtagcaaaaacattgatcctgtcaagtttgatgagttggaaaatgaggccacaattatactgtgctagttggagatgtattttccccctgctttctttgacatcatgattcacttgattgtgcatctggtcagagaaatcaaatgttgtggtcctgtttatctatggtggatgtacccggttgagcgatacatgaagatcttaaaagggtatacaaagagtctatattgtccagaagcatcgcatctattgttgagaggtacattgcagaagaagccattgaatnttgttcagaatacttagagaaggctaaacctattggccttcctgagtctcagcatgatgacagagt

SEQ ID NO: 3088 - DNA, 474 bp, Glycine max
  unsure (1)..(474): unsure at all n locations
tcaagaattatggcctcatcaaaatacttgtttcctgagggaaattctataaatagacctgccatctttaatggagtgggttaccactactggtaaacccgcatgcaaatctttatagaggcaatagatctaaatatttgggaagccatagaacaaggaccttatgttccctctataatagccggaagtgcaacaatagaaaaacctagagcaaattggactgaggaagaaagaagattagtacaatataatttaaaggccaaaaatattattacatctgccttacgcatagatgaatactctatggtttcaaattgtaaaagtgctaaggatatgtgggatacactacaagtaacacatgaaggcacaacagatgttaacagatctangataaacactttaacgcgtgagtatgaaccttntangatgaatgtaaatgaaagtatacaagacatgcaaaagagggtcacacac

SEQ ID NO: 3089 - DNA, 416 bp, Glycine max
  unsure (1)..(416): unsure at all n locations
agctngtaagggtntaagtgggaaatgatattgagacttcacttgggtaccaaccttgtgctacaacaattacagcaagacccactatccacaatgagagaacaattttttgttaacaccctgcatcttgtatgaaggatgttctctcttttggtttaagtcaggtcataaaatatactcctaaggagccttctcaccattagaagttcaccttcttcataggggtaaaactcctcaatatgcttatcacccgtggcttcaccctcacttccacttgaagcgggaaaagaagtagcttcctcttggctactatatatgtcttaacccctcatgatcatggttttctttgcagggtattgagaagcaatgcggcccttcccaatacatttgaagcacttgatgttactagttctatc

SEQ ID NO: 3090 - DNA, 474 bp, Glycine max
  unsure (1)..(474): unsure at all n locations
agcttcaacattcaatttcgagcgtctagatatatttcttgactcaatcaaacatccgagtaanatgttactgtcgtttaaaattgcttggctcttcagcattataattcgagcgtctcgatatattacgggactatatcagacatccgagtaaaaagttggtgtcgtttgaatttgcttagagattcaacattcatcttcgagtgtctcgttatattacggggctcaattagacatccgagtaaaaagttattgtcgttggaattggctttgagcttcaatattcaattacgagggtctcgatatattacgggactcaatcagacatccgagtaaaaagttattgtcgtttgaattntctcatagcttcatcattcaattntgagcgtctctatatattacaggactcaataagatatccgactagaaagttattgtcgtttaaattgctaagagcttcaacattcaactttg

SEQ ID NO: 3091 - DNA, 591 bp, Glycine max
  unsure (1)..(591): unsure at all n locations
agcttgaagtgaggaagtgtggaagggtgagacttcctacttttattcgttgaccacagagtagtacctagaatacagaagaagcaacaacaatcaatttaacaatattctttaaacatgcaagacacaattgattgcaacaaaataaataagataagggaagagagaatgcaaacacagttttatactggttcggccacaacccgtgcctacgtccagtactcaagcaacccacttgagatttccattatctttgtaaaatcctttacaaagtctgaaccacacagggacaacccatcccttgtgttcagatgctttacaacaagagactcacagtctcttaaccaatctcattgaataagaagaatggaagaagaattctctcttcaagagaagaatattacaatgaagatcatgtaaaaatccttatagattttgcaagtgtttggccaagggattcttttgagagagcatttgacaatgaagttcttttggaatctctctcattgtcttttgagaggataagacatttntgccaagccaaactctcttaatcttttgagaggataaaacattttgatcaatcaaaac

SEQ ID NO: 3092 - DNA, 310 bp, Glycine max
ttacgagtgcctgtatattgatgcgcctgagtcggacattcgagtgaaaagttatgaccatttgaatttctcgagagcttcctatggttaattttgagcgtgctcatatattatacgcctgaatcgaacctcagggtgaaaagttatgaccatttgaatttcttgagagcatccgatgctcattatcgagcgtctctatatgtgatgcacctgaatcggacctccgtgtgaaaagttatgaccatttgaatttctcgagagcttccgttgttcaattttgagcgtctcgacatattatgcgcccgaatcg

SEQ ID NO: 3093 - DNA, 294 bp, Glycine max
tcaaccaaggggagatggaccatttcaagtgcttgaaagaatcaatgactatgcttacaaagttgaactgcccggtgagtataatgttagttccaccttcaatgtctctgatttacctctttttgatgcagatggagaatccgatttgaggacaaatccttctcaagagggagagaatgatgaggacatgaccaatagcaagggcaaggatccacttgaaggacttggaggacctatgacaagggctagagcaaggaaagccaaggaagctcttcaacaagtgctgtccatact

SEQ ID NO: 3094 - DNA, 290 bp, Glycine max
tgtggggggacatgttgacttgctatgcaatctgacattcaccacagattctgccttattctattttcagatagggaatgcctctcacagcccctctgccaatgatctgcttcatgcctgttaagtgcagacgtccaaatctttgatgccatattctgacttcatcttctttggaggataaacatgtggaggactaactggcttcttgaggtgtgcataggcaacatgggtacttggatctgatgccgcttattataactacactcttctcattagtcaccaagcattct

SEQ ID NO: 3095 - DNA, 593 bp, Glycine max
agcttcccaaccaatctccgatatctttcaggatcagaataaggctccccctgattgggtaacaatttttgatttggattcatgggactatcaattgatctacaatctgacatactagtttctttaagtatgtctaacgcatacttcctttgtgagatgataatcccatcttttgactgagcaacttcaattccaagaaaatatttaagttttcccaaatccttagtatgaaaatgactaaataaatgttccttcagttgagcaattttttcttggtcatttcctgtgatgactatatcatctacatagaccaccaagtaaacacatctactcgatgaggtatgacaataaaaaattgaatggtctgcttcacttcgtttcatcccaaaagcctgaacaactgagttgaattttccaaaccaagctcgtggagattgtttgagtccataaagagacctccgaagtttgcaaaataagctagactccccctgagcaacaaatccccgtgggtggctcatataaatctcctcttctaattctcatgtagggatgcatttttaatatccaactgatacagtgatccatgacggatg

SEQ ID NO: 3096 - DNA, 297 bp, Glycine max
tcccaagtttttaagttcttcctcaaaactgtcctaagcaaagatcccaaagtcctattaacaacttccgtttgcccatcggtttgtgggtgacaagtggttgaaaataacaatttagtgcccaacttgctccacaaagtcctccaaaaatgacttaggaacttagagtccctatcactaacaatgctccttggcaaaccatggagcctcacaatctccttgaaaaacaaatcagccacatgggaagcatcatcaacttttttacatggaataaaatgagccattttagaaaaccta

SEQ ID NO: 3097 - DNA, 499 bp, Glycine max
agctttaagaaaagtcaaacgacaataacttttaactcggatgtccgattgagtcccgtaatatacgagacgcttgtaattgaaaatagaagctctgaacaaattcaatcgacattaacttttgactcggatgtccgattgtgctccgtacgatatcgagacgctcgaaattcaaaacggaagctctgagaaaaatcaaacgataataacttttaactcggatgtctgatcgagccctgtaatatatcaagacgctcaaaattgaaaacggatgctctaagaaaagacaaacgaccataacttttgactcggatgtctgattaagtccccgaagatatcgagacgctcgtaattgaaaatggaagctctgagaaaaatcaaacgacaataacttttcactcggatgtctgattgcgccctgtaatatatcgagacgcacgaaaatgaaaactgaagctctaagaaatgtcaaactacaataactgttgactcggatgtc

SEQ ID NO: 3098 - DNA, 295 bp, Glycine max
tgtatccatggcttcctatggtggtgagcttgttcttgactcatcttctccttgaagtggcatctccaatcacctttccttcttttccattccgttgtcattgatcttcaagaagcaaagggctctattgatgaagaagatccaatgcttacaagctctatatggagctacatcagtttatgaaatataggttgaagttgtgtataatatttgattgatatcattttttgggggatcaaggatatcatgcatatgttacaatttagatgcaaacaaaatttgcatagactaacca

SEQ ID NO: 3099 - DNA, 293 bp, Glycine max
tctctaaatttatattgcaaaacagagtatctagacatagttgtactcaaatatattatgtagctatccttaatgttttgtgtaatatattttctgtttctcctctggcagcttaaacgatgggagcggaaggagtgtaaaccaaacagtcttcctatcttgcacaaaatgcaggagatgcggtttaagtcatatttggacgagaaaggggtaaagttggggagattactgaaatcttcaagcatgacaacagtgttatagtgaaagatttaaatttgaagacaaagcatgtc

SEQ ID NO: 3100 - DNA, 709 bp, Glycine max
agcttgtaattgattaaaccgatacgagatataactctgtaagcttaaaacaacttttgtaatcgattactataagattgtagttgattaaaacacagagttttatcttctgaagaaattttctaactttgaaaattttcttttcactcacacatgatgatgcatgatgcacaaatgatatgatataaactaagatgcaacatttaatataacaaataatacaaatgtcattcaagagagttggaaatgtaaaagataaaacttcttcaagcttcaaaactaagtcttcaatgttgctcatgttgctccctctatctctaacataatattcaagtatttttttatcatcaagttatttttaactttcacaaaccaggtttaaaaatattttcaaagaaataaactctcacatagagaataaaggcaatgcaaaatgaatactcatgaattaactttgctagccaaagcataacactttgagaccaaatgatcatctatgagagcttttttggaaggagttttttgacactttgtgtttacttatatcctaagttctttttcttcaaagtttcaatctttcttatatataggctttaattaatgggtactagagagacgccccgtgccgatgcacgggcttatactaatatgtaaatatttatacatatacattattacatgtatacacctatataattttatttatttg

SEQ ID NO: 3101 - DNA, 294 bp, Glycine max
tgaaggtaaactagatgccttggttaacctggtaacctaactggtcatgaatcaaaaatctgcacctgtttccagactttgtggtttatgctcctctatcgaccaccacacaaaccttttcccttctgtgcaacaatctgaagcaattgaacagcctgaagcttatgctgcaaacatctacaacagacctcctcaacctcagcagcaaaatcagccacaacagaataactatgacctctccagcaacaggtacaatcctggatggaggaatcatcccaaccttagatggtcgaa

SEQ ID NO: 3102 - DNA, 295 bp, Glycine max
ttgagaaaattcaaacgacaataactttttactcggatgtctgattgagtcccgaaatatatcgagacgctcgaaattgaataccgaagcgctaagcaaattcaaacgacaaaaactttttactcggatgtctgattgagtcccgtaatatatcgaaaagctcgaatgtgaatgtagaagctctgagcaaattcaaacaacaataactttttactcggatgtctgattgagtcccgtaatatatcgagatgctcgaaatggaataccgaagctctgagcaaattcaaacgacaat

SEQ ID NO: 3103 - DNA, 589 bp, Glycine max
agcttctacattcaatttcgagcttttcgatatattactggactcaatcggacatccgagtaaaaagttatcgtagtttgaatttgctcagggcttcagaattccatttcgagcgtctggatatattacgggactcaatcggacatccgagtaaaaagttattgttgtttgaatttgctcagagcttcggtattccatttcgagcgtctcgatatattacgggactcaatcagacatccgagtaaaaagttattgtagtttgaatttgctcagggcttcagtattccatttcgagcgtctcgatgtattacgggactcaatcagacatgcgagtaaaaagttattgacggttgaatatgctcaaagcttctacattcaatttcgagcgtttcgatatattacgggactcaatcagacatccgaataaaaaggtagtgccgtttggaattgctcagagcttcaccaatccatttagagcgtctcgatatattaccggactcaatcagacatgcgagtgaaaagttattgtcgtttgaaattgctcagagcttcaacattcaatttcaagccgttcgaaataatacgggac

SEQ ID NO: 3104 - DNA, 312 bp, Glycine max
cactattgcttactcacccttcggagtttccaagtgccgattcgtcttcttctttagtccagtcttcttctggcttcaattcattagagggctttccttctgtgtccagcatcttgggatgttcccagcctttgatgacagctttccaggttctgctatccagtgatttgaggaaggccaccattcttgctttccagtattcatagttggttccatcaagaattggtggtctgttcactggtcctccttctttctccatgttcatcagaatttatctccctagatctcactcagtgatttcgagtgcccgct

SEQ ID NO: 3105 - DNA, 295 bp, Glycine max
tgaaggcaaactggatgcgttggtcaacttggtaacccagctggccttgaatcagaaatctgtacctatcgcaagggtttgtggtttgtgctcctctgctgaccaccatacagacctttgcccttccatgcagcaacctggagcagttgagcagcctgaagcttatgctgcaaatatttacaatagacctcctcaacctcagcagcaaaatcaaccacagcagagcaattatgacctttccagcaacagatacaaccctggatggaggaatcaccctaacctcaaatggtccagc

SEQ ID NO: 3106 - DNA, 403 bp, Glycine max
  unsure (1)..(403): unsure at all n locations
agcttcaaactcgaaggtggaggacacatgaactaaaattcaattcatggggctccgaaaaaggttgagaatggagaattgcactaagcaataactacgcatagctcaaaactcgaaggtggaggacacatgaaccaaaactcaattcatggggctccgaaaaagggtgagaatggaaaattgcactaaacaatcactacccatagttccaaactctaaggtggaggacacatgaacgaaaacgcaatttatggagcttcaaaaaagggtgagaatggggaattacactaagcaatcactacccatagctccaaactccatgggggaggacacatgaatgaaaaccatatntatggggctcccaaaaaggttgaaaatggagaatagctctaatgaattacta

SEQ ID NO: 3107 - DNA, 676 bp, Glycine max
agcttatagttattggagggagaataaaacaatccaaaatctaattgtacctttcaagtaacgaaaaattcttttttgcgcttttagaagaagagagggaggagcctccataatagcgacacacaactcccaccgtatataaaatatcgggcctttgattggatagaaaccttaaactccccacaagactcttgaagatcggggagtctaccttctctcttcataaacttgataacttaagccaccttccataggtgtgttcacgggattgcaatcaaacatattaaattttttcaacactttttttgtgtacctttcttgtgagacaaagataccattctctgtttgcttcacttccattcccaagtaatatgacatgagtcccatatctgtcatatcaaattcacgagacatggactccttgaagtcttcaaacaaatttgggttattgccggtaaagataacgtcttccacattaagacaaattaataagacatctccttattaaaagtttaacataaagagcatacttttcttgacatgaacaaacccattgtttggaagattgtcaatgcgatattccatgcccttgggcttgctttacacatacaagccttgtcaattcagaaattttttcttgaccttaagaaaaaccattgctgtcacataacatttt

SEQ ID NO: 3108 - DNA, 297 bp, Glycine max
tgcatgatttacacctccctctttctcaagcaaattcttcttgatatcatcaaaatcttcatgatttacacctcaaacctctagtaggggcaaattcatttgaggggctgccatttatgagaatggatatagaagctgattgattgcaagcattgatccatttcctccatataggacagaaccccattctgaccatcatataatccagaaagttccatgaaacagagtcataagcctttgcaaagtccaccttaaacaccaaagttggttacttacttcttttagcttcctctattg

SEQ ID NO: 3109 - DNA, 297 bp, Glycine max
tttaactgaatttgcaacattccaaatgttttttaaatggtgtaatcgattaccagtgtatctgaacgttgaaattcaaattcaattgtgaagagtcgcatcttttcataaaatgcattgtgtaatcgattacatggttatggtaatcgattaccagtgacaagttctaaataaaaagtcaagagatgtaactcttccaatggttttctcaagattttctcaaggttataactcttccaatggttttcttgacctgacatgaagagtctataaaagcaagaccttgaattgcattca

SEQ ID NO: 3110 - DNA, 583 bp, Glycine max
agcttcaacattcaatttcgagcgtctcgatatattacgggcctcaatcagacatccgagtaaaaagttattgtcgtttgaattggctcaaagcttaaacattcaacttcgagcgtctcgatatattgcgagtctcaatcagacatccgagtaaaaagttattgtcgtttgaatttgctcagagcttcaacattcaattttgagcgtctcgatatattacgggactcaatcagacatccgagtaaaaagttattgtcgtttggattggctcagagattcaacattcaatttcgagcgtctcgatatatgacaggactcaatcagacatccgtgtaaaaagttattgtcgtttgaattggctcaaagctccaacattcaatttcgagcgtctcgatatatgacgggactcaatcagacattcgagtaaaaagttattgtcgtttgaatttgctcagagcttcaacattcaatttcgagcgtctcgatatatgacgagacttaatcagacatccgtgtaaaagttattgtcgtttgaattcgctcataggttcaacatttaatttcgagcgtctcgatatattac

SEQ ID NO: 3111 - DNA, 582 bp, Glycine max
agcttatttgtaaaaaaaccctaaaacctaatttgtcaaatacccattaaaccccaatcagtcaagtaattctaaacccttatctttcaaatacccctaaaccataactagcaaagaaatccaaaaatctaatttgtcaaataaacataaaccctaattggtaaagtaacactaaacacaaatttgtcaaatacccctaaaccctaattagtgaagtatccataaaccctaagttttaaaataactataaaccctaattggtcaagtaacactaaaccctaattagtaaagtaaaactaaaccctaatttatcaaacacccttaaaccccaattagtaaagtaaaactaaaccatgatctgtcaaatatagctaaaccctaattagtcaagtaattgtatccctaatttgaaaataaccctaaaccctaaacagtcaagtaacactaaactctaattagttaagtacccataaaccccaatttgtcaagtaacccgtgaatccctaaatttcaaatactcctaaaccctaatataataaataacccttaaccctaattggtcaagtaacacaatattctaat

SEQ ID NO: 3112 - DNA, 295 bp, Glycine max
ttgagccaattcaaacgacaataactttttactcgaatgtctgattgagtcccgtgatataacgagacgctcgaaattgaatgttgaagctctgagctaattcaaacgacaataactttttactcagatgtctgattgaggcccgtaatatatcgagacgcttgaaattgaatgttgaagctctgagccaattcaaacgacaataactttttactcggatgtctgattgactctcgtcacatatcgagacgctcgaaattgaatgttgaagatctgagccaattcaaacgacaat

SEQ ID NO: 3113 - DNA, 483 bp, Glycine max
agcttacccatggcgtacctacaccatgcccaaattcaagggacaaattaaatatatgccataagttatgaagcaaattataaatatatcatgaatggtccgcagtatgaaatttctatatgccaaaaatcataaaattaaaaaaaattgcagcctgcatgatagggacttgactgtgaccatgtgcatgtggttcttttttttaacactgcaagttatgtactggcagtgtgggttgagactgaagataaggcagggtactttcaaatgacatgaaatggggtactcgtaaatcgtaatacttactctggtgccgaatatccagtggtccccaacatacgggtggaaacctgaccgttcctcttgtctgatcccatcttaggcaatccaaaatcagacaccttggcacgcatgttttgatccagtagaacgttgttactcttgaagtctctgtggatcacaagagagactgtttgttcatgc

SEQ ID NO: 3114 - DNA, 643 bp, Glycine max
  unsure (1)..(643): unsure at all n locations
agcttttctcagtcgtctataaggatgattgggtgttataaagcggtgatgcctactgtagactatttttctcccatgtttaagttgtatgtaacttgtattttcttcacagacggggcatgcatgatgacccttaacactgtaaccgctgagattcccatatgctggaaagtcattaatggtacaaaaaagcattgcacgtatttcaaacgtctccttgcgaaacgcatcaaatactacaaccccctcgtcccacaactttctcagatcttcaaccaacggacttagataaacatcaatgtcatttcctggttgtcttgggcccgatatcatcatagacaacatcatgtattatcgcttcatgcacaaccaaggaggcaaattgtaaattactagcagaattggccatgaactatgttgagtgcttaaggtgccatatggattcattccatcactggctagtccaagtctaagatttcttggctcattcccaaaatccggatacaaaccatcaatcttcttccactgcgagtaatcagcccgatgacagaccattccatcagaaatccttcatttgcatgccatgtaanggtctttgcgtcattctcgttgcaaagagacgcttaaccttggaatgattgga

SEQ ID NO: 3115 - DNA, 294 bp, Glycine max
tctattttttattacgagcgtctcgatatactacgggacacaatcggacattcgagtaaaaagttattgtagtttgaatttggaacgagcttcttttttcaattacgagcgtgtcgatatattacgggacacaatcgtacatccgagtaaaaaggtattgtcgttagaatttgctaagagcttatgttttcaatttcgagcgtctagatatattacgggtcacaatcggacatccgagtaaaaagttattgacgttagaattttctaagagcttatgttttcaatatcgagcgt

SEQ ID NO: 3116 - DNA, 540 bp, Glycine max
agcttgacagtgcctgattcattgaccagcaagtttgttcctttgatatctctacagaaccaaatcaactcaaccattttaacaaacttcaaacagcaatgccaaacagattttattagcaagatagaaaggttgctttcattaaacatccttgtcacctgtggatggttttgttactatgtaagtaagctaatcccgaaagaatatgccttgtaaaattgcaaaccacagattctgtcatagctccacaatgttcacgcataaatttactgattgatcccgggtagacatactccatatatatgtacaaatgatcgccaacctgaaaatacaaatgcttcaaaacgtcaatctaatttactatgacaaatatccttaactttccattgggttgtatcgattatacttggaacaaaaacttaacaaccaagaattaactcactgtttcacttccataatactgcacaatgttgggatggtgtagttgacggaaaattttgatttcctggaacacagaactttttagaataacagcctaaa

SEQ ID NO: 3117 - DNA, 291 bp, Glycine max
ttaactcggatgtccgattcaggcgcataatatatcgagacacttgatattgaataacagaagctctcgagaaattcgaatggtcataacttttcacacggatgtccgattccggcgcataatatgtcgagacgctcgaaattgaacaacggaagctctcgaaaaattccaatggtcataacttttcactcggaggaccgattcacgcgcataatatatcgagacgctcgaaattgaagaacggaagctctcgagaaattcaaatggtcataacttttaactcagaggtcc

SEQ ID NO: 3118 - DNA, 456 bp, Glycine max
agcttctcgatacattatgcgcctaaattggacattcgagttaaaggttatgacaatttgaattgctctagagattccattgttcaatttcgagcgtctcgatatattatgaatttgaatcggacctccgagttaaaagttatgaccatttgaatttctcgagagcttgcgttgttcaatttcgagcgtcttgatatattatacgccagaatcggaactccgtgtgaaaagttatgaccatatgaatttctccagagattccgttgttcaatttcgagcgtctagatatattatgcgcccgaatcggacctccgtgtgaaaagttatgactatttaaatatctcgagagcttctgtcgttcaattccgagcgtgtcgatttattatgcttcgcaaatttggtctcgaggtaaaaggaatgaccattggaatttctagagagctttcgttattcaat

SEQ ID NO: 3119 - DNA, 554 bp, Glycine max
  unsure (1)..(554): unsure at all n locations
agcttaatacaccaattattaatttttttttaatagattgtaggtattttatatgaaagataatcttatttaaactggataaataagataattataagtgataaaactctgtctccaaatatttaacgtaattatatatgtaagactaattaatctaaaataactttgcatgattaacatactcagtgctataacactaatagtttggtaataactaattcattgataaatattataaaatcatcaatatttgagagtattagaataaattttacttcgtattagaataaaattaattagatgcaaacctattaacgaaatgctttaacttcaccaaatatgtgattatgaaagcaaagggtagatggcagaagaaagagcaggataaataccatgggacggtggcatttgagaagtgattggaaaggaagcaggggcacttgtgcggaattgactntgaaatcttcataattagggccactagaagacataaaattatgatctatctttgattccaaagntcgtagttggtgtgattctgcttacataatgac

SEQ ID NO: 3120 - DNA, 395 bp, Glycine max
tggatgtagatgacgatatctatacagatggatcttatatatctatatatctatagatagatatatagatgtagatatatagatatagatcatacaatgaagtaccgcacgagtgggtatataggaatccaaatctgccgaatcactcatgttatgatcttctacatcctaggtcttcccgttccttcatctggcttatgttcttcatgtagcattcagactgaatgactctatgaaattacgtcgctacttccacatggtacgggtaacgtaggagacatctctatttttcctcgcgggaatccttagaattaccacagcttagctgtcaattcgcctctgaccatcagatgaaatgtgaataacccgtcctcccctctttgaaactttgaaac

SEQ ID NO: 3121 - DNA, 217 bp, Glycine max
  unsure (1)..(217): unsure at all n locations
accgcttagaataaagaacacaattatatttgtcgagaagtgccaaatngtattcatacgatctttgctgcgccgtttgattaattggaatgtttctttatacattccactacgcacgttntgcagatgtgtttccggacattcctttaacatgtcatctaagaaaaacagttgcttacattctatgaatttttttagaatactcttttctttaata

SEQ ID NO: 3122 - DNA, 398 bp, Glycine max
  unsure (1)..(398): unsure at all n locations
tctctatccaatcctttgaagaaacatgcaatgtcttaaaaaatgtccttttgagaacagtctaagccatcataacttaattttaataccttatgaattntcatatttgaaatctttnttagttttctcaattcactttctcatgcttctttacttcttgaacgaaaacttacacccaaaacttttaaagccaaaggaatacctttgctctaagaaattgctcttcttgattgaacctcatatccatctntagggtgtatttctccaaaaacagtcaaacagaacaactgaagagaatgctcagagctcaaatcttggacctgatatatntcatcaattgggctaagtatttgcttgtttctagttgtaacaatgatcctacttgctgggtgacactc

SEQ ID NO: 3123 - DNA, 431 bp, Glycine max
  unsure (1)..(431): unsure at all n locations
agcttgccttggcccttgatatatttgagggactcatggtcactatgaatgacaaattccttgggataaaggtagtgttgccatgttttcaaagcccgtactaaggcatacaacttcttatcataagttgaataaggaaaggcaagaccacttaacttttcactaaaataagcaattggatggtcttcttgcatcaacacagccccaatcccaacatttgaagcatcacactcgaattcaaaagatttttgaaagtttggcaacgcaagtatggnggcattaattaacttttgcttaataacattgaaagcttcttctttgttctctccccatctgaaaccacacattttcttgagcacttcattgagaggtgctgccaatgtgctaaaatccttcacaaatcgtctataaaaactttctaagccatgaaa

SEQ ID NO: 3124 - DNA, 386 bp, Glycine max
  unsure (1)..(386): unsure at all n locations
tatgaaccatttaatttctcgggagtttccattgttcaataaccaatgtctcgatatattatgcacctgaatcggaaatccaagtgaaaagttatgaccatttgaatttctcgagggattttgttgttcaattttcagtgtctccatatatggtgtgcctgaatcggacctccgcgtgataacttatgaccatttgaatttcttgagagatttcgttgttcaatttcaagcgtctcgatatatgatgcgcctgaatcggacatccaagtgaaaagttatgaccatttgaatntctcgtcagcttccgttgttcaacttcgagcatctcaacatgtgatgtgcctgaatcggacctccgtgtgaaatagtatgaccattttaatttc

SEQ ID NO: 3125 - DNA, 444 bp, Glycine max
  unsure (1)..(444): unsure at all n locations
taatgtactaagtcctccaactccacataattntgcaactctgcaacatcccttatatcactatttaacccatgtagcaaacaagccatagtagcctctcaatcctccgtaacattagctctaatcatggaaacctncatctccttataatactcatcaaaacttatactaccttgtgtgagtctttgtagcttgttatgaaggtttctttgataatgagaaggaacaaatcttcttttcatcaacctcttcatttcttccctactatccaccaagggttcttcatatctcgccctttccctttgtaattggttccaccagatgaaagcatagtcagtgaattctatggctaccaccttcatctttgtatccttagtgtaattgaggcatgcaaatagccgctcaattntcatttcccactccaaatatgcttctggatcactc

SEQ ID NO: 3126 - DNA, 472 bp, Glycine max
  unsure (1)..(472): unsure at all n locations
gcttcgacgctcaatccctggtgcctnttccttgttgaatgaagaatctntaaaatcaattgccaataaagtgctcaaaaattgtagtttgtcaaaaacttcaatatctaagattggatcactgaactctgtaactgacaaatgacgagtctttataccaatcttggtttcttttccaagttcttctgatctgaaatagaattctccaccaaggtataatgctagatcatgcacgagatcatgcattacaaaataattgccccaagtttgattacttgaacgttgaaaaaatgatcttgaaactaagtcatcaaaatactcgtaaccaacttctaacgcctttcctctgtttggaagcttcaaaagatcttcagccatccacaacaagatcaagtccttctttcgaaattcataatctttacggcataatgaacactaaacaaagcaccgttgtaaatgtggagggagatat

SEQ ID NO: 3127 - DNA, 296 bp, Glycine max
agcttctcgatatattatgcgcttgaatcggacctccaagtgaaatgttatgaccatttgaatttctcgagagcttctgatattcaattttgagcgtgttgatatattatgcgactgaatctgacctccgattgaaaagttatgaccatttgaatttctcgagagcttccgttgttcaatctcgagcgtctcgatatattatcctcctgaatctgaccttcgtgtgcaaagttatgaccatttgaatttctcgagagctctccctgttcaatttccagcgtctttatatatgatgc

SEQ ID NO: 3128 - DNA, 375 bp, Glycine max
  unsure (1)..(375): unsure at all n locations
agcttatgctgcaaatatntacaatagacctcctcaacctcagcagcaaaatcaaccacagcatagcaattatgagctttccagcaacagatacagccctggatggatgaaccaccctaacctcagatggtccagccctcagcaacaacaacagcagcctgctccttccttccaaaatgctgctggcccaagcagaccatacattcctccaccaatccaacaacagcaacaaccccagaaacagacaacagttgaggcccctccacaacccttcctcgaagaacttgtgaggcacatgactatgcataacatgcagtttcagcaagagaccagacgcttcattaagagcttaaccaatcagatgggacaattagc

SEQ ID NO: 3129 - DNA, 453 bp, Glycine max
  unsure (1)..(453): unsure at all n locations
cctgtcactatacttgattatntaaatgttcaattaaattcattttttatagagcatgtatacaccgttggaaatagattttttcagactagatatcattattataaatggtttttcaatcaaatatttaatataattacatattctaattttaatttgagacctctaattaaaatcaataattttgatttattaatatacaattaaatatgagaacaatacataaactagtgattattttttcttggttgaaaaaagaacttatagtttgacattaaaaacctatgaatgggtatacaataataaaataattaattctatactttataataaaagagatatacttaattactaatttgtaattntatcaattttttatctatgaattgaagacaatgttaggatttacaattaggatatactttatatgatgttcaatcaattaagttaatc

SEQ ID NO: 3130 - DNA, 419 bp, Glycine max
  unsure (1)..(419): unsure at all n locations
nggatttcctcttagtagggaatgtatccttcctaagatggagccaaacccagtcccgctcattaagaaatagctcctttcttcctctattgcctttagttgcatacacctttgtttggttctttatttggttcctaaccctctcatgcaacttctttacaaactctgacctagattccccttcaatatgcataaaagaagtgccaagtgggaggggaattangtctaatggtgttagaggattaaacccatagacaaccttaaaaagggattgcttggtggttctatgaacccccttgttgtaggcaatttctacatgaggaagatacccatcccaagacttatggttgcctttcagaagagcccttanaatggtgtatagagacctattcactacctctgtttgctcatcagtttat

SEQ ID NO: 3131 - DNA, 299 bp, Glycine max
gctggagctgctgcacatgatgtcccaccctatgtccaaaaataagatccggctgcacaatgcacaacgcaagatatagtgtcacatgaacaattgcagcttgccgattcacgatgtcggatacaatgtgcacaacatccctgcccaaaatactggagttgctgacagcatctgaaagttgccgatccacgatgtcggacaccatgtcctgcacttcggcccgacaatactggacatattaatctgctatatctttaacagactattgcgcacgtagcaagagataacatgatctatct

SEQ ID NO: 3132 - DNA, 433 bp, Glycine max
gtctcgcacgatatggcagtctatttcaatgtgtttagttcgttcgtggaaaatatggtttgaggctatctggatggcggactgattatcacaatagagagttgcaggttgaaggaaggggaccggaaaatcatgaaggaggtaggtgagccactgaagttcacacgtagtagaagccaaagctctatactctgcctcagatgaactgcgagagaccgtagattgcttcttggaccaccaggaaattagagactcacccagatagactgagaagccagtgatggagcgtcgtgtgtcgcaacatcctgcccaatcggagtcactgaaagctgtgagagtgagtgtaccttgagccacgaagaagatgccagaaccaggagttcctttgaggtaacgtatgacctatatagcagcttgtgagtgcgtggaagtg

SEQ ID NO: 3133 - DNA, 216 bp, Glycine max
  unsure (1)..(216): unsure at all n locations
cttactaacgcacctgttctagctctctctgatatttctaaaattgctgagctagaatgtgatgcctctggagtgggagttggagctgtattgttacaacgtgggcaccctattttttattntanagaaaaacttcatagtgccacccttaactaccccacgtatgataaagagctttatgccttaataagagccctcctgacttgggaacattac

SEQ ID NO: 3134 - DNA, 389 bp, Glycine max
agcttgcctaataaacaaggacacaacaagagacatgaatcttataaatataaatatagatacacatgcacggtaaaaaacttacattataataagaggtgacaagatcattataccatatataacattaacataacaacataaatgtttaattaaagaaaaaactaatatttaataaattactatcattattagctattgctgccttcatttgcgtctaattatttgtattacttattttctattcaaactaaacctgttcataacgcaataaaaattctaaagggtcacgcacagctttctgcactctctgtctcttacctatttgacagtgtgtatatatatatatgagatacacttccccccgttttatgtcttaaaactcccgc

SEQ ID NO: 3135 - DNA, 416 bp, Glycine max
agcttgcactcttaggggacatgatgaaagtgtgttatctggacaccgtggcaactctcttgaaatgataaagctcttatcttcttataatacggaaatagatgaaattatctcggacaacgcccctcacaatgtaagatacatttcactcactatccaaaaagatattctatatgtctttgctagaaaggcgcgagatgaaattcaagaagagatcggtaacgcaaaattctcgttcattgttgatgaagcccatgatgaatctaaaagagaacaaaccactctagctcttagatctcgcgataagaatggatatgtctacgagcatttcttggatatgatacatatgccagatactacatcatccattcttaagcacgggatatgtctcctattgcctcatcataatctcaaca

SEQ ID NO: 3136 - DNA, 377 bp, Glycine max
  unsure (1)..(377): unsure at all n locations
tatacggcctaggatgtggttntgtgattaaattcaattaagacacaagtcttgcacttgccacattggtacaactccctccatcaatgatcaccatgcaaactttgccattgatcaaacatctagtgtggaaaatgttttctctttgactttcctccatagacttcaattattggccaagtaaccgcctaatcatcaacaattctccctccagtgttttctccacttcctgctcatcatcctcactctcttctcccttttcaacttcggactcactaatgtactctccatctctaagaatcatggctgtcttgttagggaactcatatgcataatgttccaagccttggcaccgaanacacttcacatnctggctc

SEQ ID NO: 3137 - DNA, 498 bp, Glycine max
  unsure (1)..(498): unsure at all n locations
tgtattcttaggaatcactnggactagactcacccaccggctatcagaaatggngtagatgattccaactggcaagagcttggtcacctcctttntcaccacatctagaatgatggggttaagtcgtcgatgtggctgcctcactggcttagctccatcctctaaaagtatcctatgcatgcaggtagatgggctaatactangaatgtttgctaaagtccatccaatagctttcttgtgcttctggagcactaacaacaacttctcctcttgctcggcagtaagggaggcagagatgatcactggaaatttttccttgtcctccaagtaagcatacttgaagattgctggtaagggcttcaactctgatgtgggtggtggctgaatagtgggaggaaccanggtaggagaagaagaggagggttccttcacctgtacctcataaagcaagtcataagtatatgtaccttctgcaacatggttagtgcattatgactc

SEQ ID NO: 3138 - DNA, 360 bp, Glycine max
  unsure (1)..(360): unsure at all n locations
agcttgtagatccaccgaacgtggaggacaagatctgtgttgtgcctcatggcctttccaccgattcagatgtccgtaagatgtgcgcattgntcgatttccctttctctctcgttctcttgtttttttgcgtataagcgtgcgtgtgttgttgcgactgaaagggaggcgtatatgatctccaagagatctcctccaagcaatgcggagaagtttgagttccaagccgaagtgtcgtggctaccttatggattgtgttctgccccaaaaaccctaatcaacagcccattcacagcctcaagggccatcatgggcgacactaactatatctgtccgctccacataaataataattcacga

SEQ ID NO: 3139 - DNA, 285 bp, Glycine max
  unsure (1)..(285): unsure at all n locations
ggatctctaagtcanctgaggcatgcaagcttgtgaccatttgaataactcaagagcttccttgtntcattttgaccgtctcgatatattatgcgccttaatccgacctccgagtgaaaagtcatgaccatttgaataactccacagcttccattgttcaatttcgagcgtctcgatatcttatgtgcccgaatctgaactccgcgtgaaaagctatgaccatttgaattactcgagagctttcgttgttcaatttcgagcgtctccatatcttatgcgcctgaa

SEQ ID NO: 3140 - DNA, 413 bp, Glycine max
agcttcttcttgtttctcttctcatttgacaccaatatttttctcgagcacttcatcgagaggcgctgccaatgtgctagaatacttcacaaatcgtctataaaaacttgctaagccatgaaaactcctcacctcggtcacagacttaggtgtaggccattctagaatacccctaaccttcttctcatgaacttgcactccttttgaactcacaacacaaccaagaaacacaacatggttagaacagaagatgcatttttcaagatcgcgatacgagtgttcttttctgagcacaggaaagacagagtttaaatgatcaatatgccaatcaagtgaagtgctatccataagaatatcatccgagtacaacacaacttatttttctatgaactctgtgaagatatggctcatta

SEQ ID NO: 3141 - DNA, 399 bp, Glycine max
  unsure (1)..(399): unsure at all n locations
cgaagtcgattctacgacctgttttcttcactctgaattcttttgctanatttaaccttgcaatcacagtctcatagtcaactcgattgttagaagttttgatattaaaccttaatgattacttgagtgagatatgtccaggtccttcaagggtgattcctattccactaccattgaggttactagctccaacaacatagagcatacaccaatcacctctgtcactactactcgattcatatggaagctctaccatgatgtagaccatacattaagctctaatgggtccttgtggctagctccatggaccatgcaaccattctttcaacaagctctggcttttgaagcactagtctaataggatgagtggtcttgactctgatcaactgactttggaag

SEQ ID NO: 3142 - DNA, 346 bp, Glycine max
  unsure (1)..(346): unsure at all n locations
agcttgcatcagtaattntctagcatccatcaatatatagtactttgagtgctccaccatgtattctgcccaaggctgacactacattatctgtctagttccaccaaccaatgaggtttacattgaccagtctagcctaacaattatgcaaaagggggagaagacccacatcatttatggcatagacgttaatcacattaagatgctgaagtcaagacacaatctgaacaattatgactcggctagcattgataaaaccacgtcacttttgaattactaaacgtccaagagactcgcacggagaaagcatacaccctttcatatcgatatatttgactcccatgca

SEQ ID NO: 3143 - DNA, 388 bp, Glycine max
cctgactcaccatataccttgacccacggtgagaatgccaatccttaccctcggaagcgaaaaaagaatagaggggaaatttgcgatcaaagaataagagaaggagaatttccaatgaaagcataaaagaaatgaaggaaaattccccaatctaagagtgggagaaagcaaaacaaggaaaagaacgaaaattcctcaatcaaagagtgggagagagcaaaaagaaaagaaaggaaaattccctatcaaagaatgggagagagtataacaggaagaagaagaaggagagaaagctcctgatcaaggatcgaaagaaccagaagaaatgtgcagagaggtcttgggaccagacaatatctgaacagtacagaattgtcaccaaatgaac

SEQ ID NO: 3144 - DNA, 455 bp, Glycine max
  unsure (1)..(455): unsure at all n locations
tgagcattcaatatcctgatgagggtgttccatatgttctcaatactggactaatacatttgctgcccaagtttcatggtcttgcaagagaagatccttataagcatcttaaggagttccatattgtttgtttcaccatgaagccccctgatgtctacgaagatcatatctttctaaaggcttttccacattcactggagggagtggcaaaagatcggctatactaccatgctctcagatccatctccagctgagatgaccttaagagagtgttgttggagaaattcttccctgcatctatgaccacttccatcagataagacatttcatgcatcaggcaactcattggagagaacctatatgaatactangagagatttaatatattatgtgccagttgccctcaccaccagatgttagagcaacttcttctccaatatgtttatgaatgactc

SEQ ID NO: 3145 - DNA, 387 bp, Glycine max
  unsure (1)..(387): unsure at all n locations
agcttgttntanaccatatatagatctatctaagcttgcataccatacgctcagcactattataggagaaaccttcccgttgcctcatataaacctactcctctaaatcaccattaagaacagctgttttcacatccatatgctgcttctccaggacaaaatgagcacctaatgctcttattatatgaagagaatctttcttatatactggagaaaaagtctctttgcaatctattgcttccttttgagtaaataccttagcaacaagncttgccttgtatctctcaatgaagactaatgaatcctttttggtcttaaagacccatttacatacaatagcctctcgcccattacgcaactctacaacgctacacactttggtactct

SEQ ID NO: 3146 - DNA, 460 bp, Glycine max
  unsure (1)..(460): unsure at all n locations
agcttgaagataagactatacgaggtatcttccttgggtatagcaatatctctcagggctaccatgtctacaacttgcaaactaagaaactcttcatcagtcgagatgttgaagctgatgagtatgcttcttggaattgggatgaagaaaaagtggagaagaatgttcttatacccgctcaactacctcaagaagaagttgaggaagaagacccaggtgaaccaccttcacctccaccacaacaacaagatcaagaactatcatcaccagagtctactccaagatgagtaagatctttggtggacatatatgaaaccagtagcttggccatacttgaacctggaagctttgaagaagcgtcaaagcaggaagtatgggtcaaggcaatggaagaagagatacagatgatcgagaanaataatacatgggagtatgtaaatcatccccatggaaaagatat

SEQ ID NO: 3147 - DNA, 446 bp, Glycine max
  unsure (1)..(446): unsure at all n locations
tcctcgtggcttctttgagaagttttctcaagaggcttctntgataagctacatccttatctatccatccctctattaactaaattaacttccttaagaataattacggatgaaaataacgcaacaaataatcaaacatcaaacataattactaataatatatagatatatatatcacggtgttacacatcatatattgagacgctcgaaattgaacaatggaagctctcgagacattaaaattgtcataaattntcacacggatgtccgatcatgcacatcagatatcgagacgctcgaaattaaaaaaacggatctcgagaaattcaaatggtcataagtttcacacggaggtccgattcaagcacatcacatatggagacgcccgatagtgaaccacggaagatctcgagagattcaaatggtcataacttttcactcagatg

SEQ ID NO: 3148 - DNA, 442 bp, Glycine max
  unsure (1)..(442): unsure at all n locations
tctntcttgacagntgatgctagatccncatctgtaaagcctgtaacatctcccaacgtagcaacacattcaaaatctgaaactgatatttgtgtttttccttgtgaagcatagtacaactttttcaatattaggcttccatattccaagtttaaatgtgcattgacaatctataacaatcactcagtgctctgataattttctttactaattgaaaatggcaattcttcttttctaatttgttggctatatatcttttctttcgctttttaatttggcagctggcattcccaaaaggccttacttctgctcctggaagaccaagggtggctccaagcagtccagtcatatttgacgttagtttggaatatataccggcgcttgaagcggatgaggagtaaaataaggctgtcctttgtacgtgatcagtcttgattttatg

SEQ ID NO: 3149 - DNA, 405 bp, Glycine max
  unsure (1)..(405): unsure at all n locations
ngcacactanaccttctttaggagttgtaaaaccaggtggcactatcatgtagacatcttcaagtagatcaccatgcagaaatgcgttatttacatcgagttgatgtaaaaaccaatttttagctgttgctaacgcaagaactagtcgaaccgttgtaagtttaacaactggagaaaaggtctcagtgtaatcaacaccctcaagttgcgtatatcccttggcaaccaaacgagccttatacctctctatacttccatctgctttcctcttgatcttataaacccatttagaaccaatatgctgtttaccaaaaggcaaggcagtaagagtccagtttttgttactctccaaggctgcaatatcttttttcatagcatgtctccaacaagcatgtttcacagctt

SEQ ID NO: 3150 - DNA, 434 bp, Glycine max
  unsure (1)..(434): unsure at all n locations
agaagaaatcacatgtntgtcatcatcaaaaagggggagaatgtgaatgtatgtatacatgattttgatgatgtcaaaagaagaatcaatcaaggctcatcttgcttcaagattaatacaagattgtttcaacaaaaaaagccttgattcaagatttcttcaagatcaagccttgcctcacaatgaaaggtttcaagtcattcaaggcacatgtaatcgattaccaatacatgtaatcgattaccaatggtttgaaagtgtgtaatcgattacacatcatatgtaatcaattaccagagactctgaacattgcgaattcaaattntaaatgaagggtcacaactgttcaagacaaacaattgtgtaatcgattacactaattctgtaatcgattaccagagaagatttcaaggaatatcgccacagtcacatct

SEQ ID NO: 3151 - DNA, 480 bp, Glycine max
  unsure (1)..(480): unsure at all n locations
atgcactattcaatggagttgacaagaacatcttcagactgatcaacacttgcacagtggccanagatgcatgggagatcctgaatatcactcatgaaggaacctccaaagtgaagatttccagattgcaactcttggctacaaaattcgaaaatctgaagatgaaggaggaagagtgtattcatgacttccacatgaacattcttgaaatggccaatgcttgcactgccttgngagagaggataacagatgaaaagctggtgagaaagatcctcagatccttgcctaagagatttgacatgaaagtcactgcaatagaggaggcccaagacatttgcaacatgagagtagatgaactcattggttctcttcaaacctttgagctacgactctcggatagggctgaaaagaagagcaagaatctggctttcgtgtccaatgatgaacgagaagaagatgagtatgacctgaatactgatg

SEQ ID NO: 3152 - DNA, 426 bp, Glycine max
  unsure (1)..(426): unsure at all n locations
agctngaagctnggcctgaatagaatgagcacatgcagcacttgngcaagcaagcaaaatgtcatctgcatagaccaacagaacaaccagggaagcacctttgccaatggtcaaaagagaatagtcattctttgattgagagaaaccattagcaattaatgttgttgagagtttacaaaaccactgtctagaagcttgtctaaggccataaatggatttgttgagcctgcaaacaagattttttatcaactgaagtgtacccttttggaagttccatataaacttcctcaaatatatcaccattcaagaagacattatccacatcaagttgtaagattggccattttttagcagctgcaacagccaaaaggactttaactgatgtaagtttagcaactggagagaaagtatcagaanaatcaatac

SEQ ID NO: 3153 - DNA, 462 bp, Glycine max
  unsure (1)..(462): unsure at all n locations
agcttaatcatgtttntagattaaaaaaggctttatatggcttanagcaagcccctagggcttagtatgagcgtctgagtaagttccttttagaaaaggatttctctagaggcaaagtagatactactcttttcataaagagaaaattacatgatattttattagttcaaatttatgttgatgatattatttttggatctactaatgaattattatgcaaggaattctctcatgactgcaaagtgagtttgaaatgtcaatgatgggagaacttaatttctttcttggattacaaattaaacaaaccaagattcgaatttttgtcaatcaatccaagtactgcaaagagttaattcatagatttgggatggaaaatgctaagcacatggctacaccaataagcactgcttgctatntagataaagatgaaaccggtcagtcaatagatgttaagcaatatcg

SEQ ID NO: 3154 - DNA, 414 bp, Glycine max
  unsure (1)..(414): unsure at all n locations
tgtttggaactacaattggttcctatggacttntaaattacaaagataggttgaaataattttaatgaaaatgtgaaaggaccatataattttttcgttgttatatatttttgctttaaaatatgtgaaggaagaaacttgggctgaaaattcaagtccagatcttgctgtggtaaaatatatgataataatcacgtgaccataagaaagtatatgataataattaatcaagtcttgaaaatcagttttctcaattaagcatattactaatatgcacctttcattgatggatgataaaattatggttaaataaagtttaattgttaatntaaagttagattattggttggcaattcttaaaatgagactttgtggtaaagaaagtcttgagttgttcaagtgataaaaaagctt

SEQ ID NO: 3155 - DNA, 448 bp, Glycine max
  unsure (1)..(448): unsure at all n locations
ctcagcttgaggtattaaactcctatgctacttataataattataacaacgggtttataatgcttaactatttaaccaatctaacatttaataattgaatttcataaaagaaaaaataggttatacaaacagttttatatcatcatctaatcacaatccaacatatatgttatatttgctgattttatgataattattttaaaagttatatcaacagtgatttataattagatagcagtgttaaattattccgtactattagtgtataatcatcactactacaaaaattatattttaagatgcgaaatcgatgacgcttcttaagaaccgtcttaaaattgaacagaatggcaattttgtaaataaaanaagatatacaaagatgatttataaaaaatcgtttaaaaaatgaatgttaaagccgatcattaaaaccgtcttaaataca

SEQ ID NO: 3156 - DNA, 411 bp, Glycine max
  unsure (1)..(411): unsure at all n locations
agcttatgctgcatatatttacaatagacctcctcaacctcagcaacaaaatcaaccacagcagagcaattatgacctttccagcaacagatacaaccctggatggaggaatcaccctaacctcagatggtccagccctcagcaacaacaacagcagcctactccttccttccaaaatgctgctggcccaagcagaccatacattcctccaccaatccaacaacagcaacaaccccagaaacaaccaacagttgaggcccctccacaacctttcctcgaagaacttgtgaggcaaatgactatgcagaacatgcagtttcagcaagagaccagagcctccatttagagcttaaccaatcagatgggacanatagctacccaattgaatcaacaacagtcccagaattctga

SEQ ID NO: 3157 - DNA, 427 bp, Glycine max
  unsure (1)..(427): unsure at all n locations
agcttgcaaacgcaatcaagcatggcattgtatgaccccacactaagctcaaacccaccacgatacatctcaccggcgagcctttgagcttcatcgagcttcccatcaacgcaccaccctttgatcaacatatcacacgtggcttcgtcggggaaaaacaccttcgccaaatccttaaccattttttccgcgtaactagcgaaacccttcgaacacagcttctccacgaccacttttaaggaagcacgatcgcgcttcagcccgtagtctctctccattcgctcgaagaactgaaccgcctggctggggcggcccgcgcggacgaagcggtcgatcgcggaggctanggttttggggccggcggcggnggaagcggcggagaggacgtcatgcgtggccttgaagtccttacggcggccaaagtagt

SEQ ID NO: 3158 - DNA, 423 bp, Glycine max
agcttatgaaacctacagaaaacatgatataatatgtcaaaataagacaattgtatgattgtcgaaaaggaaattaaaaaaaaaaaaaaaaaaactaaccatgttggatggcatgtgcttaaatctgtgataactgtagtaaaaacaatcttctttaaaagaccctttgaccttaaaattcgaagtggaacgtgctgcatcagtggatgcacactgattattatatctggctgatatttcattaggcctttggcaacctcgctgtaaaaagagaaaagatattttaactatgacatgtgatgttacattgtatttgagaagagatacgcatgcacaagaaagtattttctgaaccatggaatgcagaaaaagtcaataaattgtgtctaatattaacacaatgcacaacaaacattgctagct

SEQ ID NO: 3159 - DNA, 448 bp, Glycine max
  unsure (1)..(448): unsure at all n locations
agctntaacttaagtgttagatcaagtggcctcaaaataattaagaagggggggttgaattaattattaatgaaccttgactaattaaaatttacccttcttaggcttttactatgttgttaagaaagtaaagaacagaaatataaacttaaccaaaagtaaaaacggtaattaaagtgcacagcggaaattaaaagagtagggaagaagaagacaaacacacaagagttttatactgattcgacaacaacctgtgcctacaagcaacctgcggtccttgagatttcttttcaaccttgtaaaatcctttacaagcaaagatccacaagggatgtaccctcccgtgttctctttgaacaacctagtggatgtaccttccactaganatgatccacaagagatgtaccctctcttggtctcagtcacaacaacccaagaagatgtaccc

SEQ ID NO: 3160 - DNA, 379 bp, Glycine max
  unsure (1)..(379): unsure at all n locations
tatacgggctaggatgtggntntgtgattaaattcaattaagactcaagtcttgcacttgccacattggtacaactccctccatcaatgatcaccatgcaaactttgccattgatcaaacatctagtgtggaaaatgttttctctttgactttcctccatagacttcaattattggccaagtaaccgcctaatcatcaacaattctccctccagtgttttctccacttcctcctcatcatcctcactctcttctcccttttcaacttcggactcactaatgtactctccatctctaagaatcatggctttcttgttagggaactcatatgcataatgttccaagccttggcaccgaanacacttcacatcctggctctt

SEQ ID NO: 3161 - DNA, 407 bp, Glycine max
  unsure (1)..(407): unsure at all n locations
ntgagcanattcaaacgacaataactntntactcggatgtctgattgagtcccgtaatatatcgagacgcacgaaattgattacagaagctcttagcaaattcaaaagacaataactttttactcagatgtctgatagagtcccgtaatatgtcgagaccctcgaaattgaatgttgaagctctgagcaaattcaaacgacaataactttttactcggatgtctgattgagtcccgtaatatatcgagacgctcacaattgaatgttgaagctctgagcaaattcaaacgacaataactttttactcggatgtctgattgattcccgtaatatgtcgagacccttcgaaatgaatgctgaaggtctgagaacatcaaacgacaataactttatctcgatgtccgatg

SEQ ID NO: 3162 - DNA, 436 bp, Glycine max
agcttcaacattcaatttcgagggtctcgatatattacgggactcaatcggacattcgagagaaaagttattgtcgtttgaatttgctcagagcatcaacattcaatttcgagcgtgtcgatatattacgggactcagtcagacatccgatttaaaatttattgttgtttgaattttctccgaccatcaacattcaatttcgagcgtctcgatatattacgggactcaatcagacatccgagtaaaaagttattgtcttttgaatttgctcagagcttcagcattcaattttgagcgtctcgatatattacgggactcaatcagacatccgagtaaaaagctattgtcgtttgaatttgctcagagcttccgtattcaatttcgagcgtctcgatatattacaagactcagtcagacatccgagtcaaaagttatt

SEQ ID NO: 3163 - DNA, 440 bp, Glycine max
  unsure (1)..(440): unsure at all n locations
agcttcaacggagtgttcgggtttatgtgngaatattcattcactgcatatcgtagctttccattaattatggctatagaatttgccaacacatgtgttctttgaacagggatggtttcatagtggaatgagccctgaggattcggtcgagctgcatttgctgtcaaattcagtcttcagaacaacacaatagaacacagtcagagccaatgatcacaagatccccaattatttttttttttgtttataggtaagaatcaaaaaattcataaaactgatacacattactgaattaactaagaaaatatgttctatttaccttctaatataaatgtttaaacattataaacttaacaatgtcatatttccatttcatttttatttttatattaaatatataaataaagtaacaaacgtatatcnttttactattctatata

SEQ ID NO: 3164 - DNA, 453 bp, Glycine max
  unsure (1)..(453): unsure at all n locations
agctngaaggtaaactacatgccttggttaacctggtaacccaactgtgttggatcaattggtctcagaataattaagaagggggggttgaattaattattactagacctttactaattaaaaattaccattcttaggattntactatgttgttgagaaaataaggaatagaaaagaaacttaaccaaaagtaaaagcaggaattaaagtgcacagtggaaattaaaatagtagggaagaaggagacaaacacacaagagttttatactggttcgacaacaacccgtgcctacatctagtccccaagcgacctgcggtccttgagatttcttttcaaccttgtaaaaatccttttacaagcaaagatccacaagggatgtaccctcccttgttctctttgaacaacctagtggatgtacccttcactagaactgatccacaagagatgtaccc

SEQ ID NO: 3165 - DNA, 214 bp, Glycine max
caatttcgatcgtctcgatatattacgggtctcaatcagacatctgaggaaaaaagttattgtcgtttgaatttgctgagagcttcaacattcaattttgagcgtctcgatgtatttcgggacttaatcagacatccgagttaaaaagtattggttgttgaatttgctgagagcttcaacattcaatttcgagcgtctcgatattttacgggac

SEQ ID NO: 3166 - DNA, 344 bp, Glycine max
  unsure (1)..(344): unsure at all n locations
agctntgagctaattcaaacgacaataatgttttgctcggatgtctgattgagtcccgtaatacatcgagacgctcgaaattgaatgttgaagctctcagcaaattcaaacgtcaataactttttactcggatgtctgattgagtcccgtaatacatcgagacgctcgaaattgaattctgaatctctgagctaattcaaacgacaataactttttactccgatgtctgattgagtcccgtaatatatcgagacgatcgaaattgaattctgaagctctgagctaattcaaacgacaataactttttgctcggatgtctgattgagtcccgttatatattgaga

SEQ ID NO: 3167 - DNA, 409 bp, Glycine max
  unsure (1)..(409): unsure at all n locations
ngaaggcaaactggatgcattggttaactgggtaacccagctggccttgaatcagaaatctgtacctgttgaagggtttgtggtttgtgctcctctgctgaccaccatacaaaccttttcccttccatgcagcaacctggagcaattgagcagcctgaagcttatgctgcaaatatttacaatagacctcctcaacctcagcagcaaaatcaaccacagcagaacaattatgacctttccagcaacagatacaaccttggatggaggaatcaccctaacctcagatggtccagccctcagcaacaacaacagcagcctgctccttccttccaaaatgctgctggcccaagcagaccatacattcctccaccaatccaacaacaacaacaaccccagaaacaaccaatag

SEQ ID NO: 3168 - DNA, 387 bp, Glycine max
  unsure (1)..(387): unsure at all n locations
gatgcatcctaaacctttccaccactttcttgaggtaattgctttgggataggaatagttcaccctttgctctatccctatgaatatcaatcccgagtatccttctagctgaccctagatctttcatctcaaattttgtgttcaagctttctttgagtttcctaatctcttccttattagcactcgctatgaggatgtcatccatatacaagataaggtagataacacacactctcccctttttcaggatatatacacangtgtcatatctggttctaatgaagccatatctgattaagaactcatcanatntcaagtaccatattcgagggctgtgcttcagtctatacaagaaatntttcagcaagcacaccttggtctcccctt

SEQ ID NO: 3169 - DNA, 457 bp, Glycine max
  unsure (1)..(457): unsure at all n locations
agctnggtcatgctaccttgaggttaatatcaaagcttcaaaagtatagcctcataagaggatttccaaagttgtcatatcaaaatgattccctttgtgaagcttgccataaaaaggaaacaagtaaaatgttcgtttaaatccaaacatattgtttccacttttaggcctttagagctcctacacattgacctatttagaccaatcaagactgcatccctctttggatgcatatatggtctggtcatagtgaaagattaccccagataggcatgggtcaggtttctaacccacaaggatgagtctattgataccttttataaattcagaaaaaagaatcagaatgaaaaaggtatttatatctcttcaatcagaagtgatcacggnggagagtttgaaaaaaattatgaagagaatgatattcacccctatttttccactccaagaacaccacaac

SEQ ID NO: 3170 - DNA, 425 bp, Glycine max
  unsure (1)..(425): unsure at all n locations
agctngccgccacggagttntccgactatgctcttgtgtggnggaacaagctacaaaaggagagagcaagaaatgaagagccaatggttgatacatggactgagatgaaaaagatcatgaggaagcggtatgtgccggctagttactcaagggacttgaaattcaagctccaaaaactaacccaaggcaacaagggggttgaggagtatttcaaggaaatggatgtgctcatgattcaagcaaatattgaagaagatgaggaggtaactatggctcgatttcttaatggtttgactaatgatatccgtgatattgttgagctgcaggagtttgttgaaatggatgatttgcttcacaaagcaatccaagtggagcaacaattaanaaggaagggagtggctaagaggagttctaccaactttgat

SEQ ID NO: 3171 - DNA, 340 bp, Glycine max
  unsure (1)..(340): unsure at all n locations
agcttggatattcttttagcatggaatctattcttcctaagatggagccaaacccagncaccctcattaagaactagctctgttctttctctattgcctttagttgaatacactttcgtttgggtctctatttggttcttaaccctctcatgcaacttctttacaaactctgacctatattccccttctttatgtataaaacaagcttcaagtgggaggggaatgaggtctaactgtattaggggattgaacccatatacaacctcagaaggggactgcttggtggttctactaacccccctgagtcggcaaattctacatgatgaagatactcattcca

SEQ ID NO: 3172 - DNA, 455 bp, Glycine max
  unsure (1)..(455): unsure at all n locations
tatgatattataaggaattgtgttgctaaagtatcatgttttcaaagctgccatgttaagtttgggagtaaacaagccaatcaagttgtccacaccttagatacgacatctagatcctttgcttgtccgcattattttgatcatagcccaatatgtattgactcttttattattggtgatttaatataattatattgctttcaaaaaaagtttaaaacgttaattaatatgatataagtttatcacctttaagataacttagttaaaaagcctattttgtaacaagctctaagtaaaacataaatttatcattcaataggcttatatgtttgactcttattgtagtcaacatttgaaatatntttaacaggtaaaaaaatgtatacttctgatacattcatataatctaatatgatgatgatgatgatgatgataaanatatatgataatcatta

SEQ ID NO: 3173 - DNA, 437 bp, Glycine max
  unsure (1)..(437): unsure at all n locations
agctnttcctcttttcttctcgagcaatagcctctgtttttctttatctcgatagctactgcacctaatgtgcagatctgtgcatggtgattttctagttcaagcttgatttgtgacatggtatcagagctcttcaaagagctctgctgcgcaatcaagagaagtttccgaagcaatttatgatttcttcacctctgttttgagtttcatctggctttgatcttcgattgtggcaatgagtgaaagagatacacatatcccagccatagacagcttcctttacttgcatccaagcgagaatcccgcggtttcgcttgtatctccagttcttgattccacaaattatcactcatggagcagatcaatgatgattgctctgagtgccananataaacttgagtttgttgatggaggagcagctgagccattgaaattga

SEQ ID NO: 3174 - DNA, 359 bp, Glycine max
  unsure (1)..(359): unsure at all n locations
gagaagatgagtggagggagagggagagaagngcacggaattntgtgcctcanaaaaggtctgcactttgaagtataattctcaaatgatcaaagttgaaaaaatgcacacacatgacctctatttatagcctaagtgtcacacaaaattggagggaaatttgaatttttattcaaatttcagttgaatttgaaattgaatttgtggagccaaaattttactaattatgattagtgaattttagctatggttcagcccactaattcaaaatcaagtccaagattctccactaagtgtgcttaggtgtcatgaggcatgtaaagcatgaagtacatacacaaagtatgactatatgatgt

SEQ ID NO: 3175 - DNA, 430 bp, Glycine max
agcttctagagtagtataatgaagtcggctatgatgaggagttaatatctgacctccaatactaaatgccgattcaaaagctacagtggagatcggaatagctaacacatcccttgcaattgcttgtagtgttggatacattagctcgttcaatttccaccacattaagatatcaaaatctgaatttcttggtaaaacttcatcctctaagtaatgatccaacttcgttttcatagttgaggttcttgccctttctttctttcaatgtatctatcataatcacacaatttactctttccatcactaaccacatctagtgattcaaaagaactagtagaatctggatgctttttggcttgatattccgaaataaaatcataacacaagtttcggatcctattaacttgtgaaaaataatccatgggataaa

SEQ ID NO: 3176 - DNA, 282 bp, Glycine max
  unsure (1)..(282): unsure at all n locations
cgagatgatgcgctccatgtatgttggatcaaatggagaatagagatcataatgaagaataaaggaggagaagagggaatgatggtgttcctatacaaaaccgaattgatggtattaaactcaacattgctccatttaaaggaaagaatgatcccgaggcctacttggagtgggagatgaaaatagagcatgttttctcatgcaacaactatgangaggaccaaaaggtgaagcttgccaccacggagttttccgactatggtcttgtgtggtggaacaagc

SEQ ID NO: 3177 - DNA, 459 bp, Glycine max
  unsure (1)..(459): unsure at all n locations
agctntgagcaaattctaacgacaataactntttatcttggatgttcgataaagtcacgtaatatatcgagtcgctcgaaatagaatacagaagctgtgagaaaattctaacgtcaataactttttactcggatgtccgattgagtcacgtaatatatcgagacgcccgaaattcaatacagaaactctgagcaaattctaacgacaataattttttacttggatgtccaattgagtcgcgtaatatttcgagacactcgaaattgagtacagaagctctgaggaaattcaaatataaataccttttgactcggatattcgattgagtcccgtaatgtatcgagacattcgaaattgaatacagaagctgtgagcaaattctaatgtcaataactttctactcggatgtccgactggagtactttatatatcgagacgctcgaaattcaatacagaagc

SEQ ID NO: 3178 - DNA, 377 bp, Glycine max
acacttcaaactaagcttgcaattgccaacggaagctctcgaaagattcaaatggtcataactcttatctcggaggtctgattgaggcgcattatatatcgagacgctcgaaaatgaacaatgggagctctcgagcaagtacaatggtcataacttttcactctgaggtacaatataggcgcataatatatcgagacgctctcaattgaacaatggaagctcttgagcaattcaaatggtcataacttttcactcggatgtccgattcaggcgcataatatatcgagacgctcgaaattgaacaacggaagctctcgagaaattcaaatggtcataacttttcactccgaggtccgattgaggcgcataatatatcg

SEQ ID NO: 3179 - DNA, 418 bp, Glycine max
  unsure (1)..(418): unsure at all n locations
tctagagattaagactatgctttcgagttcctctatgggatntttatatgggtcgggtttctacagttgattctgcccggcgaacagtggtggaatttctccgccgccactgttttgttagatctgagatttgggaatttttggatttttttaatgataataaatataatgacggtaaagaatcgtctttactcgttattaaaagaagcttcttcacaccaacgaaaccatggcttccgtgtacagctgtacggactgcggctccaacctgaatttgaactccgtttatgcgtaccctccggacttctacatcgaagccggcaacaagggctccgtctncttctccgccgtcgacgccaccaagttcaaattcgacaaggaggacaagaatcgtcccttcttcgaaaccgtcaactac

SEQ ID NO: 3180 - DNA, 435 bp, Glycine max
  unsure (1)..(435): unsure at all n locations
agcttcacacttgcaagaaggtttgccatgccttatatatgagcataatngggcttcacaccaaacacatcagtcatctgtttgaagtaagacctcccctcatccaacatctctgcccgagcacacgcacagagaacaccaatgaaggttacttcattagggagcaatctcagagtctcgtcactctcaactccatgtttcatcttccccatactgatcattacttcaaacaggtcgagtccatcttcaggactcccacgaatgcagtgccccaagatcatcatattccacgataccaaattcctttctctcatcctctcaaacactatctgcgcaacctccaccttcctacacttacagtacatgccaatcaatgccgtatcaagaatcaaacttgacctcaatgacatcctaacaatgctcccatgaaactga

SEQ ID NO: 3181 - DNA, 420 bp, Glycine max
  unsure (1)..(420): unsure at all n locations
tatctgactcanacgaggctggatagacttctcgtatctgactctctagttcccatgtggcgtcttctcctaatgcacctccctagatcaacttgactaatggattctccttctctcttaagtgctttgttcgcatatcctcgatcctcaaaggcaatgtttgatatgtcaagttctccttcacttgtatgtcatccaatttgatcacatgagatggatcatggatatacttacgagttaagacacaagaaagacattgtgaagattagaaagagacggnggtaatgcaatttggtatgccatgggactgactctttntgagaatttggaaaggaccaagaaaatgaggtgtgagtttttgggatttcaatgctcgaccaacccaagtncacggagtgactctagagaatacatgatcac

SEQ ID NO: 3182 - DNA, 377 bp, Glycine max
  unsure (1)..(377): unsure at all n locations
atggctcctattttcactctcattgatggacagacactaccatagtggaatgtcagttgaagaagcaattgatctcgttgataagtgcattatggaaatcagatccaggcttgttgttgcgccgcccaactttgttattaaaatcgtggacaaggatggtgcaagagagtacgcatggcgtgagtcagtcaaggatactcctgttccttcagcttgagtaactctttccctaattntcgttggacttctttctttctatttgcccatgcttttgtcttgctatagttntttttactggtcttggaatgtctctgaaaattatggtctatagatgctctaaagtaagacagtttatcattngaatttaatatgcatga

SEQ ID NO: 3183 - DNA, 427 bp, Glycine max
  unsure (1)..(427): unsure at all n locations
ggagaatgtgaatatatgtatacatgatcttgatgatgtcttaagaagaatcaaaccacgcttattttgcttcaagaataatacaagattggttcaacaaacaaagccttgattcaagatttcttcaagatcaagccttgcctcacaatgaaagggttcaagtcattcaaggcacatgtaatcgattaccaatgggttgaaagtgtgtaatcgattacacatcatatgtaatcgattaccagagactctgaacgttgggaattcaaattttaaatgaagggtcacaactgttcaagaaaaacaactgtgtaatcgatacactaattctgtaattgattaccagagangaatttcagggatatcgccaacagtcacatcttatcatttgaattntgaatggccatcnaggcctatatatatgtgtgac

SEQ ID NO: 3184 - DNA, 416 bp, Glycine max
  unsure (1)..(416): unsure at all n locations
agcttctgttttcaattacgagcgtctcgatatattatgggactgaatcgcacatccgagtcaaaagttaatttcgtttgaatttgcttagagcatctgttttcaattacgagcgtctcgatatattatgggactgaatcgcacatccgagtcaaaagttaatttcgtttgaatttgctcagagcttctgttttcaatttcgagcgtctcgatatactactagacacaatcggacatccgagtcaaaagttattgtcgtttgaatatgctcagagcatctgttttcaattacgagcgtctcgatatattacgggactcaatcggacatccgagtaaaacgttattgtcgntggaatttgctcagagcttctgttttcaattacgagcgttttgatatattacgggactcaatcgga

SEQ ID NO: 3185 - DNA, 432 bp, Glycine max
  unsure (1)..(432): unsure at all n locations
tctatagaaggttcgttcctaatttctctacaattgcatcacctctcaatgagctggtgaagaagaatgtggcatttacctgnggtgaaaaacaagagcaagcctttgctttgctcaaagaaaagcttactaaggcacctattctagctcttcctgacttttctaaaacttttgagctagaatgtgatgcctctagagtgggagttggagttgtattgttacaaggtgggcaccctattgcttattttagtgaaaaacttcatagtgccacccttaacaggggggttcatagaactaccaagaagtccccttctgaggttgtctatgggttcaatcccttaacaccgttagacctcattcccctcccactagacacttcttttatacataaagaaggggaatctanggtcaaagttgtaaagaagttgcatg

SEQ ID NO: 3186 - DNA, 445 bp, Glycine max
  unsure (1)..(445): unsure at all n locations
ntacagcagatgccactctactccaagttcttaaaggatatgttaacaaggaaacacaagtatattcaccaggaaaacattgttgtggaaggaaatggtagtgttgtgattcaaaagatccttccacccaagcataaagaccctgngagtgtaaccattccttgttcaattggagaagtcactgtgggaaaagctcttattgacctgngagccagtattaacttaatgccactctccatgtgcagaaggtttggagagttggagatcatgcccactacgatgactttacaacttgttgaccgctccattacaagaccatatggagtaattgaagatgtgctggtcagagtaaaacattntatcttctcggcaaactttgtggtaatggatatctgtgaagatactgacanttctgtaatattgggaaggccattttcatgtaact

SEQ ID NO: 3187 - DNA, 440 bp, Glycine max
agcttcttagtttcagatgatgcatctgagtttgtagctacctcatgcactcctctaatgactatcgcataatttctggcgctaaactgctgggagttggaagccatcttctcaattaaatttttggcttcagcaggagtcatgtctccaagggctccaccactggcagcatctatcatacttttctccatattactgagtctttcataaaaatattggagaagcagctgctttgaaatctgatggtgagggcaactagcacatagttttttaaatctctcccagtattcatacaggctctctccactgagttgtctaatacctgagatatccttcctgatggttgtggtcctggaagcagggaaatgtttttctaagaatactctcttaaggtcatcccagctcgtgacagaccttggagcaaggtaatacagccagtc

SEQ ID NO: 3188 - DNA, 439 bp, Glycine max
tccttgagaaaattcctaaagaagctagagcttagctacacacacctctctaatagctaagctcacctccttgagatgagaagctagagcttagctacacaccccctataatagctaagctcacccccatgacaaaatacatgaaaatacaaaaaagtccctactacaaagactactcaaaatgcctcgaaatacaaggctaaaaccctatactactagaatggccgaaatacaaggcctaaacaaaggtaaaatctattctaatatttacaaagataagcaggctcatacttagcccatgggctcgaaatctaccttaaggctcatgagaaccctagggccttcccttggatctctggcccaatctacttggagtcttctatccaatgcccttgcgggatatgaatggatcattcctcccttcttctcattctctcta

SEQ ID NO: 3189 - DNA, 453 bp, Glycine max
  unsure (1)..(453): unsure at all n locations
agcttggatttctttgctccgganacctctcctttctcatgtgaacacaaacccaatcttcggattggaaaacaacctttttgctccccttgtttgcttatctagcatagctctcattcctcttttcaatttacgccttgactatttcatggagctttttcacatagtccgctttggattgtccttccttatgcttaaaaactgaaatattagacattagtaacaaatcaagagcagttagtggattgaaaccataaacaacctcaaaaggagaacaactagtggtgctatgcacaaccctattataagagcaaactttccaattcttaagattctatttcaaaacgatccttagcaaggtacccacaagtctattcacgacctttgtttgtccatccatttgagggtgacaagtagtagaaaatagtaacttagtacccaacttttcccata

SEQ ID NO: 3190 - DNA, 151 bp, Glycine max
  unsure (1)..(151): unsure at all n locations
agcttataatatatcgatacgctcganataaatatctgaaactctcgggaaatttaaatagtcataactattcacacggatgtccgattccgcgcgcataatatgtcgagaggctcgaaatcgaacaacccaagctcttgagaaattcaac

SEQ ID NO: 3191 - DNA, 421 bp, Glycine max
  unsure (1)..(421): unsure at all n locations
agcttgttatatggacttggggaaggttactctacctgccattgacaacatataagcctaccacgagctcaacttactattgactgtatcgaggataaaatcaaatgtatgattagtaaatttcttgtcaagaattgaaatccgggtacttatctaagtcctcgatttacttaaatccacttggcaccactatatcctacttgacttgccagctaacattattatagaaaaagatgcgggattattcatcactctctttagcttcagaactatcacaaaacaatctaagggtcaacttgatggcatctatctaatccgtcgaggcttcaacanatagcagaatatcattcgcaaagacaaggtatgaaattacgagcccccttttgtttaactggatgggtttccaagctttttggttgat

SEQ ID NO: 3192 - DNA, 417 bp, Glycine max
  unsure (1)..(417): unsure at all n locations
tggctgcctgtctctcggtataatggtcacgctgaataatcctatcgaaaagctctccacctgcacataattccatcacaacatgaacagccacggcatcctcatatgcacctttgatggatataacattangatgcccggccaagtggtgcattatctgaatttctcttctcacatcctcgacatcatcatcggtgacgagcttcctctttgcaatagatttgcaggcgcactccagccctgttgccttttccacgcacaagaacgttgtcccgaactgaccctgtccaagttttctcccaagagtgaagaactccttgaaattatcggtctctctttgcaacacagaatcaacacgaagccctgcgctagaaactctcttcactgaaccacgtttcttctgtttcttcttatcct

SEQ ID NO: 3193 - DNA, 401 bp, Glycine max
  unsure (1)..(401): unsure at all n locations
agctntanacaatgagcagataactaattggagaagtatttgggctcatgcttgctacatgctatgtttctagaggaatcagcaagtccgtcaacctatgtttatcagacttcaaagccttgggagaccattntgtacctctccaaccaatataatcaagtgtaagcttcaagtattgttggttgagttataaaagggaagaagaaattatgattagatggaagtctcctgaagctgggtggtttaaacttaattctgatggttcagtgcatggcaacaatgggcctgcaagttgtggagtcattacagatgatagggggagatggtgttgacgctttgctaaaaagctagggaggtgttctgtcttcattgcggaattgtggggggttatcaatgagcca

SEQ ID NO: 3194 - DNA, 340 bp, Glycine max
agctatgaaaagcattgggcgcctcctaatttatttgtaattcatctatggtgggtatggggaatctatccttgacagtgatcgtgttcagagcgcggtaatccacgcagaactgccatgtgccatcgaatttacggacgagcaacaccggcgacgagaatgggctcgtgctgggtttgatgagccctttctgcaacatggagtccacctgagcttctatctcttgcttctgatagtgggggtagcgatatgggtagacgttcaccggcaatgagtggggaaaaagatgaatatggtggttcctccctcttgccggaggctaggtttgacgctgatggaa

SEQ ID NO: 3195 - DNA, 372 bp, Glycine max
  unsure (1)..(372): unsure at all n locations
tgcttctcctgaatatcannattcatttgggaaaaatatatggtcaaattaggattagttagtagggcactaactgaaattaaatngaatttgaatttaggaatgtaagcaacattatgcaagactaaggtgttggttaaacaaactgaaccaatggcaagaatgggtataatgtcactattaggtagagttacagttttatcataaacaagctaataagatctaaaatgatgaagagagcaagtaatatgaatgcttgcaccagaatctaaaagccaacaatcatgaagaaaattggaagtggaagtagaaagaatcataccacttatggaagaaacatcatgaagaatgacaacattggtagcatgactt

SEQ ID NO: 3196 - DNA, 387 bp, Glycine max
  unsure (1)..(387): unsure at all n locations
ngcctgtccgatgcagcagtaatgatggcccgagttatgttgttgaacggntactaaccccgaatgggtttaggcaaagacaacggcggcattgttagacaagtggcctcagatatcttaagaaaggggggttgaattaagatattccanactgtttcccctaattaaaaatctatttcactttttactcaagttatgaattcccttaatgacaatcttcttaaatattaattcanatgaagcaactngaatatgaatataaagcaataataaataaaggagattaagggaagagaaaatgcaaactcagttttatactggttcggccacacccttgtgcctacgtncagtccccaagcaacccgcttgagagttccactatcttgt

SEQ ID NO: 3197 - DNA, 203 bp, Glycine max
  unsure (1)..(203): unsure at all n locations
agcttatgacaatntgaaattcgcgagagctttcgaagattaatttctagcgtctcgatatattataagcatgaatcggacctacgtgtgaaaatctatgaccatttgaattatttgagagcttccgttgttcaatttcgagcgtctcgacatattatgcgcctgaatttgacttgcctgtgaagggtatgaccctttgaatt

SEQ ID NO: 3198 - DNA, 314 bp, Glycine max
  unsure (1)..(314): unsure at all n locations
tctacatagaantcgagctnttcgatatattacgtgactctttctgacatccgagtaaaaagttattgtagtttgaatatgctcagggcttcagtattccatttcgagcgtctcgatatattactggactcaatcagacattcgagtaaaaagttattgtctgttgaatatgctcagagcctcggcattccatttcgagcatttcgagatattacaggactcaatcagacatccgagtaaaaagtgattgtagtttgaaactgctcagagcttctgtataaattagcagcgtcatgaattttactggactcaat

SEQ ID NO: 3199 - DNA, 429 bp, Glycine max
  unsure (1)..(429): unsure at all n locations
agctttgagattattcaaacgacaataactntttactcggatgtctgattgagtcccgaaatatatcgagacgctcgaaattgaataccgaagcgctgagcaaattcaaacgacaaaaactttttactcggatgtctgattgagtcccgtaatatatcgaaaagctcgaaagtgaatgtcgaagctctgagcaaattcaaacgacaatcaacttttactccgatgtctgattgagtcccgtaatatatcgagacgctcganatggaataccgaagctctgagcaaattcaaacgacaataactctttactcggatgtccgattgagtcccgtaatatatcgaaacgctcgaaatggaatgttgaagctctgagccaatccaaacgacaataactttttactcngatgtcttgatgagtcccgtaatata

SEQ ID NO: 3200 - DNA, 414 bp, Glycine max
  unsure (1)..(414): unsure at all n locations
tggctgcctgtctctcggtataatggccacgctgaataatcctatcgaaaagctctccacctgcacataattccatcacaacatgaacagccacggcatcctcatatgcacctttgatggatataacattaggatgcncggccaagtggtgcattatctgaatttctcttctcacatcctcgacatcatcatcggtgacgagcttcctctttgcaatagatttgcaggcgcactccagccctgttgccttttccacgcacaagaacgttgtcccgaactgaccctgtccaagttttctcccaagagtgaagaactccttgaaattatcggtctctctttgcaacacagaatcaacacgaagccctgcgctagaaactctcttcactgaaccacgtntcttctggttcttcttat

SEQ ID NO: 3201 - DNA, 165 bp, Glycine max
agcttataatatatcgatacgctcgaaattaattatcggaaactctggcgaaattcaaatgggcataacttttcacccggatgtacgattctggcgcataatatgtcaagagtgtcgaaattgaacaacggaagctcttgagaaattcaaatggtcattactttt

SEQ ID NO: 3202 - DNA, 355 bp, Glycine max
agcttataatatattgatacgctcgaaattaattctcggaagctctccagaaattcaaatggtcattactattcacacggatgttcgattatggcgaatcacatatcgagacgctcaaaattgaacagcggaagctctcgagaaattcaaatggtcataacttttaacactgagttccgattcaggattataatatatacagacgctcgaaattaaacattggaaggtctcgagacattcaattggttatcacttttcacacggatgtccgattccggcgcataatatgtcgacacgctcgaaattgaacaacggaagctctcgagatattcaaatggtcataaccttttacacg

SEQ ID NO: 3203 - DNA, 297 bp, Glycine max
  unsure (1)..(297): unsure at all n locations
catgctttcccgaatgattgcatactgtacaggcatgaatttgaagaaatgtccaaatgccctgggtgtggggcatcaaggtacaatggtgaagatgatgangactgcagttctgatgaaaactcaaagaagggccctccagcgaaggagttgtggtatcttcccatcattccaaggtttaagtgtctttctgctaatgaggacaacacanaagaccttacctggcatgcaaatgggagaaactctgatggaatggtctgtcatctngactgatgctcccagtggaagaagaatgat

SEQ ID NO: 3204 - DNA, 391 bp, Glycine max
  unsure (1)..(391): unsure at all n locations
actggatgcattggttaacttggtaacccagctggccttgaaccagaaatctgttcctgtcgcaagggtctgtggtttgtgctcctctgctgaccaccatacagacctttgcccttccatgcagcaacctggagcaattgagcagtccgaagcttatgctgccaacatttacaataaacctcctcaacctcagcagcaaaatcaaccacaacagaacaattatgacctctncaacaacagatacaaccctggatggaggaatcaccctaatcttagatgggtctaccctcagcaacaacaacaggagccttctccttccttccaaaatgttgttggcccaagcagaccatacattcctncaccaatccaacaacagcaacagccccagaaa

SEQ ID NO: 3205 - DNA, 461 bp, Glycine max
  unsure (1)..(461): unsure at all n locations
tccttaacaagaatcctaaagaagctagagcttagctactcatacctctctaatagctaagctcacctccttgagatgagaagctatagcttagctacacacaccctataatagctaagctcaccccatgacaaaatacatgaaaatacaaaaaaatccctactacaaagactactcaaaatgcctcgaaatacaaggctaaaaccctatactactagaatgaccgaaatacaaggctcaaacgatggaaaaacctattctaatatttacaaagataagcgggctcacacttagcccatgggctcgaaatctaccctaaggctcatgaganacctanggccttcccatggatctctggcccaatctacttggagtcttctatccaatgcccttgcggggtaggatngcatcaatntatccctaaccagttcaaccacttaatccaaccctannnataaata

SEQ ID NO: 3206 - DNA, 259 bp, Glycine max
agcttaagctccttcaactgcacaaggctcttattatttgaagagtatccttgtggaaccttcacccaacgaagacactgacaaaaacttatcttctccttcttggacaaagtatggcaggctgggggcaagtaaattttcttcccatcagaccttggatgcaactgtgatcgtatacccatatcagctagatctatgtgtgtggctgtgtgtgtatggctgtgcgtgtgtgcttctgtgtatgtgtgtgtgcgtgtgt

SEQ ID NO: 3207 - DNA, 267 bp, Glycine max
agctctgtgctcaatttccactggaagatgacatgcctttccaaagacaacccgataaggagacattcctatgggtgctttgtaggcagtccgatgtgcccagagagcatcatcaagcctggtactccaatctttcctgcttggctgcacaatcttctctaaaattcgcttgatttctcggttagaaatttctgcctgtccattggtctgggggtggtatggtgtcgaccccccccgcctcccccttactctctccacaaatcctcc

SEQ ID NO: 3208 - DNA, 379 bp, Glycine max
  unsure (1)..(379): unsure at all n locations
agctnttaactgaatntgcaacgttccaattgttttttaaatggtgtaatcgattacaatatattggtaatcgattaccagtgtatctgaacgttgaaattcaaattcaattgtgaagagtcacatcttttcataaaatgctttgtgtaatcgattacatggttttggtaatcgattaccagtgacaagttttgaataaaaatcaagagatgtaactcttccaatggttttcttaagattttctcaaggttataactctctcaatggttttcttgaccaaacatgaagagtctataaaagccagaccttgacttgcattttatgtacttgatataactcttttcacaactttttgaacatcttcttaaacttcttcttc

SEQ ID NO: 3209 - DNA, 396 bp, Glycine max
agctctaggaattatattctggagcacttatcctttcaaggatctcatactcacacaataattattgcacaacccaaaattctataatattaactatcttccaaacgttagctatctttactagtgactttccaaggtatgaaaaattgaaatgttacattacttgatgttttaaaatgaaagtgattggactacaaaaatattctacaatataaaaaatagattgcatctcataaaatataattcacaacaaaattttctaatttaaactttcataacatggaaagctatttcattgaatacattcaatttggtgctcgacttccatcttatggcaaaaatctaaagtcaagtattatggaaatttgtacaatatttttaccaaataaataaatc

SEQ ID NO: 3210 - DNA, 342 bp, Glycine max
  unsure (1)..(342): unsure at all n locations
aatgtcttagctcatcattttttatatctcataccctccacaaacaacacgaaaaggatgaaagaataaacgtaactgaatcaatggaaggcaaaacaatccaatgatgatngaataaccactagtaaaaataattgggagaaaaacaagtacaaactcacaattattgctcttccaaaagcaccagcactgacataagcccatgttcctggaagcatccccaaccaactgcataacaattatcagttntaagacaganattcacgagaactatatgtngtcanatgcagttccagataatcatactgggatagttccaaatagatacacgacanacatatg

SEQ ID NO: 3211 - DNA, 331 bp, Glycine max
ttgacttgctttccaatctgacattcacttcagattctggcttcctctattttcagaatgggaatgcctcttacaacacctttggcaatgattttcttcatgcctcttaagtgcagatgttccaatctttgatgccatattttgacttcatcttcattgggagataaacatgtggaggaagtactgggtttcttgaagtgttcataggtaacaaatgtcctttgatctgctgcccttcattaaaacttcactcttctcatttgtcaccaagcattctgactttgtgaaagatacattgaatccttcatcacaacactgactgatgctgatc

SEQ ID NO: 3212 - DNA, 413 bp, Glycine max
  unsure (1)..(413): unsure at all n locations
tctcgttcacgctactcacacagggaaccatacattctttcattccacttaaccctacataatgtgctctacatacccactttcacattcaatcttatttcaatgtcaaactcgtatcttctactaattatgaattaatcttttcttccacatcgtgcgtattgcggaagcgaacaatcatatgaagattggtatagttgaagcaaagcatggcctctaccatntgataccaaaccagataactaccaaagccatctgctctaccatcactcatcctaaatgcaacatcatccccatagacctatggcattttagaatgggacacccatcaaatgaaaggctacaatgtatgaaaaactattatcctcttttgagaaatgatncaaaatttgtctgcaacacgtgtcactatg

SEQ ID NO: 3213 - DNA, 398 bp, Glycine max
tagactaagttcagcctaccatcctcagactgattgccaaactgaactgttcattcagtcgctaaaagaccttttgagggcatgtgtcttagagcaaaagggaagttgggagagttttcttccgctgatagagtttacttataacaatagttttcactctacgattgacatggctccctatgatgctttgtatggttaaaggtgtatgacacccctatgttagctagagcccggagaatgccttaccttatgacctgaaatggtacaacaaaccaccaataacgtcaagttgatccaaaaaggatgacgaccgctcacagttggcagaattgttttacgattagaagaggaaagatctgacattcgcgttggtgatcatgtattcttgaaagtcactc

SEQ ID NO: 3214 - DNA, 362 bp, Glycine max
  unsure (1)..(362): unsure at all n locations
taagatcctaagtgctgatagtataatacccttatgtatctaatctttgcttaacctttntgcactctactggccaggttctttaattcctttagactgagagagctaacagcatcacgaaggatgtgcctggaatgcaaaaaaatgacattgaatntttcatttcaatggagaattctactgaataatatttttaacagaatgtaacattgacctatttggattctgaatgtctctgatctgtctttttaatttggatatgttctgataaaactgttattcataaaaagtgtcaaccagttagagaaaccttgtggaggagcagtttttcaactaactgcagttgataccatttgttctac

SEQ ID NO: 3215 - DNA, 444 bp, Glycine max
  unsure (1)..(444): unsure at all n locations
tactcagcttgacaattaacacatacttaactcgatgtcttattgtgtcccgtatatatcgagatacctaaaattcagaacagaagctattagaaaaaatcaacgacgatgactttttacacggatgtncgattgggtcccataatatgtcgagacgcttgaaattgaaaacagaagctttcaagcaaatcaaaagacaataactttttactcgaatgttcgagtgagtcccataatatatcgagacgctcgtaattganaacagaagctcagaggaaattcaaacgacaataacttttgactcanatgtccgcttgagtcccgcactatatcgagacgctcgtaattgaaacagaagctctgangaaattcaaacgacagtaactntttactcgtatgaccgattgagtcccataatatgtcgagacgctcgtaattgaaaac

SEQ ID NO: 3216 - DNA, 264 bp, Glycine max
gtcttttaacccagagaatgggtttgggtgcacatgaaaaaagaaagatttccggaacaaaggaaatcaaagcttctaccaaggggagatggaccatttcaagtgcttgaaagaatcaatgacgatgcttacaaagttgagctgcccggtgagtataatgttagttccaccttcaatgtctctgacttatctctttttgatgcagatggagaatctgattagaggacaaatccttctcaagagggagagaatgatgaggacatg

SEQ ID NO: 3217 - DNA, 276 bp, Glycine max
agcttcgcatgttcttgacctctcacccccaatctaatggacaaacttatgtattaaaccgtgtcgttcagcaatatttacgggccttcatgcataataagccactctcttgcggcaagttcttaatttgggctgaatggtcctataatacgtcttgacatttaggaacaggggcttctccttacgagatcacgtatggtaagacacctcttactatcccacaatatgttataagaacatcgaaagtggcagccggggatgactttctgactaacc

SEQ ID NO: 3218 - DNA, 390 bp, Glycine max
  unsure (1)..(390): unsure at all n locations
taaaaattcacttacgagccctctcgatatattaccggactcaatcaacattcgagaataaagttattggtcgttgaattttctcagaggttcaacattccatttcgatcgtctcgatatattacgggactcaatcagatatctgagtaaaacgttattgtcgtttgaattggctcagaggttcaacattcaatttcgagcgtctcgctatattacgggactcaatcagacatccgagtaaaaagttattgtcatttgaattgactcangagctctacattcaatttcgagggtctcgatatattacgggactcaatcagacatccgcgtaaaaagttattgtcgtttgaatttgctcagaggttcaacattcaatttcgagcgtctcga

SEQ ID NO: 3219 - DNA, 446 bp, Glycine max
agcttcaacatcagaccacttccagggtgctggtactacttcacatggatttgatggggcctatgcaagttgaaagccttggaggaaagaggtatgcctatgttgttgtggatgatttctccagatttacctgcgtaaactttatcagagagaaatcagaaacctttgaagtattcaaagagttgagtctaagacttcaaagagagaaagactgtgtcatcaagagaatcacgagtgaccatggcagagaatttgaaaacagcaggttcactgaattctgcacatctgaaggcatcactcatgagttctctgcagccattacaccacaacagaatgggatagttgagaggaaaaacacgaccttgcaagaagctgctcgggtcatgcttcatgccaaagaacttccctataatctctgggctgaagccatgaacacagcatgttac

SEQ ID NO: 3220 - DNA, 440 bp, Glycine max
  unsure (1)..(440): unsure at all n locations
tccacatacttgatacccattctacattttcagcttacagatctaactatctttcanggcccagatagaccaaattggagagattcccaatctgagatggaatcttccccatgaatccaacataagagaggtcgaggtgagtcaaagaggtcattgcacaaaggaaagaaggaattgccataccttcaaaataattgtcgctcaagtcaagatatcgaagcttagagagattcccgatctgagagggtactgttccgtangcaacatatctcangtcaagatacaccanatntgagagattcccaatctgaggaggaatcttccccctgaatccagtaagagagaggttgaggtgagtcaangaagtcattgtcccaacgaaagaaagaatngacataccttctccaagaaatccattgccgctcaagtccaagtaattc

SEQ ID NO: 3221 - DNA, 451 bp, Glycine max
  unsure (1)..(451): unsure at all n locations
agcttatcggagatggagctntggtggagagattagtccttgtttggctgatttaaagcatttgaattacttggacttgagcggcaattatttccttggagaaggtatgtcaattccttctttccttgggacaatgacttccttgactcacctcgacctctctcatagtggattctatgggatgattcctcctcagattgggaatctctcaaatttggtgtatcttgacctgagatctgttgccaacggaacagtaccctctcagatcgggaatctctctaagcttccatatcttgactcgacctacaatcatttacttggagaaggtatggcaattccttctttcctttgtgcaatgcttgactagtagtagtagctagtgaccaaacctaattcgtattatcatagccatcatacaaacctagctcacactgntcacttgcatccatat

SEQ ID NO: 3222 - DNA, 463 bp, Glycine max
  unsure (1)..(463): unsure at all n locations
tccnctgcaccanatagctntttctatanatagtgatgtaagctccattgtagcttgtatgcctaggatcttcttcatcaatggattcctttgcttcttggaagatgaatggtagtggaatggagaaggaagagagagaggagatgccacttcaaggagaagatgagtctataagaagctcaccaccgtaagaggccatggataagagcttggaggaagaaggagatgaatgaagggagaggaagagaagagcacaaaattttgtgctctaaaagagctctgaaatctgaagtttaattntcaaatgatcaaagttgaaaaaatgcacacacatgacctctatntatagcctaagtgtcacacaaaattggagggaaatttgaatttctattcagatttcacttgaatttgaaattgaatttgtggagccaaattttggatccaaaattcactattatgatag

SEQ ID NO: 3223 - DNA, 416 bp, Glycine max
  unsure (1)..(416): unsure at all n locations
agctagaaggcaaactggatgcattggttaacttggtaacccagctggccttgagtcagaaatctgtacctgttgcaagggtttgtggtttgtgctcctctgctgaccaccatacagacctttgcccttccatgcagcaacctggagcaattgagcagcctgaagcttatgctgcaaatatttacaatagacctcctcaacctcagcagcaaaatcaaccacagcagaacaattatgacctctccagcaacagatacaaccctggatggaggaatcaccctaacctcagatggtccagccctcagcaacaacaacaacagcctgctccttccttccaaaatgctgctggcccaagcagaccatacattnctccaccaatccaacaacagcaacaaccccagaaacaaccaacagtt

SEQ ID NO: 3224 - DNA, 393 bp, Glycine max
  unsure (1)..(393): unsure at all n locations
gttgtaaaaaggaaatcaagttaaaaactctgtttaaagcagatatgttgtttctacttcaaaaccccttgaactacttcacattgatttatttggtccctctagaactatgagtntaggtggaaattactatgtctcggtaattgtggatgattactcaaggtttacttggaccttgttttcaaaaacaaaaaatcaagcttttgatgtttttcgcaaacttgccaaggtgatccaaaataaaaaaaaaggtctttacgttgtttcagttataagtgatcatggagatgaattaaaaatgagtcttttgaagacttctatgaagaacatggaattcaccacaatttttcagccccaagaatacctcaacaaaatggtgttgtggagaggaaa

SEQ ID NO: 3225 - DNA, 405 bp, Glycine max
  unsure (1)..(405): unsure at all n locations
tctcatatattatgcccctgaatcggacttccgtttgaaaatgttataccatttgaatttctcgagagctttggttgttcaatntccaatgtctcgatatattatgcacctgaatncgattgtcgtgagacaagttatgaccatttgaatttctcgacagcatgcgttgttcaatttctagcttctccatatattatgcgcctgaatctgacctccgtgtgacaagttatgaccattggaattgctcgagggcttccgatgttcgatttcgagcatctcgatatattatgtgcttcaattggacatgcgtgtgacaagttattgaccattgaatttttcgagcccatacgttgttcaatttcagcctctcgatatatatgcacctgaatcggacttaatgtgaca

SEQ ID NO: 3226 - DNA, 410 bp, Glycine max
  unsure (1)..(410): unsure at all n locations
ntagttntcatgttgttcatgttgctcttcttatctctaacattatataaaaataatattcagatnttagagtttatctaaagcttaagtttatggaatgtaacatgaacaatcaaaacctattactccgttccaaaactataaatgctctacaaattcaacactaaattcatagtcctttctctattatacccttgtttacagttatcagtgcattgaatattttttgtcaccaatagctaaccatttatcaatgagaatattcacttaatattgtctctagactctacggtatctaaatatntgtggttaatggtgattccaacaacatgattaaataggaatattttagtctaaagttttatcaattaatatntagtaatgggtgtgcactaaccttaaacatatat

SEQ ID NO: 3227 - DNA, 385 bp, Glycine max
  unsure (1)..(385): unsure at all n locations
agcnttcttaagaagattcgtaaagaagctagagcttagctacacatacctctctaatagctaagctcacctccttgagatgagaagctagagcttagctacacacnccctataatagctaagctcacccccatgacaaaaaacatgaaaataaaaaaaagtccttattataaagacaactcacaatggcccgaaatacaacgctaaaaccctatactactagaatggccaaaatacaaggccttgacgaaggaaaaacctattctaatatttacaaagataagcaggctcatacttagcccatgggctcgaaatctaccctaaggctcatgagaaccctagggtctttccttggatctctancccaatctacttggagtcttct

SEQ ID NO: 3228 - DNA, 446 bp, Glycine max
gttgatctcctttgttccggaaacctttcttttctcatgtgcacccaaacccaatctccgggttcgaagacaaccttctttctccctttgttggcttgtttagcatagcttttatttttcctctcaatttgatctttgactctctcatgaagcttcttcacatagtccgcctttgcttgaccttctttatgcttaaaaacagaaacattaggcataggcaaaagatcaagaggagttagtgggttaaaaccataaacaacttcaaaaggagaacaattagtggtgctatgaacagctctattgtaagcaaattcaacatggggtaaacaagcttcccaagtttttaagttcttcctcaaaactgtcctaagcaaagttcccaaagtcctattaacaacttccgtttgcccatcggtttgtgggtgacaagtggttgaaaataacaa

SEQ ID NO: 3229 - DNA, 458 bp, Glycine max
  unsure (1)..(458): unsure at all n locations
cgcgctngagcctggttgtggttcgttttccctcattcccccatcgacccgtcgagtcgctatgcaacatgatatgaagtagtagggtggttctaaagatttgctagcttagccctcagggaacagaggaagagtttaggcttggcttgagaagtagggtcattctctgaaatgttattaataaatttcaatatggagctgtacccaaggtgagttagatcaatntaatttaatttgcaattntattggctccagttttggttatttcgttattgtatgttacaatgtattatcttttaaggtggtggagtcccgttgattctgcactgaaccatgatggagcaccattaacgacatatcagtattttgaaaatatgatgaatttcctggtgcatctgtccaagaaattggacttccttccttccttccttcctttgagacatctgatctgaaacaag

SEQ ID NO: 3230 - DNA, 272 bp, Glycine max
catgcaagcttatcattatatctaagctagagagatcacctgacagattattgtgagagagattcaatgtttctaagctttttaattctccaaacgttgaacgtattgctcctctcaaagaatttccactaagatcaagacttgtaagaaatttcagttcgcccagctctgaaggaatatttccctgaaatttattttggctcatactcatgtccaataaatagagcaaatttccaagttgttctgggattaacccacacaaattatttgat

SEQ ID NO: 3231 - DNA, 475 bp, Glycine max
  unsure (1)..(475): unsure at all n locations
agtccactntagcttcttgccatcaccttgaatttctggaaaactgagaacacctcatcttttgccttgatcaagtatgcccacatcattctgctatgctcatctacaaatgatgtgaagtacttgttcccacccagttatggtacctcaaaaggaccacacacattagaatgcacaacaccaagtgcactggaagctctcattggcaaatgggaattaaaggaatttcttggttgcttgccaatgagacacacatcacacaccttctctggtacatttaattttggtaaacctataaccatattattagttactaacatattcaaacttttgaaatttaagtgaccaaacctgagatgccaaagccagctcaattggttgatctttgtagccattaaacattgtacttctgctgccttaatgttggcttgaaaggttctatttcttgagagtggagatatcaagactagcttca

SEQ ID NO: 3232 - DNA, 457 bp, Glycine max
tattctatgtgatttaccaaccacacaatgatcacaaaattcaagtttatctagtttatcaccacctagtagattttgtttctcaagttcatgtaatcctctttcactaacatgacctaatctcaaatgccaaagttttgttttatcaatcaaagtattactagctaccgatgcatgtccaacaatagtggaaccttcaagaataaacaagccattacttttattcttgttacccttagctatgattaaagatccatttgaaatcttaagaacaccatttaaaattctagttgaatatcctagatcatcaaacatgtttatggaaataagatttcttttgagttctggaatgtaccttacatttttcagtagatactctctattatcaaacatcttcaatctcacaattccaatgccttgtaccttgcaggggtagttgtctcctagcagtacagct

SEQ ID NO: 3233 - DNA, 432 bp, Glycine max
  unsure (1)..(432): unsure at all n locations
tgtatcacattcaaacgacaataacgttntactcggatgtttgattgcgtctcgtaatatatcgagacgctcgaaattgaaaacggatgctcgtagcacatgcaaaccgcaataacttttaactcggatgtatgattgagtaccataatagatcgagacgctcgaaattgaaaaaagaagttctgagcaaattcaaacgactataactttctactcggatgtctgattgagtcccgtaatatatcgaggagcacgaaattgagaacagaagctctgaccataatcaaaccacaataactgtatattcggatgtgcgattgagtcccgtaatatatgaagacgctccaaattgaaaacagaagctctgaacaaattcaaacgacaataactttgtactcggatgtccgattgagtcccgtaatatatcgagac

SEQ ID NO: 3234 - DNA, 345 bp, Glycine max
  unsure (1)..(345): unsure at all n locations
agctntgagccaattcaaacgacaataactntctactcggatgtctgattgagtcccgtcatatatcgagacgctcaacattgaatattgaagctctgagccaattcaaaccacaataactctttactcggatgtctgattgagtcccgcaatataacgagacgctcgaaattgaatgttgaagctctgagctaatctaaacgacaataacttttttctccgatgtctgatcgagctccgtaatatatcgagacgctcgaaattgaatgtggaatctctgagccaattcaaacgacaataactctttactccgatgtccgatcgagtcccctaacatatcgagac

SEQ ID NO: 3235 - DNA, 460 bp, Glycine max
  unsure (1)..(460): unsure at all n locations
tatgctgcanatatttacaatagacctcctcaacctcagcagcaaaatcaaccacagaagagcaattatgacctttccagcaacagatacaaccctggatggaggaatcaccctaaccacagatggtccagccctcagcaacaacaacagcagcctgctccttccttccaaaatgctgctggcccaagcagaccatacattcctccaccaatccaacaacagcagcaaccccagaaacagccaacagttgaggcccctccacaaccttccctcgaagaacttgtgaggcaaatgactatgcagaacatgcagtttcagcaagagaccagagcctccattcagagcttaaccaatcagatgggacaattagctacccaatcgaatcaacaacagtcccagaattctgacaagctgccttctcaagttgtccaaaatcccaaaaatgtcagtgccatttcat

SEQ ID NO: 3236 - DNA, 330 bp, Glycine max
gcttgatctttagttttatctttaatctttaatccctgaatgaactattcaagtttgtaattcgaactttaattatctcttaattcgctcctaaagatagatcgccaaatctgttgctaactgcacaataatctgttaaagatataacagatttatgtgtccagtatttccggcaggatgtcctggacattgtatccgacatcgtggatcctgcacaatctgttaaagatataacagatttatgtgtccagtattttccggcaggatgtcctggacattgtatccgacatcgcggatcctgcaccttcaattcttcatttgacattttat

SEQ ID NO: 3237 - DNA, 471 bp, Glycine max
  unsure (1)..(471): unsure at all n locations
cttgtaaagactaananactagatggagatatgatntatgactttctctntgtttttaagtcaaaaaccagaactaaccatctaatctgcactactacattaatgttctttttaaccatgagatttatacagggtaccgggaaaaaatatattaagttaaattcctttataaattctgtagttttgttaaaattttaaatggagggacattggaatgaatttatttagacttataaaaatcacttggggttcttttataattnttttaactcatttcaataaatttaacgattattctaataaataatttttcaataaaaatttattgaaaatgtgattgattatatataaaaaaaaaatatgtcttaaaccagcaatggttaaaaggttttaacaagatcctatatttatacaattnttaattagattcctaaccgctatcgacatgtttgaaattctttaataaataat

SEQ ID NO: 3238 - DNA, 471 bp, Glycine max
  unsure (1)..(471): unsure at all n locations
cacgtgccanaccacctcctcaggtgttgccacccaagcctccactcaccaatttctccatttataccctcattaccaccaccttaaaccctaccacattaattactcactcttcactcaaaactcttgtctttcattttgataattcccacactatggctgagcttcactaccaacaacaacaccaataccctcaccgataccctaatgatccatacgaacaacaaactagctactccactcaggtcgtcaaggcggccaccgccgtcaccgcgggcggctccctcttgatcctcgcctcgttgatccttgccggcaccatcatcgccctcaccatcgtcacaccaccgctcgtcatcttcagtccggttctcgtccccgcggtgatcaccgtcgcgctgctgagcctgaggttccttgcctncggcgggttcggtgtggcggcgaccacngtgctggcgtggatctaca

SEQ ID NO: 3239 - DNA, 236 bp, Glycine max
tatagaaagttcgttcctaatttctctacaattgcatcacctctcaatgagctggtgaagaagaatgtggcatttacctgaggtgaaaaacaagagcaagcctttgctttgctcaaagaaaagcttactaaggcacctgttctagctcttcctgacttttctaaaacttttgagctagaatgtgatgcctctggagtgagagtaggaactacgatcaacaaactagctactccact

SEQ ID NO: 3240 - DNA, 445 bp, Glycine max
tgagggagaatgttgagaagtaaaaatatttaatgtatagatctattatgatccgatttagaggaaaatgaatatcctttcattatcattggtatctattgtaatgacctatataattagaatggttctgttgtgtacttttacactaattttagtctattattcctttatattacttttattttacaaaattgattgagtccagaattaatttaggctgaaataattttaagtagcttttgtgttaaatcagaaaattaatatatttgatatagcatatgataaatttatgattagattatagtgtaaaaatgtacacaactgcaagaattatttattcttgatattgttacaattttaagaaactcttgcaatatttccttatagaaaagtcttgctattgtgttggtgtaaaaagtgagttattccaaaccaaaagctgatt

SEQ ID NO: 3241 - DNA, 436 bp, Glycine max
  unsure (1)..(436): unsure at all n locations
agcttgactcattacctatcatagactttntttaaaggctcgactcggcttacctaanagtctggcttggcctacgagcctatntaaaaatctgcttaaagacgtctctaatcaattaattgttttaaaacctagtaaaatactaacaaaaaaaataaacttataaaatttcgtataagtaatgtacaaatccaaaaataatgataaacaaaatcatattgaattcaagttattaaaacataaagtatatcaaaagaaaatgaaaaaaaagaacataatattaaaaaaatatatggattagagatgatctatactaatatagccaaataaaaatatttaaattgtctgaaaatgtctttacaaaacattnttttctttggaagtattaatcctgatgcattatctttctaacttaagtcttttctttttgaaaatt

SEQ ID NO: 3242 - DNA, 469 bp, Glycine max
  unsure (1)..(469): unsure at all n locations
attctttgtgggttgatgggttctgtcgcacagaatggcgtgatcactggctgacatattctcaattagctcagttgcttcttccggggtcttcagctttatttttccccatgtcgaagcatctagcagttgcttggtttgtggtctcagcccatctatgaacatattcaattggattggctctgaaaacccatgggtgggagttcttctcaataaacctctgaacctctctaatgcttcacttagagattcatcagcgaattgatgaaattaagagtttgcagctttcccttccgcagtcttggactctgggaagtatttctttagaaacttttcaacaacttcttcccatgttttcagactgttacccttaaacgagtgaagtcacctcttggcctctcatgctaatgagaatgagaataggttgagtcttatagcttcatctggcacaccgaanatcttaacaatg

SEQ ID NO: 3243 - DNA, 472 bp, Glycine max
tatatcaaggaataggctaaaaccttcgatgagatctccttccatcatgttccccgcgaggaaaatcaaatggcggatgcacttgctactttggcgtctatgttccagctaacgccgcacggagatctaccctacattgaattttggtgtcgtggcaaacccgcgcattgttgccaagtagaagaggaacgggacggaaagccttggtatttcgacatcaagcgatatgtcgtaagcaaagaatacccgccagagattgccgacaatgataagaggacattgagaaggttggcaaccgatttcttcatgagcggaagcatactgtataagagaaatcacgacatgacactcctgcggtgtgtggatgccagggaggcaaatcacatgatcgaggaagtccatgagggctcgtttggaacgcacgccaacgggcatgctatggctaggaagatccttagagcaggttattact

SEQ ID NO: 3244 - DNA, 396 bp, Glycine max
tcataagagagtcaaaacatcaaattgagaggagaaataaaagctatgctaaacaagccaacaaagggagaaagaaggttgtctttgaacccagagattgggtttgggtgcacatgagaaaagaaagatttccggaacaaaggaaatcaaagcttctaccaaggggagatggaccatttcaagtgcttgaaagaatcaatgacgatgcttacaaagttgagctgcccggtgagtataatgttagttccaccttcaatgtctctgacttatctctttttgatgcagatggagaatctgattagaggacaaattcttctcaagagggagagaatgatgaggacatgaccaagagcaagggcaaggatccacttgaaggacttggaggacctatgacaa

SEQ ID NO: 3245 - DNA, 449 bp, Glycine max
  unsure (1)..(449): unsure at all n locations
gctattacggacctatgaaactcagcttanaaatatatgtagaacataacaagctagaagaataaatggaagttaattatattntcttaaaatcttattttattatttgatgtagctccatgtagagcttgtaagcattgaatctttcttatcaatggagtcatttgcttctcaaagatcaatgacaacggaatagagaatgagaaaaggttatttgagacgccacttcaaagagaagatgaatcaagaacaagctcactagcatatgaaaccatgaataagagcttgaaggtaggtagaagaagatgagtggagggaaaaggagagggggacatgaaatttatgcctcanatgaggtctgaactttgaagtgtaatttctcaaattatcaaagttgaaaaatatacacacaagacctctatctatagcctaagtgtcacacaaaatta

SEQ ID NO: 3246 - DNA, 460 bp, Glycine max
  unsure (1)..(460): unsure at all n locations
ctattacggacctatgaaactcagctatcctacaaaacaggacatccttactttatatatgcagaggactaagcagacaaaatcaccgaattaactttcatatggattctagtcacagcccaacgattcactaccttgaactaacatccatataagacacaaactgcaccctctgaacacacatgatcttaaccctaacgatctacattgagcaagcttaagcagtgatcaaacttgctctttggaactggctgtgtaaacatattagccggattgtgcagagagataatcttatgaactttgattcttctttctgaccgaatgaagtgatatctaacatctatatgcttggttctatcatgatgaacctaatccttggccaagcatatagcactaaggctgtcacagtagatgttagcatattcttgattaatntcgagatcatttatcagacctctca

SEQ ID NO: 3247 - DNA, 369 bp, Glycine max
  unsure (1)..(369): unsure at all n locations
tgaagagcctcctcaatcaaactgaaaaacctatattcctcaatgaagttagcacccatcttttcataaaacttgatggtgagaatattccaatcaagcataacccacttgacccttatgcaccccatttttatggcttgctntgccaccacagagagcaacattctcccaagccccttcgtcttataacactccctcaagaacaagttctccatgtaaaaccctcgcttctctagaacgagagagaagttccgagaaaacaagacaaacccaacaatggaaacacctttgagggtttttaaatcgtagtttctcgagataactattacttaatgggaataataaatgaataattaataattatggact

SEQ ID NO: 3248 - DNA, 405 bp, Glycine max
  unsure (1)..(405): unsure at all n locations
agcttacactgattgacaatccgtaaggttagtctttatgacttatacggattgttaaaaatatgttttagaaaataatttaaaattaatgatccatacaggtctcaaacctgtgtgactctcatgttattatcataacactctaatcaactcaatgaataggtcaattatgttaaaaaataattagcgtcgctatatataacattaaaatttttaatgtatatttaatttacataataaattttgtaacaattatttttgatctaataatgtttttttacatatataaattctaaataaaaattatacggttaatgaacatctatatatgtaaaaaatacattattacaataaaacttattattacacaatttattatatnaacttatatgtgtattaaatata

SEQ ID NO: 3249 - DNA, 420 bp, Glycine max
  unsure (1)..(420): unsure at all n locations
gctttaatactttgaaatagaaaatgacgtctgcatccataatcactactccaaattggacactagattttgaaataatgtgtgatgcaagtgattatgcagtaagagcggttctgagtcaatggaaaaataaaatttttcatgtcatacactatgcaagaaaggtattaaatgaagctcanatacattatgccacaactgagaaagaattgctcgcaatagtatatgctttggaacaatttacatcttatttgataggatctaaaattgtgttttttactgatcatgctgctataagatatctgttagttaaagctgattctaaaccctaacttattaatggattctattattgaggaatttgatttatagatcaacgataaaaagggaagtgaaaattatgtacctgatcatctgtct

SEQ ID NO: 3250 - DNA, 405 bp, Glycine max
  unsure (1)..(405): unsure at all n locations
gcatgcaagcttgctnctncaccttctctaatagcccacaagagatcttcctccatggctctcctatcaaggatttggccatttgcatcaactattcttgcatctacgacattgtcagctncaaggccatactttctcatcatggatccatatgcacctcccgtgatgtgccctccaacacctaaacttgtgcaaaggcctgcagggaaaccatgaaccgaacttttctcatatattttgtaatagacctccccaatagtggcancggcttgaatccaagcagtgttgtcttctatatcaacgttgacggcgcgaagctttgacaaatcaacaattatgaaaggggtctcaacttcagaaacatatgagagtccttcatagtcatgggcaccgctacgaattctc

SEQ ID NO: 3251 - DNA, 317 bp, Glycine max
agaatcggacatccgtgtgagaagatatggcctatctgaatatctccagagattctgatgattgagtttcgagcgtatcgatatgttataatcctgaatctgacatccgcgtgaatagttctgaccgtttagatttcaccagagcttgcgtcgtcaatttcgagtgtcactatatgtgatgcgcctgaattggacatccgagttaaatgttatgaccatttgaatatctcaagagcttccactgttcagatttgagcgtctcgatatgtgattcgctcgaatcggactctcgtgtgaaaagctatgaccattataat

SEQ ID NO: 3252 - DNA, 239 bp, Glycine max
agcttcaatgtttaatttcgattgtctcgatatattataagcctgaatcggacctacgtgtgaaaagttatggccattcgaatttcttgagagctctcgttggtcaatttccagtgtctccatatgtgatgcaaacgaattcgacacgccggtgaaaagataagaccatatgaatttctcgagggctttccctcctaaaattcgagcgtctccatatattctaagcctgaactcggaca

SEQ ID NO: 3253 - DNA, 445 bp, Glycine max
  unsure (1)..(445): unsure at all n locations
tcttgagctnggtatgaaaagttaagttcngttttaattgaaaatggctntataagaggaaaggtaaatactatgctatttcagaaagattatggaagtcaaatcctagtcgtcaagatatatgtggatgataccatattcagtgctactaatgacttgttgtgcgaggatttttccaaacttatgcaggcagagtttgagatgagtataatgggagaattgaagttctttcttggacttcaaatcaagcaaacaaacaatggcatatacacacatcaaaccaagtacatgaaggaacttctgaagaagttgaagatggatgatgaaaaccaaatgaaaacacttatgcatccaaccactgtacttggactaggcaaagaatcaaagcgggtggatgaaaagacatacaaagaaatgataggatatcttttgtatgtcattgagt

SEQ ID NO: 3254 - DNA, 157 bp, Glycine max
catgcaagcttataatatatcgagcgcgctcgaaattgaacaacggaagctcttgagaaagtcaaatggtcataacttttaactcggaggtaattcatgcgcctcacatatagagacgcttaaaaatgaaccaccgaagctctcccgaagttaaaat

SEQ ID NO: 3255 - DNA, 461 bp, Glycine max
aaacgttcagaaactgctggtaatcgattactatatatgtgtaatcgattacacagtgcaaactttgaattcaaattttaatagctgttgtaaatcagttttggccactggtaatcaattacatcctctggtaatcgattaccagagagtaaatttgttaaaaaagactttttaacttaaaattcttggccaaaccttttgctacttcaattggaattctcttcctatttaatataccctttctaagactctagagactgtcttgatcatccatcttgaatatctttaatttctttgtcttgaataaagcttttagactttgagacgcatgtgaaactttggcatcatcaaaacattcagctagatcctttgtctacaaaagtgtgacagagagacaggtgcgatcatagttctggatgacattgcttctcagcagcatcctccccagcgatcataattct

SEQ ID NO: 3256 - DNA, 432 bp, Glycine max
tcaacattcaatttcgagcgtctcgatatatggcgggactcaatcagacatccgagtaaaaagttattgtcgtttgaattggctcagaggttcaacattcaatttcgagcgtctcgatatattacgggactcaatcagacatccgagtaaaaagttattgtcgttggaattggctgagagcttcaacattcaatttcgagggtctcgatatattacgggactcaatcagacatccgagtaaaaagttattgtcggttgaataggctcagagcttcaacattcaatttcgagggtctcgatatattacgggactcaatcagacatccgagtaaaaagttattgtcgtttgaattggctcagaggttcaacattcaatttcgagcgtctcgatatattacgggactcaatcagacatccgagtaaaacgttatt

SEQ ID NO: 3257 - DNA, 393 bp, Glycine max
tgtagtcccgggatctctaagtcacctgcggcatgcaagctttgagccattacacgacaataactctttattcggatgtctgattgagtcccgtaatatatcgagaccgtcgaaattgaatgttgaagctcttagccaagtaaaacgacaataacgttttactcggatgtctgattgagtcccgtcatatatcgagacgctcgaaattgaatgttgaatctctgagccaattcaaacgacaataactttttactcggatgtctgattgagtcccgcaatatatccacaccctcgaaattgaatgttgaagctctgagccaattcaaacgacaataactttttactcggatgtctgattgagtcccgtaatatatcgagacgctcgaattgaat

SEQ ID NO: 3258 - DNA, 336 bp, Glycine max
catgcaacttcacgatgtgtactccctcggctgctgactagcagagtatacggccacggaacaactactacaaggtatgaaactacatgagagaaaaaggttcttacaagacaccactaagtatgtgcgggacgaccctattcttttttgcattcgttttgacagaccgtcaaagcgatgtctaacaaaagaagaacaagctatcatactttggcattgccataactcaccacgacgaggccactttaactgagatagaacaactgcaaagatccttcaagaaacattatattggcctacattctttatagatgcttatcaccatgcacgatcatg

SEQ ID NO: 3259 - DNA, 457 bp, Glycine max
taagctccttcaactgcacaaggctcttaatatttgaagagtatccttgcggaaccttcacccgacgaagacactgacaaaaacttatcttctacttcttggacaaagtatggcaagctgggggcaagtaaattttcttcccatcagaccttggatgcaactgtgatcttatacccatatcagctagatcttgacgggtattcaagccatccttcgtcgtgccttgaattttaaggagcgtcccaatcacactgtcacaaaaatttttctccacatgcataacatcaatacaatgtctaacgtcaagatcacaccagtatggaagatcaaagaaaatggacctcttcttccatatgcaactctgacttttatccttcttttgggtcttcccaaatacagtgttcaggtgttgaacccgctgatatacctgctcaccagtgaacagtatcggcgcaat

SEQ ID NO: 3260 - DNA, 298 bp, Glycine max
  unsure (1)..(298): unsure at all n locations
ttccacaattttagtcgtgctatacgagacatcttgccaacagagtcaggttaccataactcgcatgtgcttttnctttcatgccatatgtagcaaagtccgtgatcctatctagtttgatgagctggaaaatgacgccgcaattatactgtgcttagtggagatgtattttccccctgcttttttgacatcatgattcacttgaatgtgcatctgggcagagaaatcaaatgttgtggtcttgttatctactgtggatgtacccgggtgagtgatacatgaagatcttaaaagggta

SEQ ID NO: 3261 - DNA, 327 bp, Glycine max
  unsure (1)..(327): unsure at all n locations
agcttaattattttcactcagaatctttcattatctatatccctaggatgagaatttgcagagtttcattaccattaatgggtggctccgtgatttcttatggacccacataattcagtcttatggttctttattatctgcatatggtctctctttcttgagtgcacattctgtatgggcttttaatttaatgtttctattcagcgggcggggttattggcaattctagcatatggtttntggcacaataatatgcaaagaaaatctcttatgctatgtgtttattgattatgaagatcgatgatatgatcttcccttaacgttcac

SEQ ID NO: 3262 - DNA, 356 bp, Glycine max
tcttttcttttagaagatggtttttaatatgaaagacaaagttgatacaactcatttcagaagagaagtacgcaaaatttcattataattcaaattcatgtagatgaaattattttttgagttactaatgaatctttgtgtagggatttctctaatcctatgaagaatgaatttgaaatgagcatgagatgagaacttaagttcattttgggacttcaatcaagaagtatagcaaaggcatatatattgatcaataaaagtacactaaaaaacttctgaagaagtttaagatggaaggtgctaaacctatgaaaacccttatgcatgcttctattcctctgagcaaagacaaatat

SEQ ID NO: 3263 - DNA, 446 bp, Glycine max
  unsure (1)..(446): unsure at all n locations
agcttcaagaaaaacatggcctcagcaaactccttatttccagaagggaattctatcaatagacctccaatctttaatggagagggttaccattactggaaaacccgaatgcaaanttttattgaggcaatagatctaaatatttgggaagccatagaaatagggccttatatacccaccacagtggaaagagtttcaatagatggtagttcatcaagtgaaagcataactatagaanaacctanagatagatggtctgaagaggatagaaaacgagtacaatacaacttataagccaaaaatataataacatctgccctgggaatggatgaatatttcagggtttcaaaattgtaagagtgctaaggaaatgtgggacactcttcgattaacacatgaaggaactacagatgttaaaagatctatggataatgcactaactcatg

SEQ ID NO: 3264 - DNA, 322 bp, Glycine max
  unsure (1)..(322): unsure at all n locations
agtgaccataagagccctaaatatttgtttgatcaaaaagagctttacatgaggcagaggagatggttagagttctttaaggattacgattttgagcttagctatcatctatgtaaagccaatgtagtagctgatgccttaagtagaaaatcccttcaaatgtctgctttcatggttagagagttagacctcttagagcagtttatagacatgagnttggcatgtgagatcacctctagtagcattaagttgggtatgttgagagtcaccagcgaactcttgagcgagatccgtgaaggtcagaagtttgacccattcttgt

SEQ ID NO: 3265 - DNA, 416 bp, Glycine max
  unsure (1)..(416): unsure at all n locations
aaacccaacacagcagctatgagcttatcaattaccatcacaagtttagtcaactttcgctgtgatgaatcaatatatagacttatcttcacttgggacttgggtacaccgtggcctttcatggctcctgacactttatccacagactttttcacaatggttttgaaagccaccttactcatattaccttgccgccatgatggtttcaaaacctcccttacaaaaatcgcaatggaaactttgaacaatttcatcgatctggaatccttactctnttttcttttcccacgagacttgacctgattaatctcaacctcccctgaagtcatttttgcaacatccacatcatcacttaagctctcattttcaacagcacctacttctgcatctgctggntcaccatattcatcattatt

SEQ ID NO: 3266 - DNA, 372 bp, Glycine max
  unsure (1)..(372): unsure at all n locations
tattgcaaactatttccccaattaaaattctatttcactttcaatgccagttataaattcccttaaaaatgaactcttaaataatgattcaaatagaacaatctgaatataaatataacgcaataataaataaaagagttcaagggaaaagaaagtgcanactcggatttatactggttcggccacacccttgtgcctacgtccagtccccaagcaacccgcttgagagttccactatcttgtaaaatccttttacaagttctaaacacacaaggataatccttcctttgttttcataattcttttacaacaagagaccctcggtctcttaatcccctctgagaatttagaaagaagagaagaatgaatctc

SEQ ID NO: 3267 - DNA, 417 bp, Glycine max
  unsure (1)..(417): unsure at all n locations
agctntcaaagtgttccttcgccacatcatatgtggaatacttgggccatattgtgtcttgtcgtggcgtaaagcccgtgccggcgaagatagaagcggtgtaaaattggccaactccccaatctaccagagcattgcgaggcttccagggcttgtcgggattctaccgaagatttattaaaggctattcctcaattgcagctcccctcacgacactgcttgccaaggattcattccactggaactttgaggccaaacatgccttcatgaacctaaagcacaccctatgtagtgcccctgtgttaagcttacaggatttttccctcccattttgtgtggaaatggacgcttccggatcggctgggacggtttgctataaataccgaagcattttacaaacatctgtcactctgtgct

SEQ ID NO: 3268 - DNA, 358 bp, Glycine max
  unsure (1)..(358): unsure at all n locations
attcccgaaaattagctntttatgattatatcggaaataatccagcaaaaggggggttatttatagcaggttcaatggacaatggagatggaatagccgtcggttggttacgacatcctgtctttagagataaagacgggcatgaacggtttgtacgtcgtatgcctactttttttgaaacatttccggttgttttggtagatggggatggaattgttagggccgatgttccttttctaagggcagaatctaaatatagtgtggaacaagtacgtgtaattgctgagttctatggtggcgagcttaatggagtcagttatagcgatcccgctactgtgaaaaaatatgctagacgtgc

SEQ ID NO: 3269 - DNA, 433 bp, Glycine max
  unsure (1)..(433): unsure at all n locations
gcttctgatctcgataaagctactcaaaatcaattagcaagaggtcaacgattgcgcgagttgcttaaacaatcccaatcagctcctcttaccgtggaagaacagataataactatttatactggaacgaatggttatcttgattcattagaaattggacaggtaaggaaatttcttgttgagttacgtgcttacttaaacacgaataaacctcaattcaaagaaatcatatcttctaccaagacattcactggggaagcagaagtccttttgaaggaagctattcaagaacagatggaactctttttactacaggaacaggtagaaaannaatgattaatcatttaataactttataatttcactttcaaattcttataaattagtatctttaatatctttttatttcatttgaatattatattaatatatt

SEQ ID NO: 3270 - DNA, 398 bp, Glycine max
  unsure (1)..(398): unsure at all n locations
agcttaaggattcttagggaactactagagacatcactatcactgccaaactacacacatcagcctgcttagaggtaagggatgagtttatcgcaattgaggttaaaatgaacatatgtagtgatgtagatccatgtgcagcttgtaggccttggatcttcttcatcaatgaagttttttgcttcttgaagatcaataaaaggggaatagagaaggaagaaagacgattagagatgtcacttcaaggagaagatgagtcaagaacaagctcaccatcaaaagaagccatggataagagcttgaaggtangatgagatgagtggagggagaaggagagaangagcatgaaattttatacctcaaatgacgtctgaactntgaagtgtaaatctaaaatg

SEQ ID NO: 3271 - DNA, 359 bp, Glycine max
  unsure (1)..(359): unsure at all n locations
agctnggcacttgtgatggtgcgagtttatatatatcttgtttcccctgataattattcacgtaaataagtttatattgagatgataattaggcaaaattctttctatgatttttgttagtaatcaacataattaaagaactttntactattgagggaaatcctacaatatttttataaattttgatcatttagattcattacgtaactaattcttaatttataactttgtcatatctaaagtttattgtttccattcgaacttaaaaatcaaacatacaaattatctttcataacctcaatatgtattatcaaataaattatactttntaactnttttttaagataatagagaaacaa

SEQ ID NO: 3272 - DNA, 365 bp, Glycine max
  unsure (1)..(365): unsure at all n locations
agctntgcttctacacttatcagtgatggtgggtcacattnttgtaatgcacagttgcagaatatgttggggcactacaatgtcaagtataaggttgcttctccttatcatccctagacaaatggccaggccgaggtatccaataaggaattaaagaaaatcctggagaagactattacatcctcaagaaaggaatgggctgtgaaattggattatgctttatgggcttatagaactactttcaagactccaattggtttgtccccattttagatggtctatgggaaggcatgtcatccaccgatagagatgaagaacaaggcttactgcgctctcaaattcctcaatnttgatgaatccttatc

SEQ ID NO: 3273 - DNA, 409 bp, Glycine max
  unsure (1)..(409): unsure at all n locations
ttcttatcttcatattctagnggctgctacgcatacaccttttcatttatgaatccatttagaaaggaacccttaacatccatctggtatagtttaatgtttttgtgtgttgcataagctaaaagtattatgatggcttcaagtcttgctactggtgcaaaggtttcttcatagtcaattccatcctttngattgtatccttaagtaaccagtctagccttgtttatgactacttcaataatgcccttgactgttaacttgttggtagctcacactctatgacacttcacacggtgacacttcactcaacttctcgttagtcagaatcctctaccagtcagaatccttcgtaagtagtctttttcgagacctagacaatcttctttgactgctttaagagcaatgacta

SEQ ID NO: 3274 - DNA, 403 bp, Glycine max
ctggatgcattggttaactcggtaacccaactggccttgaaccagaaatctgtacctgtcgcaagggtctgtggattgtgctcctctgctgaccaccatacagacctttgcccttccatgcaacaaccgggagcaattgagcagcccgaagcttatgctgcaaacatttacaatagacttcctcaacctcagcagcaaaatcaaccacagcagaacaattatgacctctgcagcaacagatacaaccctggatggaggaatcaccctaatctcagatggtctagccctcagaaacatcagcagaagcctgctccttccttccaaaatgctgctggcccaagcagaccatacattcctccaccaatccaacaacagcaatagccccagaaacagccaacagttg

SEQ ID NO: 3275 - DNA, 313 bp, Glycine max
cgacagttagtgtttactctgatgtcggataaaggcccgtaaaatatcgagacgctcaatattgaaaacagatgcagtcagcaaattcaaacgacaataacttttgactcggatgtccgattgtgtcccgtattatatcgagacgctcgaaattgaaaactgaagctctgagaaaaatcaaacgacaataactgtttactctgatgtccgactgaatcccggaatgtatcgagacgctcgttattgataacagaagctctgagcaatttcggacgagaataactgttgactcggatgtgcgattgagtcccgt

SEQ ID NO: 3276 - DNA, 342 bp, Glycine max
  unsure (1)..(342): unsure at all n locations
tgctcaccactactagagggaaatcttttanggtgtttcataaaaacctcctcctctaaatcaccattaaaaaaggatcttttcacatccatttgttgcaactcaaggtcaanatgaacaatttataccaagataatacgaagagaatatttcttagatacaggagaaaaattctctgtgtagtctattccttctttttgagtaaatcccttaacaacgagtcttgccttggatctctcaatgttgcctaatgaatccctttggtcttaaagacccatntacaaccaatgacctttaccctattatgcaactctacaaggtttgaanactttgtactctgca

SEQ ID NO: 3277 - DNA, 416 bp, Glycine max
  unsure (1)..(416): unsure at all n locations
agcttctanactntgtacaagaatgaagctctgataccacttgttagacaagtggcctcagatatcttaagaagggggggttgaattaagatattccaatctttttcccctaattaaaaatctatttccctttttactcaagttatgaattcccttaatgacaatcttcttaaatattaattcagacgaagcaactggaatatgaatataaagcaataataaataaaggagattaacggaagagaaaatgcaaactcagttttatactggttcggccacacccttgtgcctacgtccagtccccaagcaacccgcttgagagttccactatcttgtaaattccttttacaagttctaaacacacaaggacaatccttcctttgtgtttagagatcctttacaacaagagactcaca

SEQ ID NO: 3278 - DNA, 437 bp, Glycine max
  unsure (1)..(437): unsure at all n locations
tgcagccgtccgtcgcagacatctcaaattgtgcgcactgtttagttaataaaaaggaaaatnttctcttttacaatttgataaaaacaaaaattatgcaaaaaaatgaattaggttatantaattttttttaaaaagaataattcagtaaataattataaaattatatggtttaaagaatttgtaacagtaatgaatgatataatgatgatcattactatcgtgtatatgtaataacataaaaatagatataaaggttttcttagacaactaacaanaaaagataaaagaattttagattgaataaaaggataaaataaaatttcaaataaaatagtatggataatttaaaaaaaaacttataaaataatntattctccataagttacttcaattagtgtatggaaaataaactactaaaataacgttgtgtactt

SEQ ID NO: 3279 - DNA, 318 bp, Glycine max
agcttgtttcttgctattccaagacactatagagcttcctaatatgtggcatgtcccacctgtgtattttctatataatttgcaacctgcacaatccgaatttaaatagcctattataattaaggtggcacctttatgataccacaaacctacattcgtagtgcctttaggaactcaatgatcctttgaatggttgtaaagatagattccttaagagttctctcggtatctttcacataagtaaacacttagtaagatatcctgtctttttgaactcagtacataagtgatccactcccacctttatatcttgactca

SEQ ID NO: 3280 - DNA, 471 bp, Glycine max
agcttgtggatgttctaagacgtaatattggagcgttttcttggagctcaactgacatgctaggtatagatccaaatttcctccatcacaaattggttttagattcctcggcaaagccagtcatccgaaaatgaagaaagttcggagaggataaaataaaagtaattactgatgaaacaaagaagttgatttcagccaaccatgttagaaaaattcaatatttgacttggctggtgaatgtggtgatggttaaaaagtcaagtgggaaatggataatatatggtgacgtcacaaatttaaacaaagcatgcttcaaggattcatatccactaccaaacatcaatcgcctagtcaatggggcatcatgttgcaaatggcttagcttcatggatgtctacttagggtataatcaaatcaagatgcatcccatggacgaaagacaaacaacttttatagttggataatccaatt

SEQ ID NO: 3281 - DNA, 362 bp, Glycine max
  unsure (1)..(362): unsure at all n locations
cgagggtctcgatatattacgggactcaatctgtcatccgagaanaaagttattgtccgttgaatttgctcagagcatcaacattcaatttcgagcgtctcgatatattacgggactcaatcagacatccgagtaaaaagttattgtcgtttgaatttgctctaagcttcaacattcaatttcgagcgtgtcgatatattacgagactcaatccgacatccgagttaaaagttattgtcggttgaatttgctcagagcatcaacattcaatttcgagcgtcttgatatattacaggactcaatcatacatccgagtaaaaagttattgtcgttgaattactcagagcttcatattaatttcg

SEQ ID NO: 3282 - DNA, 385 bp, Glycine max
  unsure (1)..(385): unsure at all n locations
cgacaataactttttactcggatgtctaattgagtcccgtaatatatcgagacgctcgaaattgaatgttgaacctatgagccaattcaaacgacaataactttttactcggatgtctgattgagtcccataatatatcgagacgcttcgaattgaatggtgaacctctgagccaattcaaacgacaataactttttactcggatgtccgattcagtggtgtaatatatcgggacgctcgaaattgaatggtgaacttctgagccaattcaaacgacaataactttttactccgatgtatgaatgagtcccganatatatcgagacgctcgaaattgaatgttgaacctctgagccaatcanacgacataacttttactcgatgt

SEQ ID NO: 3283 - DNA, 502 bp, Glycine max
  unsure (1)..(502): unsure at all n locations
agcttaacattcaatntcgagcgtctagatatattacaggactcaatcaaacatccgagtaaaatgttactgtncgtttaaattgcttagctctccagctttaaatttcgagcgtctcgatatatgacgggactatatcagacatccgagtaaaaagttattgtcatttgaatttgcttagagattcaacattcatcttcgagtgtctcgttatattacgggactcaattatacattcgagtaaaaagttattgtcgttagaattttctcagagcttcaacaatcaatttcgagcgtctcgatatattacgggactcaatcaggcatccgagtaaaaagttattgtcgtttgaattggctcagagcttcaacattcaatttcgagcgtctcgctatattaccggactatatcagacatccgagtaaaaagttattgtcgcttgaattggctcagagcttcaatattcaattacgagtgtctcgatatattacgggactcaat

SEQ ID NO: 3284 - DNA, 446 bp, Glycine max
  unsure (1)..(446): unsure at all n locations
atcttcttcatcagtggattccttttcttcttggaagatgaatggcaacggaatggagaaggaagagagagaggagacacaacttcaatgagaagatgaatctagaagaagctcaccaccatatgaggccatggataagagcttggaggaagaaggagatgaatgaagggagagggagagaagagcacacaattttatgctctaagagagctatgaaatctgaagtttaattttaaaatgatcaaatttgaaaaatgcacacacatgtgctctatntataacctaagtgtcacacaaaattggagggaacattgaatttctactcaaatttcacttgaatttgaaattgaatttgtggagccaaattctcactaattatgattagtgaattttagttatggttcagcctactaatccaacatcaagcccaagattcttcactaagt

SEQ ID NO: 3285 - DNA, 438 bp, Glycine max
  unsure (1)..(438): unsure at all n locations
gcttatcatcaacatgatccncatttgggtgttcacattaccatttggaatctgtgcttcccaaacctccactttcttcatcaaacaaggtgccatcatgaacagaaatatangcaataatggatttgtggttcccccagcttcaattttcactcttgcagccgttgggatgatactttcagtgaccatctatgacaagctccttgtgccagtgctaagaaaactaacaggaaatgacagaggaatcagcatcctccaaaggattggtattggaatggtcttctcagtcatcacaatgatagtggcagctttggtggaaaaaaagaggcttgaggcagttgaaatgaatggcccattaaagggttctttgtccatgagttgcccttggttggccccacaatttatgatcattggatttggtgatgggtttgctcttgt

SEQ ID NO: 3286 - DNA, 437 bp, Glycine max
  unsure (1)..(437): unsure at all n locations
agcttcgatggagaacaaccttatgttgtagagggtacacgcacggagaagaagataacgggagaagaagaaagcgcgagcaaaataggtggcgtctaatataatttaaattgtaagttcaacatcagttttcaatacaaaagtgatgttaacgttaacatcagttttattcaagaaaccaatgttaactaatcatacattaacatcggttttcagaaacccgatgttaaagtaacttcgttaacatcggttttcttgaaacccgatgttaacgtatatacattattcacaattatgccaccacatttatcttaacatcatntttaaaaaaaaaaaaactgatgttaataaagtctccttatttaaccatttngccaccgtgttttgttaacattgattttatcaaaaaccgatgttaacttaacgatgttaaatgt

SEQ ID NO: 3287 - DNA, 568 bp, Glycine max
  unsure (1)..(568): unsure at all n locations
agcttgtattgaacactacttatatatatatatatatatatatatatatatatatatatatatatatatatatatatatatatattaaagaaactaattngtgtacccaaaaatatgactataccaaaaaagtcactaattcaaaaataaataagtctcattaggtaaatataataaatttaattcattaaaaacttctttaggtgtgatatacattcattcactaaatatatatatttttttttcaaaaatgataacatatatgtcagagtgctcaggattcttcctagtgcatcagtgaatgcttcttggcaattatgtntcctcttcataatatgttatgtatgtttttattacactaataaaaacaattattaaaaaaattattnttcaatatcaatgagtacaaatgaattatgatgtaaaaaatacatatattttttagaaataaatactttaattcgtatcattataaacgtggaaaaaaataaatacctatatagccatgtgttaatatacaagacagtgaggagaaaataaatgtgtaaaagaatatatacatatttaa

SEQ ID NO: 3288 - DNA, 603 bp, Glycine max
  unsure (1)..(603): unsure at all n locations
aaagaaaagcatatagtccatgcgttcaagtttagttttaacatggcacttttacttcgtataatttttcgtttgttttaatgttattacttattagactaagattcgctaagtctcatatntaagttttatgaataaaaagatgtataattaaaagaaaaaatttcattaaaaatgattgaacttgtcttagatgcatngttgcatttgttggaaacaataaccacaatgaaatttaaacttaaaatttcgtacacatttcctaaatttatcaccactaacctaattctaatagttttcttttacataaatatacattgataaagcttcgatacttaattaagtatttagaagacataagagttattcttaatgacttttatacttcaaacgaatatcttatataaagaaaatagaattggttttatatattaagaaatatttatatttttctacttatctataactaaatactcatatcttacataaaagtaatcgttttattcttatttagttaatgagctacaaaaaaagtgcagatattgtttaaaactcgctgatatgagtggttactagaatacctctactatgatagatcatctg

SEQ ID NO: 3289 - DNA, 333 bp, Glycine max
  unsure (1)..(333): unsure at all n locations
ttagtccagacttctaatgctcttaatctctcctcgtctaaatcaactaactcatctgacatcattttccaataatggtcgatcggaatgtccatttgtttttgtactctagctgattgcaaatgtatttcgaccggaagtatagcatcgtgcccataagtcagtcgaaatggggtagtattaagtgattccctatgagaatttctacatgcccatagaacttgatctaacgttntattccaatttcttggcttttgggcaatgtgttttttaatcaagttgaatacaatcttattggctgcttcgacctgaccatttgcttgcgcataatat

SEQ ID NO: 3290 - DNA, 510 bp, Glycine max
  unsure (1)..(510): unsure at all n locations
agcttccttgtcgaatntcaagcgtcgcggtatatgttgggtctcaatgagacatccatgtcaaatgttatagcggtttgaatatgctccagctttcgtgtctctcgatatttaagtcaaaagttattgccgttggaatatccctggagcattggtctttcatctcgagcatctcgatatgttatgagcctcaatcggaaacttgagtcaaaagttattgcaatttggattntccagtagactccttgttcaatttcgagcgtctcgatatattatggaccgcaatcaaaaataaagtcagaatttatgggaatctaaatttgctgggagcttcgatgttcaatttcgggcgtctcaatatattatgggactcatacagacatccgagtcaaacgctatgctagtttgatntttttgggagattctatttcaatntcgagagtcttaatatgttatggcctgcaatcggatatcatagatagaacttatggccattgataattggctgga

SEQ ID NO: 3291 - DNA, 385 bp, Glycine max
  unsure (1)..(385): unsure at all n locations
agcttctaaactntatacaagaatgaagctctgataccacttgttagacaagtggcctcagatatcttaagaaggggggttgaattaagatattccaaacaatttcccctaattaaaaatctatttcactgttttactcaagttatgaattcccttaataacaatcttcttaaatattaattcagatgaaacaatttgaatatgaatatcaagcaataataaataaaggagattaagggaagagacaatgcaaactcagttttatactggttcggccacacccttgtgcctacgtacagtccccaaacaacccgcttgagagttccactatcttgtaaatcccttttacaagttctaaacacacaaggacaatccttcctttgtg

SEQ ID NO: 3292 - DNA, 342 bp, Glycine max
  unsure (1)..(342): unsure at all n locations
cctcatcagcaaaatcaaccacagcagagcaattatgacctctctagccacagatacaaccctggatggaggaatcaccctaacctcagatggtccaaccctcagcaacaacaacagcaacctgctccttccttccaaaatgttgttggcccaagcagaccatacattcctccaccaatccaacaacagcaacaacccctgaaacagccaacagttntaggccacattatttccaataagggtattgaagtagatcctgcaaaaatttctgttatttcacaatngccttacccctcctgtgtgcgagaagagtgatctnttcttggtcatgcaggattctac

SEQ ID NO: 3293 - DNA, 484 bp, Glycine max
  unsure (1)..(484): unsure at all n locations
gcttctaaactttatacaagaatgaagctctgataccacttgttagacaagtgaccttagtatcttaagaaggtgggttgaattaagacacaaaaatatccctaattaaaatataactctctttttaattaataatgaaaccctaattatgaattatttcaagaacaattcacaataaaacttctttaaagcgaaatataaactgcaataaaataaaagaagttaagggaagagagaatgcaaactcaattttatactggttcggccacgccctgtgcctacgtctagtccccaagaaacccgcttgagattccactatcttgtaaaatgcctttacaaagtctgaaccacacaaggacaacccttccctcacattcaaaaatccttacaacataagagaccctctgtcccttaatcaatntctttgaatgagaagaagaaaagaattctctctttaagagaaaatatacaatggaagatactc

SEQ ID NO: 3294 - DNA, 364 bp, Glycine max
  unsure (1)..(364): unsure at all n locations
gaagatatcctaacactttctttgccgctgtctagagctctatacctgaattactctgatatcttccaagcattccaaccacaaatgcaatgtcaagtcttgtacacacctgcgcatacataaagcttcctacaatggaagcatatggaatgtttctcatttgttccctttgaagcttatttttatgacattgattcaaattgaatctatcacctttcacaataggtgtcatgttgggtgaacaatcttcatncgaaatatttctagaactttgttagtattggccttcttatagagcccgagaatcccttgatatcaccatctatggatctctatgccaatgacatatgctgcctcacccata

SEQ ID NO: 3295 - DNA, 394 bp, Glycine max
  unsure (1)..(394): unsure at all n locations
acttaaaattctggaagaagacaactaacaatctttttgaattggaacccgtgaatgctatgccttatgttattgtgtctaacatgcattatgaatctcggaaatgggatgatgttgtgaaatacaaggttggtgaaatcaaaggaataacaaaggagcctggatgtagttggatcaagatgaactacagagtgcatacattcatttctgaagatagaggacatccaaaggaagctgagatttgttccaagattgatgaaatcgtaagaagaactaaggaagctggttatgttccagatatgaattttttgttgcatgacatggattcaganggaaaagaagttggtcttgcttatcacagtaagaaatcggatgttgctttgggattacttgc

SEQ ID NO: 3296 - DNA, 242 bp, Glycine max
cctttatatatttgagggactcatgggcactctgaattacaaattcccttggataaaaagggtgttgccatgttttcaaaacccgtacttaagcgtacaactccttattataaattgaataatttaaggtgagaccactttactttttacttaaataaaccatttgattggcctctttcattaacacaacccccattccaacattttaaacattacactccatttttaaaaaatttttaaaa

SEQ ID NO: 3297 - DNA, 418 bp, Glycine max
agcttccacgttcaatttcgagcgtctccatatgttacgggacttaatcagacatccgagaaaaaagttagtatcgtttgagttggctcatagattcaacattcaatttcgagcgtctcgatatattacgggactcaatcagacatccgagtaaaaagttattgtcgtttgaattggctcagaggttcaacattcaatttcgagcgcctcgatatgttacgggactcaatcagacatccgagtaaaaagttattgtcgtttgaattggctcagaggttcaacattcaatttcgagcgccttgatatgttacgggactcaatcagacatccgagtaaaaagttattgtcgtttgaattggctcacaagttcaacattctatttcgagcgtctcgattgttacgggactcaatcagacat

SEQ ID NO: 3298 - DNA, 332 bp, Glycine max
agctttgagctaattcaaacgacaataactttttgctcggatgtctgattgagtcccgtaatctattgagacgctcgaaattgaattctgaacctcagagctaattcaaacgacaataactttttactcggatgtctgattgagacccgtaatacatcgagacgctcgaaattgaatgttgaagctctcagcaaattcaaacgacaataacttttttcctcgaaggtctgattgagtcccgcaatatatcgaaatcatcgaaatggatttctgaagctttgacctatttcaaccaccaataccttttttttcgaatgttggattgagtcccg

SEQ ID NO: 3299 - DNA, 137 bp, Glycine max
tgggttcatactatgtagctcatcatgatgtatcttttccattccaatgatctatgctttagagccttcttcggatgttacatagctagtggagcatggctgaatgttcaccaggaattctttaacttctgtcatgt

SEQ ID NO: 3300 - DNA, 580 bp, Glycine max
ctggttatcaactcgtcccccgggtggtccattcaacccgtcttttttatgatcttccatgcccatgatgcatcctccaaatccaatgatgaatctgtctcctctaaatgcttctccaatgaaccctgcaggaattggttcttcaccttcgatgctacgtccacctcatttccaacagttctatgatcaacaacaccaccatcaacatcctcagtcttttggacttcctggtcggcctgaatatgatccgtcatccaagtctttcaaaggggtctttgggccacttccatctgatgttgcaatggagctcagtaatgtccttaacaatctgaatggtacaaaagaatccatcaaaggtgcaaaactttggttcatgcagagatctccatttgcaccagccctagcagaagctcttacagatagggtctttgcattggatgaagttgagagacaattacacataatataccttgccaatgacatactttttgacaggtatcatatttgattaattcacatattataaaatgttagaaatgttcttctaataagcagaaaagatggatcacacatacaccta

SEQ ID NO: 3301 - DNA, 449 bp, Glycine max
tctcgatatattatgcgcctgaatcaaactttcgtttcaaaagttattatcctatgaatttctccactgtattccgtgtgacaagttatgaccatttgaatttctcgatagcattcgttgttcaatttcgagcgtctctatatattatgcgcctgaatcggacttccgtgtgacaagttatgaccatttgaatttgtcgagagcattcgttgttcaatttcgagcgtcctcatatattatgcgcctgaattagacattcgcgtgacaagttatggccatatgaatttgtcgagagcattcgttgttcaatttccagcgcctcgatataatatgcgcgttaatcggacttccgtgtgacaagttatgaccatttgaatttctcgagggcttcccgtgttcaatttcaagcttctctatatattatgcgcccgaatcagacttccgtttaa

SEQ ID NO: 3302 - DNA, 379 bp, Glycine max
ttctggtcggtattgatttttggtatatcccttcaacactttcatgtagcgttcaactggatacatccaccacaaaaaaaccggaccacacaacccaatttccctcacaagatgaacaattaggtgaaccatgatgtcaaaaaatgatggtaggaaatacatctccaactggcaaatgacaatggcagcctcattctctaagtcatccaattgttgaggattaatgaatttgctacatatggcattaaaaagaaagcacaaactggttatggcaaccctaactttgtcaggcaagatgccgcgaatcgcaacaggcaataattgttgcattaagacatggcaatcataagacttcaagccaaccaacttaagatcattg

SEQ ID NO: 3303 - DNA, 448 bp, Glycine max
tttttggtctttattgaatgttgagtttgggattaaccacaggctgtgcgaaaagttcttccctcgctgaatggtaaaactactgggatgtccttccaagtcccccctgatgatgtttcaaatgttgacctaactgtcatgctaaagaagccagcatcctatgagcaaatcaaagctgctatcaagttagtttttgaacctttttgaaaatcttttcatttggcagatcgaatcatgtttttttcccgttgacccaacaactttttgtgttcaaatttcagggaagaatcaaaaggcaaactgaagggtattttgggatacaccgaagatgatgttgtgtctactgattttgatggtgataacacgtgatgttgtgttctgaagcaacattggaagataaactatcatgatcacttttttggtgttctcttggtctataatgacttac

SEQ ID NO: 3304 - DNA, 521 bp, Glycine max
  unsure (1)..(521): unsure at all n locations
tagcccatcatcaatattgatttcagaaaaaaaaagcaagtgattatattgaactgagccagaccaaggaaaaatacatcaaagaaaataaataatctagtatagctaattttataatcagataaagcatctgagacctgctgccatgtggtatcaacaggaagctgccgccgagcatcgccagcatcaaaatccagtacaccataatccctcaaccgaatctacacagcaataactaaaatcagaagtctttttgaggattaaatgcatggcattatctataagacacatttttcaaattgagacaaacccgaaggaaggcacggattctttgcaaattcccaacaccaccaccaagagcagcctaccattagataaaaaagcaagcagaaattaagtgttgataacaaatacaaattcatgcttgctctcttatatgaattaagaaataaagaacagcngatataaacaaaaaaaattgagagaagcttgcanagtatttcactatttcttggagcatg

SEQ ID NO: 3305 - DNA, 408 bp, Glycine max
gctaacccatggaagctcctaatatctcctacactttttggagtgggccattcttggatggccttgattttataaggtctccttggaccccatttctaccaactacaaaccctaagaaaactatattatctacacaaaaagtacacttctctatatttgcatagagggtatttttcctaaggactgaaagaacttgcctaagatgtcctaagtgatcatctaagctcctactgtacactaaaatatcatcaaaataaacaactacaaatctacctatgaaatcccttaagacatgatgcataagcctcataaaggtgcttggtgcattagtgagcccaaaaggcatcactagccattcatacaaaccaaacttggtcttgaaagccgttttccactcatcactctttt

SEQ ID NO: 3306 - DNA, 448 bp, Glycine max
tatccccataagagtgcagaacagctggcgagtcagcattgattatatgaggctaatccaggtaaccaaaaaagatcattttcccctgccattcattgatcaaatgcttgagcgcttggcaagtatgtctcattacaatttttttatggcttttctggttatttacaaattcatattgctcctgaggatcaagaaaacaccacattcacctatccctttggcatttttgcctataggaggatgccctttggcctatgcaacgcctctggtaccttccaacggtgtatgcttagcattttcaatgattttttagagagttgcatagatgtgtttatggatgattttactgtttatggatcctcttttgatgcatgtttggatagtctagatagagttcttaatagatgcattgaaactaaccctgtgctgaattttgaaaaatgtcact

SEQ ID NO: 3307 - DNA, 442 bp, Glycine max
agcttcgacatcagaccacttccgggtgctggttctacttcacatggatttgatggggcctatgcaggttgaaagtcttggaggaaagaagtatgcctatgttgttgcggatgatttctccagatttacctgggtaaattttatcagagagaaatcggaaacctttgaagtattcaaagagttgagtctaagacttcaaggaaagaaagactgtgtcatcaaaagaatcaggagtgaccatggcagagaatttgaaaacagcaggttcactgaattctgcacatttgaaagcatcactcatgagttctctgcagccattacaccacaacagaatgggatagttgagaggaaaaacaggactttgctagaggctgcttgggtcatgctttatgccaaagaactttcctataatctctgggctgaagccatgaacacagcatgc

SEQ ID NO: 3308 - DNA, 395 bp, Glycine max
  unsure (1)..(395): unsure at all n locations
agcttnaccattcaatgaacataaaaacttgctaggagacattcataatgctctgaatatagaaatgtatgacagaacaaaattttgttctccaacaaataaacaatcaatcaaatgaatgtttattattattatgctgtaataatttgtgtaattaacagaagacctctagtccatacaatacaccggcgtgttgtcggtgctcatcctttacaaaataaatgtcaacaatcttctggaacgcgtgccacgtgagcaagctgtctgacccagcctggtggcactgccctacggcgcgttccacgttaagcgaccgggcgacgcggtccaatccgccgtagagcgtgtcacagaacctcatcatgtgcttgacatcataaacgttgtgcccaaaa

SEQ ID NO: 3309 - DNA, 318 bp, Glycine max
tctgttttcaattacgagcgtctcgatatattacgggactctatcttacatccgagtaaaaagttattgtcgtttgatttttctcaaagcttcagttttcaatttcgagcgtctcgatatactgtgggacacaatcggacatccgagtcaaaagttattgtccgatgaatttgctcagcgcttctgtttttaatttcgagcgtctcgatattttatggggctctatccgacatccgagttaaaagtcatcgtcgattcattcttcttagagcttcccttttcaatcacgagcgtatccatattctacgggacaccatc

SEQ ID NO: 3310 - DNA, 514 bp, Glycine max
gcttgaaccttgaatcttgattcttgaaatcaactttcctcttgaatcttgaagtgttgttcttgattctatcttgaacatcttgaactcattctttgattgacctttgagctttttgtcatcacctttgtcatcatctttgttatcatcaaaacatctttgaatcaatcttgattcatcatgaagctttgcgtctacagctggatcaacacaattctcatgctaaaagttttagaatggccagggatagattggcagatgatcaagccgataatatcaaattgcaactgatagctgctcggggaaaagatggccatgcatataatatgcctaatgttcccgatattgctgcactaattgttggcgattttcatccaggctcaaaaagagatattattgttgaaactcaaaatggagaattacaaagaatccatgaactgcaccatagctatctaccactacagtaccttctactctttccttatggagaagatggatatagagctgacatact

SEQ ID NO: 3311 - DNA, 727 bp, Glycine max
tcaacaatgattttccatttatcccttcatgttcaggaatattctttcttgcaagctaagaattgttgaacaattacttattgtatgatattgatattttttataaccttcatctgattttaaatctaaaatgataatgtaaagagataatgaggggaaaaactagaataaatattattttcaatttaaattcaaactatcttttgttaatagataacacaataatttttttaataggagagggacaaagaaaaaaaaaacaaaagcaactacaaatgtggaaacttaattcccacacttaatcagcttgaagtggatgtgatcattagtagttgcttcatgtttttctaaaaaatcaactgatacattctattataaagatttaatttgaattttacataagacaaatatgatagttaaaaaaactcttataagataagctatataaagaggtgactgataaaattgtataacacattaaagaaaacattaaatactatacaagcataaaaaatataagattatatatatactatgtgtgtatatataatcaactaatgtaattagcttattcaaattaataatagctataacacgtataaatatttttatatgtataaattaattaaaacatatattggattttctctctccctctctttcggttaaaagaaaagataaattcaattattaaagataatgtgataaatttccttttaattttttt

SEQ ID NO: 3312 - DNA, 566 bp, Glycine max
tgaaatagaacaacggatgccctccagaaattccaatggtcataacttttcacacagatgtccgattcaagcgcataatatatcgagacgctcgaaattgaacaacggaaccagtcgagaaattcaaatggtcataacttttcgctagaatgtacgattctgggacataatatattgagacgcttgaaattgaacaacggatgcgctcgagaaattccaatggtcataacttttcacatggatgtccgattaaggtgcataatatatcgagacgctcgaaatttaacaacagaagctctcgagaaattcaaatggtcataagttttcacatggatgtccgattcgggcgcatgatatattgagacgctcgaaattgaacaaagaaagctctcgataaatttaaatggtcataacttttcacacgaatgtccgattcaaggacttaatatatcgagacgctcaaaattgaacaacggaacctctcgagaaattcaaatggtcataacttttttctcggatgtctgattctggcgcataatatatcgtgatgatcgaaattgaacaac

SEQ ID NO: 3313 - DNA, 576 bp, Glycine max
  unsure (1)..(576): unsure at all n locations
agctttagcttcttaaggaagttttctcaaagaagcttctcaaggaagttttcttaagaaagcttctcaaggaagttacctagtctataaataaaagcatgtgtaacacttgttataactttgatgaatgagagtcttgtaagacacaactcaaagttcaacttctctccctttttcttccttcaatttcgtgctccctcctctctttcttttagcaaatgctcacccccccctctaaaatttaattggattgggcttctcccaattcaattaaatttattttcaaccacacacatcaaatattcacttaatgcatgccaaattagaaaactacccctaatacaaaaaactagtctaggtgccctaaaatacaagagatgaaaaatcttacatttctagggtaccttaactatattgtggagccctaaatacaaggcccaaaaataatgaaaccttaatctaatatgtacaaagataagcgggctcatacttagcctatgggtccgaaatctaccctaaggctcatgagaaccctanggccttctcctgcatctctggtccaatcttcttggagtc

SEQ ID NO: 3314 - DNA, 573 bp, Glycine max
catgcaagcttcaagaattatggcctcatcaaactacttgttttctctaggaaattctataaataaaacttccattttttaaggaatggggtaaccaccactggaaaacccgcatgcaaatctttatagaggcaatagatttaaatatttgggaagccatagaacaaggaccttatgttccctctataatggccggaagtgcaacaatagaaaaacctagagcagattggactgaggaagaaagaagattagtaccatataatttaaaggccaaaaatattattacatctgccctaggaatagatgaatactttagggtttcaaattgtaaaagtgctaaagatatgtgggatacactacaagtaacacatgaaggcacaacagatgttaaaagatctaggataaacactttaactcgtgaatatgaactttttaagatgaatgtaaatgaaagtatacaagacatgcaaaagaggttcacgcacataggtaatcatcttgcatctctaggaaaaacttttcaaaatgaagatctagtaaataaagtcttaagatgtcttaatagagaatgac

SEQ ID NO: 3315 - DNA, 352 bp, Glycine max
tccttgatagaatgtccatccactacaacatgttttgtgcgatcaagacaaactggattgggtgctctagctatgggtgctttattaacacaaaacagatccattggatcttgagctgaacacatgacttactctacctacctcttctaccagaagatgcctcacgctcatatgaccatacctctaaactgcgcttctgcactagataacacaaccaccttctgccttttactgctccgagagacaagatttcctcccacaaatgtgaggtcacctgatatggaatgtttagtagttatactccctgccccatctgtatcaatataaccctgaatgtgctgatgctatcttt

SEQ ID NO: 3316 - DNA, 491 bp, Glycine max
ttttaatggtaaaaggtataagacacccctatgtttttctttaacccaaaaatggccttaccttaggacctgaagtggtacaacaaaccacaaagaaagtcaatttgatccaagaaaggatgcccactgctcaaaataggcaaaaaggttatcatgataaaaagaggaaggatttggaattcaagggtggtgatcatgtattcttgagagtcacgctgtggactagggttggtcgagcattgaaattcccaaaactcacaccttgctttatcggccctttccaaaatcttaaaaaaattggccctgtggcataccaaattgcatttcccccgtctctttttaatcttcacaatgtctttcatgtgtctcaactccctaagtatatccatgatccatcccatgtgattgaattggataacgtacaagtgaaagagaatttgacatatgaaacattgcctttgacgatcgaggataggcgaacaaaacaccta

SEQ ID NO: 3317 - DNA, 427 bp, Glycine max
tgcatgatttacatctccccctttctcaagcaaattcttcttgatatcatcaaaatcttcatgatcccgactcgttggtggaggatgcgtgaatgacaatcaattcatggggctaccaataaaaatggagaatggaggattagcgaataacgctacgcaatcaattcgcggttctaccgactcgttggtggaagatgaatgaatgacaatcaactgatggggctgcgaataaaagtggagaatggaggataggagaatagcgcgtggcaatcaattcacggggctgcagactcgatggtggaggatgcaagaatgacaatcaactaatatggcttcgaataaaagtggagaatggagaataggcgaacagcgctaggcaatcaattcggggggctgccgactcgttggtggaggatgcatgaatgac

SEQ ID NO: 3318 - DNA, 538 bp, Glycine max
tcaacattcaacttcgagcgtctcgttatattatacgactcaattttatctttcgagtataaagttattgtcgtttgaattttctcagagcttcaacattcaatttcgagcgtctcaatatatgacgggactcaatcagacatccgagtaaaaagatattgtcgtcttaattggctcagagcttctacattcaatttcgagcgtctcgatatatgacgggactcaatcaggcatccgagtaaaaagttattgtcgtttgaattggctcagagcttcaacattcaatttcaagcgtctcgatatatgacgggactcaatcagacatccgagtaaaaagttattgtcgtttgaattggctcagagcttcaacattcaatttcgagcgtctcgatatatgacgggactcaatcagacatccgagtaaaaagatattgtcctctgaattggctcagagcttcgacattcaatttcgagcgtgtcgatatgttacgggacttaatcaggcttccgggtaacagatattgtcgtctgaattggc

SEQ ID NO: 3319 - DNA, 534 bp, Glycine max
  unsure (1)..(534): unsure at all n locations
tgaacctaaatatcacaaccatcaaacaaaaaatcaagtcacacacatttgattaaactataacctaagttaacaaaaaaaaattacaactgtcaactggttatcaaggtttaaaaaaaaaagtctgcaacatcaaagtttccaagtggcagggaaaggcggagagctaataacaaaatcaccaaatcaaccaacacaaatctcaatatctatcaactaactgatcgaatttcttcaagcaaaaagctaacatttaacagaattttaccaaaaaccaaggcatcacaaatccgatcgaatataatacaatctcaattcaagccaactgttcaaagattttaccaatctcgacgccaagaccctacatcccgcatatgagaaagttggaaccgaagagcctttgcatgatctctcgcccatacacggcgagttgtcagctgtggagatcctcatcgatgtccggcgggtttgatttgcccaaagccatattggacgctccttcactcgcgtncccgctgttgctgcatatagtgc

SEQ ID NO: 3320 - DNA, 670 bp, Glycine max
tcaacaatacattccttctgaaacgggtcgtatttctcacatgaattgagcctatgtagatatctttcaatatgatacattcaatgatattgcattttttggatcaagtggcctcaaaataattaagaaaggggggttgaattaattattaacgtgtcttgactaattaaaaatttatccttcttaatgttactagattcaatcaagctttactactaagttatgagaaagtaaagaacagaaacaataacttagacaaaagtaaagcgaacacaacaaaaagataaagagtgtagggaagaagaagacaaacacaagatttatactggttcggccacaacccgtgcctacatccagtctccaagcaaccaccggttcttgagatttccaataatcttgtaaaatccattacaagcaaagacccacaagggatgtaccctcccttgttctctttcaacaaccaagtggatgtaccctccacttgaactgatccacaagagatgtaccgtctcttcaatgtctttcttggtcttcctctgttccttttaaaaaaaattaaaaatcatgcaatctacttttagcaccaatgtatccaacatctttctttatatgtttgcaaaccatcttaccaatttttcttttggcatctttttgtggagtcacttgatgc

SEQ ID NO: 3321 - DNA, 513 bp, Glycine max
tcttagtctcggctgatgaagatgaattcatggttacttcatgcactcctctaatgacaatagcatcatttctggcactaaattgttgggagtttgaagccatcttctcaattaaatttctggcttcagcaagggtcatgtctccaagggctccaccactggcagcatctatcatacttctttccatgttattgagtcctttataaaaatattggaggagaagctgctcagaaatctggtggtgagggcaactagcacataattttttaaatctctcccagtattcatataggctctctccactgagttgcctaatgcctaaaatatcctttctgatggtcgtggtcctggaagcacggaaaaatttttctaaaaatactctcttgaggtcttcccagctcgtgattgttggaccttgtggcctcagatatcttaagaaggggggggttgaattaagataacacgaactattccccaatttaaatcttgctctctctctttaattaacaatgc

SEQ ID NO: 3322 - DNA, 438 bp, Glycine max
tggtactacatctgggtttgattcagcattaaaatatatatccttctaatcattacatgatgttgttttgattataatgaattaaatgaagagttcattgttttagggttcaagatgtgtacttgcaggggaccatcttcaacttcctccaaccattcaaagtgttgaagccgagaagaaaggcttaggaagaacgctctttgaacgacttgcagaagtgtatggagatgaaatcacatcgatgcttactgtccagtaccgtatgcatgaacttatcatggattggtcttctaaagagctttacaacagtaaggtactcccagtttttaaagtgtgtctcaagattgcattcattgtaaagcaatctttatatgccactacaaagcataatttatcaatcctgaactgcaaaattctattatgttgggggggtggggg

SEQ ID NO: 3323 - DNA, 618 bp, Glycine max
  unsure (1)..(618): unsure at all n locations
agcttatatctagatgtcaaataaagaagagttctctgcctcatatctttgattatgatttgggtcaaagcaaaccactgtgcaatcaaagttctatctagatcaaggttgtcaaaatattaagtggccttctaatctttaattaacttgtgtgatattaatgtgttttgattatacattatgtttttctttaaaatctattaattggtattttttggatcactatataattgatgtgaagtgtatattaagtttgttgatgattaatttttgttaagaaatttgactgattatttttaatgaaattttttcactaaatcatatatataaagctcaaatctgatattattttaaaaaaaatcaaattcaatttcattcaaattaatgattttttggtatttatttattggtatgaattactaagatggtgcattttgagattgttacgtgttagattaacattaaaattttagattcattaaaccaaactttttttaattttcattttgatcaaaattgagaaaatacgcgggggattcttttttatcatatttttgngatattgngttttgtatgtaataattaataaaaaaaattaaggaggtcaattttttttat

SEQ ID NO: 3324 - DNA, 301 bp, Glycine max
ttttttttgtgaaactatctcatcctctttttcaagtgtaaaatgaagcttgacaagttcaggtgcaagtgctgctactggtggaagcacttgaatttggttgcctgaccacaaagggatggcactcccatttttcgaattttgcacagtttgggaaagcaatttgttataattttgggactgagcttggttcaactgagtagccatctgccccatctgatttgtcagactctgaatggaggctcttgtctcttgctgaaatttcatattctggatggtcatttgcctcactaattcttct

SEQ ID NO: 3325 - DNA, 674 bp, Glycine max
  unsure (1)..(674): unsure at all n locations
tcgagccaaaatcctgactcaccataaacctggacccagggtggaaatgtcaatccttaccctcggaagcaaaaagaatagaaagggaatttccaatcaaaaaaaatagaaagaaaatttcccatggaagccaaaaaagaaaagaaagaaaattccccaatcaaaaagtgggagaaagcaaaaagaaaagaaaggaaattcccaatcaaagaatgggagaaagtaaaaaaggaagaagaagaaggaaagaaagctcctgatcagggatcgaaggaaaaacagaagaaatgtgcagagaggtctttagaccggacaatatctgaacaatacagaattgtcaccaaatgaacaaaaagaaggaaaggaaaccacgacctaaaatggtcttctccctttgattaccaaccaaaatcccgtgcgctagcgactttttcgccccgcactaaacaaaaaaacagaaaaagaaaaagccaacaaaaaatcaaaagccaaaaacacacaaaagccgaaaaacccaccaaaagaacccattcccaagggaagtcctattgatccatgatcacacatgntaattttgatttgataggaaataatttgcaaagtcaagtcatgatatatctatggttcggaattaggatgaaacacttacctgtgcgagattgatacactttgag

SEQ ID NO: 3326 - DNA, 575 bp, Glycine max
cgacctgccggctgcaagcttaaaaccccttgttcattactaaacaagctgatttttttatcacaatcacaagcaagatgctctaacatgtagaagaaaacaaattcaaatgaaatgcaataaaaagtagagaagggaaagaaaggctaagctgcctcccaataagcgctcttttaacgtcattagcttgacgcctctttctgttatccaagatcaaacaaggttcctacttcaagcaccttcttctcaggtctcctttcctccatcccatgcacttttagacagacattttggctaggtggatctttgtcctcatggaacaaatcaaagctgatcttctgatcttctatgcccatttgcagcattttctttcccatgtctacgacgcagctcgcagtagacatgaatcggcatccaagaatgagaggaatgtcaacatcctcttccatatttatgacaacaaaattagctggaaatataaggtgcttatccttcaccaaaacatcttcaatgactccatatgggcttgtgatggagcgggcaactaactggagggtcatgcctgtgggcattat

SEQ ID NO: 3327 - DNA, 604 bp, Glycine max
  unsure (1)..(604): unsure at all n locations
agcttctaaactttgtacaagaatgaagctctgataccacttgttagacaagtggcctcagatatcttaagaagggggggttgaattaagatattcccaacttttctcctaattaaaaatctatcttactttttacttaagttatgaattcccttaatgacaatcttcttaaatattaattcaaatgaagcaacttgaattatgaatataaagcaataataaataaaggagattaagggaagagaaaatgcaaactcagttttatactggttcggccacacccttgtgcctacgtccagtccccaagcaacccgcttgagagttccactaacttgtaaattccttttacaagttctaaacacacaaggacaacccttcctttgtgtttagagattctttacaacaagagactcacagtctcctaatcccttagagaatgagaagaagaagaggaacaaatctctcttgaaagagatggattntacagattgagcactcaattaattccttaatgaattgcaatgaattggccaaggaattctttaagaggataaaatgaaattgctttttgagaggataaacactttgttgttctgaaaactct

SEQ ID NO: 3328 - DNA, 339 bp, Glycine max
  unsure (1)..(339): unsure at all n locations
atgccaccttgtanggttaaagtctcacgattgtcacgtgctttttctactaattacagtcgaggctatacgagacatcttgccaaacagaagtgggttagccataactcgcatgtgctttttcttacatgccatatgtagcaaagtcgctgatcctatcaagtttgatcacctggaaaatgaggccgcaattatactgtgctaggtggagatgttttttccccctgctttctttgacatcatgattaacttgattgtgcatctggtcagagaaatccaatgttgtggtcctgtttatctacggtggatgcccccggttgagtgacacatgaagatctt

SEQ ID NO: 3329 - DNA, 507 bp, Glycine max
gtcacctgccgcatgcaagcttccttcgagcagcaaagccatagagtaaaatggttgtacaagagaaaacctttagtatcaaaaaaagaaggggaaaattaaaggctcgcctagtagcaaaaatgtattcacaattgaggagccttgatgatgaatcttttttttgtaactttatatgaatgatatattgattattggtaaccatttgcatgatgtgaatgagttgaaattcatgttgggtagggagtttgacattaaggacatggatcctaccaagaaaattcttgggatgaagattcatcaagatagaaggtccaaaaaattatggctctcacaacaagtttatgttgcaatgtgctggacaggttttgcatgagtaatgctaagtctgtgaatagtctacttgtaaaccacttcaagctttttgtagattagtgcctaaagatagattaggaagtggaatacatgtcaaaggttccatatgccattggatttggttggttgatg

SEQ ID NO: 3330 - DNA, 419 bp, Glycine max
tgccgccacagagttttccgactatgctcttgtgtggtggaacaagctacaaaaggagagagcaagaaatgaagagccaatggttgatacatggacggagatgaaaaagatcatgaagaagcggtatgtgccggctagttactcaagggacttgaaattcaagctccaaaaactaacccaaggcaacaagggggttgaggagtatttcaaggaaatggatgtgctcatgattcaagcaaatattgaagaagatgaggaggtaactatggctcgatttcttaatggtttgactaatgatatccgtgatattgttgagctgcatgagtttgttgaaatggattatttgcttcacaaagcaatccaagtggagcaacaattaaaaaagaagggagtggctaagaggagttttaccaactttg

SEQ ID NO: 3331 - DNA, 492 bp, Glycine max
agcttcggtattcaatttcgagcatctcgacatattacgggactcaatcgaacatccgagtaaaaagttattgtcgtttgaatttgctcagagatttggtcttcaatttcgagcgtttcgatatattacgggactcaatcgaacatacgagtaaaaacttaatgtcgtttgaatttactcagagcttccgtattcaatttcgagcgtctggatatattatgggtctcaatcacacatccgagtaaaaagttattgttgtttgaagttgctcaaagcttcaacattcaatatcgagcgtttcgatatattacgggactgaatcatacatccgagtaaaaagttactatagtttgaagttgctcagagcttaggcattcaagtccgagcgtctcgatatactacgagactcaatcagacatccgagtaaaaagttattgtcgtttgaatttgcttagagctttcgtcttaaatttcgagcgtttcgatatatta

SEQ ID NO: 3332 - DNA, 449 bp, Glycine max
agcttgacggagtttgtcgcatcggggaacaatttatctttaaaagtgggtcccaattggattcctaattttcaacttacctatttggaagtgacatcatggcagttaggtcccagctttccattgtggattcagtcacaaaaccaactttaatatgttggactatctaacacggggattttcgattctattcccacacagatgtgggaagcactttctcaggttttgtatttaagcctctctcgtaatcatatccatggtgagattgggactacattaaagaatccaatatctgtcccaactattgatctaagctcaaatcacttgtttggtaaattaccctatctttcaagtgatgtgcttcagttagatctttcaagcaattcattctctgaatccatgaatgactttttatgtaacgatcacgacgagccaatgcaattagaatt

SEQ ID NO: 3333 - DNA, 611 bp, Glycine max
ttgatgtgttctaaaagttggttatggaattcagagaatgcatgtaatattctgaatgcttatgtgatactttatgaattgcttatatttttaaaacttataacttgttatttattattttataattattatttataggttctagatcaattgaagaatcaacgtttactgatgagattgaatccgatgatgaaggtatattcacttttagtggttctaattttttttaatatcattatacatatctaatttttcaaattttttaaaatataggtggatctttggtcagtaacattactcaatgtttgcaagattagtagacattattgttgatcggtaaagtaataactatacttatttactaatgtgatgtgtgattttaagatttgaaacatctaaaatatgatgtttgattttataaataccaagttgagcgcttgagaagaaatgttaatgacatgtttggtgaagttggtggttattttgatgatggacattggtttcattttctatttatttctaatttggtgtaatttgaactaatgaacatttgaattatggtgcttcatatttgacggtatttatttacccttaaaaaaataatggaatca

SEQ ID NO: 3334 - DNA, 450 bp, Glycine max
ttagacgcactataccaacctctaggatccagggacggccaattatctatatataggcttgctaagggtagagagaggaagactagagatttggatcaagtaaggtgtgttaaggataaagaaggcaaagtcttagtgcatgaaaaagatatcaaggaaaggtggaaggcgtatttccacaacttatttaatgatggatatggatatgactctagcagtctagacacaagagaagaggaccggaactataagtactatcgtcggattcagaaacaggaagtaaaggaagcgttgaaaacaatgagtaacggtaaggcggtggggccagacaacatacctattgaagtgtggaaaactcttggagatagaggtcttgagtggctcaccaaactctttaatgaaattatgaggtcaaaacgcatgccggaggaatggaggagaagcatgtta

SEQ ID NO: 3335 - DNA, 416 bp, Glycine max
agctctgacaagacaagacacactgctgtcttgttcaacaagataaaacagagaaatctattctaaagatacatataattataacccataattataatactccccttcaagctggagcatataaatcgtatgcaccaagcttggaacatataaactgaatcctaggcccccttaaaggtttactcaaaatatctactggctgatcattagagttaatgaattcagtgacaatctctttagacaatagcttcttccgaataaagtgacagtcaatctctatgtgcttggtcctctcatggaagactgggtttgaagcaatgtgaagagcagcctgattatcacaatataacttcatttgcaccactttgcaaaaattcaactcttcaagaatttggttaacccacataagttcacac

SEQ ID NO: 3336 - DNA, 348 bp, Glycine max
  unsure (1)..(348): unsure at all n locations
cattgcataccatatctgcagggagaaatcttactactttatgaactgttaaacggtcggtcagacagagaacaataattgacaagatttaagtaggtttctaccttctctctgctcttaggccactcaattgggcgtttataaccttcacgaacaggaacaatgcangtaggacgttcttcaggacagtgcctttctcgatgttcatagtgtttactactctggagactcctaatagcctctcagttattgaggccaggtataaaatcaggaccagcagtgacattacaaagcttccacttgtatccaattggctgcttggaagactcttgagaatccttttcattc

SEQ ID NO: 3337 - DNA, 470 bp, Glycine max
  unsure (1)..(470): unsure at all n locations
actaagcttgatcttcactaattgacactaatcttttcttccacatcttgtacattacaggatatgaacaatcgtatgaagattggtacagttgaagtgagacacgacctttaccacctcacactagaccaaataaccaccaaagccgtatgctccactattattcatcctctgtcataccccatttttgacccgtttttatttcttttttctcgtcttttaagccggaaatttccatcatttcagatgaaatttcggcagggaggtattttaaaatacctcatttttgttttgaagacgcccctttttttattattattatttatttatttaccttttttattattattattatttntatttttagttattattttcttttcttttcctttcctggttataagtgttttttattatttccgtnttttttattattatctttattagtatcttctnnttcgtttttttcg

SEQ ID NO: 3338 - DNA, 460 bp, Glycine max
  unsure (1)..(460): unsure at all n locations
atatttcttgacaacatccatcatgcctgcactattcatgattcttcttttgtatgaataggccaaaatggtgatagttcaacaacttttcctataataatcagcgttggtgacaccagctgagcagatgtaattttctcgtgaaggtcctttagttcagcaaacacctgcatcatagcaaaataatcagctattggacctagcatccggaaaagttgaattaagaaccagctatatatagattcacacacaattgtatttatttatcagtttttaatatcaaccatgcagaagtacaaaataaaatgtctcaaattcacaactacctcctaaaacaaaacattattaagatcactatatcctattagccttgactgtagtgtcaggtacactttcttcacacccctcacattcaatctttaattgttgaatatcttttactacagntaatttgtcaaga

SEQ ID NO: 3339 - DNA, 385 bp, Glycine max
agcttgtaattcctgatccttatataacatatgttgtaaaggttgggactggaacgagtcaccaatggctttcttgaggagagagacatgaaagatcggatgaattttactgtgagatggaagatccaacttataagcaacaacacccacctagtttaacacttggaaaggaccataaaaccgaggggagagtttttcattaatccttttagccaacgatcttcttctgtaaggttgcatcttcaagaacacccaatcactgactgcatattctatgtcccgacggcgtttgttgacattcgctcacatgatatcttgagacttcaacaaattttctcttagagtagccaataattcattccgagcaattgttagtttattgact

SEQ ID NO: 3340 - DNA, 402 bp, Glycine max
  unsure (1)..(402): unsure at all n locations
tggacctgngtgttgtccagattcatcatatcttctgtaatactcatcacctctatcatatctaataattttcacatttatgtctaattgcccttttatttcattgtagtaaatttctaaggcatacattgcctaagaaatctcgggcagtaagtagacataaccgtaatgtgaataatcatcaataatggtgataaaatatcattcctttccgaaagaactaacatcaaaaggtccacaaatatcagtatgcacaatttcaagaagctgagtgcttcttgtagctcttttctttgtatgttatgcttgttttcccttaatacaacccacacaaatatttagatccataagatccacataaggaagagtttcattctttattaatctttccatcctttctct

SEQ ID NO: 3341 - DNA, 317 bp, Glycine max
  unsure (1)..(317): unsure at all n locations
agcttgtgcctcttcacgtgtganatatgaatgtagcatatagatctaaagacccttatgtgctttgctgatggcttcttgccgttccaagctgtaattggagtcttgttttttacagcttagctggacatttgttgagtatgtaaacagcagtgtagactgcttcacctcaaaatgtgctagggccgcccctcctccttgagcatcgatctcaccatctccataactatgcgattctttctctcggatactccattttgttgaagagaatatgcgactgtaagttgccgctcaatgcctttcatcctcataaaatc

SEQ ID NO: 3342 - DNA, 390 bp, Glycine max
  unsure (1)..(390): unsure at all n locations
tctatataatgttcgttcctaatttctctacaattgcatcacctctcaatgagctggtgaagaagaatgtggcatttacctgnggtgaaaaacaagagcaagcctttgctttgctcatagaaaagcttactaaggcacctgttctagctcttcctgacttttctaaaacttttgagctagaatgtgatgcctcttgagtgggagttggagctgtattgttacaaggtgggcaccctattgcttantttagtgaaaaacttcatagtgccaccctcaactaccccacctatgataaagagctntatgccttaataagagccctccaaacttgggaacattaccttngttccaaggaaattgtcattcatagtgatcatcaatcacttaagt

SEQ ID NO: 3343 - DNA, 217 bp, Glycine max
aagttatgaccatttgaatttcctcagagctacctttgttcaatttcgagcgttttgatatattatgcgcctgaaacggacctccgagtgaaaagctactaacatttgaatttctcgagagcttcccatggtcaattttgagcgtgtcgatatactatgcgcctgaatctcacctccgcgtgaaaaggtatgaccattttaatttcttaagagcttc

SEQ ID NO: 3344 - DNA, 352 bp, Glycine max
  unsure (1)..(352): unsure at all n locations
gcttctcgatatattatgcacatgaatcagacttctgtttgaaaagttatgaccatttgaatttttggagagcttccgttgtgcaatttcgagcgtcttgatatattatgcccctgaattggacttccgtgtgataagttatgaccatttgaatttctagaaagcttccgttgttaatttcgagcgtctcgatatattatgcgcttgaatcggacttncgtgtcataaggtatgaccatttgaatttctccagagctttcgccggtgaatttctggcttctcgatatattatgcacctgaatcagattttcgttttgaaaggtatgaccattttaatttctcgagagcattc

SEQ ID NO: 3345 - DNA, 372 bp, Glycine max
agctctgatgcaacatatggagaggttaatgaatttacaagatgatgcgctccatgagaggttggatcaaatggagaatagagatcataatgaagaagaaaggaggagaagagggaatgatcgtgttcctagacaaaaccgaattgatggtattaaactcaacattcctccatttaaaggaaagaatgatcccgacgcctacttggagtgggagatgaaaatagagcatgttttctcatgccacaactatgaggaggaccacaaggtgaagcttgcccgcacggagttttccactatgctcttgtgtggcggaacaagctacaaaaggagagagccagaaatgaagagcccatggttgatacatggaccgag

SEQ ID NO: 3346 - DNA, 448 bp, Glycine max
tatatacagaaatgcttggattgtctacaagctaaatcaaactatacactgccagcaggactactccaacctttacctattcctcaacaagtttgggaagatgtagccatggatttcatcacaggtttaccaaattcctttggattatctgtcataatggtagtcattgatagactcaccaaatatgctcatttcattccattaaaagctgattataacagtaaggtggtagcagaggcatttatgagtcacatagtcaaattacatgggataccaagatctatagtgtctgatcgagatagggtttttaccagtactttttggcaacatttattcaagttacaaggtactacattggccatgtcatcagcttatcatccacagtcagatggacaatctgaggtgctgaataaatgtttggagatgtatcttagatgcttcacgtatg

SEQ ID NO: 3347 - DNA, 445 bp, Glycine max
  unsure (1)..(445): unsure at all n locations
tctactcttcttctccttagtctcctcttcagccatcccagttatgtgttagacaagtggcctcagatatcttaagaacgagggggttgaattaagatattcgatactttttcttctaattaaaaatctatcttactttntacttaagttatgaattcccttaatgacaatcttcttaaatattaattcaaatgaagcaacttgaatatgaatatacagcaataataaataaaggagattaagggaagagaaaatgcaaactcagttttatactggttcggccacacccttgtgcctacgtccagtccccaagcaacccgcttgagagttccactaacttgtaaattccttttacaagttctaaacacacaaggacaacccttcctttgtgtttagagattctntacaacaagagactcacagtctcttaatcccttagagaatg

SEQ ID NO: 3348 - DNA, 364 bp, Glycine max
gcttaacatcataccacttccacggtgctggaactacttcacatttacttgatggggcctatgcatgttgaaagccttggaggaaagaggtatgcctatgttgttgtggatgatttctccagatttacctgtgtcaactttatcagagagaaatcagacacctttgaagtattcaaagagttgagtctaagacttcaaagagaaaaagactgtgtcatcaagagaattaggagtgaccatggcagagagtttgaaaacagcaagtttactgaattctgcacatctgaaggcatcactcatgagttctctgcagccattacaccacaacaaaatggcatagttgaaaggaaaaacaggactttgc

SEQ ID NO: 3349 - DNA, 397 bp, Glycine max
  unsure (1)..(397): unsure at all n locations
caaagaaatagtgtggctttatggattaccgaggagcattgtcagtgatagggatgcaaaattccttagtcacttttggaggaccttgtggggtaagattggtactaaattgttgttttctactacttttcacccacaaactgatggtcaaactgaggtagtcaataggactttangaacactgcttangactgttttaaagaanaatcttanatcttgggaagcctgtttgcctcatgttgagtttgcttataatcgagctgtccatagcacaactaattgttcaccatttgagatagtatatggatttaatcctttgactcctcttgatttgttgcctatgcctaacattgctatgtttaagcataatgatgcacaggctaaagctgagtatgtg

SEQ ID NO: 3350 - DNA, 346 bp, Glycine max
cgtaatcattcaatgcattcataatacagccacattctttcatagctgctctaaaaaaatgaaacagtcatcatctgagagtaggtaagatataataggtacacccctacagattttgatgccatgagtatgtcttcacccttctaacttcttaataagagcttaaatcccttcagcataaaggatgaacagaaaaagagaaaggggatatccttttctgagaccccaccatcggatgataagacccaccaagctttcattgacagtaacatagtactagacagattggatgcgaatcaaaatccacttaacccaagttgcactaaatcccattttggtcttgaca

SEQ ID NO: 3351 - DNA, 428 bp, Glycine max
agtgattccaattgaatccctacatcttctatgttccagaaacaattaagctaagatgccaaagagaaaatcgttgcctataaaaatagacaaatcctctatgcattagaagtctcaaagtgaccaatgagcaaagagctcaagtggcaacagcatcagacttcattttgattcctgttacaaactcctgaccctttccgttgcctcaattcctaggtctacacagcctcccttggaacctggaaaaatctattaaactaatattgtatatttttatgacttcagatggaagttttgaatatgctataggattttgttagtgaaaggaggtcttaaaacctgcaaaacataagccagcatccctacaggcaagagcagtcatcatcatgtgtgaaccatccagtgaatgtacgaagtttggaggaaat

SEQ ID NO: 3352 - DNA, 336 bp, Glycine max
  unsure (1)..(336): unsure at all n locations
gaatcgttacacatatactgttatcgattaccagagcagattttcagaanatattctcatttgtcacatctttttatgtggttcttgaatggctatcaaaggcctatatatatgtgacttgagacacgaatttgctaagagtttttcagaacaaaaaggtcttatcctcttataaagcaaaatcgttttatcctcttacaaattccgtggccaaattacttgtgattcaataaggaattatttgagtgctcaaattgttcaatctatctctttcaagagagatttcttcttttcttcttcttcattctgaanagggattaagagaccgagggtctc

SEQ ID NO: 3353 - DNA, 399 bp, Glycine max
ccctctgctgcggctaagctatcttgaaagaagtgcattttcttgcttttgtccgtagaatatgcccccattcttcggcaatacatctgaagatgaccatttggacacgtcgcctctttgtatttatcaaaatctggtactttaaacttgggaggaatgatgatgtcaggtaccagacacagatcccgctaattcgagaacgggtagttgctgaggccttctaccactcttagcctctcttcaagtaaatcaatctttcccttgtctattgcaaagggaacaagttccttaacgggtgatgatggagacaggacgtggcggactatgtttggttggggcaactcatggggggccgaatccttgatgagaagtagagggcctaaatgagcatcttcttca

SEQ ID NO: 3354 - DNA, 398 bp, Glycine max
  unsure (1)..(398): unsure at all n locations
agcttcttcttgtttctctcttcatttgaaacctttattcttcttgagcacttcattgagaggcgctgccaatgtgctaaaatccttcacaagtcgtctataaaaacttgctaagccatgaaaactcctcacctcggtcacagacttaggtgtccgccattcttgaatagccccaaccttctcctcatccacttgcactccttttgaactcacaacaaaaccaagaaacacaatatggttagtacaaaagatgcatttttcaagattggcatacaattgttcttctctaagcacagcccagacagattctacatgatcaatatgcaaatcaagtgaagtgctatagataagaatactctgaaagtacaccacaacgaantttcctatgaactctctta

SEQ ID NO: 3355 - DNA, 182 bp, Glycine max
ccatcttgggatgttcccagcctttgatgacagctttacaggttctgctatccagtgatttgaggaagggcaccattcttgctttccagtattcatagctggttccatcaagaagtggtggtctgcgcactggacctccttctttctccatgttcataagaatttatctccctacatctcac

SEQ ID NO: 3356 - DNA, 429 bp, Glycine max
agcttaagctccttcaactgcacaaggcttttaatatttgaagagtatccttgtggaaccttcacccgacgaagacactgacaaaaacttatcttctcctttttggacaaagtatggcaagctgggggcaagtaaattatcttcccatcacaccttggatgcaactgtgatcgtatgcccatatcacctagatcttgaccggtattctagccatccttcgtcttgccttgaatgttaaggagcgtcccaatgacactgtcacaaacatttttctccacatgcataacatccatacaatgtctaacgtcaagatcagaccagcacggaagatcaaagaaaacggacctcttcttcaatatgcaactctgacttttatccttcttttgggtcttctcaaatacattatctaggtgttgaacccgctgatat

SEQ ID NO: 3357 - DNA, 313 bp, Glycine max
agctgtgagcaacttcaaacaacaataactttctactcggatgtctgtttgagacccgtaagatatccaaacgctcgaaattgaataccgaagctctgagcaaatctaaacgagaataagtttttactccggaagtcagatgtgaggacccgtaatatatcgagtcgctcaaaatggaataccgaagctgtgtgctaattccaaccacactacctttttactcggatgaatgattcagtctccgaatatatacaaacgctcgaaatcgaatacccaatctctgagcaaatttacacgacaataactttttact

SEQ ID NO: 3358 - DNA, 441 bp, Glycine max
agcttctgataaaaaccgagcagttctaataagatttgtcatacgaatacccttacgctttgcagatatataaggcgacattttacgattccattttctagtaccgcggccaaaatgaactcctgcttccatcatctcttccaagattatgtccccatatcttcttgtcatttatatttatccccacacttttctttcatttcaaaatcgaaattctataaatcttttgaaatgaacaaaacagacccggtatactgaaatagaaataagtgttccaaaggaaccttctcttctaccgaagattggccttcgataaacgatcgggccatcttttctatttcatacttaatatgaccattctctttattatctttcttttattacacaacatcaaatgaccgaagatgaatccgctcttaagaatcattattttacgaatta

SEQ ID NO: 3359 - DNA, 410 bp, Glycine max
  unsure (1)..(410): unsure at all n locations
agctntgaatgcactattcattggagttgacaatatcatcttcagactgatcaacacttgcacagtggccaaagatgcatgggagattctgaaaatcactcatgaaggaaccttccaagtgaagatttccagattgcaactcttggctacaaaattcgaaaatctgaagatgaaggaggaagagtgtattcatgacttccacatgaacattcttgaaattgccaatgcctgcactgccttgggagagaggataacagatgataagctggtgagaaagatcctcagatccttgcctaagagatttgacatgacagtcactgccatagaggaggccccagacatttgcacatgagagtacatgaactcattggttctcttcacacctctgagctacgactctcggatagggc

SEQ ID NO: 3360 - DNA, 397 bp, Glycine max
  unsure (1)..(397): unsure at all n locations
agcttcatgatgatgattctagtatgaatcaagttgttntgatgatgacaaacagtccaaaagaatgatttcaagattgagtcaacaagttcaagatcaagattgatttcacgattccagagaagaaatcaagacgacttccccagggaagtactgaaaaggacttttccaaaaccaaacatagcgcagttttgttttacaaaagagttttctcaaaattttctaagttaccagagtatttactctctggtaatcgattactagtttcctgtcatcgattaccagtgataaagtttcatttcacaagctcttaactgaatttgcaacattccaaatgatctttaaatggtgtaatcgattacaatatattggtcatcgattaccagtgtatctgaac

SEQ ID NO: 3361 - DNA, 415 bp, Glycine max
agcttaagacttcaagatctgaactccttatttctttgagcatttcgtgcaagcttcattcaaggtaaggggggtctttccacttcttgaaccctaaccttgtttttggaagctaggcttcattgcatgttgtattgatgtttaaaattatgtatatgttgccatgactaaaactgtgtaatatgttttttttttcttgaatttttaaggctaaaatgagttttttgggtattaaaacttacggttagccttaagtttcccttatatcaaagttttctagcaaaagttatgaataaaacaagtttaaggactttctgtatgaaattctgatactgcggacagatgtcctaccggatgtcacgacatcacgctctacaacatgcagattgtacttgactgtatgaacacattaaac

SEQ ID NO: 3362 - DNA, 213 bp, Glycine max
cagcttgtgcctccttacgtctggaatatgaatgtatcatatacatccaaacacccttaagtgctttgctgatggcttcttcccgctccaagctctaattggagtcttgtcttttacagacttagctggacgtctgttgagtatgtaaacagcagtggcgactgcttccgcccacaatgtgttatgtagtcccttttccttgagcatcgatct

SEQ ID NO: 3363 - DNA, 426 bp, Glycine max
  unsure (1)..(426): unsure at all n locations
ggtttctggaccgagaatcatctntgcaaagagccattttggagcaattgggctatctgaggattggtgcctttctgctgctgattacctaaactgtgccctgctccattttccattctgttacctagggcttccaattggaatcaatccgagaagaaaggtggtgtgggagcctataatcagaaaatttgaggctaggctaaataaatggaaccagagaaacatttcgatggctagtagaatcactctaattaatgttgtcctaacagcattgcctttgttctatctgtccttcttcagggcccctatagcagtgattaatagattaactgccatccaaaggcactntctttggggtgtgtaattggaagggaagaaaattgcttgggtagcttggagacaggtgtgtgcctctagagaaatggg

SEQ ID NO: 3364 - DNA, 396 bp, Glycine max
gcatgcaagctctggcgagaaatatacctttgagcgggtgtttgcaaggttggtttgactaatgttgtgagcatcaaagtgccaggcctcggggaaggactcatccgcttgtgttcccatccaaaccgcaagcatgatttccccattattatgaattttttggcccttcttgtcctccaatatgtaccattgaggagccaaggggctgtctgggggtacccgaagaggaacctcagtgagatcaaacataactctccccacaaaatcatccttgacaatgtccttatccttgacggcgactctaagcaaatttgattgcagcctgtccttggagaaggcgaagatttgattccagacagggttctggctcttgtccaagtgcttggtgaggccctt

SEQ ID NO: 3365 - DNA, 397 bp, Glycine max
  unsure (1)..(397): unsure at all n locations
tcaacctcagcagtttaatcaaccacagcagagcaattatgacctttccagcaacagatacaaccctggatggaggaatcaccctaacctcagatggtccagccctcagcaacaacaacagcagcctgctcctttcttccaaaatgttgctggcccaagcagaccatacattcctccaccaatccaacaacaacaacaaccccagaaacagccaatagttgaggcccctccacaaccttcccttgaagaacttgtgaggcaaatgactatgcagaacatgcagtttcagcaagagaccagagcctccattcagagcttaaccaatcagatgggacaattggctactcaatngaatcaacaacagtcccagaattctgacaagctgccttctcaagct

SEQ ID NO: 3366 - DNA, 311 bp, Glycine max
agcttctaaactttatacaacaatgttgctctgataccacttgttagacaagtggcctcagatatcttaagaaggggggttgaattaagataatgcacactattctccccattaatactctatttccatttcaatgccagctgcaagttcccttacaaacgaactcttaaataatgatttcaatacaacaacctgaatataaatctcaagcaataatatactcaatagtttaagggaagagaaagtgccactcatattatattggtttggcacacccttgtgcctacgttaatcccaagcaaccccttgag

SEQ ID NO: 3367 - DNA, 415 bp, Glycine max
catgcaagcttctgttttcaatttcgagcgtctcgatattttacggcgctctatccgacatccgagtgaaaagttattgtcgtttgattcttctaagagcttcccttttcaattacgagcgtctcgatatattacgggacacaatcggacacccgagttaaaagttattgtcgtttgaatttgctcacagcttctattttcaattaccagcgtctcgatatattacgggactcaatcggacatccgagtaaaaagctattgtcctttgaatttcctcagaccttctgttttcaattacgagcgtcctgatatattacgggactcaatcggacactcgagtcataagttattgtcccttgaatctgctcacagcttctattttcaattacgagcgtctcgatatattaccggactc

SEQ ID NO: 3368 - DNA, 418 bp, Glycine max
gcttcatgcacatgaagtcaagtttcttgcttctaaaagggattgttagtttggaagcggtgttctcttctaccaccgtctcatcaagggtttgatcttttcagacgctgttgggttcaaaggttgccgagaaattgaagggccttatgttgagtatcttgcagaacagtttgggaagcctgttttgctttcaggacctttcatacctgagccacccaacactgtttttgagggaaaatggggttcatggcttgaaaggttcaagcttggttctgtggttttctgtgtacttgggactgaatggaagttaccacatgatcaattccaaggactattgttgggtcttgaacttacagggcttccttttttggctgttctaaaagttccaattgggtttgagacaattgaagctgctcta

SEQ ID NO: 3369 - DNA, 441 bp, Glycine max
  unsure (1)..(441): unsure at all n locations
cttgctatcccatggaagctcctaatatctcccacactntntgtggtgggccattcttggattgccttgattttatcagggtccacttggaccccatttctaccaactacaaaacctaagaagactatattatctacacaaaaggtacacttctctatatttgcatagagggtttttttcctaaggactgaaagaacttgcctgatatgtcctaagtgatcatctaggctcctattgtacactaaaatatcatcaaaataaacaactacaaatcgacctatgaaatcccttaagacatgatgcataagcctcataaaggtgcttggagcattagtgagcccaaaaggcatcactagccattcatacaaaccaaacttggtcttgaaagcggttttccactcatcaccctatttcatcctgaattggtgataaccactttta

SEQ ID NO: 3370 - DNA, 212 bp, Glycine max
cgtaatatatcgagacgctcaaaattgaatgttgaagctctgagcccatatacacgacaatgaccttttactcggatgtctgattgagtcccgtaacatatcgagacactcgaaattgaatgttgaacctctgagcatattcaaacgacaataactttttactcagatgtctgattgagtcccgtaacttatctacacacttgaaattgaat

SEQ ID NO: 3371 - DNA, 450 bp, Glycine max
  unsure (1)..(450): unsure at all n locations
ctagaacgtgatgaacttcagtcattattctaatagcaccattatgcattatatatagntaaattattctattaattcttcctctactttattaattctatttccaacttattttttatggaaatttaatgtaaaatatattctattttttctgttatatcactcaatatttcttaattattaaaaaaagaacgagttatatttgattattattctattaaattcaaacaattntattttcaaaattttcctctatttttagaagttgtattcttaatcaattatttcattcttcttttaacattctttaataactattataatattatttaataacgtactatgaaaaataatcaatcaatttatttcatttctttttagtattttttaattaacaatatatctttgtaggtaatatatgtatgctatatcagtttttcagagcaatga

SEQ ID NO: 3372 - DNA, 306 bp, Glycine max
  unsure (1)..(306): unsure at all n locations
agctagngaatgtgttcgggtttggtgttcatgtattttttctttcctacacctgatctagcgagagtatatantcttatccatatgctaatctgattttctatgatcaattgcagtgttagtgtgtttggcgtctcaacataactaatgcagtgttcctatgattcacaaggaaacagcgcccccactattctactgctaatgcgagaatgattatactcacacgatggcctacacgtacgtaccaataatattatatactctgtcatttgagccattgactatgattgcgtcactgactatcat

SEQ ID NO: 3373 - DNA, 436 bp, Glycine max
acgacaataactgtttactcggatgtctgattgagtcccgattatatcatgtatctcgaaattgaatgttgaacctatgagccaattcaaacgacaataactatttaatcggatgtctgattgagtcccgtaatatatcgagacgctcgaaattgaatgttgaagctttaggcaaattcaaacgacgataactttctactcggatgtctaattgagtcccgtaatatatcgagacgctcgaaattgaatgttgaacctatgatccaattcaaacgacaataactatttactcggatgtctgattgagtcccataatatatcgagacgctcgaaattgagtgtgatcctctgagccgattcaaacgacagtaatcttttactcggatgtccgattcagtggtgtaatatatcgggacgctcgaaattgaatgttgaa

SEQ ID NO: 3374 - DNA, 436 bp, Glycine max
agcttcaacattcaacttcgagcgtctcgttatattataggactcaatttgacatccgagtaaatttgttttgtcgtttgaatttgctcagagcttcaacattcaatttcgagcgtctccatatattacgggactcaatcagacatccgagtaaaacgctattgatgtttgaatttgctcaaagcttcaacattcaatttcgagcgtctagatatattacaggactcaatcaaacatccgagtaaaatgttactgtcgtttaaatttgcttagctctccagctttaaatttcgagcgtctcgatatatgacgggactatatcagacatccgagtaaaaagttattgtcatttgaatttgcttagagattcaacattcatcttcgagtgtctcgttatattacgggactcaattatacattcgagtaaaaagttatt

SEQ ID NO: 3375 - DNA, 437 bp, Glycine max
agcttatcgtaaccgattacacatttatttttgagacaatgattgattttttaggagtctctgctttaatccattaccagtagatataatcgattacttctctcttaaaaagtgtttcagaagtgatcaagaacactttaatcaattacatcaaaaatctaatcgattacattgttcttgaaagttttccaatttttgggaagaacactttaatcaatcaaaatggtaataatcaattacttctttgaaataattgattacattgtatatttaattgattacaggcagttattacgagctggtataagctagaataacattattagaaaatatgttttttacatcggttatttatgactttcaacatcggtttttaaatcgatgttgaaagtaccgacgttgatagtattattggtaacatcggttttttaaaaact

SEQ ID NO: 3376 - DNA, 402 bp, Glycine max
  unsure (1)..(402): unsure at all n locations
tagagctaattcaaacgacaataactntctactcggatgtctgattgagtcccgttatatatcgaggcgctcgagattgaatggtgaagctctgagcaaattcagacgacaatatctttttacacggatgtctgattgagtcccgtaatatatcgagacgctcgatattgaatgctgaacctctgagctaattcaaacgacaataactctttactcggaagtctgattgagtcccgtaatatatcgagacactcgaaatggaatgttgaagctctgaggatattcaaacgacaataactctttactcggatgtgtgattgagtcctgtcatatatcgagacgctcgaaattgaatgttgaagctctcagcatattcaaacgacaataactttatactcgaat

SEQ ID NO: 3377 - DNA, 328 bp, Glycine max
  unsure (1)..(328): unsure at all n locations
agcttcaacattgaatntagagcgtctcgatatattatcctgactcaatcagacatacaagtaaaaagttattatcgtttgaaaatcctcagagcttcggtattcaatttcgagcgtctcgatatattacgggactcaatcagacatccgagtaaaaagttattgtcgtttgaattagctctgaggttcataattcaatttcgagcgtctcaatatattacgggactcaatcagacattcgagcaaaaagttattgtcgtttgaattagctcagagcttcagaattcaatttcgagcgtctcaatatattacaggactcaatcagaca

SEQ ID NO: 3378 - DNA, 425 bp, Glycine max
  unsure (1)..(425): unsure at all n locations
agctngccaaattcttattatttagcagtcccaatataattnttagattgggagaaataataaatcgttactatatcattatgagaaatacaaccaatctgtgttctaaacaaataattaaagaatacctgaatcaaccatacaacattctcactgtacaaatcattattcactatccaactggctagttggtcccactcactttgcttcctaccatatattgatattctatattcagccatctgtgaataaataaggcacagaaataagttaacatctagatggggataagcatatataaacaacagtcaagaaatggtaaattatagtcaacaagtcaaaacacattggccaacataggtcctcatactcatgaacatattattgcactattgngtagtggtaaataaagacgcattgtaatt

SEQ ID NO: 3379 - DNA, 378 bp, Glycine max
tagttgtaccatgtttagtttacttgagatcagatggcagaggtgtgaatattggtttggcatcaaccatcttagccttttcaagcaaatcataaatatatttagcttgagataacaatagagaaccattactcaaatgttttacttcaatacccagaaaataatccaagtttcctagctgtttaagagcaaaaacaacatgtagtttggtaattaagtttcaaataagaactggagatgaccctgtgatgataatatcatcaatacatatcaacagataaagacacttagaatcagtgttgaacactagaagggatggatcacactttctttgaacaaagccaaaagtcagtagtgttttggttaatctttcatact

SEQ ID NO: 3380 - DNA, 357 bp, Glycine max
  unsure (1)..(357): unsure at all n locations
tccaagagttgaggcgattgacaacagctccaatgttgattntgtccgaccctaagagaccatttgaagtgtattgcgatgcgagcgggcaaggcttanggtgcatattgatgcangagggaagggtanttgcttatgcttcacgcccattatgtcctcatgaagttaactatccgacccatgacttggaactagcagctgtggtctttgccttaaagatttggaggcactatttatatggcactcgttttgaagttttcagcgatcacaagggcctcaaatacttgttcgatcagaaggaactcaatatgaggcaatgaagatggatggagttcctcaaggattatgactttggtc

SEQ ID NO: 3381 - DNA, 455 bp, Glycine max
  unsure (1)..(455): unsure at all n locations
gcaagcttctaaactntatacaagaatgaagctctggattcatcttgttagacaagtggcctcagatatcttaagaaggggggggttgaattaagatatcccaaattactttccacaattaaaaatttatttcactttcttttcaagttatagattcccttaacaatgaacttcttaaatattaattgaaataaaacaatttgaatatgaatgtaaagcaataataaacaaaggaggttaagggaagagaaagtgcaaactcagatttatattggttcggccacacccttgtgcctacgtccagtccccaagcaatccgcttgagagttctactatcttgtaaattccttttacaagttctaaacacacaaggacaatccttcctttgtgtttagaattcctttacaacaagagacccacagtctcttaatcccttagagaatgagtagaagaag

SEQ ID NO: 3382 - DNA, 460 bp, Glycine max
  unsure (1)..(460): unsure at all n locations
ggaatcttctaccccatttctgacagccaatgggtgagtccagtttaagtggttcctaagaagacatgcctcacagtgattaagaatgagaagaatgagcttatccccacaagagtgcagaacagctggcgagtctgcattggttataggaggctgaaccaggtgaccagaaaatatcattttcccctgccattcattgatcaaatgcttgagcgcttggcaagtaagtctcattactattttcttgatggtttttctggttatttacaaattcatattgctcctgaggatcaaganaagaccatattcacctgttcctttagcactttttcctataagaggatgccctttggcctatgcaacgcccctgataccttctagtgatgtatgcttagcattttcagtggatttttagagannnncatataggtgtttatggatgattttactatntatggat

SEQ ID NO: 3383 - DNA, 451 bp, Glycine max
agcttccttaagaagattcctaaagaagctagagcttatctacacatactctctctaatagctaagctcacctccttgagatgagaagctagagcttagctacacaccccctataatagctaagctcacccccatgacaaaaaacatgaaaataaaaaaaaagtccttattacaaagacaactcaaaatgccccgaaatacaaggctaaaaccctatactactagaatggccaaaatacaaggcctagacgaaggaaaaacctattctaatatttacaaagataagcgggctcatacttagcccatgggctcaaaatctaccctaaggctcatgagaaccctagggcctttccttggatctctagcctaatctacttggagtcttctaaccaatgcccttgcggggtaggattgcatcacatacgatatgtcattaagtaatgcatttcag

SEQ ID NO: 3384 - DNA, 432 bp, Glycine max
agcttcttagtttcagatgatgcagatgggtttgtttctacctcatgctctcctctaatgactatggcatcatttctggcactaaactgctgggagttggaggccatcttctcaattaaatttctggcttcagcaggagtcatgtctccaagggctccaccactggcagcatctatcatacttctctccatattactgagtccttcataaaagtattggagaagaagctgttctgaaatctgatggtgggggcaactggcacatagtttcttaaatctctcccagtactcatacaggctctctccactgagttgtctaatacctgagatatccttcctgatggctgtggtcctggaagcagggaaatttttttctaagaatactctctaaaggtcatcccagctcgtgatggaccttggagcaaggtaatac

SEQ ID NO: 3385 - DNA, 362 bp, Glycine max
aaattatcttttccattattcaatacaaatcatttacagcctaagatatgaagatgtgagatgttcggttatatgccattgaacaattcatatggcagtttctttacaatgggtcttattaaagccctatataatatgtagcatgcagtgctaacgacttcagcccaatagtattttggaagaggagtatcatataataaagttttagcaatctcttccaaagatctatttttcctttcaacaacaccattttgttgacgggttctaggtgcagaaaagatatgctcaatcccatgcttatcacaaaatattttagattctttattctcaaactcacgcgcatgatcactcctaatagatat

SEQ ID NO: 3386 - DNA, 431 bp, Glycine max
agcttatgctgcaaacatttattatagaccccctcataagcaaaaccaacatcagcagaataattatgatctttcaagcaacagatacaatccaggttggaggaatcatccaaatttgagatggacaagtcctccacaacaacaacagcctgtccctaccttccagaatgttgttggtccaagcaagccatatgttcctcctccaatgcaataacagtagcagaagtcacaacaaagacaacaagcaactgaggctcctcctcaaccttccttagaagagttagtgaggcaaataaccatccaaaatatgcaatttcaataagagacaagagcctccattcagagtctgacaaattagatggagcatatggctactcagttaaaccaagctcagttccaaaattctgacaaattgccttcacagactgtgc

SEQ ID NO: 3387 - DNA, 415 bp, Glycine max
agcttgactactttggtactgatcatattctcggattaaatgatgatcaatgtcaatgtgcttggattgttcatgatgagtacagcttgaagcatgacttatagcaaatttattattacaaaatatcatcacagagggcacatcaactttaaagtaaagaagtaacttgcttaaccaaacaatttcactagtaacagaagacaaggcaagatattcagattcagtggatgattttgaaacaatgggttgtttcttagaacgccaagaaagaaggttgtttcccagaaagacacaaaagccagaagtggatcttctggtatcaacacagctggcccaatcagcattagcaaaggcagtgaggttgagagagttctgagcagatttgatatattgcagaagatgatgaacaacatgt

SEQ ID NO: 3388 - DNA, 439 bp, Glycine max
  unsure (1)..(439): unsure at all n locations
tgctaacccatggaagctcctaatatctcccacactttatgatgtgtgccattcttggatggccttgattttctcagggtccacttggaccccatttctaccaactacaaaacctaagataactatattatctacacaaaaagtacacttctctatttttgcatagagggtgtttttcctaaagactgaaagaacttgtctgagatgtcctaagtgatcatctaggctcctactatacactaaaatatcatcaaaataaacaactacaaatctacctatgaaatcccttaagacatgatgcataagcctcataaaggtgcttggtgcattagtgagcccaaaaggcatcactagccattcatacaaaccaaacttggtcttgaaagcagttntccactcatcaccctttntcatcctgatttggtgataaccactttta

SEQ ID NO: 3389 - DNA, 433 bp, Glycine max
  unsure (1)..(433): unsure at all n locations
agcttcttggaggaccaaattgcaaggaagctattctcgaactaaatgcttcagatgaaaggtacatttttgtaatttctcaattcagttttcaattctggacgatttcctgttaatttatcctttcacttttggttatagatgacttgctccacggttgaactcactgttcaataggtggagaagttgagggaaatgagtccactttatgaaattgtcaaggaaggtatcaacatcaaggacattcaatgggcacagcactgattattatcaagctctcagattgcaatgcaagtgatgggaagcaattgtgattgaactccagacgtagctgccactcttgcaattgcagattcttcgaacttgctgattatntagtaatttgtatctcgagggtacattacaattagaaatttaccctggcagagctatt

SEQ ID NO: 3390 - DNA, 361 bp, Glycine max
aagcttctcgatgtattatgcgcctgaatcggacatccgtgtgaatggatatgaccattggaatttcttattagcttccgttgttcaatttcaaacttctccatttattatgcgcctgaatcggactttcgttgaaaagttatgatcaattgaatttcacgagagctttggttgtccaatttcgagcgtctcgatatattatgcacctgaatcggacttccgtgtgacatgttatgaccatttaaatttctcgagaccataccttgttcaatttcgagcgtctcgatatattatgcgcttgaatcggacatccgtgtgacaagttatgatcattggaatttgtcgagagctttcgatgttc

SEQ ID NO: 3391 - DNA, 422 bp, Glycine max
  unsure (1)..(422): unsure at all n locations
agcttctcgatatattatgtgcctgaatcggacttctttgtgacaagttatgaccattngaatttctcgacaccatacgttgttcaatttcgagcgtctcgatatattatgcgcctgaatcggatgtccgtgtgacaagttatgaccatttgagtttctcgagagctttcgttgttccatttccagcttctcgatatattatgcgccggaatcggacttccgtgtgacaagttatgacgcattgaatttctcgagagctttggttgttcaatttcgagcgtctcgatatgttatgcacctgaatcggacttccgtgtgacaagatatgaccatttgaatttctcgagagcattcgttgttcaatttccagcatctcgatatattatgcgtctgaatcggactttcgtgtgacaagttatgac

SEQ ID NO: 3392 - DNA, 435 bp, Glycine max
  unsure (1)..(435): unsure at all n locations
agcttcaagaaaaatggcctctatatactccttanttccataacgaaattctatcaatagacctccaattnttaatggagagggttaccactactggaaaacccaaatgcaaatnnttttttatgcaatagacttaagtatntgggaagccatagaaatagggccatatatacccactacagtagaaagaattacaatagatggtagcacatcaagtgaaagcataccattagaaaaacctaaagatagatggtctgaagaggatagaagacgagtacaatacaatctaaaagccaaaaacataataacatttgccctgngaatggatgaatatttcagggtttcaaattgtaagatcgctaaggaaatgtgggacactctacaattaacacatgaaggaactacagatgttaaaagatctatgataaacacact

SEQ ID NO: 3393 - DNA, 414 bp, Glycine max
  unsure (1)..(414): unsure at all n locations
agcttgaaattgacaacggatgctctcgaganaatctattggtcataaattttcacacagatgtccgattcggggaaataatatatcgagactcacgaaattgaacaacggaagctctcgagaaatttgaatggtcataacatttcactcggatgttcgatccggggacataatttatcgagacgctcgaaattgaacaaccgaagctctcgacaaattagaatggtcgtaacttttcacgcgaatgttcgattcggggacataactcatctagacgctcgaatatgaacaacggaagctctcgagaaatttgaatggtcataagttttcacacggatgtccgattcgggaacataatatatcaagacaatcgacattgaacaacggaagctctcgagaaaatcgaatggtcat

SEQ ID NO: 3394 - DNA, 402 bp, Glycine max
agctttgatttcctttgttcctgttacctttcttttctcatgtgcacccaaacccaatctccgggttcgaagacaaccttctttctccctttgttggcttgtttagcatagcttttatttttcctctcaatttgatctttgactctctcatgaagcttcttcacatagtccgcctttgcttgaccttctttatgcttaaaaacagaaacattaggcatatgcaaaagatcaagaggagttagtgggttaaaaccataaacaacttcaaaaggagaacaattagtggtgctatgaacagctctattgtaagcaaattcaacatggggtaaacaagctctcccaagttttaagttcttcctcaaaactgtcctaaacaaagttcccaaagtcctattaacaact

SEQ ID NO: 3395 - DNA, 433 bp, Glycine max
  unsure (1)..(433): unsure at all n locations
tctcgcgaaatattggttctaatatggtactaattgcatatttatgggcttgtacagatccaaaatanttgtttagtggagacaataatttttttatcaatggcaataaaaacaccacaacaactatcatttatatagatagatagataaatatatacccaaatattgttattgatccataataaatttttcttcatttttgttccctgatatttgacatggttttttaaattgtagtcattagttaagtgatgacatgtcactactaaaaaatagggtttcaacattggttattaaggactttccacatcggttattaaccgatgatgaaagtaccaacgttgaaagtaatatcgttaacatcgattttccaaaaccgatattaatataaaattacaacatcggttattgaaataactgatgttatataata

SEQ ID NO: 3396 - DNA, 435 bp, Glycine max
gcttctcgagaaattcgaatggttataacttttcacacaaatgtccgtttcggggactttattcatctttactctcgaaattgaacaacgcaagctctcgagaaattcgaatggtcataacatttcgcacaaatgtccaattctgggacataatatatcaagacgctcgaaattgaatagcggaagctctcgggaatatcaaatgggcataacttttcacatggatgtccgattcgggaaaataatatatcgagatgctccaaattgaacaacgaaagctatcgagatattcgaatggtccgaacttttcgcacggatgtccgattcggggacataactcatctagacgcacgaaattgaacaatggaagctctcgataaatctgaatagtcataagatctcacacggatgtccgatttggggaaataatatatc

SEQ ID NO: 3397 - DNA, 458 bp, Glycine max
  unsure (1)..(458): unsure at all n locations
tctanactntatacaagaatgaagctctgataccacttgttagacttgtggcctcttatatcttaagaagggggggttgaattaagatattccaaactacttccccaattaaaaatctatttcactttttattcaagttataaattaccttaataatgaacttcttaaatattgattcaaataaaacaatttgaatataaatataaagcaataataaacaaaggagattaagggaagagaaagtgcaaactcagatttatactggttcggccacacccttgtgcctacatccagtccccaagcaacccgcttgagagttccactatcttgtaaattccttttacaagttctaaacacacaaggacaatccttcctttgtgtttagaattcctttacaacaagagacccacggtctcttaatcccttagagaatgaggagaagaagaagaatgaatctc

SEQ ID NO: 3398 - DNA, 439 bp, Glycine max
agcttgccttgccccttgatatatttgagggactcatggtcactatgaatgacaaattccttgggataaaggtagtgttgccatgttttcaaagcccgtactaaggcatacaactccttatcataagttgaatagttaagggtaggaccacttaacttttcactaaaataagcaattggatggccttcttgcatcaacacagccccaatcccaacatttgaagcatcacactcaatttcaaaagatttttgaaagtttggcaacgcaagtatgggtgcattagttagcttttccttaagaacattgaaagcttcttcttgtttctctccccatttgaaaccagcatttttcttgagcacttcattgagaggtgctgccaatgtgctaaaatccttcacaaattgtctataaaaacttgctaagccatgaaaactcctca

SEQ ID NO: 3399 - DNA, 403 bp, Glycine max
cgagtgtgaatgccttgctgagggcgttgtggggacagaggtattataactcttaagacgattatgattgttgggaagaaaggggttggggggaataagaagcctatgtttgttcagtttgtgttggagcccttgtggcaggtgtatcagggggccttggaaggggataaggggctggtggagaaggttattaggacctttagtttgtcggtgccgcagcgggagctgcagaacaaggatgtcaaggttgtgctgcatgcggttatgagccgctggcttccgctttcggaggcggttttgtccatggtggttaggtgtttgccggacccggtgacggcgcatgcatttaggatatccaggttgattcccaagaaggaggttattggggatgtggagggggttg

SEQ ID NO: 3400 - DNA, 444 bp, Glycine max
  unsure (1)..(444): unsure at all n locations
agcttgaaagaagaaaattagtaattaatgtaaggttagaaattaagtggtgataattaaggttgattaatggtgatctagatttcatagaattagaaaataggtaattaagtcttaagagtttaaagttgagagtatttttgtaaatgaccatacgactagtttaaaaatagaattttagtttaattagtgtctgattatatatatggaataattaaaatatgttagagttgtaacaccctgaaaaattataactcaggctgatagaggaaactctatgttgtgtcatctgtgcatgtgtgtatataattgcaatgattatgtgtttttaattattaatttttgtgctatatatgaatatattttgtgtaaataatttgtttagtctagcttggcagagatacgagaactgcctaaatgaaaattccatttgtaacanaattg

SEQ ID NO: 3401 - DNA, 460 bp, Glycine max
  unsure (1)..(460): unsure at all n locations
agccgacctgctgcatgcaagcttgttcgtaagtctcatcccatatcgagggctcaattntcttgagtgttttgttaaatggcttcaccttctcagcaagcttcgggaggaacctagacagggatgctagcctaccatttagtttttgaacttcttagtcgttgatcgagttgtgcatctccaatatggcagtgtatttatgggggttagcttcaatcccctggtaagtgatcatgaagccaatgaacttgcctccgcttaccccgaaagtacatttttcagggtggaggcgcatgtcatatttgtggagttccccaaagacttcttccagatccatcatgtgttaggctatgctttgagacttgatgaccatgccgtccatatataactcgacgtttcatccaatctgttgtttaaatacttggtccatcagccgttggtatgtagcgcatgcattttt

SEQ ID NO: 3402 - DNA, 434 bp, Glycine max
  unsure (1)..(434): unsure at all n locations
agcttatagaatatataatataataacaatgacattttgtgagtctatacatgtttcctttgatgagtctaatgccattctaccaaggaatgattttttagatgatatttcagattccttagaagatacacatattcatggaaatgaatctaaagaaaaagatgaaggaagcaatgaggattctcaagataatggggctagaggaaataatgaacttccaagagaatggaaagcctcaagagatcatcccctcgacaacattattggtgatatatcaaaaagggtaacaactagacattctcttaaagatttatgcaataatatggcttttgtatctatgattgaacctaanaatataanagaagccatagtagattataactggataattgctatgcaagaagaanctgaatcaattgaaagaaataatgtgt

SEQ ID NO: 3403 - DNA, 420 bp, Glycine max
agcttcttgacatcctggaggactatttgaatatttattttgggcctaaaacgtatgagagagtggatggatctgtttcagttgctgatcgccagtcagctattgcacgctttaaccaagacaaaagtcgatttgttttcttgttatccactcgctcttgtggacttgggataaatttggcaactgctgacactgtcatcatctatgattctgatttcaatccccatgcagatatccaagcaatgaatcgagcacacagaattggacaatcaaatagacttttggtataccggcttgtggttcgtgctagcgttgaagagcgcatcttgcagcttgctaagaaaaaattgatgctcgatcagctttttgtaaataagtctggatctcaaaagaggtagatgatatttaaaatggggactg

SEQ ID NO: 3404 - DNA, 439 bp, Glycine max
gaccttgaaactcagcttatgagagagtcaagatcatttggaggataataaaactttgctaaacagccacaaagggagatagaagttgtcttcgaacccggagattggtgttgggtgcacatgataaaagataggtttccggaacaaaggaaatcaaagcttcaaccaagtggagatggaccatttcaagtgcttgaaagaatcaatgacaatgcttacaaagttgagctgcccggtgagtataatgttagttccaccttcaatgtctctgatttatctctttttgatgcagatggagaatccgatttgaggacaaatccttctcaagagggagagaatgatgaggacatgaccaagagcaagggcaacgatccatttgaatgacttggacgacctatgacaagggcaagagcaatgaaagccaatgaagctcttctac

SEQ ID NO: 3405 - DNA, 460 bp, Glycine max
ctcaagctgcacccggaagcctaatttaaacgagatcattttgttcaagctcgcacctcgcgtagcttgaaggcttagagggttgggtcgaccctcattttcacacaaaataaaacaaagaattaaatttgaagaatcttgcaaggtgatggtgaggagtgtgagctagccgacgatggcaataatgtggtcttgtagggcggaagagaggatttttcaactaatgaggatgaatatcttgttgttgttgttgaagatggagatggtcttgatgaccttggagagctcgacggggagtgagagaggaagaggaggtgggcgaaggtgatgaagcaacgttgggtgtcgaagggatgatggtttggcaggggagtggaaatctatgagagggagatgcggatggtgtcgagggtgctcaaatgcaaatgatgacaataacatcacagatgggagaacaaat

SEQ ID NO: 3406 - DNA, 453 bp, Glycine max
tgtattgatttaaaacaaaaatgtaaaacatgtattcaagcaaagcaacctataatgggttttactacatgtattgaaagagaaactaacttacttgaattagttcatagtgatgtatgtgataataatgatgtgttaacacgtggtagtaagagatactttattactttcattgatgatttctccaaatattgctatgtgtatttagttaatcacaaaagtgagttgtttaataagttcaaagtatataaaatagaagtagaaaattaattagaaagaaaaattaaaattctttgttttggtagagggggataatacatatttttatatatgaataatttttttgaaatgcattgtattattcatgaagtgacatctttgtatgcttctcaatctaatggtattgcagaaagaaagaatcgtaccttgcttgatatggtgaatgttatgctt

SEQ ID NO: 3407 - DNA, 433 bp, Glycine max
  unsure (1)..(433): unsure at all n locations
tcagtccctgaganactggttcccagaagacatcagggagtgattattgctgangaccctagctctgcaacaagtcctagggaagtagacccggagatggacaagaaaatccgcagtattgtgagtagcattctgaaagatgcttctgtgcctgatgctgagaaagatgttccaacatcttccaccccaagtgtttccgtgcctgatgctgagaaagatgttccaacatcctccgctccaaatgctgaagccctcccgtcacccagtgaagaggaatcaacagaagaagaggatcaagcctcagaggagactcctgcaccacgggcaccaganactgctccaggtgacctcattgacctggaagaagtcgaatctgatgaagaacccattgccaacagggtggcacctggcattgcggaaagacttcaaaaca

SEQ ID NO: 3408 - DNA, 445 bp, Glycine max
tctagaatggtgtaccagatgatcgtggccccatccaagctatcttggaagaagtgcatcaacaacttctcatccctggaatgtgcccccatcttgcgacaatacattttgagatggttctttggacaagttgtccctttgtacctatcgaaatcaggtaccttgaatttcggggggatgacgatgttcggtactaagcaaagatcagtcatgtccgcaaacggatagtcgccaaagccttcaacagccctcaatctctcttcgatgagatcgagtttcctcttttcttctgctgccgtgcgtagccctcctgtggacaaaaatattggctgtgctggggagtttcgaggttctcccatgaggttgggctgaggtagtgcgttgggtgccggcccctcggcagggaatggggagtaggaatcaatgtctccttgggcatgccctc

SEQ ID NO: 3409 - DNA, 430 bp, Glycine max
tgcaagcttctcgatatattatgcgcctgaattggacttctttgtgacaagttatgacaattttaatttctcgagagcattcgttgttcaatttcgagcgtctcgatatattatgcgcctgaattggacttccgtgtgattagttatgaccatttgaatttctcgacagcttccgttgttcaattgcgagcgactcggtatatgatgcgcctgaattggacttccgtgtgacaagttacgaccatttgaatttcttgagagcttacgttgttcaatttcaagcttctcgatttattatgcaccttaatctgacttccgcttgacaagctatgaccatttgaatttctggagagcttccgttgtgcaatttcgagcgtctcgatatattatgcgcctgaatcggacttccgtgtcataagttatgaccatt

SEQ ID NO: 3410 - DNA, 453 bp, Glycine max
  unsure (1)..(453): unsure at all n locations
cttgatgctagtgttgaatgtgttaaaggtaaacagaccaaaagctagaaattaggtgcatatagagctacatacgtcttggaattgatacatacggacatttgtgggtcatttcatacatcttcatggaatggtcatcaatattttatatcattcatagacgattactccagatatgcatacttatttcttatacatgaaaagtcacaatctttggatgtgttcaaaacatttaaagttgaagttgaaaatcaactcaacaaaagaatcaagagtgttagatctgaccgtggtggtgaatactatggttgatatgatggttcaggtgaacaacgtccggngccttttgccaagtacctagaggaatgtggaatcgtcccacagtacaccatgtcagggtcacctagcatgaatgatgtggctaaatgacgaaacataactcttaaggatatg

SEQ ID NO: 3411 - DNA, 435 bp, Glycine max
agctctgatgcaagatttggagaggttaatgaaacttcgagatgatgctctccatgagaggttggatcaaatggaaaatagaaatcataatgaagaagaaaggaggagaagagggaatgatggtgttcctagacaaaaccgaattgatggtattaaactcaacattcctccctttaaaggaaagaatgatccggaggcctacttgtagtgggagatgaaaatagagcatgttttctcatgcaacaactatgaggagaaccaaaaggtgaagcttgccaccatggagttttccgactatgctcttgtgtggcggaacaagctacaaaaggagagagcaagatatgaagagccaatggttgatacatgggtggagatgaaaaggatcatgacaaagcggtatgtgccggctagttactcaagggaattgaaattcaa

SEQ ID NO: 3412 - DNA, 475 bp, Glycine max
  unsure (1)..(475): unsure at all n locations
ctatagaccactcaagcttcatgatgatgaatcaagttgattcaagtagttctgattatgacttagatgatgacttaaatcccaagagaatgatttcaagatggagtcaacgtgttcaagatcaagataaaatcaagattaatttcgagtttcatgaaattacatcaagaagaatcaagattcaagagaagatgacttcacaagggaagtgttgaaaagaatttttcaaaaatcaaacatagcatatttttgttttacaagaaaagtttttctcaaaattttctaaggtaccagaggttttactctctggtgatctattaccagtttcctgtaatcgattactagtggcagagtttgatttcaaaagcttttaactaaatttgcaacgttccaattgattntcaaatggtgtaatcgattacaatatattggtaatcgattaccagtgtatctgaacgttgaaattcagattcaa

SEQ ID NO: 3413 - DNA, 433 bp, Glycine max
tcttatccaaggctcatcttggtggtgaagctcttttttccatggcttattccttaatggatggcgcctcctctcacctcttctcctttgtcttccgctgcatctccatggtgaaaaatcaccattgaaggacctcattgaagctcaaagatccagcctccatagaagctccacaagctagcttccatcaagaaaaaaaaaaaagtccttactacaaagactactcataatgccccgaaatacaaggctaaaaccctatactattagaatggccaaaatacaaggcccaaacgaagaataaacctattctaatatttacaaagataagcgggtcatgcttagcccatgggctcaaaatctaccctaaggctcatgagaaccttatggccttcccttggatctctaacccaatctacttggagtcttctaccca

SEQ ID NO: 3414 - DNA, 440 bp, Glycine max
  unsure (1)..(440): unsure at all n locations
nggccgccacggagtttccgactatgctcttgtgtggtggaacttgctacaaaaggagagagcaagaaatgaagagccaatggttgatacatggacagagatgaaaaagatcatgaggaagcggtatgtgccggctagttactcaagggacttgaaattcaagctccaaaaactaacccaaggcaacaagggggttgaggagtatttcaaggaaatggatgtgctcatgattcaagcaaatattgaagaagatgaggaggtaactatggctcgatttcttaatggtttgactaatgatatccgtgatattgttgagctgcaggagtttgttgaaatggatgatttgcttcacaaagcaatccaagtggagcaacaattaaaaaggaagggagtggctaagaggagttttaccaactttgattcttctggttggaaagaca

SEQ ID NO: 3415 - DNA, 437 bp, Glycine max
agcttgacattggagtcaatcgtcgcctagacggtttgtgcacacgcttcattcttagccatattgttggtgcagtcaaaccccagtctggctataaaaggtatacattgattgtctagagagaccaatattgttccaacgccatggcctagaatgtttgaagctccgtcaaaccacacgatccacttgtcccgatcctcgtctagcttttcctcaaacaaggccatgatgtcctcatccgggaattcgggatgcatgggttgatagtcgttgagaggctgctgagccaaataatctgccaaggtgcttccttttatcgccttttaggtgacatagactatatcgaacttggatagcaaaacttgccaccgggcgatcctcccagtgaaagcatgcttctcaaagatgtacttaaccgggtccatcttggatatcaa

SEQ ID NO: 3416 - DNA, 424 bp, Glycine max
  unsure (1)..(424): unsure at all n locations
ntagaagttggggtcacttattatttaactcattgatttgccgttaaaactaatggaaaaacgagagtgtgtaatatttttgtttttcgtcttgtatgaacatccttcagtaaaatgaacatttctctctatatgattaactttggattttgagtcatacctcatccaaatctagacatacatgactttttatactggtaaagtttataaattttttgtatatgataagtataagttatgcaatagttctataaattctctatagaagacaaaaatgtaaacttgagttttaatataaatgtttaatcagataaatatatctatgtataaatttggtttgagttggattagattgaatttcaaaatgaaatccaaaatctgattttatccaaaaaaaatgggttattatattttaattgtcaac

SEQ ID NO: 3417 - DNA, 411 bp, Glycine max
tggttacctctttcttcactatacatcaagaatcaccgggttgagtcttctctgtggttgtcttactggtttagcctcatcttctaaatttattcgatgcatacatgtggatgggctaataccaggaatatctgccagggtccagcctatagctttcttatgcttcttgagaacaaataacaacttctcctcttgctcatcagcaagggaggcagatataattactggaaaacttttgccatcatccaagtaagcatattttaaattagatggtagaagcttcaattctggtgtgggcggctggatagtggtagaaagagatggtttctcagcctacacctcataaagaaagtccaggtatttgtacttacttgaacatggttagtttgatctgactctataaaatcaatc

SEQ ID NO: 3418 - DNA, 332 bp, Glycine max
ctggaactacttcacatggacttgatggggcctatgcaagttgaaagtcttggaggaaagaggtatgcctatgtgggtgtggatgatttctccagaattacctgggtctactttatcagagagaaatcagacacctttgcaactgtcgagcacttccacatctttggaagtccatgttacattttggcagatagagagccaaggagaaagatggatcctcagagtgatgcaggaatattcctgggatactctacaaacagcagagcatatagagtgttccattccagaaccagaacagtgatggaatccatccatgtgggtggtgatgatct

SEQ ID NO: 3419 - DNA, 535 bp, Glycine max
agcttgtattacttatattacaataaaaaatttgtattacttatatgtacaaatgaatgtgtatagtttttataaattatgtaaaataatttatatgaataattttaatacatataatcctttgtatataataatcttgaatatgattgtttttcgtaaataataattatttttctgtgaatgataattgtgatctttaccttaactaaaaaatatgtggttaaaaaatatgtttaatttttttgaaacacagcactcagtttttctccaaattaaaacagataatttaaactaaatgtaatttatatttagaattgacataacaaagaaataacatagtatttgaaatgaaaaaaaaaactgagaaataaaacgtcaataatagagtttaaaattatatcattccctagcaataaaactaacaactatactttcaaatgattttattaatatcatgttaaatattaaaaattttttaatactatgatattatttagaagtaggtcttataagatgatatatctcattgaatcta

SEQ ID NO: 3420 - DNA, 510 bp, Glycine max
tcttatccaagctcatcttggtggtgaagctccctcttccatggcttattccctagtggatggcgcctcctctcacctattctcctttgtcttccgttgcatctgcatggtggaaaaccaccattaaaggacctcattgaagctcaaagatccagcctccatagaagccccacaagcaagcttccatcacatatggaactattaaaaaaatcattagtaaaaaaaacataaagttattgtgatagtaatttgttgaacaatgaaatagttatttgttagaaataaaaaccaaaattgtagttgtattttggtcattacattaaatttttattagaattagtgttgtcaactttatatatttcacaaaaaatctatatgcatttatcaatatatttaagtaataaaaaaagtttatgaataaataataagacattggttatgaattattaaattgggattgattgaagtattgcttgaacgctcacaaattattatgaatcctttaatgtg

SEQ ID NO: 3421 - DNA, 493 bp, Glycine max
tataactgcatggtgtgccacaataactgataagatgcaaaataaatttagaaaaaaatcattattccctagatacctattaattgcaagagagaaatgatctaaaaatagtattatctaatgtaagctgaatggctgatccttcaagaaatgtatataatcatttcctataattattagaaattatttcttatttattactgttactattgtttgaattaaattaaaaagaaaataatatacagataggacaaggaatctttcctaaaagacaaaaacagacaagaaagctttcttttttctttacttaaaattatagcattcctctcttagtaaattcaccaaactcctgcaattcagatgttaaaacacagaatcctacttcataagccttatctgggctcagatttaatgagtcaaaatcctaatataattagcaatttactcaatcttggagaatgttgctatcaaacaaattcacaattagtttaag

SEQ ID NO: 3422 - DNA, 629 bp, Glycine max
  unsure (1)..(629): unsure at all n locations
tgaggattgtgtaccttccagattggatggttatcggtttcaatgacttagtctctacgcatttcgtccttgggggttgtgtaccctttgggttggatcattcccaatccatagcttaacccttccgattcgtgccttgagtccaaccttgcctcatcatatctatgtctaatctaattatctctaaaagcctaaacgcaccataaaatcgtcatagacacaattaatcacacctcgagaatcttgagatatgggagaatattttgaaatgtcataatgcattgactcatgaatataagagaggatacacatagtaaatgatgataaatagtcatctctttgacctaagaagacaagttgagcaatacaatttgcttgagtactctggattangttgtgtccatctacgagaaaacctttttctaaaataaatataaatatttgtgttcaatttgtctcttcctttacttctttattattatatttattcctaaatataaagttcttttaactaattcatatcatttaaaagaaatttaataatttaagtagtactattaatttgttagaaattggattatcttttaaaatacccttataatttttctaatcctattataagaaataaa

SEQ ID NO: 3423 - DNA, 337 bp, Glycine max
gcttgtcatgttttctggtgatgcagactttgctgatggagctcataatcttctcaataaagaaagtgaaatacgccgtggtggatttggagttgtttatcgaacttttcttcgtgatgggcatgcggttgcaatcaagaagctcacagtcttcagtttgatccaatcccaagaagactttgatagagaaattaaaaaacttgggaatgtcaagcacccgaatctcgtggcacttggagggtattattggacttcatccttgcagctccttatttatgagtacctatccagtgggagtttgcataaagttctacatgatgatagcagcaaaaatgtc

SEQ ID NO: 3424 - DNA, 256 bp, Glycine max
  unsure (1)..(256): unsure at all n locations
aaactcagcggcaccaagctccggatgagctctagctatcacccacaatcgggtgggcaaactgaggtcatgaatagaattgtcgaacaatatctttgcgcattcgtacaccaccaaccttctacctgaggtcgctttttgacttgggccgaatggtcatacaatacttcngttcattcggccaccggcatgttcccctatgaaattacatttgggaagaaaccacccttgttctctgcgatacattgaaagaaca

SEQ ID NO: 3425 - DNA, 548 bp, Glycine max
  unsure (1)..(548): unsure at all n locations
tgacagcacgataagctagaaagagcttattttgttgagcttatctctgaaactggtataattaaaatagagcttatttgaaggctaaaaatgattttcatgagcccaaaaaagataatgtaattttttatggccaaataatatatgttcataaaacaaaaatttaaggattgatgatcctgcttgtggtgtgcaagtttttgtgcaagctatgtgaagctactgcctgcaatgaagacatatgaatatggctttcgtgtgtttttgttgacattttgtattgtattggtatctgggagaactagcaaggaatttttctccacagccttttacagattaattcttattgcaattggtgctagcatatgcttgtttgtaaatattttcatataccccatctggtctggggaggatctgcataaattggtggtgaaaaatttcaatggagttgctgcatctttagaagggttgcttgaatttccccatatgttctgaatcccttgcaagatttgttggtgctttttatgcctggntgctgtacttaattt

SEQ ID NO: 3426 - DNA, 608 bp, Glycine max
ttgatttcctttgttccggaaacctttcttttctcatgtgcacccaaaccctatcttcgggttcgaagacaaccttctttctccctttgttggcttgtttagcataacttttatttttcctctcaatttgatctttgactctctcatgaagcttcttcacatagtccgcctttgcttgaccttcttaatgcttaaaaacagaaacattaggcataggcaaaagatcaagaggagttagtgggttaaaaccataaacaacttcaaaaggagaacaattagtggtgctatgaacagctctattgtaagaaaattcaacatggggtaaacaagcttcccaagtttttaagttcttccttcaaactgtcctaagcaaagttcccaaagtcctattaacaactttcgtttgcccatcggcttgtgggtgacaagtggttgaaaataacaatttagtggccaacttgctccacaaagtcctccaaaaatggcttatgaacttagagtccctatcactaacaatgctccttggcaaaccatggagtctcacaatcttcttgaaaaacaaatcagccacatgggaagcatcatcaatttttttacatggaataaaa

SEQ ID NO: 3427 - DNA, 493 bp, Glycine max
ttacgcgccatgcatgactactatccatttcgtacgtagtcttccaggtaaatgggtatcttcttcttcctcttgggcctaacttcactctcctcctgttgttcctttgctaattgcagacccctcgagttattcgtaacactctcgtgcccatcaaacaacaccttgtcctcaaggtggtgaagctccttaaagtctgaccactcttcccacgatgtttcttcaagtggcaggcctttccactgcaccaacaccataagttttggtcttgactaagagggaattagtttggacgctactatggctaaaggagtgacgacagggtgattgtccaaagccataggtggaagatcaacagtgcctctcggacatgcaatggccacatagggtttaaagagagaagaatgaaaaacggaatgaatgcgtgaatggtctggtaattgtagctggtaagctactttacccatgcgtgctgtaatttggaagggctcat

SEQ ID NO: 3428 - DNA, 484 bp, Glycine max
tgaagggctaacctatttagcaacaatattatttaatgaaaattttattagcaatatgatatataataattattttaatgaaattgcaaaattactttatgtggtctaacgatttgaatcattttaatgtttgaaattggttaatttcaataagcatagatggataacaagaatatggactcttttcttttgggtaagggtgttcgctggccggttttaaccaaattcaagactcaacctaatcaaatttgattagtttgctttgatttggtttttacattttttaaacccaacccaattcattcatgaacgatttggttcagttcgtgccaacaggttatccatttaaattagatctttttttcttataactactattttatatcaagattcatccaaatatccaatacaattaatatcatcaacataatattctaaaatacactaatgccacttttaaaaaatattcttcaacgatatttac

SEQ ID NO: 3429 - DNA, 309 bp, Glycine max
tctcttgaacatcttgaactcattcttttgattgacctttgagctttttgtcatcacctttgttatcatcaaaacatctttgaatcaatcttgtttcatcatgaaggtttgcttctacagcgatatctcaagggggtatagttgtagacccctctaagatagaagatgctctcgagtgggagagttcaaagtctgcttttgagattaggagttttctacgcttagtaggatattatcgaagaatcatagaaggtttctccaagttagctctacctctgaccaaactgacttgaaggggtcaagttttgt

SEQ ID NO: 3430 - DNA, 639 bp, Glycine max
tgggagaggatgctgaagatgaagcagtggagaggttcttgagccatggaatgagggagttgccatcaagattgggaatttgggtgtagtaaggggatgatgagccaaggcttggattgtaggaagcacatggacttggatggtaagatgagcaagggcttgctgctgctgatgatccaccaactatctccatgccctctgaaggcttgcatccctaattgtacacaaaatatattttcattaactgatcataatatgtggcatgtaataggatttccatcaccaaaatcttttcaaatataacaaataaatcattagtaagacactctaataaactccttcatgttggttccagtaaatatgtggattttttggtagattttattcccaaatcagtggaaactcagattaacttcaaccaataaaaaaaaatgtgttgaaaagaagtaaatgcacgagttatttaactcagcatgttctcagtatattgttgctatcaaatctaaccaacatggcataactattatttattgaataactcaacttcattcaaactaattaactataatttatcgaatagaacaattgtctctcttctatttatgttgggtactcgctacaatgtaatctctttttttt

SEQ ID NO: 3431 - DNA, 347 bp, Glycine max
  unsure (1)..(347): unsure at all n locations
caatcaacttgcttcaccagcagctcctattgaaacaccaaacttagtttttaaggctacacaaagagtctaacatgctatgacaaattaaatttcacttttcttctagttcgtatttctcagaatattacacatacaacagagccgataccaaccaattgaactatgttttccaatattaacttgagcagcaaccaactctcttcaaagcagacacatcatttttcagaatcaatttctcttctttggcaagcacagatgcagttccattntcagccccctctactgctttcttgctaacaatgcggtagatttgaatcagaacttcagcacatgcattctctaca

SEQ ID NO: 3432 - DNA, 347 bp, Glycine max
  unsure (1)..(347): unsure at all n locations
ctatcttgttaaaaaatcaaaacaggatcaatggcatattctatttttattatcatatcagaattataggaagaatatctcctgctattaattgcattaattataattaatttatataaatgaacatcccatgtgtactttgatacacgatttttactctattattcctttatttttctcttattttacatatttactaggagaaagggtaaaataatagataacctctgtattacaatacttatgtagcatatttttggatgagttntcggtaccttgtacctagtataaatatattctanttgccgataaaaaatgtaacatttctataccaatataaatcattt

SEQ ID NO: 3433 - DNA, 407 bp, Glycine max
tctggtgggacatcttgacttgctttccaatctgacattcaccgcagattctgccttcttctattttcagattgggaatgcctctaacagcacctttgtcaatgattttcttcatgcctcttaagtgcagatgtccaaatctttgatgccatattctgacttcatcttctttggagaatagacatgtggaggagtaactagtttcttgaggtgtccataggtaacagttgtcctttgatctgctgcccttcattaggacttcactcttctcatttgtcaccaagcattctgactttgtgaagtttacattgaacccttcatcacacaactgactgatgctgatcaagttcgcaatcagtcccttcaccagcagtactttgttcagactaggaagtccatcatggact

SEQ ID NO: 3434 - DNA, 461 bp, Glycine max
  unsure (1)..(461): unsure at all n locations
gatatttgtgttgaatgcattaaagggtaactgaccaacaacatgatattatgttcatatagangtacatatgtcttggaattgatacatactaacttttgtgggtcatttcatacaccttcatggaatggtcaacgatattttatatcattcatagacgattactccatatatgcatacttgtttcttatacatgaaaagtcacaatctctggatgtgttcaaaacaattaaagttgaagttgaaaatcaaatcaacaaaagaatcaagagtgttagatctgatcgtggtggtgaatactatgacagatatgacagttcatgtgaataacatcccgtngccttttccacagtacaccatgccagggtcacctaacatgaatggcgtggctgaaagaataaacacaactcttaacgatatggtaagaaacatgatttgcatttctacttactagagcactc

SEQ ID NO: 3435 - DNA, 505 bp, Glycine max
caaagtatataataataatttatgaatgaccgttcaaactataatgggagtctaatcaaaatccaactctcacaccgaaagcaatgaggactgcggacaactaataacatatgtcatcataacttatatatagtttaaaacttgtgattaaatgttaaaggtttcgaatttattaaacaaggataaattatttaatttacttaaaaacaattgttactggaattgttaattatttcatccttttgtatgtatttggcaataccccaaagaaactatattgaattctatcttgtactgtattatatatgaaggattgtccctaataaggcacaaattcacataagggatgttttatgacttattgatgacttaataacattgatttaaataaaaggggatgctgttaatcaatgtactttaaagaattaataatatttgtttatttaaaaatacaacacagtatacctatgatatttttttaaacttttttaatttttgattcttt

SEQ ID NO: 3436 - DNA, 364 bp, Glycine max
  unsure (1)..(364): unsure at all n locations
aacatactccctaacaaaacagcttaagtagttgagtaaataaatgatagggcagtgtatcgagtattgcgccaataagacctatggtgtttccacaagcaagccatgcattgcatgaagaaggaagttgagtattgtgaaggaaaataaaggtctttcgaaccaggggctggagtactcaattctttaacaagttctttgtttcttctgagacagaatgccgaaaaccattatcagtaaccattggtaataattataataataacaaataaattattgcacttctagcggntaagtgctttctagcatatcactttagagttctggtattctgtagttntattagatgtgttaccgaatatac

SEQ ID NO: 3437 - DNA, 536 bp, Glycine max
  unsure (1)..(536): unsure at all n locations
tctatgccctctttctctgtcttaacgtcttcttcacaagaataaatagaacaccgaacccccaatcccattcgttcccgctaaatccaacgaaaacccaatggtgggcccctctccctcccatggcaacaacctcaaattcctctgcagctacagcggcaaaatcctccctcgttttcccgacagcaagctccgttactttggcggccacacccgcgtactcgccctccctcgctccgctcccttcttcggtaaaaccaccaccttctcctcccttcttggtttcccttacattgacggcgtataactgtatttgctttggcatgcttcttttcataaaaaatcatgttcaacgtgcttcggaaatgcctgattcatgtcaaacaaacatacattaataacgtccttgggaatacgctacacaaaattacctctaaagaaaaaataattctgnggacgtgcttcttttgntnnttgcgttatttattctacctaatgaactttatattataaacccacttgcatacatttacatt

SEQ ID NO: 3438 - DNA, 363 bp, Glycine max
tacctcagtgagagtgcttctagcaaaagcaacaactaggaattggtgtttataacaaatggatgttaacaatgctttcctcaatggggatctgtttgaggaagtttatatggacttgcctcaaagttacaaaaccattgctcttgatcttgtatgcaaactcaataagtccttgtatggccttagacaagccttaatgcaatggttttgcaagttttcttctaccctattacaataaggtttcattcaatcaaaaaatgattattctattttcacttatggctttggatccttattagtagtgccttttagatatgttgatgacattatacatgttggcccaaagatcttcatgtgttgctg

SEQ ID NO: 3439 - DNA, 470 bp, Glycine max
tatcattgggggtttaactttatcattttgtcaatgttggattaaattttagcttatatattgctaatttcagcttataagtgaaaatgaagctactttagctcctatatataaccattgattaatagcaatatggcactttgagcaagatttactctctataagttttcatatcaagagtcaaatgctattgaaatggataaatgcacaatataattggtgtgtatcaaccctaacacaacaacactaccacaaaaacacacaccctatgatccacaatttgaaacgaagggaaaaagtcatgaaaagtgaaaaagaagagaacctagctgatgtaagctccattggagcttgtaggcctaggatcttcttcatcaatggattcctttgcttcttggaagatgaatggcagcggaatggagaaggaagagggagaggaaacgccacttcaaggagaagatgagtctaga

SEQ ID NO: 3440 - DNA, 452 bp, Glycine max
  unsure (1)..(452): unsure at all n locations
agcttaaataatataaaatagttacgagaaaaacttggtcaagacgaatttgaattattgaaaatatgaacttgctcactcagcaaacaatgtagacgaatttaaaattcctttgaaagtaaaatatttgattaaaaaactatatataaattaaggaacttagtttgacatatatttttaaaaagaaaaatagtttgacatgattttttaaaagtaataatagagaaaacttgatatagtaaagaaaagaaatgggacatcattattaggactttatctntattaaatattattaatattggctctagtttgattagaaaaaaaaatgaataattaatattggcttacttgtgaacttttatacaacgaaatatgtagatgaaaaactatcttctattgtctagaacgaacaacaaaattatattntatctacacaaaaataatagaaatac

SEQ ID NO: 3441 - DNA, 485 bp, Glycine max
  unsure (1)..(485): unsure at all n locations
ttgaaaatagagtgagattgaaaacatatattatggacaaaaacttagagaataattattggagttgctttaaaacttgctcttttaggcttcaattttcttaaattaataatatataaacattcttatatactattttggtggtccttattataaagtccaattaactaattatcaaaattaagaaaattggtgaatttaattgaaggcattaaagacatttttgtgaaaaaaataatacaaaggacattttaggttgaaccttataatacaggatcaagtgacacttgtaatgtggatattataataagcattagatggagtaccatattaacacccataatttttctttcactctttttctatcatgtaatatcaattaccatacttggatttctttctcttctctctttatgggncaattaatgttcaatgaaatgttttttcatttcttaactcaaattgaaaataaaaatatttatttt

SEQ ID NO: 3442 - DNA, 415 bp, Glycine max
tatgactcagtttcttggggattcctaaactatatgatgatgaggatgggattttgtgaaagatggagaaaatggatccatggatgcctttctagtgcaactatatcaattttgatcaatagcagcactactagagaatttgtgcctgagaggggactgaggcaaggagatccccttgcacctttcctatttaatatagcagctgagggactcactggtttgatgaggacagctgtctccaaaaacattttcagcagctataaagtgaggaggcaaaatgaggagattaacatcttgcagtatgcagatgatacactgttttttggaactgcaactacagctaatgttagagtcatgaaatctatcctcaaaattttcgagttggtttcatgactcaagattaactatgctaaaa

SEQ ID NO: 3443 - DNA, 326 bp, Glycine max
  unsure (1)..(326): unsure at all n locations
tgcttgatattgagtggtgtagccactctagaactgcctgcaccttagtagcattcataacaacctcttcacctgaaactatatgtcccaagtactctatcttcaatacaccaaaagagcatttaaaccacttatcaaacaaaacattttctttcaatactttgaatacaacctctagatggcataagtgttcatgccatgtggaactatataccaatatatcatcaaaaaacactaacacatatttccttaaagcatgtnggaaaatatggttcatcaaacactgaaaagaagtcgaagcattggttaaaccaaatggcattatt

SEQ ID NO: 3444 - DNA, 370 bp, Glycine max
tagacatagaaggagagagcctgagcaaaataaggctcgcgttctaatatttttaaatgtaagcccaacatcggttttcaataaaaaaaaaaaactgatgttaatcaaatgatgttaacattaacatcggttttctggaagaaaccaatgttaacttatcatatgttaacatcggtcttctgaaaaaccgatgttaatgaactaaagttaacatcggttcttgaaaaaccaatgttaacgaagtaatattaacattgggttttcaagaaccaatgttaatgtctgttcgtttacatcgggttttcagaagaccaatgttaataaactcacattatttacaattgtgccaccaggtttatgttgacatcgg

SEQ ID NO: 3445 - DNA, 267 bp, Glycine max
taaacattcaacttcgagcgtctcgatatattacgagtctcaatcagacatccgagtaaaaagttatggtcgtttgaattggctcaaagcttcaacattcaatttcgagcgtctcgatatatttcgggactcaatcagacatccgagtaaaaagttgttgtcgtttgaatatcctcagaagttctacattcaattttgagcgcctcgatatatgacgggactcaatcagacatccgagtaaaaagttattgccgtttgaattggctc

SEQ ID NO: 3446 - DNA, 429 bp, Glycine max
  unsure (1)..(429): unsure at all n locations
tatgactcagtttcttggggattcctaaactatatgatgatgaggactgggatttgtgaaagatggagaaaatggatccatggatgcctttctagtgcaactatatncaatttgatcaatagcagcactactagagaatntgtgcctgagaggggactgaggcaaggagatccccttgcacctttcctatttaatatagcagctgagggactcactggtttgatgaggacagctgtctccaaaaacattttcagcagctataaagtgaggaggcaaaatgaggagattaacatcttgcagtatgcagatgatacactgttttttggaactgcaactacagctaatgttagagtcatgaaatctatcctcagaattttcgagttggtttcaggactcaagattaactatgcctaaaaagccaattgggtg

SEQ ID NO: 3447 - DNA, 375 bp, Glycine max
  unsure (1)..(375): unsure at all n locations
agcttcaagaaaaagatggcctcagcaaattccttatttccagaagggaattctatcaatagacctccaatctttaatggagagggttaccactactgganaacccgaatgcaaatttttatcgaggcaatagatctaaatatctgggaagccatagaaatagggccttatatacccaccacagtagaaagagtntcaatagatggtagttcatcaagtgaaagcataaccatagaaaaacctaaagatagatggtctgaagaggatagaaaacgagtacaatacaacctaaaagccaaaaacataataacatctgccctangaatggatgaatatttcagagtttcaaattgcaagagtgctaaagaaatgtgg

SEQ ID NO: 3448 - DNA, 410 bp, Glycine max
tcagcttgttaacatgaagcctgactttctcaataggaatgtgaaccaaaggtttagtggcggtgaacgcaagcgcaatgaaatcttgcagcttgcggttttgggggcggacttggctattttggatgaaattgattctggtttggatgttgatgcgctcagggatgttgcgaatgcagttaataggattctcaccccagaacagtccttggtgatgataactcattatagacggattctggatcttttgaatcctacacatgtccatgttatggtaacttactgttgatcttcaatatcattgccagttctgaatatggaatatgtatgatacatgggtgttcacttttcattactgggattaaggagctagtcctatcacattcttttcacccttatattgggatact

SEQ ID NO: 3449 - DNA, 265 bp, Glycine max
gcttctagatgagttatgtctgcgaatcggacatcctgtgataaagttatgaccatttgaatctctcgagtgcttccgttgtttaatttcaagcgtctcgatattttatgtcctcaaatcagacatcggagcgaaatgttatgaccattcgaatttgtcgagagcttccgtttttcaatttcgagcgtctagatgagttatgtcaccgaatccaacatctgagtgaaatgttatgaccattcgaatttgtcgagagctcccgttg

SEQ ID NO: 3450 - DNA, 326 bp, Glycine max
gctcaaacattcaatttcgagcgtctcgatatattactggactctatcatacatacgagaaaaaagttattgtcgtttgaatttcctctgagcttcaacattcaatttcagcgtctggatatattacgggactcaatcagacatccgagtaaaaagttattgtcctttgaattggatcagaggttcaacattcaatatcgagcgactcgatatatctcgggactcaatcagacatccgagtaaaaagttattgtcgtttcaattggctcagaggttcaacattcaattttgagcgtcccgatatattacgtcactgaatcggacat

SEQ ID NO: 3451 - DNA, 302 bp, Glycine max
  unsure (1)..(302): unsure at all n locations
ctcgtccacgtggcccaggtcaccggtgcgaatgataccgcttgccgtcgatctccatgaagacctgggccgtggcgtncgggcgcttccagtagccgtcgaagacctcgggtccgtggacgacgatttcgccctgctcgccctgcgggacatcggcgccggtttcggggtcgatgacacgcgcctcggtgctcatgataggaatgcccaggcattgctgcttgggatgctccaacgggttgctgtgcgtgggcgcggccgtctcggtcaggccgtagccctcgctgaagcgcaggccgtat

SEQ ID NO: 3452 - DNA, 396 bp, Glycine max
agctcgtatgacgggcatgaggaagatgaacattgttgttctttgaagatatgttactttggcagggaaggaaaatgcgcacgtgggaaattcgtcatgcaatggtgatggtgtgggaaagtgtgaagatgggttgttgcttaacgaaagtaataatgatagtgttagtgttggtggcttgcttggggaatgtgacatctttgatgggaaatgggtgagggatgaattcaagccttactatccattggggtcttgtacaaacgcagattgggattttgattgccatctttatggatagcctgattgtgattatgtcaagtggaaatggcagccaaatgggtgtgacattccaaggaatggtgatgcttttgctgttgttgttacaattggaaatgg

SEQ ID NO: 3453 - DNA, 424 bp, Glycine max
gcttagtttatgattatttaacactaagataggggtttttttaatatgtgtgagacattataagagtcaaatcttaacttatttatatgatagccacatatcctccagatttaatataatattcatgatcttatttaaaagtatattttgcaataagacatttaaataaggcataaatttatttttcaataaacttaattataaactttaacttaactttttgtgtagaccagcatgattaatatttaaaaagacaagtaaatgtaatattttagtaaattataaccaatctaatataataataatactaacaatgaatacttatttataaatttttaaataaatcagcctatttagcctagaagaacttttgaatgacctagaacctaacctggttaactaaataaactctattagaagtctt

SEQ ID NO: 3454 - DNA, 335 bp, Glycine max
ttcgagtgcctgtatattgatgcgcctgaatcagacatccgagtgaaaagttatgaccatttgaatttctcgagagcttcctatgtttaatttcgagcgtgtcgatatattatacgcctgaatcgaacctcagtgtaaaaagttatgaccatttgaatttcttgagagcatccgttgttcattgttgagcgtctctatatgtgatgcacctgaatcggacctccgcgtgaaaagatatgaccatttgaatttctcgagagctttcgttgttcaattttgagcgtctcgacatatgatgcgcccgaatcggacatccatgggaaaagacatgacta

SEQ ID NO: 3455 - DNA, 404 bp, Glycine max
  unsure (1)..(404): unsure at all n locations
tcttcactatacatcaagaatcaccgggttgagtcttctctgtggttgtcttactggcttagcctcatcttctaaatttattcgatgcatacatgtggatgggctaataccaggaatatctgccagggtccagcctatagctttcttatgcttcttgagaacaaataacaacttctcctcttgctcatcagcaagggaggcagatataattactggaaaacttttgccatcatccaagtaagcatattttaaattagatggtagaggcttcaattctggtgtgggcggctggatattggtataaagagatggtttctcatcctacacctcataaagaaagtcgaggtatgtgtacttactgaaacatggttatgttgatctgactctataanatcaatctcaag

SEQ ID NO: 3456 - DNA, 346 bp, Glycine max
  unsure (1)..(346): unsure at all n locations
cactatatacctaagctctcgagctaatgatacttgngagttagttcctcttcttccaagctatatacctgcttggtgttgatgggtatatgctataaaagttggggccaacggacatattgatcgcctcaaagctcgattggtagccgaaagttatactcagatttatggcctatattatggagatactctcttccctgtggctaaaattaacttctgttcgactctttcttgccataattgtgatccgtcattggctactatatcaggaggatattaaaaatgccattctacatggggaattagaaaaagagagttatatggagcaatcactgggatttgttgc

SEQ ID NO: 3457 - DNA, 403 bp, Glycine max
  unsure (1)..(403): unsure at all n locations
gacatcttgacttgctttccaatctgacatttaccactgattctgcctnnnggtatagtcagattgtgaatgcctctaacagcacctctgtcaatgatttttttcatgcctcttaagtgcagatgtccaaatctttgatgccatattctgacttcatattctctggagaatagacatgtggaggagtaactggtttgttgaggtgtccatnnnnaacagttggcctttgatctactggccttcattaagacttcactcttctcatttgtcaccaagcattgtgactttgagaaggttacattgaatacttcatcacacagctgactgatgctgatcaagtaggaatctgtcccttcaccaccgtactttggccagactacgaaggacatcatggactagcttt

SEQ ID NO: 3458 - DNA, 392 bp, Glycine max
  unsure (1)..(392): unsure at all n locations
tcagagatatgttcaggcaaggtttttatcaacctattgagtttatattcggcagtgtattcagtgcttgcagaagccttctngaaccagaatttggaccgcaaatacatggaatgtgtgctaaatttggtttaaggaggaatgtttttgctgggtgctccctctgtgacatgtatgcaaaatttggattcttaccttcagcaataaaggccttttatcaaattgaaagccctgatttagtgtcatggaatgcaattattgcagcattatctgacagtggtgatgttaatgaagccatatattttttttgtcagatgatgcatacgggattgatgccagatggcattacttttctctccttaccttgtgcttgtgggagcccagtgacaatc

SEQ ID NO: 3459 - DNA, 410 bp, Glycine max
  unsure (1)..(410): unsure at all n locations
cgcatgatntacattctcccnctttctcaagcaaattcttaattcttcttgacatcatcaaaatcttcatgatttacatataatagtcgctaagttcttcacttaaactcttgcaagagtcatgaatactataggaggaatgtttttctcttttcatttctttcattatttttcttctttctttctctcttattttctctctttcatcttgacttatttcttccactctttttttttacctttttcttttctctcttgtttttctttccacaacttaagggatctcaactcatctaatatcttatacaaggggtccttatgagtagagccctcaccattaacactagatgaagaatgaagactcatgttggttcctatgttatggttcttccttggttggggtttgaaaa

SEQ ID NO: 3460 - DNA, 441 bp, Glycine max
  unsure (1)..(441): unsure at all n locations
aatactccagcttatttgtgggagccttgtagatcaccaatgaattcgtggatcatatacgcgaagctcattatgatgacccgtttttgcaaggcaaggtgttagatgtaatgggggataacggtgtggagtttgagaaggacacaaccgggttaattagatttaaggggaggatatgtgtgccatctttagatgatttgaaagttaagatcttggaagaagcacataaaagtcgtcttagtttccatccaggaatgactaagatgtaccaagatttgaagagaaatttttggtggcattgcatgaagaaagatgtacttgaatatgtatcgagatgtttgacatgtcaaaaggctaatgctgagcaccagcgaccatcangagaacttgagccattggaaattttggaattgaaatgggagagcatatctatggattttg

SEQ ID NO: 3461 - DNA, 433 bp, Glycine max
agctctgacgcaacatttggagaggttaatgaagtaatgagatgattaactccatgagaggttggatcaaatggagaatagagatcataatgaagaagaaaggacgagaagagggaatgatggtgttcctagacaaaatcgaattgatggtattaaactcaacattcctccctttaaaggaaagaatgatccggacgcctacttggagtgggagataaaaatagagcatgttttctcatgcaacaactatgaggaggaccaaaaggtgaagcttgccgccatggagcttttcgactatgctcttgtgtggcggaacaagttacaaaaggagagagcaagaaatgaagagccaatggttgatacatgggcggagatgaaaaggatcatgacgaagcagtatgtgccgactagttactcaagggacttgaaattc

SEQ ID NO: 3462 - DNA, 373 bp, Glycine max
tataatatatcgatacgctcaaaatttaacatcggataacttttcacacggatgctcgattcaggcgcataagatgtctagaggctcgaaattgaaaaaccgaagctcatgagaatttcaaatggacataacttttcacacgaatgtccgattcaggcttataatatatcgagatgctcgaaattgaataacggaagctcttgagaatttcaaatggtcataacttgtcacactcgggtccgattcaggcttataatatatcgagacgctcgaaattaaacatcggaagctctcgagagattcaattggtcataatttttcacacggatctccgattcgggcgcatcatatgtcgagacgcgcgatattgaac

SEQ ID NO: 3463 - DNA, 382 bp, Glycine max
  unsure (1)..(382): unsure at all n locations
cttgatctaccaccaccgccgccaccatcattttagttnttctcttattttaatattactagtactttgatttctagccgtgtatttggctatattattatggcatttgaacaatttagtatttctttatttgcatggtgtgtttgaaaaattatgaattatgttatatgactatgtgacttttctatatatttgatctagtcatgtttcttgcttcatgattggtttgtatttttccatgattgttgtgtgaatgattagttgtatttgcatgtttcatacttgttacgcactctggctttttgttgattccaaagggggagagaaatanggattaaatcaagaactcacatgagtaataaacttaatttttagtgaatca

SEQ ID NO: 3464 - DNA, 340 bp, Glycine max
agcttattctaaagcgggaagagaaaaaagaaatttcatagaaaaactaaacccaagccgagaagcacagaagcaactcacggtttgcgaataattttgaaaaggacactattagaggccaggagaggtgcaacagagagtaccccgtgaaagcccttaacaacttttgaaagtcagacacgacgtcattctcgccgcccccaccgtgctgtgcagaggcaacatcgactgtgtgcatctcagctcctgcgaaatcctacaacagaccaacgaccacaacgaccaatccataattctaatgcttatttgcgattaagagcaaaaacgaacatcgtacgac

SEQ ID NO: 3465 - DNA, 428 bp, Glycine max
  unsure (1)..(428): unsure at all n locations
agcttcttggaggtttgatggatcctcctctaatgtataggccatataatcgggcccatagtatttagcaattcttgctctcttacctcttcgaggctctatttctggttctagttgtgcaagattttcactactaatagcaggaaggtgactagatgaagtacccccactattccttaatttaaaaggaaatttattttcataaaaatcagcatcatttgactctatgatcacttttgcgtttaggtcataaaacctatacactttgctattaataacataaccaatgaacactcattcataggctctacttgcgagtttaaccctcttggggtctaggatccttacataggccaaacatncttaagttctcaaataggacaaatttggctgtcttttcattaatatctcatagggagatgtcttgc

SEQ ID NO: 3466 - DNA, 395 bp, Glycine max
cgttagtgtgtgttaaatgtctaaaataaagaaaaattatgtataatgtttctctgtttaaaactttatcagtgaaaataaaatattttgaatatgaattttgtagtatttttttaattagattaggttggtgttaatgatttattagtgtgttaataattcatgaacgtttcaactttcatttaaaaaaattagtagatcatatttatttgaagaaagtattttgagtatgaaatttattttaatatgaagttgtagtatttttttaattagattaggttcattcttttgtgttaaaaattgataagcgttcaagttgaaagtgttatttgatgatgttttgctgcttcttgtatcatatctaatttaatatatctgtagtaattttgtaatta

SEQ ID NO: 3467 - DNA, 395 bp, Glycine max
  unsure (1)..(395): unsure at all n locations
agctttggcctttatgttgctcaccatgttgttccccctatctctaacaatctcttcctttgtggctttgatgatgccaaacttgaatatgacattgagtgcatttggagggtctgagtgatgtaagctccattggagcttgtacgcctaggatcttcttcatcaatagattcctttgcttcttggaagatgaagggcagtggaatggagaaggaagagagagagtagatgccacttcaaggagaagatgagtctagaagaagctcaccaccataggaggccatggataagagcttggaggaagaaggagatgaatgaagggagaccgagagaacagcaccanattttgtgctctacaagatctctgaaatatgaagcttaatattcacatgatc

SEQ ID NO: 3468 - DNA, 376 bp, Glycine max
agcttaacaaaaggcatgcgaagcgggcccaatttctagagcaattcttttatgttatcaaacataaaaaggcaacaggcactattgtagccgatgctctctctccgcgtcatgcattactttctatgccttgaaacaaaattgatcggtcttgaatgttcgaaaagcatgtatgaaaatgacgaaacttttcgagaaatttctaacaattgtgacaaattttcacaaaacggcctctttacacatgaacgctttcttttcaaagaaaacaaatcgcgtgtgcctaaatgttctactacaaatttgcttgctcgcgaagcacatgaacgaggtttaccggcgcattctggcgtccaaaacactctagaaacatcac

SEQ ID NO: 3469 - DNA, 409 bp, Glycine max
  unsure (1)..(409): unsure at all n locations
agcttgaaggcaaactggatgcattggttaacttgttaacccagctgtttttgaaccataaatctgtacntgttgcaagggtctgtggtttgtgctcctctgctgaccaccatacagacctttgcccttccatgcagcaacctggagcaattgagcaccccgaagcttatgctgctaatatttacaatagacctnctcaacctcagcagcaaaatcaacctcagcacaacaattatgacctctccaacaacagatacaaccctggatggaggaaccaccctaatctcagatggtctagccctcagcaacaacaacaacaacctgctccttcctttcaaaatgctgctggcccaagcagaccatacacttctccaccaatccaacaacagcaaccaccccaacaaaacca

SEQ ID NO: 3470 - DNA, 390 bp, Glycine max
agcttatagggagccatgttaatggtagaatgtttactatcgttataagcgaactctatcaatggaagaaaaccctcccaacttctctcctgctctaagacacatgctcttaaaaggtcctccaatgactgaatggtccgttcagttcggccatcagcctgaggatggtaggctgaactcagtctaagcttggttcccaccgctctgttcaagctctcccaaaacctagaggtaaatctacgatctctatcatatactatgctacatggcacaccatgtaacctgacaaccctccttatatacaacgtagtcaacttttccaacgaatatctgatactaatgggaatgaagtgagtacacttaatccatctgccacaataacccatatag

SEQ ID NO: 3471 - DNA, 262 bp, Glycine max
  unsure (1)..(262): unsure at all n locations
aacaagggaagctctcgaganactcanagancatttcttatcacacagatgttcgantcaggcgcataatattccgagacgctcgaaattgaacaacgaatggttgtgagaaattcaaatggtcagaacttgtcacacggatgttcgaataaggcgcataatatatcaagatgctcgaaaatgaacaacgaatgcccttgagaaatgcaaatggtcataacttgtcacacggatgactgattcaggcgcattatatatccag

SEQ ID NO: 3472 - DNA, 397 bp, Glycine max
tgaagacaagactatacgaggtatcttccttgggtatagcaatatctctaagggctaccgtgtctacaacttgcaaactaagaaactcgtcatcagtcgagatgttgaagttgatgagtacgcttcttggaattgggatgaagaaaaagtggagaagaacgttcttatacccgctcaactacctcaagaagaagttgaggaagaagacccaggtgaaccaccttcaccttcaccacaacaataagatcaagaactatcatcaccagagtctactccaagacgagtaagatctttggtggacatatatgaaacctgtaacttggccatactttgacctggaagctcttgagaagcgtcacaacatgaagtatgggtcaaggcgatggaagaagagata

SEQ ID NO: 3473 - DNA, 264 bp, Glycine max
ctcaagcctgtgtcgcactttcaactggcgatgttgaatatataaacgtttgaagcctatggactcaaagtctttggatgacgcaacaacttatagactttggagatatcctcaatcacattcctcttaaatgggacaacacaagtgctcttaatctaacgaagaacccaattatgcattcttaaaccaagcccacacgaaataggcatcatttcctaagagaacatgtgtctaaaggggactgttgcattgagctcattgata

SEQ ID NO: 3474 - DNA, 401 bp, Glycine max
agcttaatgaacctcatatccaaatgcaaaacatgctgatgattcattcaagcaatcacaaacaagtaatcctaactatatgcagcgatgaataaaattaacaagggttgggttgcctcccagtaagcgctcgtttaacgtcattagctcgacgcatcttacttcatatgtcttgaaaatacatgagagtggtcatcctcttaatatctccttcacgatactgctttaatctctaaccatttactacccatggtctgtctacattttctaattgaggatcaaataattccacagccgcgtagggcttgacatctttgatgatgaaaggtccagaccatttggattctatcttgcctgtaaataatttcaatcttgaattgaacaacaacacttgctgtcct

SEQ ID NO: 3475 - DNA, 449 bp, Glycine max
  unsure (1)..(449): unsure at all n locations
ataatttaacatatntacagccacaaatgaaaacttgttcattgtccagtccctcctaccctctctcctatctcctaccacaacctcaacaaaccaaaaaaagacatacttcaaatcacagacaacactgctggggccaatatcctatcttttttcacccaaaaatggggtattagagaaaagaattacaatgaagagagttaaaattaaaaaatagacttctttatcgaattttcctttccaaagtaaaaattggcatttctaaagtagtcatctaccgctattgtttttcattgtttaaatgcaatgacccgtccctcatcaacgttaggctcagactggcaaacctctctcgcgaatactgccttgatgcttttctccaatctgtgccagccttcatcattgtagcaaattcgtcgtaacttatccttccatcctgcaatttcatg

SEQ ID NO: 3476 - DNA, 389 bp, Glycine max
gcaagcttggtactacatctgggtttgattcagcattaaaatatatattcttctaatcattacatgatgttgttctgattataatgaattaaatgaagagctcattgttttagggttcaagatgtgtacttgcacggcgacatcttcaacttcctccaaccattccaagtgttgacgccgagaagaaaggcttacgaagaacgctctttgaacgacttgcagacgcgtatggagatgaaatcacatccatgcttactgtccagcaccgtatgcatgaacttatcatggattgcgcttctaaagagctctatcacagcaccgtactcccagtttttaaagcgtgtctcaagattgcattcattgcacagcaatctttatatgccactaca

SEQ ID NO: 3477 - DNA, 438 bp, Glycine max
  unsure (1)..(438): unsure at all n locations
tgtgtcgcactntcaactgccgaggctgaatatataattgtatgaagtttatgtactcaaagtctttggatgacgcaacaacttaaagactttggagttatcctcaatcacattcctcttaaatgtgacaacacaagtgctattaatctaacgaaaaacccaattatgcattctagaaccaagcacacagaaattaggcatcatttcctaagagatcatgtgtctaaaggtgactggtgcattgagttcattgatagtgaacatcaattagtagacatcattgatagtgaactangcatattcgatgcatctagcatagaatgacatcttatntgcataagggtatgtttcactttgtcattcatatcatnntgtcttgnttgggtatgtgtttagcttagtgattcatgtgcattctttagttggttgaatatcaca

SEQ ID NO: 3478 - DNA, 384 bp, Glycine max
  unsure (1)..(384): unsure at all n locations
agcttcttagtttcagatgatgcagatgggtttgtagctacctcatgcactcctctaatgactatggcatcatttctggcgctaaactgctgggagttggaggccatcttcctaattaaatttctggcttcagcaggagtcatgtctccaagggctccaccactggcagcatctatcatacttctctccatattactgagtccttcataaaaatattggaaaagaagctgttctgaaatctgatggtgggggcaactggcacatagtttcttaaatctcttccagtattcatacaggctctctccactgagttgtctaatacctgagatatcctnctgatggttgtggtcctggaagcacggaaaaattnttctaagaatactc

SEQ ID NO: 3479 - DNA, 426 bp, Glycine max
  unsure (1)..(426): unsure at all n locations
ntgagacgcatgtgatnccttggcatcatcaaaacatcagcttgatcctttgtctacatctgtgtccatgttttcgacttctttatttcaatttccaaattttggttaatatattcttttctacaccctttccacaaataattcaaaattagatttattaaattagttgtaagactcaagattctgtggttcgttaataaattaatccaatcaaaaagttgtttaaaagtgtgtgttataactttttctaactagaaatatctagtttttactctttaaacataaataaaactctaattaaacattctaattaaaactctaattaataaacttaaaagtatgtgttataacatgcttcctacactctaattaaacattctccctcggcaccacatantttataaaataaaatatttttagtctctt

SEQ ID NO: 3480 - DNA, 295 bp, Glycine max
  unsure (1)..(295): unsure at all n locations
agcttggacttcctgtgttctgngaacctctcttttttcaggtgtacccaaacccaatcacctggttcaagcacgactttctttctgctcttgttggctcgccttgcatagctcgcatttttcttttcaatttgaaccttcactcgctcatgcaacttcttcacatactcagctttagcctgcgcactcctatgcttaaacatagcaatgttacgcatacgcaacaaatcaacaggagtcacaggattaaatccatacactatctcacatggtgaacaattagttgtgctatgga

SEQ ID NO: 3481 - DNA, 447 bp, Glycine max
agcttatatcaagtaagttatgctacacttcacataaactattagttattcaacaatttatatatttgttatcatcaaaactatgggtattttggatcatccagtcaaagcctgacatgagaattgtccagagatgcaacaacactagactcattttaaaaaaaaaactatagctttgtaataatttttttctatattgtttttataaataaattaaagcttctatttattttatatctcattttttattcaaattaaaatgtgacatgttattaaaaggtatcattcttttaattaattttcctagcattttacaatcatagattcttattgattgaattttcaactctatgatatatcacacatattgaagaactacacacaaaatcacattatacagaacactacactaacactagtattctcataaagaacaaaactttgata

SEQ ID NO: 3482 - DNA, 405 bp, Glycine max
  unsure (1)..(405): unsure at all n locations
agcttgaaggcaaactggatgcattggttaacttgttcaccctgctggccttgaatcacaaatttgtacctgtcgcaagggtttgtggtttgtgcttctctgctgaccaccatacagaccttcgcccttccatgcagcaacctggagcaatcgagcagcctgaagcttatgctgcaaatatttacaatagacctcctcaacctcagcagcaaaatcaaccacagcagaacaattatgacctctccagcaacagatacaaccctggatggaggaatcaccctaacctcagatggtncagcccttagcaacaacaacagcagcctgctccttccttccaaaatgctgctggcccaagcagaccatacatttctccaccaatccaacaacagcaacaaccccagaaac

SEQ ID NO: 3483 - DNA, 336 bp, Glycine max
tccttgagaagattcttaaagaagctagagcttagctacacacacctctctaatagcttatctcacctcattgagatgagaagctagagcttagctacataccccttataatagctaagctcacccccatgacaaaatacatgaaaatacaaaaaagtccctactacaaagactactcaaaatgcctcgaaatacaaggctaaaaccctatactactagaatggccaaaatacaaggccctaatgaaggaaaaacctattctaatatttacaaagataagcgggctcatacttagcccatgggctcaaaatctaccctaaggctcatgagaaccct

SEQ ID NO: 3484 - DNA, 408 bp, Glycine max
  unsure (1)..(408): unsure at all n locations
ctgatgcatgcaagcttaatgaagccacaagaaaagatcactacccgtcttccttcatgtgttcttatgcttgagagacttgcaggacaatctttctactattttttggatggatactcgggttacaattagattgcagtagatcctcacgaccaagaaaaaacagctttcacatgtcccttcggtgtttttgcttatcgtcgcatgccattccggttatgtaatggccccgctaatttccatanctgtatgacggctattttttctggcatggtagagaaacgtattgatgtctttatggatgatttttcagttcttggcgcatcttttgagaaccgcctagccaatctagagaaagcgttacaacgctgtggagaatcccatctggcgcttaactgcgaaaaatat

SEQ ID NO: 3485 - DNA, 410 bp, Glycine max
  unsure (1)..(410): unsure at all n locations
gtacaaacttggtagcattacttattatccaaagagtttgttatccatagtgatcacgagtccttaaaatacttaaaaggccaaggaaagcttaataagaggcatgctaagtgggtagagtttttagagcaatttccatatgtcatcaaacataaaaaagggaaagggaatgtaccggttgatgcgctgtctatgagacatgctttacttgctatgcttgaaactaaactgtttggtctcgagtctttgaaagacatgtatgtgaatgatgtggactttgctgaaatttttgctgcatgtgaaaagttttctgaaaatggttactatangcataatggattcttgtttaaagcaaataaattgtgtgtgcctaagtgttccattagagagttgcttgtgagtgaatcaca

SEQ ID NO: 3486 - DNA, 428 bp, Glycine max
  unsure (1)..(428): unsure at all n locations
agcttctatcgctctcattcatctttactcgttctatctcagaccttttatctctgctgcctaagattttgcatacacctcccttaaagcgaagtgtgtagtctctctacatcatttggccaatgcttagaagattttcttttacgctaggaactagtaagacatcatggatgagtcgcgtacatttatatgtctccaccatgacagtgcctttgccttttgatttaaccacacttacatttcccactccaactttgactttgacagactcatcaatacttttgaaaatagtctcattcttggncatgtgattgctacatccactatccaagtaccagctttcctccttttcttttattgagtcttgagtggccgacaacgcacattgttcttgatcatcgctctctgtgatattagcttgatgccta

SEQ ID NO: 3487 - DNA, 345 bp, Glycine max
agcttaaggttaatttcaatgctgctaacacactacctagtgagacgcttaccacgtatgtcatacaaagatgatttactttgtggggcatatcaaaacgcgaaccaagttaacaactctgctctaagtaaaaacattatttccacctcaagacctttagagttgttacatcctgatctatctggaccaaccagaaacacatctatcactggaaagaggtatgaacttgtcctagcgcatgactattctagatggagatgggttatgcttctatctcacaaggatgactctttcaatgtcttctttaaattctgcaaaagagttcaaaacgaaaaaagagtatgc

SEQ ID NO: 3488 - DNA, 311 bp, Glycine max
  unsure (1)..(311): unsure at all n locations
tagaagattattcaaatggtcataacttttcactcggatgtattattcaggtgtatcacatatcgagacgctcgaaatcgaacaacaagagctctcgagaaattccaattgtcagaacctttcacactgaggtccaattcagccgcatcacatatcgagacgctcgaaatttaacaacggaagctctgacaaaattcagatgctaataacttttcactcggatgttcgattcaggcgcgttacatatcgagacgctcctaattgaacaacagaagctctcgagaaattccnatggtcaaaaattttcacac

SEQ ID NO: 3489 - DNA, 345 bp, Glycine max
  unsure (1)..(345): unsure at all n locations
agcttntaatggaagtcaagagcaagcaattgtgccgacccgccgactggtgagcacgtatatgagcgggttcaacaattcaatactgcatttggcaagatccaaccgaacgatcaacgtcacagttgcatatggaacaacacgtccattttctctgatcttccgtactggtctgatcttgacgctagacatcgcattgatgctatgcctgcgcagacacatgtttgtgacactgtgattgtgaccctccttaacattcaacgcacgacgaaggatggnttgaataccccgccaagactagctgatatgggcataccatcacagttgcatcccaggcttgatggg

SEQ ID NO: 3490 - DNA, 387 bp, Glycine max
agcttgtgcatataatactctgatgacgatgtcttatatgttcttaaatctggactgatccacttgctgcccaagtttcatggtcttgtaggtgaagaccctcataaacatctgaaagaattccatattgcctgctccaccatgaatccttcagatgtccaagaagatcacatttttctaaaggcctttcctcattctttagagtgagtgcgaaaggactggctatattaccttgctccaaggtctatcaccagctacgatgaccttaagagagtattcttagaaaaaaatttccctgcttccaggaccaccaccatcagaaaggatattttacgcattaggcaactcagtggagagagcctatatgaatactgcgagagatttaaa

SEQ ID NO: 3491 - DNA, 339 bp, Glycine max
  unsure (1)..(339): unsure at all n locations
tgtagcanattcaaacgacaataacttttaactcagattncttattgaattccgtagtatatcgagacgctcgaaattcagaacaaaagctctgagcaaaatcaaacgacaataactttttactcggatgtccgaatgaatctcgtaatatatcgagccgctcgtaattgaaaacagaagctctgagcaaattcaaacgacaataactttttacttgtatgtccgattgtttcccgcagtataacgagaccctcgtaattgaaaccagaagctcgtagcaaactcacacggcaataaatttttactcggatgtccgaatgaatcccataatatatcgag

SEQ ID NO: 3492 - DNA, 338 bp, Glycine max
tattgggctgtaaagacctgcaacttctctattgatcaggctttataggaaaggaagttgcaactaagtgagctagatgagatccgtttagaagcctatgagaattccaaattctacaaggagaagaccaagaagttccatgatagtttgatagctaagaaggactttgtggttggacagaaagttttattgtataactctaggttcagactcatgaatggtaagttgaggtaaaagtggattggtccttttgtggtgactaatgtttttccttatggtacagttgagatcaaaagtgaatccacagattagagcttcagggccatggacactggctg

SEQ ID NO: 3493 - DNA, 423 bp, Glycine max
  unsure (1)..(423): unsure at all n locations
agcttcaagtctgcttaacataacactntttagtttactattttcttatattgcttcatgctattagtgcaaactgttttgctatgttctgtgtttttttgatcgtgttggggttctgagtttgaaagttgaacggttgtgtttagctttctgaaccaaaggttacaagggccttggtatgttgttgttgntgtatggcactataacacatgaatgcactttggtttgcaacctgctgcgtctgcaaagggttgtgaagccaatttaatattaaataaaaacaaatgctntctctctttctctctntgnatgtttatngaacaattataaatatttatagattatcttcaataatatttgatgaaaatataatttaataatattctatattaatccaacttcttatatagtcatgtaatttac

SEQ ID NO: 3494 - DNA, 358 bp, Glycine max
ctacccttattttccaatctaagtaagcttctacattgaccttcctgatgcaatcctacctcgcaagggcattggatagaagactccaagcagattgggccacagatgcaagaaaatgccctacggctctcgtgagccttataatagatgtcagacacatgggcttagtatgagtccacttatctttgtacatattataataagagttcattattattgttccttgtatttacggctccatgactgtcgtacgataccctagatatgtacgattctccatccctcgtattctaaggcacctatgctagcttttatattattggtaactatataatttcacatgcgttaaggcatattt

SEQ ID NO: 3495 - DNA, 396 bp, Glycine max
  unsure (1)..(396): unsure at all n locations
agctcggccagcttcggaagtcctatgaaattgatccttagccaataatggcgtgaaaggtgctgctatggttgcgtaccctttaatgaagcgtcgataaaaaacctgataaacctaggaatccnctcaacgctcgagtcgactgaggggtcggccattgttgcacgacggcaactttcgcaggaactggttcaacgccttttgcagaaaccaagtgacccaggtattccacttgttgggtcgcaaaggaacatttggatagtttcacgacaaagctgttgtcggtgagagtttgcaaggccatccgcagattctcgagatgatcagagaaactctggctgtatattagaatatcgtccaagaagatgataacccatttatgcaagtagggtccaa

SEQ ID NO: 3496 - DNA, 322 bp, Glycine max
  unsure (1)..(322): unsure at all n locations
nggacaatggtaatgcaatcttgcataaatcctagatgaatcttctatagaaacttgcatgaccaagaaaaaaacacactttctgcacagaagcatggtaaggtagagaagtaataacatcaatcttggccttattgacctcaatacctctactagagaccaaatgccttagaactatatcatcatgtaccataaaatggaatttctcaaagttaaaaacaaggttagtcacaatgtagtagtcaagaacttgagagaggctatccaaacatgcataaaaaaggaaccataaacagtgaaatcatccacaaacaccttcatg

SEQ ID NO: 3497 - DNA, 391 bp, Glycine max
  unsure (1)..(391): unsure at all n locations
tcacaaaagtttatatggcttgaaacaagcatcgaggtagtggtacaagaagtttaatgagtttatgagcaactcaggattcataagatgtgacatggaccatngctactatgttgagaaatatactaatagttatgttatccttgtcgcgtatgttgatgacatgttgattacaggatctagtatgatagaaattaatagtttgaagcaatagttggcagataactttgaaatgaaggatcttggtccagctatacaaatccttggtatgagaattcttagaaacagatcagaaggagatttgaagttgtctcaggagaaatatatacacaagttgcttgacaggttttaccttgaagaatctaagaccaggaataccnctttgggatct

SEQ ID NO: 3498 - DNA, 465 bp, Glycine max
  unsure (1)..(465): unsure at all n locations
ctctcttgttntaattcatatattgttataatataaaataatatctcacatatgtatacttatatctaaattatcagatacataatagaagatatataaactaacgcataaacgtatatagcatgtatagatatcaatgtgccaattccaaataaagtttacgtgaaagaataagacaattaggtaatcaattacacttttatatatagcaaatggaagattgacattcaagctaggagttcacgattctcaaaatattaatacataaaagtgagctaattcaaatacaaggatcacaaaaattgaatttcacgtcaccacaaattacaataaacaaatgaatatatatagtgtaaaaaaataagaatcacgatactgcaaattgcacagttaatgtaacaaactgaaatagaagaaggggtgtgggaatngaaagcaaatngatatcaattattagtagtgcat

SEQ ID NO: 3499 - DNA, 442 bp, Glycine max
agcttggaaggttgcaggattggtgttgaacggttgaggcttattttattatatcatcaacaattttccttatcctacaagtctatcttctttaacttcaagccattattgcttttcaaaactacatgtaccttgtcttgtactgactataactcccactttttaatcactttaattcaagtggattaatttaatgtcatgtgaaaaattgagtatattctttaaaaacatggcactatctatgaacaatgttcctctaatttgtaacctatcgttagacaattaatgaagttggcagaagacgttgatgtcgttgattaatatgctcccctaataataatttcgggacatctctaaaggtagtatcataattaaatttaaattgaaggtttcttaacaagtaattactaattaagaaatattaaaaaaattaataatatat

SEQ ID NO: 3500 - DNA, 422 bp, Glycine max
  unsure (1)..(422): unsure at all n locations
agcttctggtgggacatcttgacttgctttccaatctgacattcaccacagattctgccttcttctattttcagattgggaatgcctctaacagcacctttgtcaatgattttcttcatgcctcttaagtgcagatgtccaaatctttgatgccatattttgacttcatcttctttggaggatagacatgtggaggagtaactggtttcttgaggtgtccataggtaacaattgtcctttgatctgctgcccttcattagaacttcactcttctcanttgtcaccaagcattctgactntgtgaagtttacattgaatccttcatcacacaactgactgatgctgatcaagtttgcagtccagcccttcaccaccagtactttgttcagactaggaagaccatcatggactagctttcccat

SEQ ID NO: 3501 - DNA, 422 bp, Glycine max
  unsure (1)..(422): unsure at all n locations
gcttcacattcaatttcgagcgtctcgatatattacgagcctcaatctgacatccgagtaaaaagttatggtcctttgtattggatcagagcttcaacattcaatttcgagcgtctcgatatgttacaggactcaatcccacatcacagaaaaaagttatcgtcgtttgagttggctcagagattcaacattcaatttcgagcgtctcgatatgttacgggactcaatcagacatccgagaaaaaagttattgtcgtttgaattggctcagagcttcaacattcaatttcgagcgtctcgatatgttacgggactcaatcagacatccgagtaaaaatttattgtcgtttgaattggctcagagcttcanagttcaatttcgagcgtctcgatatgttacgggactcaatcagacatccgag

SEQ ID NO: 3502 - DNA, 313 bp, Glycine max
  unsure (1)..(313): unsure at all n locations
tccatcaagttatgaccatttgtatntctcgagatctttcgtggttcaatttcgggcgtctccatatgtcatgtgcctgaatcggacctccgtgagaaaatctatgaccatttgaacttctctagagcttccgttgtgtaatttcgagcttctcgatatctgatgtgcctgaatcggacattcgagtgaaaagttgggacaatttcaatttctccagagcttccggtagtcaattatgagcgtctcgatatgtgatgtgcctgaatcggagctccgagtgagaacttatgaccatttgaattgctctagagct

SEQ ID NO: 3503 - DNA, 423 bp, Glycine max
acctgcatgcgagcaagcttcggtattcaatttcgagcgtctcgatatattacgggactcaaattgacttccgagttaaacgttattggcgtgggaaaatcctcagagctttggaattcaattgcgagcgtctcgatatattacgggtctcaactcagacatccgagtaaaaagttattgtcgtttgaattagctctgaggttcagaattcacattcgagcgtctcaatagattacgggactcaataagacattcgagcaaaaagttgttgtcgcttgaattagctaagagcttcacaattcaatttcgagcgtctcgatatattatgggactcaatccgacattcgagtaaaacggtattgccgcttgaaaatcctcagagcttcggtattcaatttcgagcgtgtcgatatattacgggac

SEQ ID NO: 3504 - DNA, 475 bp, Glycine max
  unsure (1)..(475): unsure at all n locations
tcctatgaaccctcaggttattttgttattaaataaatttataagacataattgactatttgtagttaacttaattattagcattaaatttataatacttttccaaatttatctttaattttataggggacctattcatcttctctaatcttcataggagagagaaagagataattcatggtattttagtcaaaatagttaatgcaccatatagatgaaataaaatcttataataagaaacaaaaaaatttgttgactatgtcttgtaaataaggactaagttagtattttaattaaattgatgtttgaaagtttaggtagttggatcagtctttggtgccattgttggaggcacgaatttggatgaaaggaagcgatgtgcagaggaggtagccaagcgaaatgtatcaggtttctttntcttttggtggtnntgaaattgcgattagtggttttgaaccttctttaattatac

SEQ ID NO: 3505 - DNA, 468 bp, Glycine max
  unsure (1)..(468): unsure at all n locations
cactggaattgcaatgttccatataatatttaaatggtgtattcgattacaatatattggtaatcgattatcagtgtatctgaacgttgaaattcaaattcaattgtgaagagtcatatcttttcataaaatgcattgtgtaatcgattacatgattatggtaatcgattaccagtgacaagttttgaataaaaggtcaagagatgtaactcttccaatggttttctcaaagattttctcaaggttataactcttccaatggttttcttgaccagacatgaagagtctataaaagcaagaccttgacttgcattcaaacaactnttagaactttnttagaacctcttgaacaacttttgagaaatcttgaaacctttccttctcatctttcttcttcttcttcctttgccaaaaagctttctaagttttctgttttccaaaccttgttcttctacagaaaacaaaagt

SEQ ID NO: 3506 - DNA, 477 bp, Glycine max
  unsure (1)..(477): unsure at all n locations
tcatcatcttgagganntttttccaaagaaatgaaggcacatgttactgagcattcttccacattattagggattcggagttgaatcacgaggaacaaccttgaaggttcctaatccttttgctataaaacaaggtaacataacaaaaataaaaaaaaaatgtatatgaagaaaaatggatgttcaacatcatggtcattgatacacatggtgcacaagataagaaagtctacactaattgtagatgtgaccatatgaatctctcaaaggacttttataatgttacaagggatatacataactaaacgttgactacaaattataaaagaggtctcttttgttgttatgtcaactttcagtgcaaacaaatagagggttntcaaggttcaaggagaatgaattccttaagatacanaataagttgggttgattggaacaaacaccaagtaccagataaagtttatattcttcatttca

SEQ ID NO: 3507 - DNA, 428 bp, Glycine max
  unsure (1)..(428): unsure at all n locations
gtgaatgctctattcaatggagttgacaagaatatcttcagacttatcatcacatgcacagtggccaaggatgcatgggatatcctgaaaaccactcatgaaggaacctccaaagtgaagatgtccagattgcaactattggccacaaaattcgaaaatctgaatatgaaggaggaagaatgtattcatgactttcacatgaacattcttgaaattgccaatgcttgcactgccttgngagagaggatgacagatgaaaagctggcgagaaagagcctcagatccttgcctaagagatttgacatgaaagtcactgcaatagaggaggcccaagacatatgcaacttgagagtggatgaactcattggttcccttcaaacctttgagctaggactctcggatagggctgaacagaagagcaagaatct

SEQ ID NO: 3508 - DNA, 344 bp, Glycine max
agcttataatatatcgatacgctcgaaattaaacatctgaaactctcgtataattcaaatagtcataactattcacacggatgtccgattcaggcttataatatatcgatacgctcgaaattaaacatcggaaactctcgcgaaattcaaatggtcataacttttcacacggatatccgattcgggcacataatatgtcgagaagctcgatattgaacaacgaaagttctttacatatcaaatggtcttaacttttcacacggatgtccgattcaggaatatcacatatcgagacgctcatattgaacacaccaagctcttgagaaattcaattgggcctaact

SEQ ID NO: 3509 - DNA, 339 bp, Glycine max
agcttatgaccattcgaattttttgagagtttccgttgttcacactctagcgtgaatatgagttatgtccccgaatcggacatctgtgtgaaaagctatgaccattcgattttctcgagagcttccgttgatccacctcgagcgtctcgatattgtacgaccccgaattggacatctgtgtgaaaacgtatgaccattcaattttctcgagagcttcctgtgaacaatttcgagcgtctagatgtggtatgtcccctaatcggacattcgagtgaaaacttatgaccattcgagtttctcgagagcttccgatgttcaatttcgagcgtctcgatatat

SEQ ID NO: 3510 - DNA, 449 bp, Glycine max
  unsure (1)..(449): unsure at all n locations
tatcttataatcaagcatccanaacacgtattcatgtatatngattaacactctcataatnttatnttttttgttattgttcttccaatcttattcgttcttccttcgacacagacacatataagcaaaatgcattatttaaagtaaattattgttatctaaacctctgccgatcctatataataatattgcatatgcatntcttgaaatggaatcttatacacatataattaagtgataagccatcatgtttaatgtgtcaatcaagcatatgaactaaattattattctttagaaactaattatgaatactaattaatgaagatgattgcttagtgnggaagcatacatgatgcattaactgatgaagtatgacccacaaattaatatataacacatatcacaaagtcaaattaatagagctagttgatcaatttacaaacaaaatt

SEQ ID NO: 3511 - DNA, 451 bp, Glycine max
  unsure (1)..(451): unsure at all n locations
ctgagtagccatctgccccatctaattngtcaaactcttaatggttgctcttgtctcttgctgaaattgcatattctggatggtcatttgcctcactaactcctctaaggaaggttgagaaggggcctgacttgcttgttgtctttgtcgctattgctgcattggaggaggaacatatggcctgcttagactatcaacattctagaaatgagggacaaattgttgttgctgctgttgttgttgtggaggatttgcccatctcagattcggatgattcctccaacctggattgtatttgatgcttgaaagattataattattctgctgatgttgagctttttgttgagggggtctattataaatgtatgcagcataggcttcacgttgctcattgactccaggttgctgcaaagaacgatagagatctgtatggtgatcaacagaagaacat

SEQ ID NO: 3512 - DNA, 377 bp, Glycine max
  unsure (1)..(377): unsure at all n locations
agcttgcatgccttactatgtatgtattgaagagatttgtgagattgattacggngaatttagagtacctcttttcaaatgtaagtgggtgaatggaaacacaggtgtgcgtaaagacaaaatgggattcactttagtagaccttaaaaaagttggttacaaggacgacccattcataatggcagcgtaagctcgacgtgtgttttatgtagaagatccatgcgactctagatgggcggtggttttgcaagggagaacaatttgtatcggtcaccatgttgatggatcaacacttgatgtcactgacatgccgtctttctccaaagatatgccttcaagtactgttgaacaggaagaggatgatgtatatgcaaatc

SEQ ID NO: 3513 - DNA, 473 bp, Glycine max
  unsure (1)..(473): unsure at all n locations
agcttaaacaagtagttgctttaggactngatttacactaaanaattaattagattggattatggtatatcttcttataatgagtcaaccaatgacagatgttacccaaaaagagccttgaagcatataacctctaggcccaaattctaaaccagtaaaatgtaagatgtgctagtgagatgaaatgtgatgcagtgcttgttaatgaagggaaaaaaaagaagctaaaaagctccaccatggcttgaaaaagaattgataagggtttcttattttcggtaatctattatatggttggtgcacaataatttagaaggcaggatatgtatagaagtntgtatgaccaactaaagtgttcataagctaagtactccacaaacttatgtacctgtggccatatattcaggagcaacatagccatatgtgcccattacccttgtagagacatggctcttatcaccagctggtccatc

SEQ ID NO: 3514 - DNA, 450 bp, Glycine max
  unsure (1)..(450): unsure at all n locations
tctgcatggctgacaacttcagttatttacattcgttatctntctcaacaagtataattagtcaaccgttaataaaaagaagacaagaggtatcatgagagtaataaagaaatgaatctcatttttcataacagaggaaactgtgatgacttatctacaaaacccataagaaaatagaaatgcaacaacactttagcactcaaaatgcaatttcatcctcaattaacttaaatatattnttagtcttttaaatttgagttacttaaatatgtttgtggaatgttagtataattgttttgtaaaaaattccaatgtaaaaagaatagatatgagtagtaaactttattaaaagacaattgatcgaataacttcccgcataaaattattgtacattaactgtaactcttaagtaatatgatgatatagaatatgtacataataatatatcac

SEQ ID NO: 3515 - DNA, 432 bp, Glycine max
  unsure (1)..(432): unsure at all n locations
agcttcctatggatttaatagtgtcaccatagttctccaagtaaacctatcaagaggtgatccctcttgctgtctgattntcaattggacaagcacgtaaattggaattgtgagcttaacaccaattacaatgttgaccagagcataataattctgacccatcattgcctgacatgtggtgaggccttggaaaggttcttttaccaactcatagtangtgtcattcttgcttgtagtgtanggtgtgttatactggtagatgtttcctgaaacaaaacatangaacaatgattgacttatcggactntntaatcatacattataaaactaattatttcacacttcgtgttaattaagtactagtattaatgacaaaatgagcaataacatattgaatccttatttgtggcagcataagctcggagacactta

SEQ ID NO: 3516 - DNA, 353 bp, Glycine max
  unsure (1)..(353): unsure at all n locations
actcagctatactatatcgagacgctcaagattaaacttctaanactctctttatattcaaatggtcataactntttacacggatgtccgattcgggcgcataatatgtcgagagtctagaaattgaacaaccgaaacttttgagaaattcatatggtcacaactattcacacggatgcccgattcaagcttatgatatatcgagacgctcgaaattaaacgtcggaaactctcgggaaattcaaataggcataactattcacacggatgtccgattcgggcgcttaatatgtcgagaggctcaaaattgaacaacggaagctcttgagaaattcaactgttataacttttca

SEQ ID NO: 3517 - DNA, 420 bp, Glycine max
  unsure (1)..(420): unsure at all n locations
ctcaagctggaagagaccctaggctnggaggaatagttcccgtgaggaagttgaaacttatgtccaaagcaacgagggttgaacagttgctgagcgtgggtggaataaaacccgtgaaccggttgttctgcaggtaaagttccttcagaatattattattcccagcgtcaccaccgcacagcgttgtcgggattgagccgctgaagttgttggagctaagatccagcgactctaaagtggagagcttcgtcagagactccggaaggggaccaaggaacgcgttgaacgccaccgcgagctctntgaggctnttcattggcgtgagaacgtccataggcagcgcaccggcgaagaggttgctggagatgtcgaaggactgaagagaagtgcaagcgccgaacgcttcggngagagcgcctg

SEQ ID NO: 3518 - DNA, 287 bp, Glycine max
  unsure (1)..(287): unsure at all n locations
agctntctccactaagtngccttattcctgaaatgtcttttctgatggccatggtcctagatgcaaggaagaacttctccaagaacaccctcttaaggtcatcccaattgaaaatagacctgtgagcaacgtagtataaccaatcttttgccactccctctagagaatgaggaagaacctttagaaaaatatgatcttctttgacatcacggggcttcatggtggaacaaacaatatggaactccttaagatgcttatgaggatcttcacctgcaagaccatgaaac

SEQ ID NO: 3519 - DNA, 464 bp, Glycine max
  unsure (1)..(464): unsure at all n locations
tgatgggtaaactggaatgctcatgtgatgcctccttacaaaatgcactagagcttggtcttggatatctaaatcaaatcccatcatatggtcatcgagaagttctgatcttatattcggctctcagtacatgtgatcctggtgatctcatggaaaccatccagaaatgcaaaaagagtaaaataaggtgctcagtcattggtcttgcagctgaaatgtttgtgtgcaaacatctctgcgaggaaactggagggacttattctgttgcactagatgaggttagtttgttgattttgatgatacccatgtagatgtagtacaaatacaaataattatctatgannagttattgaatntttatagtcaagcaaccttaatttaagcaagtacttaagatattgctgatcaccttagaatttgtttgcatctttcaagtgtttgaaattcatgaatgtatgcattat

SEQ ID NO: 3520 - DNA, 467 bp, Glycine max
tagcattacttattacccaaagagtttgtcattcatagtgatcacgagtccttaaaatacttaagaggccaaggaaagcttaataagaggcatgctaagtgggtagagttattagagcaatttccatatgtcatcaaacataaaaaagggaaagggaatgtactggctgatgcgctgtctaggagacatgctttactagctatgcttgaaactaaactgtttggtctcgagtctatgaaagacatgtatgtgaatgaagtggactttgctgaaattctagctgcatgtgaaaagttttctgaaaatggttactataggcataatggattcttgtttaaagcagataaattgtgtgtgcctaagtgttccattagagagtggcttgtgagtgaatcacataacgaggggatgatgggacactctgtgattcaaaagaccctgtaaattctgcaagagcatttcttttg

SEQ ID NO: 3521 - DNA, 446 bp, Glycine max
  unsure (1)..(446): unsure at all n locations
agcttctattgctctcattcatctttacttgggctatctcagaccttttatttttgttgtctaagattttgcatacacctccttcaaagtgaagtgtgtagtctctctccatcatttggccaatgcttagaagattttcttttaggctaggaactagtaagacatcatggatgagtcgcgtacatttatatgtctccaccatgacagtgcctttngcctttgatttaaccacacttacatttcccagtcgaactntgactntgacagactcatcaatacttttgaaaatagtctcatccttggccatgtgattgctacatccactatccaagtaccagcttcctccctttccttttattgagtcttgagtggcgtagaacgtacattgttcttgatcatgctcctctgtgatattagcttgatgcctatttttggtgcgacaattt

SEQ ID NO: 3522 - DNA, 459 bp, Glycine max
  unsure (1)..(459): unsure at all n locations
agcacctaatgtcatattagatgggaattgtgtatcttaacataagagatttcagatggactttaatcataatcccacagctgaccttttcacgagatctctacttaaccctttggttaaatgatcggccaataaatatgcacatagaatcattagattctagcatctcgtgactctataaccgagttcacagcaacagaatcattagattctagcacatagaatctatatgctttagaatgttcagctgatccaataaatatgcaatctatacctctttcacctatggttttccttttaggttctgtaagcctgactacagccctacatccncaaattttgagataactcanattaacatagcctcaccccanaatccttcacttaaacccgaataggataacatggaattcaccatttctttcaaggttctattcttcctttcagctacaccattct

SEQ ID NO: 3523 - DNA, 437 bp, Glycine max
agctagccatttaaaaaggcattgttgatatcaattttctgaagatcccaatgaaaggaagtgactaaagtcagaatagttctaattgttataggtttcacaactggggaaaatgtttctttgaaatcaaaatcaggctgttgatggaagccttttgctacaagacgtgccttgtacttactgacagacccatctgaattatgcttgactctaaaaacccacttgcaaccaattggttgcctagtaggaggtttaggaaccagttcccatgtattgtttttgagtagtgcagccatttcttcatccatagcatctttccacttaggatctttaagtgctgttttgacagttttaggcacagcatgagttagaagcaaggttggttggagtctaggcttgacaattccattttttgatctagttgtcataggatgaat

SEQ ID NO: 3524 - DNA, 450 bp, Glycine max
  unsure (1)..(450): unsure at all n locations
agctagtatggagaatgtcgaagctataaaagtcatgctaaggtcttttgagctggtatcaggactgaagattaattttgctaagagttcttttggtgcttttggagtatcagctcaatggaagcacctcgcggccaagtatttgaattgcagcttgatggcttttccttttgtgtacctgggtattcccattgaggccaatccgaggcggagtagaatgtgggattccattattcacaaatgtgagagaaaactctcaaattggaagaaaaggcatatctcattcggnggacgagtgacactgatccaatctgttctaacttccatccctatctttttcttttcttttttcaggattcctcaatcggtggcaaccaaattagtaaagattcagcgtgtattcctttgnggaggggagcatgatcaaaagaagatagcttggataagttg

SEQ ID NO: 3525 - DNA, 349 bp, Glycine max
  unsure (1)..(349): unsure at all n locations
ctaagcttcttgagttgctaatctcttccttattagcacttgctatgaggatatcatccacatacaagagaaggtggagaacacactctttcttccttntcagaatatatacacaattgtcatacctatttctgatgaagccatacctgatcaagaactcatcaaacttcaaataccacattcgagggcttngcttcagtccatacaaagattttttcaacaaacacaccttgttctcccctctttcaaaaccttcaggctgattcatgtaaatggtttccttcatatttccatgaagaaaagcagttttaacatctagctattcacgttccaaatcatactgatttac

SEQ ID NO: 3526 - DNA, 469 bp, Glycine max
  unsure (1)..(469): unsure at all n locations
attgaaattaaaagacattacaagtgatagttataaggtgatgtatctaaaattgattgaaacagtggccaaacattaattatacatctatttatttaaaatatactacaacaaatggagaattttaaaattgtgtattaggataataatttttttctttaattgtgtgaagactttacccgtattcacaccgaaatcaatctcttgttataaattcttttgaactttattagtttgagtatggtgtattatgctcttctatagaagcttatatntatagtgttaaagaaactatgaatttgatctttttagaagagagatttgatttacaataatctcatatttctttattntaataaactctccgatttaatgcagagatacttntcacataatcacatgactaaatataagagaagattgattatatattaattatataacaataaaagattattcgtatntttat

SEQ ID NO: 3527 - DNA, 466 bp, Glycine max
  unsure (1)..(466): unsure at all n locations
gagctgctgcatgcaagcttaaaggcttatttatttatttatttatctcattctagcattaaattaaagagtgagtgtataatacaaatctgctctttcggcatgattttgcttttctgcttttccaaacacattcaaagcagatccctcacgatataaattatcttcagccctaactggattgactttttatcttgtaaaaacaacatatttcggaaacatcaattgagtagataaaaattccataatcatacccaatcaaacatgtcaaccactaacatctttcaaaggaaagataactgaagattgccactgaaacatgccataatatcattaattcattattattcagattcagacacttccatttaacatgagtagattcccttcttattttcaaaaaacaacacanagttaggggttaattaaaaaatcactgttatatttatttatgtgtggatcacct

SEQ ID NO: 3528 - DNA, 260 bp, Glycine max
  unsure (1)..(260): unsure at all n locations
tgtattatacgcctgaatcgacctgagtgagaaagatatgaccatttgaatttatctagaacatacgtggatcatatttgaacgcctctgtctgtgatggaccttaatcggacctccgtgtgaacaggtatgaccatttgaatttctcgagagcttccgttgttcaatgtctagcgtctcgacatattatgcgcccgaatcggacatccgtgggaaaagctatgaccatttgaatntctcgagagcttccggtgttgaat

SEQ ID NO: 3529 - DNA, 350 bp, Glycine max
cgagtgcctgtatattgatgcgcctgaaatcgtcattcgagtgaaaagttatgaccatttgaatttctcgagagctttctatgtttaattttgagcgtctcgatatattatacgcctgaatcggacctcagtgtgaaaagttatgaccatttgaatttcttgagagcatccgttgatcattttcgagcgtctctatatgtgatgcaccttaatcggacctccgtgtgaaaaggtatgaccatttgaatttctcgagagcttccgttgttcaatttcgagcgtctcgacatattatgcgcccgaatcggacatccatgggaaaagctatgaccatttgaatttctcgagag

SEQ ID NO: 3530 - DNA, 315 bp, Glycine max
  unsure (1)..(315): unsure at all n locations
agctntctatgcatagaatattcaaggaaaatactgtcatctgacttagcatcaaattttcctaagttatcttttccattattcaatacanaacatttacaaccaaagatatgaagatgtgagatgtttggttntctgccattgaacaattcatatggagttttctttaaaatgggtcttattaaagccctatttaaaatgtagcacgcagtgttaacggcttcagcccaaaagttttttggaagaggagtatcatttaataaagttctagcaatctcttccnagatctatttttcctttccacaacaccatttt

SEQ ID NO: 3531 - DNA, 436 bp, Glycine max
  unsure (1)..(436): unsure at all n locations
agcttgaggagtaacattaaatttcagtctagcattttcatctgtttatgagtataaattataaccacttttcacatgttagcattattagaatgcttcattaatattattttattgctgtaccatcttgcttccttattgtcttttaggtttccatttctactttttttctcctagaaaaagcttgttgagttagaatctttaacaacttgtgctgttcatggacattngtgtttctaactatgacaatcttctgttttaggctgttaaaatattaacgacagattatgaaccctcagatttagacatcctttatgctgagggagttacttcatctaatggngtggcttgtgtggagttttcatttcccaatcagcttctgacgaaactgttgacactactgatctacatgattctttggtcaggtatgtgaaaa

SEQ ID NO: 3532 - DNA, 460 bp, Glycine max
  unsure (1)..(460): unsure at all n locations
ngtatattgtcttattcaaaactggaccactntcatattcttctttcgcattggcataatgttcaattactgtcaaggcttttggagcatctataacttgttcaactatattgtgtgcaacatttcggttgataagctgcatcaaatctctctttttcctctgtattctttcagcacagaaagtattttttggttctcaattgcttggcaactatagtttgtatctctcctttgacgatcttcttccgtatcgcatccagagaagcccccttctcaagctcttctaacaatacttttcttgcttcctcaaattccatctaattcaattaagcagtgagtgccaaaaagtattgttagagaaaatgaaatatgatngacaatctaagtaattaatatttaatactcagcagaaaaaagaagaaatcagaaaagatgttataaagttacaagttgttggtcc

SEQ ID NO: 3533 - DNA, 329 bp, Glycine max
  unsure (1)..(329): unsure at all n locations
agctttntattctaatttagaaatccatgaaggttctctaaactctgaagtttatgggatcaagatggtcattgaccaatccctattttatgatttaaccaaattgcctagtgaaggtgtgccttttgagggtgcactgattgatgaatggaaattcgatttctctatgcatgatgcccgccggttggtttgcaccaaccaagcggatatgaccggaagacttcttgtcggttcattggcttttgaaagtcgcatcctccattaccttatagtttgcattntgcttcctagatcttcaaaccttgcccaagtttctgaagaagatctca

SEQ ID NO: 3534 - DNA, 470 bp, Glycine max
  unsure (1)..(470): unsure at all n locations
gttttaagttcttcctcanaactgtcctaagcaaagtttccaaagtcctattatcaacttccgtttgcccatcggtttgtgggtgacaagtggttgaaaataacaatttagtgcccaacttgctccacaaagtcctccaaaaatggcttaggaacttagagtccctatcactaacaatgctccttggcaaaccatggagtctcacaatctccttgaaaaacaaatcagccacatgggaagcatcatcaactnttttacatggaataaaatgagccattttagaaaacctatcaacaaccacaaaaatggaatctctaccattgcttgtttttggcagccccaaaacaaaatccatggataaatcaatccaaggatactccggaattggcaatggagtatacaatccatgaggctttaccttagactttgcctttntacatacaatgcaatgttcacaaaatttctgcaca

SEQ ID NO: 3535 - DNA, 350 bp, Glycine max
  unsure (1)..(350): unsure at all n locations
tatatattgagtagcttcagatgccgaacacaactgctttaaaagaggagtgaaggaggtcattaaaggtataaggagaggccataacggggctgactgttgtcgtgctaactatggctttctcacagaaacattacacatgcttaccctaatgatccggtattgtgaatgcacattgtgtgtgatggctgcgaacatgtcaccgattgatgtcatcactcatgttcctattctttgtgaagagtctgacgttccttatatctatgttccatctagagaagtacgcaaccaactctgcattncatatctagactatgctngngtgccatatgcccttatgctattattga

SEQ ID NO: 3536 - DNA, 416 bp, Glycine max
  unsure (1)..(416): unsure at all n locations
agtcccttaccaccttgtggtaatgctttgtattataccatccatcaaagaccttaataggcttaggaccccaatcaatgctcttagatttcatgaggataaggcagtgatcagagtagctcctttcaacgttgtgctgcgaactgtctggccacttataaagccaaccatcagagacaacagctctatccaatttgcttttacaggaaccattaggcctaacccatgtgaactgcttacccacactacgaatatctttcacctccatgatagcaagccaatcattgaaatctgacatgatgctggactctgaatntccatgattgcttcccattctctctgaagggtgcctaatacaattaanatcgccaataagacaccagcatatatcttgggaatgcagcttccttctactc

SEQ ID NO: 3537 - DNA, 438 bp, Glycine max
  unsure (1)..(438): unsure at all n locations
gctatatttaaagacgtacttgaatattataagctagctaaattgacttgcctaataattatgataatatattttaagatnttgtttgtgatcataatattgatacgaaatagtctccgtcgaacgcagtaaatcctagaccacttagttaagagatacaaatcactaccacttatatcaatcattgttggttgtataatttttaagataattattataaaaattaataagctaatatagtacataaaaattggaattgggataacattntaacaaggaaaaatattatatattcttaaatttgggaaatcaagaaaaatatagaaagaataataaagggaaaataacttatttgattttttgaagaanaaaaaatatggtatcatgatgaatntatggtgtttcccaaatgcatttaagaaattttaaaaatntata

SEQ ID NO: 3538 - DNA, 369 bp, Glycine max
ctatagacaatgcagactcttcaactgttctgcacccaagtatgaatcagctcctccttctcatcttttatcacggtgaggccggttttcttcatgattacctggacagaactcacccattggctgtcggagataggataaatgattccagtttgcaaaagcttggttaccttctatctcactacatcaagaatcaccgggttgtgtctactctgtgtctgccttactggtttagcaccatcctcaagattcatctgatgcatacatgtggatgggctaataccatgaatgtcacgcatggtctagcctatagacttcttatgcttcctgagaactgataacaacttatcctcttgctcatagcaaggg

SEQ ID NO: 3539 - DNA, 324 bp, Glycine max
  unsure (1)..(324): unsure at all n locations
agcttaacanaagacatgcgaagtgaatggaattcctagagaaattcccttatgttatcaaatataaaaagggaaaaggtaatattgtagctgatgctctttctcgacgtcatgcattactttctatgcttgaaacaaaattgattggtcttgaatgtttggaaagcatgtatgaaaatgatgaaacttttggagaaatttttaaaaattgtgaaattttttcagaaaatggtttctttagacatgaaggctttctttccaaagaaaacaaattgtgtgtgcctaaatgttctactagaaatttgcttatttgtgaagcacatg

SEQ ID NO: 3540 - DNA, 575 bp, Glycine max
aacgattaatatattattatatttaaggcatacgagtaaataatatatttgattttataaaaaaaaatttaaaaattatttttttgcacaagaattatattttttatataaattattggatgagtacttgttgggaattgatatacacaatccccaacaggagagatagaaaaaaaaattcacatccatcataaatcaagaaaaagaacggttttgggagaaaaacgaagatgaacaacacagacaagaagagagagtttaatctgtgggtggatgtggagggaccttgcccgccctatttttttatattggattaatattggatatgttattttaaaattagaatatttttatctttaacaatatttcatgcacttataatttttattttgaagagaataatacttttagagtaatattagaattatctttttatggtcttcattgtgaagataatttctttatctatttataatatatgttactagtaattttcacttttcatgtttttctttttataatcattattgatatttttaaaactataattaagtacatctataattgaacaattt

SEQ ID NO: 3541 - DNA, 605 bp, Glycine max
taataagtccatttatagattgaaacaagcttcccgccaatggtatttaaaatttcatgagatcatttcttcatttagctttgaagagaatgttatggatcactgtatatactacactgtcaagggtagtacgatttgttgacttgtattatacgtcaatgatattctgcctgcgactaaagataaaggatcgcctcgtgaggtgacactatgcctctcatataactttgatatgaaggatatggctgacgcatcttatgtcataagcataaagatccatagagaaagatctcgaggcattttaggcttgtctcaagaaacctatatcaaccaagttttagagagatttaatatgaaagagtgttcaccacgtgtagctcccattgtgaagggtgacaaacttgctttgagtcaatgccccaaaaatgattttgagcgggaacatatgaaaaatattccatatgcttcagcacttggcagtcttatgtatgctcaggtttgcactagacctgatattgcattccctgttggagtcttcggaagatatcaacgtaatctatgtattgaccactataaagctgcccagaaagtgatgagatatcttc

SEQ ID NO: 3542 - DNA, 577 bp, Glycine max
ttgtcttcatgaatcatatcgaaactgatttactggtcttttatggccatttgtagtttcctcttccccatgtctaccacacagcttgcggtggacataaaaggtcttccaagaattaggggaatgtcagcatcttcttcaatgtctatcactacataatcaactggaaagataaaatgtttgaccctaaccaaaacgtcttcgatcactctgtagaagcaagcgtcatgatgatgaatcaagttgattcaagttgttttgatgatgactaagatgatgacaaaaagcccaaagaatgatttcaagattcagttaacaagttcaagattaagtttaatttcaagtttcatgagaagaaatcaagaagattcaagaatcaagagaagtttgatttcaagattcaagagaagaagaattcaagattcaagagaagaaatcaagaagacctcacaagggaagtattgaaaatatttttcaaaaaacaaacatagcacaattttgtttttcaaaagaatttttctcaaaattttctaagttaccagaagttttactctctcgtaatcgattaccaatttcc

SEQ ID NO: 3543 - DNA, 326 bp, Glycine max
  unsure (1)..(326): unsure at all n locations
agcttatagggtaaaagtctcacgattgtcacgtgctcatgcaacaattgttagccgtggctatacgagacatcttgccaaacaaagtcaggttagcgataactcgcctgtgctttttcttccatgctatatgtagcaaagtcattgatccagtcatgtttgatgaagtggaaaatgaggccgcaattatactatgccagttggagatgtattttccccctgctttctttgacgtcatgattcacttgattgtgcatctggtcagagaaatcaaatgttgtggtcctgtttatctacggtggatatacnccggtgagcgatacatg

SEQ ID NO: 3544 - DNA, 581 bp, Glycine max
tctcccaattcaattaaatttatttccaaccatacacatcaaatattcacttaatgcatgtaaaattacaaaactactcctaatacaaaaactagtctaggtgccctaaaatacaagggctgaaaaattctacacttctaaggtaccatacctatattgtggagccctaaatacaagaccgaaaaataatgaaaccttaatctaatatgtacaaagataagcaggctcatacttaacccatgggcccgaaatctaccctaaggctcatgagaaccctagggccttctcttgcatctctggcccaatttttttggagtcttctatccaatgcccttgcaaggtaggattacatcattccctcccccttgaaaaggatttgacctcaaatcctgaggttcttgaaactctgggcttttttcctcaatacttttaaaacgaacaaaaacatatgtattagtggtgtttggtatgttgaagtaaggtaaggtcttaaaacccatttcctgggcatctttccatgaaagaacatcgttcctcagtaactcaatgagtggtgctaaaagtataaaaaaatatgggac

SEQ ID NO: 3545 - DNA, 632 bp, Glycine max
  unsure (1)..(632): unsure at all n locations
tgccttgccccttgatatatttgagggattcatggtcactatgaatgacaaattccttgggataaaggtagtgttgccatgttttcaaagcccgtactaaggcatacaactccttatcataagttgaatagttaagggtaagaccacttaacttttcactgaaataagcaattggatggccttcttgcaacaacacagccccaatcccaacatttaaagcatcacactcgatttcaaaagatttttgaaagtttgcaacgcaagtatgggggcattagttagcttttgcttaagaatattgaaatcttcttcttgtttctctccccatttgaaaccaacatttttcttgggcacttcattgagaggtgctgtcaatgtgctaaaatcattcacaaatcgtctataaaaacttgctaagccatgaaaactcctcacctcggtcatggacttaggtgtaggtctttcttgaatagccctaaccttctnctcatcaacttgcactccttttgaacttacaacanatccaagaaaacacacatggttagtacaaaagatgcatttttcaagaatggcatacaattgttcttcttctagcacacaccagataaattntaaatgatcaatatgaaaat

SEQ ID NO: 3546 - DNA, 418 bp, Glycine max
  unsure (1)..(418): unsure at all n locations
agcttcttcttgtttctctccccaattgagaccaacatttntcttgagcacttcattgagaggtgctgccaatgtgctaaaatccttcacaaatcgtctataaaaacttgctaagccatgaaaactcctcacctcggtcacggacttaggtgtaggccattcttgaatagccctaaccttctcctcatcaacttgcactccttttgaactcacaacaaaaccaagaaacacaacatggttagtacaaaagatgcatttttcaagattggcatacaatggttcttctctaagcacagtcaagacagattttaaatgatcaatatgcaaatcaagtgaagtgctatagataagaatatcatcaaagtacaccacaacgaacctttctatgaactctctcaagatatgggtcattagtctc

SEQ ID NO: 3547 - DNA, 341 bp, Glycine max
  unsure (1)..(341): unsure at all n locations
agctntatcatcatcagatagtgagccaatgaactcctatctcttctctctgcagacatgttccatctacacaaccgcatccacctccatcacccatccatctgttaaacaagtggcctcagttatcttaagaagggggggttgaattaagatacaaaaactatcccccatttaatttttttaacaattcaacccttattatgaattactctaagaacaattcaaaacaaacttctttaaagcgaaatataaacaataataaataaaagaagtttaagggaagagagaatgtaaactcagtttttatactagttcccttatgttcagataaccttacaact

SEQ ID NO: 3548 - DNA, 239 bp, Glycine max
agcttgacaggtttaggtgctactactggtagaggcacttcaatttgcttgccagacctcaaggtgatggcactcacattttttggattctgcacagcttgtgaaggcaatttgttagaattttgggactgaacttggttcaactgaatagccatttgcccaatctgatttgtcagactctaaatgaaggctcttgtctcttgctgaaattgcatattctggatggccatttgcctcac

SEQ ID NO: 3549 - DNA, 361 bp, Glycine max
tcttggggttggcaggctattatagaaagttcattgagggattttctttattggctttgcccctaactaagttgactcgtaagaatgagaagtttgtttggaatgagaagtgtgagcaaagtttccaagagttgaagaggcggttgacgacagctccagtgttaattttgcccgaccctaagagaacatttgaagtgtattgcgatgcaagcgggcaaggcttggggtgtgtgttgatgcatgagggaagagtattggcgtatgcttcacgtcaattacgtcctcatgaagtttactatccgactcatgacttggaactagcagccggggtctttgccttaaagatttggaggcattattt

SEQ ID NO: 3550 - DNA, 443 bp, Glycine max
tccaatccatcttcttctacttcctctctttctccttctcattctcctgtttctcaaccactctctccagcagaaactccacaaaatagaactgctaccacttcaaagagttactttggcctagctactatacttgctctagcaattggaggctgtgcctttatctccctcctagttttgatcatctttgtatgctgtttgaagaggaccaagagtgaaagcagcggcatactgacaggaaaagcaccttgtgctggaaaggctgagatttcaaagggttttgggagtggagtggaagaggctgaaaagaacaagttgttcttctttgaaggttgctcttacaagtttgaccttgaagacttgttaaaggcttcagctgaagttcttggaaaggggagctatggaacaacatataaagctgctttggaggatggaacaacagt

SEQ ID NO: 3551 - DNA, 432 bp, Glycine max
  unsure (1)..(432): unsure at all n locations
agcttgcttcagaaaataataacactaaaaaatcaggtcattcactttaaattatgaccaataatattaaagtacattcaagcattcattcatttattcggaaacaattgggagattgaaatttttgctcacgaaaaaaggatacaataaaaaaattactatatacaaatccatgctacctgttcattntcaccatccttcttcgaaagaaataaatgccaaaagcagacagaacatgatacctcatacatggcttcgagccttttgagcaccagatcgaggaatagccaacacagctatgagtccactgataagggctgaaacagctgccacagcaaaggctggtgagtntccttcaccaaatagctgatcccatggtccacttcccagtgacactattatctgttaanacatgataaacatgtaacttag

SEQ ID NO: 3552 - DNA, 708 bp, Glycine max
tcattaagaggcttcctctagaagcttcctcgtggcttctttgagaagctttcacaagaagcttctttgagaagctacatccttatctatccacccctctattaactaaattaacttccttaaaaataattacggatgaaaataacgcaacaaataatcaaacatcaaacataattactaataatatatagatatatatatatcagggtgttacaactctcccacccttttagaaatttcatcctcgaaatttaccttactcacacaaggatgggtgagcttctcgcatctgaatttctaattcccacatggcatcttctcctgatgcacctccccatatcaccttgaccaacgaaatctctttccctcttacgtgttttgttcgccaatcctcgatcctcaaaggcaatatttcatatgtcaaattctccttcacttgtacatcatccaattcaatcacatgggatggatcacggatatacttacggagttgagacacatgaaagacattgtgaggattagaaagagacggcggtagtgcaattaggtatgccacagggccgactttcttaagaatttggaaaggaccaataaagcgaggtgtgagttttcgggatttcaatgctcgaccaacccccagaccatggagtgactctcaagaatacatgatcaccaacctcgaatccagatctttcctctctatcatga

SEQ ID NO: 3553 - DNA, 491 bp, Glycine max
ttgaggaaattcaaacgacaataccttttgacacggatgtcggattgagtcacgcaatatctcgagacgcttgaaattgaataccgaagctttgagcaaattcaaacgacaataactttttactccgatgtgggattgagtcacgtcatatgtccagacgctcgaaatagaatacccgagctctgagcaaattcaaacgacaatacctattgactcggatgtccgattgagtcacgtaatatctcgagacgctcgaaattgaataccgaagctctgaccgaattcaaacgacaataactttttactcggatgtgcgattgagtcccataatatgactagacactcgcgatttgaaataccgaagctatgagcaaattcaaacgacaataacttttatcttggatggccgattgagtcacgccatatgtcaaagacctcgaaaataaataccgaagctttgagaaattcaacgacaatacttttactcggat

SEQ ID NO: 3554 - DNA, 317 bp, Glycine max
atcattcgtcctattataggtgctaaacgattcacaccaatcatgataataccaaaaagacttcgctcataaataatgggaagagtatctggggagtctattgttaccacattcatgacccaaacatttcaattcttcgagctatagcatatttggaaaccacatacggggaaagatgctcagccaagcgggacatattagcaagtgaaaatctaattcagagtaacaaatcgataagtataacagtgactttagctcaccctctattgatagatctcatatcaatgacttgccgtacattgccatttaattcccat

SEQ ID NO: 3555 - DNA, 261 bp, Glycine max
agcttttgagcaattcagatggtcataacttttcacttggaggtgcgattcacgcgcataatatatcgagatgctcaaaattgaacaacggacgctctcgagaaattaaaatggtcataacgtttcactcagaggtgcgattcaggcgcctaatagatcgagacactcaaaattgaacaacgaaagctctcgagaaattcaaatggtcataacttttcacttggaggtccaattcaagcgcataatatatcgagacgctca

SEQ ID NO: 3556 - DNA, 333 bp, Glycine max
  unsure (1)..(333): unsure at all n locations
agcttgcagaanatgtcgatgttgagtgtatactatntttcttccatgtctcaattgtacatagcttgtgtcttcttcatagataacgcatgcacgatggcccttaacactgtatccactcaaattcccgtatgttggaaagtcattaatggtacaaaatagcattgcatgcaacttgaatgtctcatttcgatacccatcaaagacagtaaccctctagtcccaaacctttgtcaagtctttaatcaagggatgagataaacagcgatgctatttcctagttttgttgggctcgatatcatcatagacaacatgatgtatctttacttcatg

SEQ ID NO: 3557 - DNA, 561 bp, Glycine max
ttgagtttcttcttcatgaatgcaggaagaatcaacaattaactggaaggaactgactcaaacttgtgagatggcagaaaagtgcctaacaacaaactactatggtgcaaaggaaacaactgaggcatttcttccccttcttcaattatccaactcacctatgattgtcaatgtttcctcccaagcaagattgttaaaggtacaatagtggctaaacttttcttttgaaacttgaaatatgattttacactaaagtctcaacattggcaaatttgtgttatgttgatgtttcaagggatagcaaacgaattggttaaaggggtgtttgatgatgctgaaaatcttacagaagagagaatagatgaggtactcaaagtttatcaaagacttaaaagaaggctcacttgaaaacagaggttggccaacctttttgtctgcttatatggtctcaaaagcagccatgaattcatacacaaggattctagccaagaagcaccaaaacctttgcattaattgtgtgtgtcctgggtttgtgaaaacagacataaacagaaacactgg

SEQ ID NO: 3558 - DNA, 609 bp, Glycine max
  unsure (1)..(609): unsure at all n locations
tcaagaataatggcctcaacaaacttcttattcccataaggaaattcaataaataggcctcctatttttaatggagagggttaccactactagaaaacccaaatgcaaattttcattgaggcaatagacttaaacatttgggaagccatagaagttggaccttatgtacccaccatggtggctggaaatacaacaatagagaaacctagagaagagtggtctaaagaagaaagaagaatagtgcagtacaatttaaaggctaaaaacatcattacttctgcctaggaatggatgaatattttagggtgtcaaattgtaagagtgttaaggatatgtgggacactctacaagctacacatgagggaacaattgaggtcaaaagatctaggataaatactctaactcatgagtgaattatttaggatgaacacaaatgaaagtatacaagatatgcagaaaagattcacacatatagntaatcatcttgcatcattaggaagaacttttcaaaacgaggatctcatatataaagtgttaagatgtttaagtagagaatgcaacccaaagtaacagccatcatagaatctagagaattttctattatgtctc

SEQ ID NO: 3559 - DNA, 359 bp, Glycine max
agcttggagaaccaagccaatcagaatgctagacgaaatatagatgggaatagaggtaacaatggcggtaatgacggaccgaggcagaaccgggttgagggagtaaagctcaatgttcctcccttcaaaggtagaagtgatccagatgcctacctggactgggaaatgaagactgagcacatatttgcctgcaatgactacactgatgcgcagaaagtcaagctagcagcagctgaattctccgactatgctcttgtttggtggcataaataccaaagagaaatgttgagagaggaacggcgagaggtatatacatggactgagatgaaaagggtgatgagaataaagtatgtgcccac

SEQ ID NO: 3560 - DNA, 592 bp, Glycine max
tggttatctccttcttcactacatcaagaatcaccgggttgagtcttctctgtggctgtcttactggtttagctccatcctctaaatttattcgatgcatacatgtggatgggctaataccaggaatgtccgccagggtccagcctatagccttcttatgcttcttgagaactgacaacaacttttcctcttgctcatcagcaagggaggcagatataatcactggaaaactcttgctatcatccaagtaagcgtattttaaatttgatggcagaagcttcaattctggtgtggtcggctggacagtggtagaaggagatggtttctcagcctttacctcataaagaaagtcagaggtatgtgtacttcctgaaacatggttagtcctatctgactctataaaatcaatctcaagaggtaaaacaccaccaccaggcatgcaatcaatatcactctcagattcactctcagcatcaaattcagacatatgatcaagtacaatttcagactccatgcatgatgagtgagaggcatgcatattttaataaagatcagccatgtattcctcaacaacatggtcaattttttcagc

SEQ ID NO: 3561 - DNA, 292 bp, Glycine max
agcttggcgggttcaggtgcacgtgctgctaatggtggaggcaattgaatttgcttgccagacctcaaggtgatggcactcacatttctcggattctgcacagtttgtgaaggcaatttgtcagaattttgggactgagcttggttcatttgagtagccatctgccccatctgatttgtcagactctgaatggaggctcttgtctcttgctgaaattgcatattctggatggtcatttgcctcactaactcttctaggaaggttgaggatgagcctcacgtgcttgttgtca

SEQ ID NO: 3562 - DNA, 385 bp, Glycine max
agcttctggtgggacatcttgacttgctttccaatctgacattcaccacagattctgccttcttctattttcagattgggaatgcctctaacagcacctttggtaatgattttcttcatgcctcttaagtgcagatgcccaaatctttgatgccatattctgacttcatcttctttggagaatagacatgtggaggagtaactggtttcttgaggtgtccataggtaacagttgtcctttgatctgctgcccttcattagaacttcactcttttcatttgtcaccaagcattctgactgtgtgaagtatacattaaatccttcatcacacagctgactgatgctgatcaagtttgcagtcagtcccttcaccatcagtactttgt

SEQ ID NO: 3563 - DNA, 560 bp, Glycine max
cctaaaatattggacatggcagtttgttgtcgtccgtcctgtatgttctgttttgatgattgcattacagctacgcggctgtatccaaattggttgagctgggcattcaccatcgttcttaacatatctgtgtcgttagccttgtattctctggtggccttttaccatttgtttgctaaagaactggcaccacacaaacctctagctaaattcttgtgcatcaaaggaattgttttcttctactcttggtaggtaagctcatacagaaaaaaaaaacctatttttacatatagatcaatacaaataattggactagttgatggttctcaaccatttttcctttggttttattttttattttttttcatattgcttttacttatttattttggtgtagccaacaagacaataaactcaatgtaggaaatttcaacctaaaaaagcagagaggatcataatgctttgggggttcatgccaaggacatatgtcatgagaagacaaagcataattttgaaatggcacaggagagcataagataggtacgtccacacttgacagt

SEQ ID NO: 3564 - DNA, 343 bp, Glycine max
cttaactcggaggtccgattcaagcgcataatatatcgagacgctttttattatccaacggaagctctcgagaaattcaaatggccataacttttaactcggaaggcggattcaggcgcgtaatatatcgagacgctcgaaattgaacaacggaagctctcgagaaaatcaaatggtcataacttttcacacagaggtctgattcacgcgcataatatatcgagacccctctaatttaacaacggaagctctcgagaaataccaaaggtcataactgttcactgggatgtccgagtcaggcgcataatatattgagacgcttcaaatagaacaacggaagctc

SEQ ID NO: 3565 - DNA, 582 bp, Glycine max
tcgaatgcactattcaatggagaagacaagaacatcttcagactgattaacacttgcacagtggccaaagatgcatgggagatcctgaaaatcactcatgaaggaaccttcaaagtaaagatgtccacattgcaactcctggctacaaaaatcgaaaatctgaagatgaaggaggaagagtgtattcatgacttccacatgaacattcttgaaattgccaatgcttgcactgccttgggagagaggataacagatgaaaagctggtgagaaagatcctcacatccttgcctaagagatttgacatgaaagtcactgcactagaggaggcccaagacatttgcaacatgagagttgatgaactcattggttctcttcaaacctttgagctacgactctcggatagggctgaaaagaagagcaagaatctaactctcgtgtccaatgatgaaggagaagaagatgagtatgacctggatactgatgaatgtctgaccaatgcagttgtgctccttgaaagcagttcaacaaagtgctcaacagaatggacaagaagcagaaaccacatgtccagaacatccctt

SEQ ID NO: 3566 - DNA, 607 bp, Glycine max
ttgacattatgatacatggtgcctcctcattgttgaatggagcagcttcaaaattgataatggacaagaaagttctcagaaattttactctaccaacaacatcagggttgtccaagaatgaagaattgaatttggcaaatgacaaatgacgagtcttagtattgatctttgtttctttcccaagttcttctgatctaaaataaaaatctccaccgagtgacgttgctagatcatgcatgaggtcatgcatcacaaaccatttccgatcagaccaactacttctatttgtacttgaacgttggaaaaatgatctcgaaaccaaatcatcaaaatactcatgaccaacctcttctaaagtcctaccatttcttggtttcttcaaaagatcttcggccatccacaacaagattaattcatttttttcaaactcgtaatcttgtggatacaacgaacaataaacaaagcacccgtttaaatgtggagggagatcatgataactaagtctcagtgctggaataactttacactcactttcagaaagttcccacatgtcactattcagaatattattccaatccccaatgtcatgctttcttctcaacatgcc

SEQ ID NO: 3567 - DNA, 385 bp, Glycine max
  unsure (1)..(385): unsure at all n locations
gatgcttaagttggtgataacagggttcaaaccaacatcacaatatgtgtgaacttacttgggcaatctcaaatccacgtccttcgccaagtatgatgttttttgcgggcacacaaacattttcaaatgttacttctgcatgcccatgcggtgcattatcaaagccaaacactggcaatggtctctttatgtgaacgccaggagtctggacatccactaagatcatagaatgcttgttatgcttcactgcattgaagtcagttttcccctgtccatatngttttatcagtctctggtctctattgacatgaacggcacatggactgctaatgcaataactttcaaccaatactcaccatgactatcagaattctacattttggat

SEQ ID NO: 3568 - DNA, 553 bp, Glycine max
  unsure (1)..(553): unsure at all n locations
tactcttgcttgcaaaggcccgtccttgatatttgttttcaaaaacgatggaagttctttatggttaagctaatgcttggagaaaaataagatcttcgtaagacccaaatagtgtgggctgttggtgatttttagtactcagcttactatccagaaaacctaaaaggttcttcttataaataatataaaaaaaagtctaggaccatcatattttatatattttttaaatgaaataactttctgtgtccacttgangagtgtcatctatccatctaaatcaatatttccttttgcttgctcttataatagcgttatgtctaattgtaacttatgatatagtataatataatttaactaggatgctctgtcccctttcccttgctctattatgtttatctttatcttattattcggtatttttgcctttatttcttgcttgttttattcttacctctttattattagattccactcagtacttctttgatattaattaaatttaaatttctaccataaatattatgtatagtttacattttcgatttttttccaa

SEQ ID NO: 3569 - DNA, 307 bp, Glycine max
tgacaatcctgagagtcactccatcgccagttttcatcagcccaaatgccaccgcaagcttctcactgtggtacctgagggcatactccctttcttccccttccaactcgtgcatcgcggactctggcacgggtgcatagcctgcatccttgcaccttcatatcaactcatccaagaaacaataaatctcattagtctcacggtgagacttgtcacccatgctaaacagataacttctattgtcaacatctatggtgctataacccacttgcttctaatgcctctttggatatcacattctaccgat

SEQ ID NO: 3570 - DNA, 386 bp, Glycine max
  unsure (1)..(386): unsure at all n locations
tcacctgcggcatgcaagctntctccactaagttgcctgatgccaganatgtcttttctaatggcagtggtcctagatgcagggaagaatttctccaagaacaccctcttaaggtcatcccatctaaaaatggacctgngagcaaggtagtatagccaatcttttgccactccctccagagaatgaggaaaagactttagaaagatatgatcttcctggacatcagggggcttcatggtggaacaaacaatatgaaactccttgtgatgcttaagaagatcttcacctgcaagaccatgaaacttgngcagcaaatgtattaatccagtcttgagaacatatggaacaccctcattacgatattgaatgcacaagctttcataagt

SEQ ID NO: 3571 - DNA, 619 bp, Glycine max
cattgcaaagcagatatcgggtctgctattgcataagtatctcagatatccaatcaacttcctgaactcagtagcatcaaccagttcctctttaggatccttctccaacttaagccctggttcaattggtgttacagagggattgcaattcagcataccaagtttctttaagacctcctgtgcatatctgctttggtgcatgagcactcacttctgtacttggttaaattctaatccaaggaaatgtgataatttccctagatcagtcatcccaaactcagccatcatgaactgcttgaaaatatgaatctccttttcactgctgccagtcacaagcagatcatctacatatagacagaccagcagtaaattggttgaacaattggcccttatatacaccacatgctcactcttgcatttactaaagttttgtttggctaagactccatcaatcctcatgttccaggcccttggtggctgttttaaaccatacagggcttttctgatccagtacaccttgtcttcatgctttttcttctcaaagcctggtcactgtaatatgtatacctcctcttctagataaccattcaagaaagctgacttaacatccatatggtac

SEQ ID NO: 3572 - DNA, 495 bp, Glycine max
tagatccaattcaaacgacaataactttttactcggatgtctgattgagtcccgcaacatatcgagacgctcgaaattgaatgttgaaactctgagctagttcaaacgacaataactttttactcggatgtctgattgagtcccatcatatatcgagacgctcgaaattgaatgttgaagctctgagccaattcaaacaacaataactttttactccgatgtctgattgagtcccgtaatatatcgagacgctcgaaattgaatgttgaatctctgagccaattcaaacgacaataactttttactcggatgtctgattgagtcccgtaacatatcgagacgctcgaaattgaatgttgaagctctgagccaattcatacgacaataactttctactcggatgtgtgattgagccccgcaatataacgagaccgctcgaaattgaatgtggaagctctgagcaatatcaaacgacaattaaccttttactcggat

SEQ ID NO: 3573 - DNA, 345 bp, Glycine max
  unsure (1)..(345): unsure at all n locations
atccttagagtcacctgccgctgcagcttaacaatcaatttcgagcgtctcgttatattactggactcaatcagacatccaagtaaaaagttatcatcgtttgatatggctcaaagcttcaacattcaatntcgaacgactcgatatatgatgggactcaatcagacatccgagtaaaaagttattgtccttcgaaatggctcagagattccacattcaatttcgagcgtctcaatatattacgggactcaatcagacatccgagaaaaaagttatttttcgtttgatttgctcaaaggttcaacattcaatatcgagcggtttgatatattacgggactctatc

SEQ ID NO: 3574 - DNA, 351 bp, Glycine max
  unsure (1)..(351): unsure at all n locations
agctnttntcagtcgtttgtaaaggtgattgggtgttataaagcggcgatgcctactgtagactgtttttctcccatgattaagttgtatgtaacttgtgttttcttcacagatggggcatgcatgatgacccttaacactgcaaccgctgagattcccatatgctggaaagtcattaatggtacaaaagagcattgcacacatttcaaaggtctccttgcgaaacgcatgatacactacaaccccctcgtcccacaactttctcagatcttcaaccaacggacttagataaacatcaatgtcatttcctggttgtcttgggcccgatatcatcatagacaatatcatgta

SEQ ID NO: 3575 - DNA, 585 bp, Glycine max
  unsure (1)..(585): unsure at all n locations
tatgctgcaaacatttataatagactccctcagttgcaaaaccaactacaacagaataattatgacctttcaagcaatagatacaatctaggttggaggaatcatccaaatttgagatggacaagtcctccacaacaacaaaagtttgtccctccttttcataatgctgctggtcgaagcaagccatatgttcctccttcaatgcagcaacaacagcaacagccacaacaaagacaacaagcaactgaggctcctccttaaccttccttagaagaattagtgaagcaaatgaccatcaagaatatgcaatttcagcaagagacaagagcctccattcaaagtctgacaaatcaaatgggggagatggctacacaaatgaatcaagctcagtcccaaaattctgacaaattgccttcacaaattgtgcaaaatccganaaatgtgagtgccatcaccttgaggtttggcaaccaaattcaagtgcctccaccagtagcagcacctgcacctgaacctgtaaagcttcattcttcactagaaaaagaggatgagatagttggtgtcataccctaatttcgtctgggg

SEQ ID NO: 3576 - DNA, 535 bp, Glycine max
tctgctgcaacatttataatagacctcctcaacaacaaaaccaactacaacagtataattatgacctttcaagccaaagatacaatctaagttggaggaatcatccaaatctgagatggacaagttctccacaacaacaacagcctgtccctcctttccagaatgttgttggttcaagcaagccatatgttcctcctccaatgcagcaacagcaataacagtcacaacaaagataacaagcaactgaggttcctcctcaaccttccttagaagagttagtgaggcaaatgaccatccagaatatgcaatttcagcaaaagacaatagcctccattcagagtttgaaaaatcagatggggcagatggctactcaattgaaccaagctcagtcccaaaattttgacaaattgccttcacaaactgtgcagaatctgaaaaatgtgagtgccatcaccttgaggtctagcaaccaaatttaaagtgcctccaccagtagcagcacctgcacctgaacctgtcaagctttattctacac

SEQ ID NO: 3577 - DNA, 524 bp, Glycine max
  unsure (1)..(524): unsure at all n locations
tgtactttaccttatgagccgcatanttcggactcccacaagttgttccacaagttgtccgaacgatactcgccccctatcagaatattcaaaagtttgaagcagcttggtattattatatcttacatgagtcgaggtcctatataaaagctaatttggtgacgagctcacctgctcaggaaatgcactcaaaccataatcggaaatctttatatttcctagtgaatcacagaaaagattttcaggctgctcaaggcaggacgaaaaaaagaaaattttaagaaatcacagtaaggacaacaaacaacttctcagatctcactcaatgcaaacctttaaatctcagtgataaactcccttactgtggcaagaatctacaccggcaataagctgttggaaatatcttctagagtcagcttcactaacgcggccatggagtatcctgacaatcatattattcaccatcaaacattttccataacttgcattgtgattgataaaaggcacagtaaaagcttcaaaaa

SEQ ID NO: 3578 - DNA, 317 bp, Glycine max
gcttgagcacctctttcctcacctcttccttcatttatgggttgagccttctctggggctgcctgactgatctataggcttcttccatcattattctgtgcatgcaattggtagggctaactcctttaaaatcatatatgtgtcacccaatcgcttccctgtgtctcttgaggacttctaccaacctgttcttttcttctactgctagttcactgctgatcaccataggcgtgtgctcctcctacaagaacacatacttttgatggttgggtaggtaagatcttcagctctaccttggtcttctcggatgtactcct

SEQ ID NO: 3579 - DNA, 536 bp, Glycine max
tgttacaaatatcgtcaacacgaaaacccttaagggattctgtgagcatgtctactagttgatcttcgaagttgataaacttaatgatgatatctcttaaaggtaccttctcttgcacaaagtggcaatcaatctttatgtgtttagtcatctaatgaaagacatggtttgaagtaatgtggagagcaacttcattgtcacataatattttggtatgttgaacgtctccaaattttattagttagagaagtttcctaagccatgtgatctcgcatgtagctacttccatggcatgatactcaactttggcactggatctagcaatggttttttgcttctttcttctccatgagatcaagttccctctaataaggacacaatatctagaagtggagctcctgtctgatggtgatcttgcccaatcaacatcagagtagcaaacaactttgacctttcctttctcttcatatagaaatccatgacccaatgcattcttgatcttgaagtatgcacattgtagcaataaaatgactatc

SEQ ID NO: 3580 - DNA, 371 bp, Glycine max
  unsure (1)..(371): unsure at all n locations
agcttagtaggtctcgacctttctatctgctccaatctttnttcttgtgagcccatttacaaccaattggttttatatcctttgaagcttcaactaaagtccataatttgttgatcttcatttattccatttcagattccatagcttcttgcaatttcttacaatctaagctttgcatggtctcttcatagcttcttggatcatcatcatcatgataaaactcatttgatgtgtcatctaggaccatcaagtttaatctatcaggtgcatgatgcactcaagtagatcttttagaagcctcatacattgggtttataggttggtaaattgattctaagattggttcattaacctaatcttgaactataact

SEQ ID NO: 3581 - DNA, 299 bp, Glycine max
  unsure (1)..(299): unsure at all n locations
agcttctggaatactatccgccggaatcggacttctgtgtgacaagttatgaccattagaatntctcgagagctttcgttgttcaatttcatgcttctcaatatattatgcgcccgaatcggacttccgtttgaaaagtattgactcattgaattcttcgagagcttccggtttcaatatcgagcgtctcgttatattatgcgcctgaattcgaagtttgtgtgaaaagttatgacaatttgaatttcttgacagctttcggtgttcaatggtgagtttctcatatactatccgccgga

SEQ ID NO: 3582 - DNA, 397 bp, Glycine max
  unsure (1)..(397): unsure at all n locations
agctctcgagagattcaaatggtcatatctttttaaacggaagtccgattcaggcgcataatatatcgagaagcttgaaattgaacaacagaagctctcgagaaattcaaatggtcataacttatcacaccgaagtccgattcaggcgcataatataccgagaacgctcgaaatgaacaacggaagctctcgagaaattcaatggtcataactgatcacacgaaagtccgattccggcagatagtataccgagactcttgaaattgaacaacggaagctctcgagaaattctaatggtcataacttttcacatggaactccgattcaggcgcataatatatcgagacttttgaaatataacaacggaagctctcgagaaattcanatggtcataaaa

SEQ ID NO: 3583 - DNA, 369 bp, Glycine max
actggatgcattggttaacttggtaacccagctggccttgaatcagaaatctgtacctgtcacaagggtttgtggtttgtgctcctctgctgaccaccatacagaactttgcccttccatgcagcaacctggagcaattgagcaacctgaagcttatgctgcaaacatttacaatagacctcctcaacctcagcagcaaaatcaaccacaacagaacaattatgacctctccagcaacagatacaaccctggatggaggaatcaccctaatctcagatggtctagccctcaacaacaacaacaacagcctgctccttcttacaaatgctgctgcccaagcaaacatacattcttcacaatcaacaacac

SEQ ID NO: 3584 - DNA, 439 bp, Glycine max
  unsure (1)..(439): unsure at all n locations
ctaggattgaagcgcagtgaagcagatcattcaattntctatagtcacacttctccatgaaagtgtatntatctaattgtccatgttgatgacatagttattacagggaatgatgttgctacaatttgtctgctgaaaaagcacttattcatccactttcataccaaagaccttgggtgtgtaaaatactttcttggtattgaggtgactcaatcaaacgaaagcatttgntatttctcaaagaaagtatgctttggataggtttttttccagcaatacactccatctcccctatttgctcaaaatacacctctttgtatactaatacccaaaatacaactttttctcacctttgagaagttgagactggccaccccgacttctgtacgacgcgctnttttttaatttaattnttattttatttttaaatgtatgtttc

SEQ ID NO: 3585 - DNA, 384 bp, Glycine max
  unsure (1)..(384): unsure at all n locations
ctgatgcaacattnggagaggttaatgaaacaacgagatgatgcgctccatgagaggttggatcaaatggagaatagagatcataatgaagaagaaaggaggagaagagggaatgatagtgttcctagacaaaaccgaattgatggtattaaactcaacattcctccatttaaaggaaagaatgatccggaggcctacgttgagtgggagatgaaaatagagcatgttttctcatgcaacaactatgaggaggaccagaaggtgaagcttgccgccacggagttttccgactatgctcttgtgtggtggaacaagctacaaaaggagagagcaagaaatgaagagccaatggttgatacatggacggagatgaaaaagatcatg

SEQ ID NO: 3586 - DNA, 306 bp, Glycine max
agcttatgaccattcgaatttctcgagagtttccgttgttcaatttcgagcgtgtagatgagttatgtccccgaatcggacatctgtgtgaaaagttatgaccattcgattttctcgagagcttccggtgttcaatttcgagcgtctcgatttattatgaccccgaatcggacatctgtgtgaaaacttatgaccatccgaatttgtcgagagctttctgtgatcaatttcgagcgtctagatgagttatgttcgcgaatcggacattcgagtgaatacttatgaccattcgaatttctcgagagc

SEQ ID NO: 3587 - DNA, 423 bp, Glycine max
cacagacctgcatttatagctcacccctacttgaattccaaggtgagaaatgggaaattccaattgactgcagttgagaaaagaagttgcttccctacaccagccttcagatttacccagacacccgaattggctcttattgtagtttatctttagaccagaaaccaattcaaaacatttcatgatacactctaaaactctaacattatcattagtggcagccccaaagaacaaggtgtcatctgcatattgaagtatattaacttcctctttcttctttcccacttgatagctgctgaagagattgtttgttactgctgatctcatcaacccggtaaggccttccactactatattgaatagcaaaggtgcaaggggatcaccttgccttaagtctcttaaggacaaattcctgagaagtac

SEQ ID NO: 3588 - DNA, 304 bp, Glycine max
  unsure (1)..(304): unsure at all n locations
atatgtaagttggatcgagcctttgaaaaaatcatatgataagtaatgagtcaagcnttaagtttgcgtattcaactcaaaccaagctcaagcctactaaagctngactngactcgacttctttctacccttactgtggagtataaatttactataaggaaatcgcgcttcagagcataattttgttcttagaaaaatgttatactaaaatttatatgcacgtacgaatttagttttaataattttatattaaaagtaaaatattatgtcatgagtttacatgttttattttatttaaaaatac

SEQ ID NO: 3589 - DNA, 403 bp, Glycine max
gcacaaatggccaattatgtgcttctaaccaatgaccaattcttgtcaaaccgaaccattccccaatccgtgtcagttctaaaccatgaacaatacagccttgccttcatgcccatttcacctctttggagggaactcagaaaaatatgcaacactcagttatttgcccacaagtctcttgatgctagccaagatgttaggcgtaagatagtgcagcaactagtctccgatatccatcaaagcagccagataggtgaagcagtggatattggaacagcagcattcaagactaccataaatcttttatcaaacactatcttctctatggatttgattcactctacacgtaaagcagaagagttcaaggacttggtgaccaatatcacaaagctggttggaacac

SEQ ID NO: 3590 - DNA, 456 bp, Glycine max
  unsure (1)..(456): unsure at all n locations
cgcacggtcagagaacatggttttgaaggcattagcttctattgcatcgcctatataaaggatacggnggagacaatttatgacaatagcacaaactcgcagagatgaaatattcaaaaataataatattcaagcttaaattgctggaatcagtaaaggtccacttcacttgtccaaaggtccacttcaaaaataataatacaggaagatgtatgacacctgtcttanagcacgagtcatggccaaaatggctcctctcccatcactaggaggttgagtaatatgatatgcatcacctagtcaaaatccacatgaaataagtcaaccaaatataaactaaggctagaagaaaatcctacatatcttgcaattagacaaactacctgacatcccatagccacggacctctgcatagatnttggctcctcggttttttgcatgctcaaattcctaaaa

SEQ ID NO: 3591 - DNA, 439 bp, Glycine max
tgccaagagtgtggccttcagttgaaccatatactcagagtgaggagctgagaggatgaggtattgaccagggggatgattgtctctgcgagagagagaatcagttactatattcgaggaacccactttatactgaatttcgtagtcgtatccaagcaacttggctaggtaaaattgctgttccgacgtctgaactacctgagacatgagctcacgaaggctccgatgatctgtgaagatggtgaatttatggcccagtagatattgccgccacttgcggacggcggcaacgatggcatgcaattcgcgaacgtaagctgaagcgtgttggaggcgttgacaaaatgatttgctgaaataagctatggggtggccgtgttgctgaaggaccgcgcccatggccgtgcttgatgcgtctgtttcaagtatgaaagggatc

SEQ ID NO: 3592 - DNA, 464 bp, Glycine max
  unsure (1)..(464): unsure at all n locations
aagctctctaaactttttgcaagaaanatgtactaanaagtaatataatattttttttattgatttttatgtatgaaattaatttcattagttatcattaacagacaaattcaaggttgtaataattaaaatcaacgcaatgtgataaaatttggaggatgaactagagtatatttaaagaatttatttataataacttatttacatcttaattgaacttattttatgagattaatacttgtgtaactatttaagaaaacttaaaaaagtaattataatatgtttataagtcattttcagcttatatatttcaaaaaactatttaaaataacttatatgaaaataatttaatcatgcatattttctcttcaattataaaaacatttcatatantaaattttacatgataaatacttattcaacaaatatttaattgagttatttatcctagcatacctttaatt

SEQ ID NO: 3593 - DNA, 340 bp, Glycine max
  unsure (1)..(340): unsure at all n locations
agcttctcaagaaagcttccatgatttgagtctttgatgcaatccttcttgtgaagggacgagtcaccatagccatgagcatgatgctccaagaggattgggctagagttgctgaagaacgccctangattctcatgaacctcaaggtagatctctaagcccatgggccaaggttgggtccacttgtctttgtaaatattagaataggttnttcttcttttgggccttatattctggccattctagttgtatagggttttagccttgtatatcatggcattttgagtagtctttgtagtacggacttttttctattttcatgtnatttggcatgggggtg

SEQ ID NO: 3594 - DNA, 425 bp, Glycine max
  unsure (1)..(425): unsure at all n locations
acgtccaagtttcttgtgccatacccagtgacttcctttgatggataatagacatgttacattttgatttgatagttcactaagattaatcttataaagattatctttccttttagcagcaaaaagttgggtaccatttttgtgttagacaacacacccatcttcgctagaggaaaaatcaagtccactatcacataattgacttatgctaagtagatcctatttaagccctttaacaaacagtacattatcaatggaaggatagggattagtacttatctttcctatccctactatcttccccttctgatttcctctgaaagtgactattccaccatgcatgggagtcaagcattggaacatacactnttatcttattatgtggcatgagcaacctctatccaggtaccatgattggtgttttc

SEQ ID NO: 3595 - DNA, 427 bp, Glycine max
cgaagcctcagtatttaaagccagaccatgtaagtttcattggtgttttaactgcttgcaaatatataggagcagtatgaaaagcaagggactatttttctctgatgatgaataactatgagattgagccatccataaaacactacacttgcatggttgaagtgctacgtctagctgcgctactataagaagcagaacaactaataaagggtatgcctctaaaggctgattttattatatgggggtctttgctttcatcttgtaagaagcatgggaatgtagaaattgcgaaacgagctgcacaaagagtctgtgagttaaatccaagtgatgccagcggttatttacttatgtctaatgttcaggctgcatccaaccaatttgaagaggcaatggagcaaagaattctgatgagagaaagattggc

SEQ ID NO: 3596 - DNA, 428 bp, Glycine max
  unsure (1)..(428): unsure at all n locations
tctggtgggacatcttgacttgctatccaatctgacattcaccacttattctgccttcttctattntcagagtgtgaatgcctctaacagcaccttagtcaatgattatcttcatgcctcttaagtgcagatgtccaaatctttgatgccatattctgacttcatcttctttggaggatggacatgtggaggagtagcttgtttcttgaggtgtccataggtaacagttggcctttgatctgctgcccttcattagaacttcactcttctcatttgtcaccaagcattctgactntgtgaagtttacattgaatccttcatcacacagctgactgatgctgatcaagattgcagtcagtcccttcaccagcagtactttgtccagactangaagtccatcatgaactagccttcccattccaatgatc

SEQ ID NO: 3597 - DNA, 372 bp, Glycine max
gtggtgaagctccttcttacttgttttattccctagtggatggcgcctcccctcttctcttctcctttgccttctgctgcatctccatggtgaataatcaccattgaaggacctcattggagctcaaagatccagccttcatagaatcttcacaagcaagcttccatcagctgtcttactggtatatcctcaccctctaaatttatccgatgcatacatgtggatgggctaataccaccaatgtccaccagggtccaacctatagccttcttatgcttcttgagaactgataacaacttctcctcttgctcatcaacaagggaggcagatataattactggaaaacttttgtatcatccaagaagcatattt

SEQ ID NO: 3598 - DNA, 366 bp, Glycine max
agatttcctgcatgtctgtctgtgtttagaattcgtacatccaacatccctatcctatgaacagcagcaacagataaactataagttccatgatcacttgcatcaaaatcatgaggaatgaactgctgcagtgatgcaatcttgcttatttgctgtgtgttatgatgcatactaccattgaccctgtcattaatattaaaaatagaatgtgtgacctttacaagggcagtagagggcacattggctaaatgatcatggtcaagaaggtaagctgcaacttctcttatacctgtctccccaaccctcactgaacgtttcaatcctggttgtccaagggctttgccaacaaaacctttaggattgttt

SEQ ID NO: 3599 - DNA, 341 bp, Glycine max
ggatcctcatagacgtctgaaaccccatcaatccttgttcttggaaaacgtctatcctgccgactgtgatgactttgacaagttggaaaatccaaactgacctcatagactcctaatataagatttgatctagcatatttcatggatggcattttacgccaagattttgtcaagggactaaatgcaagcacccctttgtgtgtattgaatgagctcctatccactttcccaaagttagtcaagctagaacatcctccaacaatgaagatatcattctgtataccagcaacagagaacatgaacctttctctgagaaatgatcatctttctgtccattgatc

SEQ ID NO: 3600 - DNA, 335 bp, Glycine max
  unsure (1)..(335): unsure at all n locations
acatcttgacttgctntcagagctaacattcaccacatattctgccttcttctattttcagattgggaatgcctctaacagcacctttgtcaatgagtttcttcatgcctcttaagtgcagatgtccaaatctttgatgccatattctgacttcatcttctttgaaggatagacatgtggaggagtaactggtttcttgaggtgttcatacgtaacagatgtcctttgatctgctgcccttcattagaacttcactcttctcatttgtcaccaaacattctgactttgcgaaagttacattgaatccttcatcacacaactgactgatgctgatc

SEQ ID NO: 3601 - DNA, 322 bp, Glycine max
  unsure (1)..(322): unsure at all n locations
ctacttgtagacatagacttgcttgaaagctttcttcacttctccttaagaaaccttacaaaggcaaaagctgctctcacagctgcaagaacagctgcaaatgctatttatgttcctccagctcaacaaggtgccatagatctacagagtgggattcttcacgcagaggagaaggattacaaaactgcatatagttatttctttgaagctttgagtctttaatgctcttgatgaccccaaggctgtatttagcctgaaatacatgtngntatgcaagattatggtgagtcaagctgatgatgtggctggaaacatatcttct

SEQ ID NO: 3602 - DNA, 303 bp, Glycine max
  unsure (1)..(303): unsure at all n locations
tgttgatatcgagtgtacattgtttttcttccatgtttcatttgtacgtagcttgtcttcttcacagagggcatggacgatggcccttaataccatatccactcaaattctcatatgttagaaagtcattaatggtacaaaataccattgcatgtaacttgaatgtctcattctgattctcatcaaacacgttaacccttttattccanaacttccttaagtcttcaatcaagggacttaaataaacatcaatgtaattntctaactgtcttggccctgatatcatcatagagaacatcatgt

SEQ ID NO: 3603 - DNA, 311 bp, Glycine max
ttgtttcttgcaattccaagacactagagagctttctaataggtggcatgtctaacttgtgctttttctatctaatttgcaacctgcaaaattagaatatgaaaagcctgttagatttaaggaagtatccttgggataccttaaacctacattggttgtgtccttaaggtacttaatgatctttttgatagatgttaagtgagattccttatgattggtctggaccttgcacataagtaaacactccacttgtttaagtagaaaagtgatccaatcatacctctatatcttgactcatccactggattttc

SEQ ID NO: 3604 - DNA, 407 bp, Glycine max
  unsure (1)..(407): unsure at all n locations
aacataagcacttacactttgaatgaaagctggagttgctgcacatgatgtccaacgttatgtcaaagaataagatcgggctgcacaatgcacaaggcaagataaagtgtcaaatgaagaattgaagctgtaggattcacgatgtcggatacaatgtccaggacatcctgcctgaaaatactggaattgctaaaagcattgaagctgcaggatccacgatgtcggatacaatgtccaggacatcctgcccganaatactgcagttgctaaaagcattgaagttgcaggatccacgatgtcggatacgatgtccaggacatcttgcccgaaaatactggacatataaatctgttatatctntaacagattattgtgcagttagcaagagattagatgatctatcttta

SEQ ID NO: 3605 - DNA, 272 bp, Glycine max
ggcgagtctacattgattatacgaagctgaaccatgtgaccaaaaaggatcattttcccctgccattcatcgaacaaatgcttgagcgcttggcaggtaaatctcattacttttttcttgatggcttttctggctatttacaaaatcatattgcttctgacgaataaaaaaagaccacattcacctggccctttcgcacttttgcgtatagaagaatcccttatgtctatgcaacgcctcctgtactttccagcggtgtatgccttacattt

SEQ ID NO: 3606 - DNA, 442 bp, Glycine max
ctgagctacagatatgctggaagcagggaataatatacccgaacctgttgctgctttcaagtatctgagaatcctataagctgcttgttgatgagctgaagaaggatgagctacaaattgacttaaatgttgcaccgcatatgtgatatcaggccttgtgtttatgaggtaaatgacgcgaccaatgagcctacagtacgatgaagttgctgtatcatcaagtggagttccagattgttggtgtagtcttacagcatagtcaatgggagttgagacaggtttgcttcctaacatgcctgcattacgcaagatatcaagaacatattttctttgaaaaatattgatcccttgtttacttcaagtccaagaaaaaaatgttaaagtaccaagatctttgattttaacaacttgatccagaagctgagttatggacttaatttct

SEQ ID NO: 3607 - DNA, 416 bp, Glycine max
  unsure (1)..(416): unsure at all n locations
catgatggttgaatcaagatgattcaaggagttntgatgataatttagatgatgacaaaaagtccaagagaatgagttcaagattgaatcaagaacacttcaagaataaagaggaaatttgatttcaagaatcaagtttcaagatttaagtttcaagaatcaagaataatcaagttgaagattcaagaatcaagataagtactaaaaagtttttcaaaacattgagtagcacatgaatttttcacaaaaccttttaccaaagagtttttactctctagtaatcgattaccagtttattgtaatcgattaccagtagcaaagtttgttttcaaaaagctttcaactgaatttacaacattccaattgatttcaaaatggtgtaatcgattacaatgatttagtaatcgattactagt

SEQ ID NO: 3608 - DNA, 404 bp, Glycine max
aaagttaattatttctctttattattcaatcaaaattatatcattagtaaatcaaccaagtgggtgaacataaatgattagtgtactggatttaagattgaattaatcgagtaatatccgagtttaaccctcagcgaaaataattactagatatttaagtccaaaataatatcattagcaaaaacacacaattagaatttttttaagatatttagtaagcacatcttatacttgatcaaacaagtaataacttaaggctaagcattggaagtaacactaaataaaattaaattggatgtgtcttaagaatattaattaattcttaaaaatcacattaaaaaaaaaaaagaaagacattcataatatatttttaatagaaacttaacttttattcccttccctcc

SEQ ID NO: 3609 - DNA, 439 bp, Glycine max
  unsure (1)..(439): unsure at all n locations
gcatgcaagcttcatgatacacgtattgtnnttatatgccaatagagannnaagaagaataccagtggtactcataataaaaaaaaggtatggagaataaagaaacttataacacacacaaatataatatttgtagtgtctgttgacacctccacactttggggagtctagattgatgtaattttctgtttgatattgaatctataatctataatatttgattatcattaatgaaggatatnttttgcaagtgtcaagttantactattcattgtataatacatttatacactgttgtcttcttttatattcatttcttatacacattcttctttaacataattattaacattattattttagaaatcctataaaacatattttttagataaagctatttataataatttaaataatctccattcataataattatttt

SEQ ID NO: 3610 - DNA, 416 bp, Glycine max
  unsure (1)..(416): unsure at all n locations
ttttatttctggagttcgtttaaagctcgacctgtatctttgtctctgctgtataagaccaggctaccaatcaagatattttttcttcactgaaccatgaacacttatttaggatttgatttacatgttaaacagttgctacttcttatttattccttcaatttctgagtgtatttttatattaagaatatacactgatttaggagcaccaaattgttgtattattgtatttctatacactggttattgattttatttgttgtggntaatgatttttattttattaacaaatatcagcaataatattttagttttttaaatgcctatcatttaaaaacttataggtattttaatatttntttatattcagtaaactcttacgagcttgcgagttaagtttgcggagtctctacgag

SEQ ID NO: 3611 - DNA, 411 bp, Glycine max
  unsure (1)..(411): unsure at all n locations
ngaaggtgtgtaacccaccattttccatagtagaatactggtaatgtgtctactatcattgtcatcattnttttttctccgtcattgaggtgccacttgagctgccaggtctctccacctttgggcatatccttttgaaagatttgtgccccctttntgcacatgttctgtagttgcatcctatctgaagacattatactgacactgcctaacgaaggtaaccactaggtccttccaagaatggactcgggaaggttccaagttagtgtaccaggtaacaactaccccagtaagactttcttggaaggaatgtatcagcaattcctcatcttttgcatatgcccccatcttccgacaatacatctttagattgttcttggggcaagtagtccccttgtacttgtcaaagtc

SEQ ID NO: 3612 - DNA, 442 bp, Glycine max
acaggaccactttcatattcttcccttgcattggcataatgttcaattactgtcaaggcttttggagcatctataacttgttcaactatattttgtgcaacatttcggttgataagctgcatcaaatctctctttttcctctgtattctttcagcacgaaagtattttttggttttcaattgcttggcaactgtagtttgtatctctcctttgacaatcttcttccgtatcgcatccagagaagcccccttctcaagctcttctaacaattcttttcttgcttcctcaaattccatctaattcaattaagcagtgagtgccaaaaagtattgttagagaaaatgaaatatgatcgacaatctaagtaattaatatttaatactcagcagaaaaaagaagaaatcagaacagatgttataaagttacaagttggtgttcccga

SEQ ID NO: 3613 - DNA, 430 bp, Glycine max
  unsure (1)..(430): unsure at all n locations
tggcctcaacaaacttcttattcccagaaggaaattcaatttataggcctcatatttgtaatggagaggcaatagacttaaacatttgggaagccatagaagtaggactntatgtacccaccatggtggcttgaaatgcaacaatagaaaaacctagagaagaatggactgaagatgaaagaagattagtgcggtacaatttataggctaaaaacatcattacttctgccctacgaatggataaatattttagggtttcaaattgtaggagtgctaaggatatgtgggacactctacaagttacacatgaaggcacaactgatgttaaacgatctaggataaatactttaacttatgagtatgaatcgttaggatgaagacaaatgatagtttcaagatatgcaaaaagattccacatatagtaattatc

SEQ ID NO: 3614 - DNA, 427 bp, Glycine max
  unsure (1)..(427): unsure at all n locations
tgccgcatgcattcttcacaaaaccttatcagggtcacgtgaaggatatataggcatggacagaattcatgtaacatcaagaggaacaaaacgatcatgaataagagtctcatttcatgtggccgctgaagaatgaataagagaacttactgctaaatccgcacgcccatcaatatgaggagaaacaatatatgaattttgtgaatcttgaagccatggctcagtccanatttttatctttgtgccatctaccactttccatctaatgccatctttgactaaagcttgtgaagtgtgaatactatatgtcaagtataacttgggttatgtcccaaagaggaacccaagaactccccattatggtaatattttgccttgaaaacttgtgaaacaacagcatcctggtcagaagctagcttccatcctt

SEQ ID NO: 3615 - DNA, 394 bp, Glycine max
  unsure (1)..(394): unsure at all n locations
tctatggattgatacaagccttccgcaatgcgaattaaaatttcatgaggtcatttcttcattcagctctgaagagaatgtcgtggatctctgtatataccacaaggtcagcgggagtaagatttgtttccttgtattatacgtaaatgatattctgcttgcaactaatgataaaggtatgctatatgaagtgaaacaatttctctccaagaactttgatatgaacgatatgggagaggcatcttatgtcataggcataaagatccatagagaaagatctcgaggaattttaggcttgtctcaagaaacctatatcaacaaagttntagagagagttaacatgaaagattgttcaccaagtgtagctcccattgtgaagggtgacaaactcgct

SEQ ID NO: 3616 - DNA, 459 bp, Glycine max
  unsure (1)..(459): unsure at all n locations
gacaagactatacgaggtatcttccttgggtataacaatatctctaagggctaccgtgtctacaacttgcaaactaagaaactcgtcatcagtcgagatgttgaagttgatgaatatgcttcttggaattgggatgaagaaaaagttgagaagaacgttcttatacccgctcaactacctcaagaagaagctgaggaagaagacccacgtgaaccaccttcacctgcaccacaacaacaagatcaagaactatcatcaccagagtctacttcaagacgagtaagatctttggtggacatatatgaaacctgtaacttggccatacttgaacctggaagctntgaagaagcattaaagcacgaagtatgggtcaaggccatggaagaagagatacagatgatcgagacaaacaacatatgggagtttgtgaatcgtccccatgggaaagatatcattggg

SEQ ID NO: 3617 - DNA, 399 bp, Glycine max
agcttacaaggttgtctgcggtgttagttttggtgtacttgaaggcaagatttgggtggagcgataaaagctttactaaattggtggtgttattgaagaaaatgcttcctgaacaagacacattgccgaaaaatcactacgaggcacaaaagattttatgtcctataggaatagagtatcggaagatccatgcatgccctaatgatttcatattatataaaaatcagtttgcagaaatgcgttagtgtcccacttgtggggtatcatgatacaaagtccagcatgatgaattcagtgatgatgcaagcaaacagaatagtcatcccacaaaggtctgctcgtatcttccaatcataccaatgtttaagcgattgtttgctaatatacataatgaaaaaa

SEQ ID NO: 3618 - DNA, 400 bp, Glycine max
  unsure (1)..(400): unsure at all n locations
aagatggcctcagcanattccttgtttccagaagggaattctataaatagacctccaatctttaatggagagggttaccactactggaaaacccgaatgcaatattttatcgaggcaatagatctaaatatctgggaagccattgaaatagggccttatatacccaccacagtagaaagagtttcaatagatggtagttcatcaagtgaaagcataaccatagaaaaacctaaagatagatggtctgaagaggatagaaaacgtgtacaatacaacctaaaagccaaaaacataataacatctgccctaggaatggatgaatatttcagagtttcaaattgcaagagtgctaacgaaatgtgggacactcttcgattaacacatgaaggaactacagatg

SEQ ID NO: 3619 - DNA, 225 bp, Glycine max
  unsure (1)..(225): unsure at all n locations
cagcttagccttgttcctcccaaccttacatgtttcatcaaacttgtttctaaacacccactntgctccaacaacagattttcctttggggagttctacaagcttccatacatcgttattctaaaactggtgtagctcttcttccattgctttgacccagtattaattagacatgatatcatctatgtgtttttgctcaatctcagatagtagtgttgtgttctt

SEQ ID NO: 3620 - DNA, 395 bp, Glycine max
  unsure (1)..(395): unsure at all n locations
ggagggagaataaaacaatccanaatcaattgtgctctttcaagtcacgaagaattctttgtgcggcttttagatgaggagaggtaggagcctccataaagcgacacacaactcccaccgcatatagaatatccggccttgtattggttagataccttaaactccccacaagactctagaagatcgtggagtctaccttctctccttcatcaaactttgataacttcaagccaccttccataggtgtgatcacgggattgcaatcaagcatattaaatttcttcaacacttcttttgtgtacctttcttgtgagacaaagataccattctccgtttgcttcacttccattcccaagtaatatgacatgagttccatatctgtcatatcaaattca

SEQ ID NO: 3621 - DNA, 333 bp, Glycine max
  unsure (1)..(333): unsure at all n locations
tctttgagtcgatctgccgcatgcaagcttgttgcaattcttctagacttggagttataacatgcagtcctcttgaacccttacctcccactctntcgtcatgccgggactcaggaaacccaacaggttntgccttttcaatgtactctgaacaaaactcaatagcttcttttgcaatatacctttcaataatagatgcttcaagacagtctagattctttgcatacccttttatgattttcatgtatcactcaaccaggtatatccaccacaaataaatgggaccacaacatctaatttccctcaccagatgaacaattaagtgcggaacca

SEQ ID NO: 3622 - DNA, 338 bp, Glycine max
  unsure (1)..(338): unsure at all n locations
gcaccaaccaccaacactccagaatcagcatatgatgtattcggaagcttcatcagtgcgagctcgacagtagccgagctgacagaaaccgatccagacgaaatgttagtctcagttctaacccgcttaccaaccgagatcgcctgcttgaacaaaccactaattttcttatcagaaccaggcactccctgtccagctntcacaacctgcttaacctgagcaagaatttgaccttccccaagaacaagtgagtcatgccctgccgccacttcaaagagatgctgcatgacatccgcgttatacagcaaaacttggtgctcacaaagctcatgtattga

SEQ ID NO: 3623 - DNA, 327 bp, Glycine max
gattccttcttgagcttggagctgcatggaatttctaatattctgactcacatatgctacatcatgagacatcacaccaaggcctttcagcagcttataacccaagtgcaagctagtctgcaagaataaaatatttagcaccagttttcaagcatcatgggagggaaagaattttttgacagtacctctgcattctccaaaatggcatccgttgcacctgtcttctttagatctaaaagatgctcgagatcaccagcttctggataaactgggatctgaggaatttcatcactaagtatactatttaaccacgagagaagagaacag

SEQ ID NO: 3624 - DNA, 462 bp, Glycine max
  unsure (1)..(462): unsure at all n locations
gaaacttccttgagaagcttctntgagaaaacttccttgagaagctagagcttagctacacatacccctctcataactaagctcacctccttgagaaacttccttaagaagattcctaaagaagctagagcttagctacacatacctctctaatagctaagctcacctccttgagatgggaagctagagcttagctatacacaccctataatagctaagctcacccccatgaaaaaaaacatgaaaatacaaaaaaaaaagtccttactacaaagactactcaaaatgccccaaaatacaaggctaaaaccctatactactagaatggccaaaatacaaagcccagacgaaggaaaaacctattctaatatntacaaagataagcgggctcatacttagcccatgggctcgaaatctaccctaaggctcatgagaactctaggggccttccttggatctcta

SEQ ID NO: 3625 - DNA, 430 bp, Glycine max
  unsure (1)..(430): unsure at all n locations
gcgaagtgggtggaattcctagagcaattcccttatgttatcaaacataaaaagggaaaaggtaatattgtagccgatgctctttctcggcgtcatgcattactttctatgcttgaaacaaaattgattggtcttgaatgtttgaaaagcatgtatgaaaatgatgaaacttttggagaaattnttaaaaattgtgaaaaattttcagaaaatggtttctttagacatgaaggctttcttttcaaagaaaacaaattgtgtgtccctaaatgttctactagaaatttgcttgtttgtgaagcaccatatgaggtttaatggggcattttggggtccaaaagactctataaacattacaagaacagttttattggcctcatatgaaaaaggatgtgcagaatatttgtgaacattgcattatatgtaaaaa

SEQ ID NO: 3626 - DNA, 432 bp, Glycine max
ctaagctcgccatcttccctgcaccaaccaccaacactccagaatcagcatatgaggaatccggaagcttcatcagtgcgagctccacagcagccgagctgacagaaaccgatccagacgaaatgttagtctcagttctaacccgcttcccaaccgagatcgcctgcttgaacaaaccactaattttcttatcaaaaccaggcactctctgtccagctttcacaacctgcttcacctgagcaagaatttgaccttccccaagaacaagtgagtcaagccctgccgccacttcaaagagatgctgcgtgacatccgcgttatacagcaaaacttggtgctcacaaagctcacgtattgaaatcccgctcacctaaacaaaaaaacacaaccgtgagttttctttctaaactaaaactagaacagaacatgggt

SEQ ID NO: 3627 - DNA, 418 bp, Glycine max
  unsure (1)..(418): unsure at all n locations
tgtcattccttcttgagcttggagctccatggaatctctaataagctgactcanaaatgctacatcatcagacatcacaccaaggcctttcagcagcttacaacccaggtgcaagctagtctggaagaataaaatatttagcaccagcttccaagcatcaagggagggaaagaattctttgacagtacctctgcattttccacaatggcatccgttgcaccttgctttcttcagatctaanagatgcttgagatcaccagctctggcatagattgggatctgaggaatttcatcactaagtatactattaaaccaagagagaagagaacagaaatataggaagatcccaaacacacaccgttacaaaattttattagtcaacgtcacccctaatataaacctaacatgtacatgtcct

SEQ ID NO: 3628 - DNA, 314 bp, Glycine max
  unsure (1)..(314): unsure at all n locations
cttgagcaattcanatggtaataactgttcactcggatattctatcatgcacataatatatcgagacgctcgaaatttaacatcggaagcttccgagcaattcaaatggtcataacttctaactcggaggtccgattgaggcgcataatatatcgagacgctcgatattgaacaatggcagctcttgagcaattcaaatggtaataacttttcactctgaggtccaattgacgcgcataatatatcgagacgctcgaaattgtacaatggaagctcctgagcaattcaattggccataacttctaacgtcggag

SEQ ID NO: 3629 - DNA, 385 bp, Glycine max
agctttaaggaggaggagataactaatgcagtgtgtgcttgcggaggagacaaaagcccagggtctgatgggctaaatttttgtttcattaagcatttctggagcatcctgaaacctgaattccttaggtttttctcagagtttcatgtcaatgcaaccttccctaagggcctaaattcatcattcattgctcttatccccaaaatcaaagatccccaactcctttctgactttagaccaatatccttaattggatgtgtttataaaatcattgctaaagtcctagctaatagggtcagcaaggttatgaatcacctcttagatgaaaggcaatcagcctttggtaagggcagacagatgcttcatgcagttttaattgctaatg

SEQ ID NO: 3630 - DNA, 390 bp, Glycine max
  unsure (1)..(390): unsure at all n locations
cgcatgaattacattctcccnctttctcaagcaaattcttaattcttcttgacatcatcaaaatcttcatcatcaataatcttaagagggataggcttaaaatacagaagaagcaacaacaatcaatttaacaatgttctttaaacatgcaagacacaattgattgcaaaaaattaaataagataagggaagagagaatgcaaacacagttttatactggttcggccacatcccgtgcctacgtccagtactcaagcaacccacttgagatttccactatctttgtaaaatccattacaaagtctgaaccacacagggacaacccatcccttgtgttcaggaatcctntacaacaagagactcacagtcccttaaccaatctcattgaat

SEQ ID NO: 3631 - DNA, 367 bp, Glycine max
taagctccttcaactgcacaaggctcttaatatttgaagagtattcttgtggaaccttcacccgacgaagacactgacaaaaacttatcttctccttcttggacaaagtatggcaggctgggggcaagtaaatattcttcccatcagaccttggatgcaactgtgatcttatacccatatcagctagatcttgacgggtattcaagccatccttcgtcttgccttgaatgtttaggagcgtcccaatcacactgtcacaaacatttttctgcacatgcataacatcaatacaatgtctaacgtcaagatcacaccagtacagaagatcaaagaaaatatacctcttcttgcatatgtgactctgact

SEQ ID NO: 3632 - DNA, 263 bp, Glycine max
gtgtggaccctctagtgcaatcctccattcttctcttttttcggagccctaagaatgtcattgcctagcgctgttcatgtgtcctccaccttcgagtctggagccccgcgaatgtcattgcctagcactgttcgacaattctccattctccacttttattcggagccccatgaatgacattgcctagcgctgttcatgtgtcctccacccgcgagtctggagacccgctaacgtgattgcctagcgctgactgccaattctcc

SEQ ID NO: 3633 - DNA, 311 bp, Glycine max
  unsure (1)..(311): unsure at all n locations
gataagagccctgtttcactttaactgctggaacattgggtgtaccttgcacctgagtatcttcagtatggaaaagccactgataagactgatgttttcagctatggggtggttgtgcttgaggtggcttgtgggaggaggccaattgaaagagaagggtctaagatgttgaatctgattgattgggnttggggccttcactctgaaggaaaagtgattgaggcagctgataaaaggttgaatggggatgttgaggaggaggagatgaggaaattgttgattttggggttgagttgtgctaatcctgatag

SEQ ID NO: 3634 - DNA, 278 bp, Glycine max
  unsure (1)..(278): unsure at all n locations
cgcatgccagctgggactgagcattgatgaagatgctggtgaattatatgctgacatgcctcctnttgaggacgctgatgcagatgctgagggtaccaagatggaagaagctgatctaaatctgacttaaatgcctgttacgttcttagaaacaatgattggagaaacagtctttctactatggtctatgttcttcgaattttcgaaattttggaacgttggctagttacgtgccgcatgttgtacttctttattggatatttgcgtccttccctgcc

SEQ ID NO: 3635 - DNA, 373 bp, Glycine max
  unsure (1)..(373): unsure at all n locations
ccaatgcctacaagattaaatcctaagctatcagccagatactatgttccttattgggtagttaaanaaattggagcagtggcattgcagttgcaattacccgacgctgctcgaatccaccctggttttgacatatccgaattgaaactcgcagtgggagaacatcagatcgaggcagaattgccaaaggaactacaagctgaagaacaagggatacaaccggaacaagtactggtaacaagaatgtttggtccagcaggagcagaaattccacaagtattcatcaagtggaaaggacgacatgctgaaggagcaacctgtgaggacagatcaaatatgatgcaacaattccctgctttcaaccttgaggaca

SEQ ID NO: 3636 - DNA, 353 bp, Glycine max
agaggttaatgaaacaatgagatgtttttctctatgagaggttggatcaaatggtgaatttagatccttatgcagaagaaaggatgagaagagggaatgatggtgttcctagacaaaaccgaattgatggtattaaactcaacatttctgcctttaaaggaaagaatgatccggacgcctacttggtgtgggagatgaaaatagagaatcttttctcatgcaacatctatgaggaggaccaaaaggtgaagcttgctgccacggatgattcggactatgctctagcgtggtggaacaagctatagaaagagagagcatgaaatgaaaagccaatggttgaacatgggcggaga

SEQ ID NO: 3637 - DNA, 422 bp, Glycine max
gcgaagtgggtggaattcctagagcaattcccttatgtttatcaaatataaaaaggcaaaaggtaatatagtagccgatgctctttctcggcgtcatgcattactttctatgcttgaaacaaaattggttggtcttgaatgtttgaaaagcatgtatgaaaatgatgaaacttttggagaaatgtttaaaaattgtgaaaattcttcagaaaatggtttctttagacatgaaggctttcttttcaaagaaaacaaattgtgtgtgcctaaatgttctactagaaatttgcttgtttgtgaagcacatgaaggaggtttaatggggcatttcggggtccaaaagactctagaaacattacaagaaccattttattggcctcatatgaaaaaagatgtgcagaacatttgtgaacattgcattg

SEQ ID NO: 3638 - DNA, 173 bp, Glycine max
  unsure (1)..(173): unsure at all n locations
gaaaacgaanaccctcgagaaattcttatggttataactcgccacacggaaggtcgattaacgcgcagactatatcgagacgctcgaaattgagcaacgaatgctctcgagaaatctatatggccataacttgtcacacggatgtccgatttaggggcataatatattgagat

SEQ ID NO: 3639 - DNA, 426 bp, Glycine max
  unsure (1)..(426): unsure at all n locations
gacaagactatacgaggtatcttccttngtatagcaatatctccaagggctaccgtgtctacaacttgcaaactaagaaactcgtcatcagtcgagatgttgaagtttatgagtatgcttcttggaattgggatgaagaaaaagtggagaagaatgttcttatacctgctcaactacctcaagaagaagctgaggaagaagacccaggtgaaccaccttcaccttcaccacaacaacaagatcaagaactatcatcaccagagtctactccaagacgagtaagatctttggtggacatatatgaaacctgtaacttggccatacttgaacttggaagctttgaagaagcgtcaaagcacgaagtatgggtcaaggcaatggaagaagagatacagatgatcgagaaaaacaacacatgggagttag

SEQ ID NO: 3640 - DNA, 196 bp, Glycine max
agcttgtaggtcttgaatcttcttcatcaatggagtcatctacttcttgaagatcaattgcagcggaatggaaatggaagaaagatgattggagacgccactttaaggagaagatgagtcaagaagaagctcaccaccataggaaagcatgaataagagcttgaaggtacgagaaaatgagtggaaggagagggac

SEQ ID NO: 3641 - DNA, 385 bp, Glycine max
  unsure (1)..(385): unsure at all n locations
catgcaagctttgatctaccaccaccaccgccaccatcatcttagttntctattatttttaatagtattagcattttgatttctagccatgtatttgttggaccttgtggcctcaataatcttaagagggataggcttataatacagaagaagcaccaacaatcaatttaacaatgttctttaaacatgcaagacacaattgattgcaacaaaataaataagataagggaagagagaatgcaaacacagttttatactggttcggccacaacccgtgcctacgtccagtactcaagcaacccacttgagatttccactatctttgtaaaatcctttacaaagtctgaaccacacagggacaacccatcccttgtgtcagatgctt

SEQ ID NO: 3642 - DNA, 410 bp, Glycine max
  unsure (1)..(410): unsure at all n locations
actaagctatgctgcaaacattataatagacccnctcagcagcaaaaccatcaacagcagaataattatgacctttcaagcaatagatacaatccaagttggaggaatcatccaaatctgagatgggcaagtcctccacaacaacaacagcctatccctcccttccagaatgctgctgctccaagcaggccatatattcctcctccaatgcagcagcagcagcaacaacaacaacaaagacaacaagcagctgaggcccctcctcaaccttcagaatatgcaatttcagcaagagacaagagcctncattcagagtctgacaaatcagatggggcagatggctactcagttgaaccaagctcagtcccaaaatttgacaaatggcttcataaactgtgcagaatctgaaa

SEQ ID NO: 3643 - DNA, 412 bp, Glycine max
ttataagatatttggtatttttagtatagacaattatgctcaacttaggtaggattattgggcatgataaatctatccttttaaatatttaacataactctacacttagtacttgaatttgagaccactagctaagataaaataattttgcgccaattaatcaacatgttagcttttatcccatgtaatttgctaattacttacatatatgtgcgaaacatgataaagactaaataacttagataatacaatagtagatcatcaatgagtatgcattacagagatataatatatgatggagaaatagttctggtaaccaatagaaattgtaaaattcttcgctttaactgtgtattatacaataataagtgttaaaaacccctcatggtatcgtgggttcattgacaatgac

SEQ ID NO: 3644 - DNA, 332 bp, Glycine max
  unsure (1)..(332): unsure at all n locations
agcttcatatttncaccagatgacaagcagaatttccttggctgggagaagctgcagaatattgctcttggtatagctaaagggattgggtatcttcaccaaggttgtaaccatcccattattcactttgacatcaatcctcacaatgtgttacttgatgacaacttcactccaaaaatttctgattttggcttagcaaaattgtgttccaagaatcctagtttggtgtccatgacagctgctaggggaaccttgggatacattgcacctgaagttctctccagaaactttgggaatgtgtcttataagtctgatatttatagctacggaat

SEQ ID NO: 3645 - DNA, 417 bp, Glycine max
  unsure (1)..(417): unsure at all n locations
attgaaggatgttgtggaaaattattgtctntntgatttnagaagctttactgtttttttatcagtaattacaaaaatattatcttatttttttacctcatgtcatgatttgaagaaatatgtttgctacaaagtactgatactttaatttgcttcatgcatctatatctgataccaatatattgatatatttcactggtacatatatgtgaagtgaccaattctttaaaaaaaattatgatcaaatatagtgacatgtaacatagaagtaagtataatataaaaatatacaaagtattgtttcttgatgaaccaaatatgacaantggtatgtgtatagataatttcaagacagacatgagatcgatcattgatagtaccattcttaattgtgaacaataggaaaaaatgatctac

SEQ ID NO: 3646 - DNA, 255 bp, Glycine max
agcttgacaggttcatgcgcatgttctgctactggtggaggcacttgaatctggttgcccaacctcaaggagacggcactcacattttttggattctgcatagcccgcgaacgcaatttgtcagaattttgggactgagcttgattcatatgagtagccatctgtcctatttgatttgtcagactctgaacggaggctattgtcttttgttgaaattgcatattctacatggtcatttgcctcactaacttttct

SEQ ID NO: 3647 - DNA, 486 bp, Glycine max
  unsure (1)..(486): unsure at all n locations
cttgatgcaacattaggagaggttaatgaaacaacgagatgatgcgctccatgagaggttggatcaaatggagaatagagatcataatgaagaagaaaggaggagaagagggaatgatggtgttcctagacaaaaccaaattgatggtattaaactcaacattcctccatttaaaggaaagaatgatctggaggcctacttggagtgggagatgaaaatagagcatgttttctcatgcaacaactatgaggaggaccaaaaggtgaagcttgccgccacggagttttccgactatgctcttgtgtggtggaacaagctacaaaaggagagagcaagaaatgaagagccaatggttgatacatggacggagatgaaaaagatcatgaggaagcggtatgtgccggctagttactcaagggacttgaaattcaagctccaaaaactaacccaaggcaacaagggggtngaggagtatttcaaggaaat

SEQ ID NO: 3648 - DNA, 485 bp, Glycine max
  unsure (1)..(485): unsure at all n locations
gcctcttcacgtctagaatatgaatgaagcatatagatccaaataccctcaggtgctttgctgatggcttcttctcgttgcaagcttcaattggagtcttgtcttttacagacttagttggacatctgttgagtatgtaaacaactgtgtagactgcttcagctaagaatgtgttagatagtctcttctctttgagcatcgatctagccattttcgtaactgtgcgattctttctctcggacactccattntgttgaggagaatatgcaactgtaagttgccgctcaatgccttcatccttacaaaatctttcaaactcgcgagaggtgtactctatgccgcgattacttgttagtacttttatacgttntccactgtgattctcagcaagggccttgaactttctgaatacttcgaagacgtctgatctttcttttataanatatacccatgtcattctagagaagtcatcaatgaagagtatg

SEQ ID NO: 3649 - DNA, 408 bp, Glycine max
  unsure (1)..(408): unsure at all n locations
agcttctacagtttcttggtttgaccattgtctctgtcatatcatctttaatggnctttgcatgcttagtcatgatgcaatcctaccccgcaagggcattggatacaagactctcagtagattgggcctgagatccaagggaaggccctacggttctcatgagccttacggttgatattgagcccatgggctaagtatgagcccgcttaggccttgtattttaccttatgattgagagtgttgtgttgggaaccttagatgcggccatccagacactcttaagattcgcctaatatacattacttgcttactttcgtcgcttattacttgtaccttccattgtcacaccgcctagatagcttgcatattaccaagtagttgttaccttatctttcacacactctttag

SEQ ID NO: 3650 - DNA, 453 bp, Glycine max
ctttctattggattcgtcatatcttcatctaatgttagatcatctgttccaacttcagaattatcgtcccgtccaattcttggtgttcctaggtcagatggctcatatgcagtatcactaccataatctgaggcaacagatgaactgccagcgaataatgataaactcgactggagaggtgattgcacagaataaactgtgttattggaatcggcgtctgtttcacaattctgctggcttgcatcttggaatgctaagtgattaaatgaggtataaaatatcataatttgcgagagctaacaatcgattagcacaaaacagaccatactgacatgtttgaggaaactaagtgcaagttgcaaaagataatcacatacaagatctagcagctgcttctagttcaagaaatgacgccacggcagcacatcgtgatatatcaatgtcagataatag

SEQ ID NO: 3651 - DNA, 457 bp, Glycine max
  unsure (1)..(457): unsure at all n locations
tgtgtcacaattcattgtgacagtcaaagtgtcattcacttagcttatcaccaaatgtaccatgagaggacaaagcacatagatgtgaaactacacttcattagagatgcgattgaatctaagaaggtgaaggtggagaaggtttcaacagaagaaaacccggctgatatgttcacaaagtccctctctagtgtcaagttcaagcactgcttggacttgataaattntgaagatgcctaaagcagattggtagaagtgcagctctaaatcacaaggtagacactcgctgatttagagtcaaagtggagatttgtggtgtgtgactcacaatcacatatgacacaagtgaaaagactttaaagtagtgttgtcataactgttttaagttattataactaaactgggtttggcaccaaagcataactagagtgtacatatatattctcgatcatgtaat

SEQ ID NO: 3652 - DNA, 480 bp, Glycine max
ccatgatgatgaagccaagcaatttgatgatgccatatgcccatgtgattgattcaagattgattcatgaattcaagatcaagcatgaagaatccaatccaagattaaagagaagatatcacgaagcaacaagtcaagacttcatataggataagttgtaaaagattctttcaaaaatcaaatagcagagttttgttttacaaaagaattttctaaagttactagagtgattactctctgataatcgattaccaattgatagtaatcgattactagtgactagactggttttcaaaatgttctcaaatgatatgtaacgttccacaatgattttcaaatagtataatcgattacactatattagtgatcgattacaagtgaatctgaacgttggaattcacatccaattgtgaagagtcacaactcttcataaaatacatcggataatcaattataccatggcggtaatcagataccagt

SEQ ID NO: 3653 - DNA, 378 bp, Glycine max
ctaagcttaatggcctagtgaggatggagaggtgcaagtaaggaatcaagtgtagttggatatttccattggaaagtacaatgataaggtgctctgtgatgttgttcctatggaggccagccacttactcttgtggagatcatggcaatttgataagagggctaatcatgatgggttcaccaataagatctctttcacacatcaaggaacaaagatagtgctcaaaccattgagtccacaagaagtgtgtgaggatcacagaacaatgagagagaaaattcttcaagagcagagagatcaagaaaaagagagcgaaacacttgagagttcacaaagtgatgaaaaaaagagggacacaccagagaggaataagatgag

SEQ ID NO: 3654 - DNA, 426 bp, Glycine max
agcttgtaaaggtatgtatataataagtgttcaagattgaatgaatgaattaattgaaaagcaaaccacagcctcgcttttatagactcttcatgtctggccaagaggaccatttataagagctacaacttttagaataacttaaaaccaatttgaaaaagtcaaaacctttttgaagagttacatctttcgatttattcagaaacattcactggtaattgagtaccaaaatagtgtattcgattacacaaggcttttatgtgaaaggatgtgactcttcacatttgaatttgaatttcacattcaagggactggattcgattaccaaacattgtaatgataccgtttttgaaataattgcaccgtgcaattcatttgaaacttttcaaacatttgcactggaatcgatacaacattgtatcatac

SEQ ID NO: 3655 - DNA, 383 bp, Glycine max
agcttctggctgttcttaaatatattcacaaagaaaggttagaacaaagaaagtttctaactatcaagttttttgttctttccatttttcttttaaacaattaagcttcaacaatgtcatgagttaagtgtgtaactgcatcaatgtgcatgggacaggtacttgacgggtttcctatatttcacgggcattaatttcgttttgacgtttgttgctgctattctctgtgtgtgttttgcacccacagcagcaagacctggaattcctgaaatcaaagcttatcttaatggtgttgatacttccaacatgattggtgctacaacattgattggcaaggtaacattaattatttgattgtatgtaacactgtctctgttccttca

SEQ ID NO: 3656 - DNA, 323 bp, Glycine max
agctcctgtaaaatatcaagataacgagcataatattgctctttttccttcttggaaggcaccaaagggtattgttagtgtttagctctactgagctctacaagattggctaagattttgttaaaacatatgcacttatacaatgaatggaagctggagttgctgcacatgatgtccaacgttatgtcaaggaataagatcgggctgcacaatgcacaaggcaagatgaaatgtcaaatgaagaattgaagctgcataattcacgatgtcggatacaatgtcctgacatcctgcccgagaatactggagttgctgtacaatgc

SEQ ID NO: 3657 - DNA, 403 bp, Glycine max
  unsure (1)..(403): unsure at all n locations
agctctacattactcctcatgcttntcaccatgtattataacgatcgatttcttcgttctgccacaccattctgattcggagaaccaggcatagtgtattgcgcaacaatcccatgttcttgaagaaatttcgtaaatgaacctcgggcttgtccatcctctgtggatctaccatagtactccccacctctatctgatctcacgatcttaatttattttccacattgtttctcaacttcagccttataaactttaaaggcatctaaagcttcattcttagaatgaagtaagtagagatacatatatcgtgaactatcatctataaaggttatgaagtatttcggactatatgcatccatgtcctgacaacatatgtctgcatgcatgatgatttctaataaat

SEQ ID NO: 3658 - DNA, 487 bp, Glycine max
  unsure (1)..(487): unsure at all n locations
cgtgttacgaacgataagaattcgaagattcttcatcttctcaaatacagtatcaatacaattaatttcttttctatgaagggggtcgagcattattccttcaatttcgctacttccctttaaatcaattataactggcattaattaagtattcataatttcaacaaaaactaaaatgcttaaggatgataaaaatcaagaaacaaagttgacaacaatattcttacattatcatcttctaatacttgaagaacatcttcatggtgccataatctgctgcgttcgccaattttattggatgctttctccttaactatctctctacccatgtctngtattagatcatgcatncacaggcaatcatagtcaacagttaaaagtgatttattaactaatgttgtaataccatctcctgagctgaaatcagatgcatctnagtacagttntacataatccaatcgttgccctttgaaaaacatgcaacatc

SEQ ID NO: 3659 - DNA, 352 bp, Glycine max
  unsure (1)..(352): unsure at all n locations
agcttctcgggggacatcttgacttgctntccaatctgacattcaccatatattctaccttcttctattttcagattgggaatgcctctaacagcacctttgtcaatgattttcttcatgcctcttaagtgcagatgtccaaatctttgatgccatattctgacttcatcttctttggaggatagacatgtggaggagtaactggtttcttgaggtgtccatacgtagcagttgtcctttgatctgctgcccttcattagaacttcacacttctcatttgtcactaagcattctgactatgcgaagattacattgaatccttcatcacacagctgactgatgctgatcaagt

SEQ ID NO: 3660 - DNA, 466 bp, Glycine max
  unsure (1)..(466): unsure at all n locations
tctggtgggacatcttgacttgctttccaatctgacattcatcacaaattctgccttcttctattttcagattgggaatgcctctaacagcacttttgtcaaggattttcttcatgcctcttaagtgcagatgtccaaacctttgatgccatattctgacttcatcttctttggaggatagacatgtggaggagtagctggtttcttggggtgtccataggtaacaattgtcctttgatctgctgcccttcattagaacttcactcttctcatttgtcaccaagcattctgactntgtgaagtttacattgaatccttcatcaaacagctgactgatgctgatcaagtttgcagtcagtcccttcaccagcagtactttgttcagactaggaagtccatcatgaactagctntcccattccaatgatctttcctttagagccatctccaaatgtcacataactagt

SEQ ID NO: 3661 - DNA, 304 bp, Glycine max
  unsure (1)..(304): unsure at all n locations
agcttctggtgggacatcttgactcgctttccaatctgacattcaccacagattctgccttcttctattttcagattgngaatgcctctaacagcacctttgtcaatgattttcttcatgcctcttaagtgcagatgtccaaatctttgatgccatattctgacttcatcttctttggaggatagacatgtggaggagtaactggtttcttgaggtgtccataggtaacagatgtcctttgatctgctgcccttcattagaactccactcttctcatttgtcaccaagcattctgactttgtga

SEQ ID NO: 3662 - DNA, 359 bp, Glycine max
  unsure (1)..(359): unsure at all n locations
agcttctattctttgtacaagaatgaagctctgataccacttgntagacaagtggcctcagatatcttaagaagggggttgaattaagatatcacaaactattccctaattaaaaattctaatttgatgttaacccaaatcctaagattccttttaaaatgaattcctaaataattattcaaattaaacttactgaatagaagcaataagcaataataaataaaagagtttaagggaagagaaagtgcaaactcagttttatactagttcggccacacccttgtgcatacgtccagttcccatgcaacccgcttgagagttccactcaatcgcaaaaaccctttacaagttctgaacca

SEQ ID NO: 3663 - DNA, 380 bp, Glycine max
  unsure (1)..(380): unsure at all n locations
ctaagcttanaagcatagcctcataagaattggatagaagactccattaagattgcgctatagatgcaagagaagaccctagggttctcatgtgccttacggtagatcttgcgtccatgggctaagtatgagcccacttatctttgtacatattaaattaacgtttcattatttttgggccttgtatttacggctccatagtgtacggagggtaccctactattgtacgatttttcaacccttgtattttaaaacacctaaactagtttttgtattaagggtagttttataatttcatatgcattaagcgtactatttgatgtgtgatgggagataaatttaattgaattgcgagaagcccactcaaattacattttgga

SEQ ID NO: 3664 - DNA, 429 bp, Glycine max
  unsure (1)..(429): unsure at all n locations
tgccgcatgcaagcttctggtgggacatcttgactngctttcttatctgacattcaccacagattcttgccttcttctattttcaagatgggaatgcctctaacagcacctttgtcaatgatattcttcatgcctcttaagtgcagatgtccaaatctttgatgccatattctgacttcatcttctctggagaatagacatgtggaggagtaactggtttcttgaggtgtccatangtaacagttgtcctttgatctactgcccttcattaggacttcactcttctcatttgtcaccaagcattctgactttgtgaagtttacattgaatccttcatcacacagctgactgatgctgatcaagtttgcagtcagtccctacaacagcagtactttgtccaactatgaaatcatcatggactatgctttc

SEQ ID NO: 3665 - DNA, 372 bp, Glycine max
tgaaatgaacaacgagctctcgagaatcattggttatttttgtcacacggaagtccgattcaggcgcataatataccgagacgctcaaaattgaacaacggaagctctcgagaaattcaaatggtcataatttgtcacacggaagtccgattcaggcgcataatatatcgagacgctcgaaattgaacaacggaggctctcgagaaattcaaatggtcataacttttgaaacggaagttcaattcaggcgcataatatgtcgagaagcatgaaattgaacaacagaagctctcgagaaattcaaatggtcataacttgtcacacgaaagttcgattcacacgcataatatactgagacgctcgaaattgaac

SEQ ID NO: 3666 - DNA, 457 bp, Glycine max
  unsure (1)..(457): unsure at all n locations
tccaataaccaaggtagtggagagaatgaagaattcaattatattgagaaacagaaagaggaagcatctaatgctgcgcgtcggaggccaacgcgagaaacttgaaatggttgaatctttattttaaagtggcgccctgtttagtatcatcatcaccacagataaattttgggcttagtttcattataggtgcactctgttttcagtattttcttttttcttccttttaagaaaaggaaaagattatttgcttcaagggtgtagatcttctcctgtttttggagactcgagtgtttgagctagttgaagttgtacaattatttttctattaatggattctgtttttaacgcagattaatgcctagctacctttncataattaatcgaaaatccctattctaatacctactataatgcaatagaataatgantaattttcgccatttttattactgcg

SEQ ID NO: 3667 - DNA, 428 bp, Glycine max
  unsure (1)..(428): unsure at all n locations
agctntatatataaattaaaaaattattaattatccacaagtttagaacaatataattacatttgtgtaatttatctttttcttatataattgatattatctcttcttttactttatagagatgtcaaaaaacttaataaattaaaagtggacaactaataataattagtgtctttctcaattgaggaggggtcaaaatactctntccaataactatctatgtatcaatctcagtgtgtgttaattttattaatcaaatcgctgaattaaaagtttttattaaataaatgaggtttataattactccgttaaataattaaatttaatgtataatgtatttcttaaaaaagataagttaaagttgattatagaactacataaatacaaatgttgaatttatttaaattggaatgtatacgattgttgag

SEQ ID NO: 3668 - DNA, 238 bp, Glycine max
  unsure (1)..(238): unsure at all n locations
tgaggatttaaacgacaataacttntactcggatgtttgattaagncccgcaatatatcgagacgctctaaattgaatgttgaagctctgaccaaattcacacgacgataaatttttactcggatgtctgattgagtcccgtaatatatcgagactctcgaaattcaatgttgaagatctaagcaaattcaaacgacaataactttttactccgatgtntcattgagtcccgtaatat

SEQ ID NO: 3669 - DNA, 247 bp, Glycine max
  unsure (1)..(247): unsure at all n locations
agcttcaacattcaatttcgagggtctcgatatattacgggactcaatcggacatccgagtaaaaatgtattgtcgcttgaatctgctcatagcttccgtattcaatntcaagcgtctcgatatattacaggactcaatcagacatccgagtaaaaagttattgtcgtttgaatttgctcagagcatcaagattctatttggagcgtggcgatatattatgggactcaattcgacattcgagaaaaa

SEQ ID NO: 3670 - DNA, 353 bp, Glycine max
agcttggatagcaaagcagcttcagaagagtttatcttgtctcccttcataatgagttccacaggggtgataatttccacagtacccttattaatcttggtagggatgtcaagcacctgaaattaaatatgaacaccatatatattatcaacgggtaattccaattaagttcttaattcgttccatgaacaagaatgcagaaattaacctgaaagatagagagctgagagggatccagctctgtgttgcctgtgggaacaacaacatcaataggtgcaactaaacctacacgagcatgagctgtcacctataacaacatttataagtgagtatgttaactggcataaagggtg

SEQ ID NO: 3671 - DNA, 398 bp, Glycine max
taatattcaaatgaatcaaattgaaaaaattcacacacattacatttatttatagcctaagtgtcacacacatgaatttctattcaaatttcacttgaatttgaaattgaatttgtggagccaaaattcactaatcatgattagtcaattttggctatggttcagcccactaatccaagatcaagtccaagattcttcactaagtgtgcttacgtgtcatgaggcatgtaaagcatgaaggacgtgcacaaagtgtgactatatgatgtggcaatggggtgtagcaaacaaattctcacctccccctctaaaatataattggattgggcttctcccaattaattaaacttatttctcaacacacacatcacatattcacttagtgcatgtgaaattac

SEQ ID NO: 3672 - DNA, 425 bp, Glycine max
  unsure (1)..(425): unsure at all n locations
agcttgtcaagcagtgtggcttgatacttttatacatgaactgaagatcaaagaagaaggtccagctgagctatatgtagataacaaatatgccatcaagttagccaaacatccaattgcacatggaagatcaaagcacattgaaaccaaatttcatttcataagagaccaagttgcgaacgggaaattcaagttgaagttctgcagatcaaaagatcagctggccgatatatttaccaagtccttgaaatctgaaaccttcaaaaaacagagaagcatgctgaatattgttgatagcacgaaactagcttaaggaggtgtgttaaaatttaagaataaataagctaggtattgaatgatatagatattgccacgtgtaataagtactctcctatatgctgaaccatatngagtattaactatgt

SEQ ID NO: 3673 - DNA, 458 bp, Glycine max
  unsure (1)..(458): unsure at all n locations
cttggacgcttactctggatacaaccagatcatgatgctttctctatacgangagaaaatgacatgtatcacttgagatgtcgacttttgctacagggtcatngcctttcacctaaaaaaacgtangggcacctatcatactagtgaaatgatgggatcgagtcttttgacccacaaatcgacgaaacatcgagctatatgtggaagacatggttgtcaagtctcaaagcatagcctagcatatggcggacttggaagaaatctttggggaactccacacatatgacatacgcctcaaccttgaaaaatttactttcgaggtaggaggagggaagttccttggcttcatgatcaactcattggggatngatgccaacccccacaaatgcactaccatactatatatgcataaccctacaaatgtccaagaagttcataagttgaatgataagctagca

SEQ ID NO: 3674 - DNA, 431 bp, Glycine max
  unsure (1)..(431): unsure at all n locations
ccttaatttaaaaatatctctgactattatgcatatatatcatacacatgcaagaattaagtgtaagtaaattagaatttgatggtcatgcactgacagcgtaaaataattctgtactctcaaccaatgataaatcattattgacatgactttttagataggtattataaaaatcaacagacttacaatanatcgtagttagtgattgaataacaatgtaaaactattttacaagtttagtgcatcacctattttctcaataaattaaattgtatgtttaaaaattaaaagtatttgtgtgaagttataatagaaagttagcgcaatcctgtatattaatagcccttgtaataacttgatgcattatattaataattaccccctctatcccatcatcattgtaagaaaaaaatctgtccaccatgattaat

SEQ ID NO: 3675 - DNA, 449 bp, Glycine max
  unsure (1)..(449): unsure at all n locations
taagcttgtcggtgtacctgaagatgctattaggctcagcctgtcttcattctctttatctanggaggccaagagatggctgcattcattctagggcaacagtttaaagactagggataaggttgttgagaagtttctaaaaaaatatttcccagagtctaaaactgccaagggaaaagctgcaatttcttcattccattagtttcccgatgaatctttgagtgaggcattagaaaaattccataccttgctgcngaaaactcccactcatggtttttcagagcctatacagctgaacatcttcattgatgggttacgaccgctgtcaaagcanttactccacacttctgcaggaggaaaaattaagttgaagacacctgaagaagccattgacttaattgaaaatatggtttctagtgaccacacaattttgcatgagagagttcata

SEQ ID NO: 3676 - DNA, 334 bp, Glycine max
  unsure (1)..(334): unsure at all n locations
taatatgcatatggctgaaacagtgaatattcgtcaaagttgcttaacttggtatttcatgatctgggtgggagacttttcacgttcctataaaatttccatttctattataaaatggtaacctcttctgcagcttgatgagtggtgggagcagccaacatcgacagnttgtgactgggtaacagtggatgggcaaaatgtaactgcctggcataatcatgtgaaacaagttcttgcattttgtgacaaggagctattgtgattagaattgtaaagcacacggagtgagcaaacatttgtgaagtctcttggtcattttgtcattttagatttt

SEQ ID NO: 3677 - DNA, 401 bp, Glycine max
tatgcttgtggaccttgtggcctcaataatcttattatggataggcttagaatgcagaataagcaacaacaatcaatttaacaatgttctttaaacatgcaagacacaattgattgctacaaaataaataagataagggaagagaaaatgcaaacacaattttatactggtttggccagttcccgtgcttacgtgcagtactcaagcaacccacttgagatttccactatctttgtaaaatccattacaaagtttgaatcacacagggacagcccatcccttgtgttcaggaatcctttacaacaagagactcacagtctcttaaccaatctcattgaataagaagaatggaagaagaattctctcttcaagagaagaatattacaataaagatcatgtag

SEQ ID NO: 3678 - DNA, 345 bp, Glycine max
aagccgaatggagaaggaggaaaggtgattagagatgccacttcaaggagaagatgagtcaagaacaagttcaccgccatatgaagatatggatataagagcttacaggtaggacaagatgagtggagggagagggagagacagggcacgaaatttatgcctcaaatgacgtatgaaatgtgaagtgtaatttctcaaatgatcaaagttaaaaatatgcacacacaaggcctctatttatagtttaagtgtcatacaaaagtggaggaaaatttgaatttctattcaaatttcacttgaatatgaatctgtggagccaaatgtggagccaaaatttcactaatt

SEQ ID NO: 3679 - DNA, 435 bp, Glycine max
  unsure (1)..(435): unsure at all n locations
agcttcacattcacaaaaatggtaatcgattataacacaaggtaatcaattaaaacaacaagtttttaaaatagataacacgtatcgaccaatggtaatcgattaaaacataaagaatttaaaactggaaacatatcacaagcaatggtaatcaattaaaacatggcgtaattgattaaaacaaaaagttttgaaaaacttaccaagcaaatatcatacagaaatcaaacataaatcaattaaaacaaagagtaatcaattaaaacagaaagaaatcacgaaatgactaagaaaaacatgtgatcttcaaccaaactaagtatgcacatgaatcactaagctaaaacacagcanataatgacaaatgatatgaatgacaatgtgaaacacacttatgcaaataagatgtcattctatgctagatgcatccaatat

SEQ ID NO: 3680 - DNA, 352 bp, Glycine max
tgtaagctacatttacaaccatacattggctttgttcaccatgaggaaattcacacaaaaaattgaattagtgagacatggagttacaagatttgctaccactttcttaactgtgcaaagattgcataagcaaaaggccaatcttagaaggatgtttacttcagatgaatggttgaagtctaaggcagctaaagagcccaaggggaagcaagcaacagatgttgctcttatgccatcattttggaatgatgttgtttatgctttaaaggctatagggcctcttgtaagtgtgttgaggctggtggataatgaaaaaaaacctgcaatgggcttcatttatgaagcaatggat

SEQ ID NO: 3681 - DNA, 315 bp, Glycine max
  unsure (1)..(315): unsure at all n locations
actaagcttgatgcacatatggagatgttaatgaaacaacgagatgatgctctncatgagaggatggatcaaatggagaatagagatcataatgaagaacaatggacgagaacagggaatgatggtgttgctagacaaaaccgaattgatggtattaaactcaccattcctccatttaaaggaaagaatgatctggaggcctactcggagtgggagatgaaaatatagcatgatttctcctgccacaactattaagacgaccacaatgtgaagcttgctgccacggagttttccgactatgctattgtgtggcgg

SEQ ID NO: 3682 - DNA, 265 bp, Glycine max
gatggagcttaacctagtcacacttattaagaactagctcttttcttcctctattgcctctagttgaatacacctttgttgggatctctatttggttcgtaaccctctcatgcaagttctttacaaactctgacgtagattctccttctttatgtataaaacaagtgtctactgggaggggaatgaggtctaacggtgttatgggattaaactcataaacaatctcaaaaggcgactgcttggtggttctatgaacccccctatt

SEQ ID NO: 3683 - DNA, 400 bp, Glycine max
  unsure (1)..(400): unsure at all n locations
cctatgttggttatagctcggagaacgcctcaccttangaccaaaagtggtacaacaaaccactgagaaagttaagttaattgaagaaaggatgagaactgctcacagtacgcagaaaagttatcatgataagaggaggaaagatctggaattccaggttggtgatcatgtattcttgagagtcactccgtggacttgggctggtccagcattgaaatcccgaaaactaacaccgcgctctattggtccttttcaaattcttaagacagttcggcctctggcataccaaattgcattacccccgtctctttctaatcttcacaatgtctctcatgtgtctcaagtccgtaagtatatccgcgatccatccnatgtgattgaattggatgatgtacaagtg

SEQ ID NO: 3684 - DNA, 365 bp, Glycine max
  unsure (1)..(365): unsure at all n locations
agcttganggttagtgacagtgattggactggagatgaagatgatcggaaaagtactagtggatttgcgtctctcatgggggaacacaaccttcacttggatgtcaaaaaattagtcgatagtcactctttcaacttgtgaggcagaatacatagcaacgacttcatacatttgtcatgcagtctggcttaggaatttgttaaaaaagttgggcatgtcacaagaatagccgaccaagatctttgttgatagtaaatcagccattgttcttgcaaagactccagtgttccatgatcgaagcatacatattgatacatgttaccactacataacggagtgcatagcangataggatgtacatgcat

SEQ ID NO: 3685 - DNA, 311 bp, Glycine max
  unsure (1)..(311): unsure at all n locations
tgaatcggacatccgtgtganaagttatgcacattcgaatttcactagagctctcgctgctaatttcgagcgtcactatatgtgatgcgccccaattggacattngagtcaaatgttatgaccatttgaatttctcaagagcttccgctgtctaattctgagcgtctcgctatgtgatttcgctgaatccgacatcngtgcgaaaagttatgaccatctgaatttctcaagagcttcccatgttcaatntccaacctctccatctattatgcgcccgaatcggacatccgtgtgaaaagttatgaccattt

SEQ ID NO: 3686 - DNA, 354 bp, Glycine max
agcttataatatatcgatacgctcgaaatttaacatcggaaactgtcgagaaattcaaatggccataacttttcacacggatgtccgattcgggcgcataatatgttgagaggctcgaaattgaacaacggaagctcttgagaaattcaaatggtcataacttttcacattgaggtctgattcaagattatactatatcgatacgctcgaaattaaacatcggaaactctcgagaaattcaaatggtcataacttttcacacggatgtccgattcgagcgcataagatgtctagaggctcgaaattgatcaacggaaactctcgagaaattcaaatggtcataaactttcacac

SEQ ID NO: 3687 - DNA, 365 bp, Glycine max
agcttgaaggctaactggatgcgtcggtcaacttggtaacccagctggccttgaatcaaaaatctgtgcctatcgcaggggtttgtggtttgtgctcctctgctgaccaccatacagacctttgccctttcatgcagcaacctggagcaattgaccagcctgaagcttatgctgcaaatatttacaatagacctccttaacctcagcagcgaaatcaaccacagcatagcaattatgacctttccagcaacagatacaaccctggatggaggaatcaccctaacctcagatggtccagccctcagcacaacaacagcagcctgcttcttccttccaaaatgctgctggcccaaacagaccataca

SEQ ID NO: 3688 - DNA, 209 bp, Glycine max
  unsure (1)..(209): unsure at all n locations
tgaganaggttatgaccatttgaatctctcgagagctctccctgttcaatttcgtgcagctcgatatgtgatacaccagaatcggacattcgagtgaaaagttatgaccatatgaatgtcttcatagctttcgttgttcaatctcgtgcatgttgatatgtgaagcagctgaatcggacatccgagttaaaacttatgaccattttaat

SEQ ID NO: 3689 - DNA, 428 bp, Glycine max
  unsure (1)..(428): unsure at all n locations
agcttgaaggtgcgtaccccaccatttntcatagtaaaacactggtaatgtgtctactattattgtgatcatctctttctccatcattggaggtgccacttgagctgccaggtctctccacctttgggcgtattctttgaaagattcgtgcccctttctgcacatgttctgtggttgcatcctatccggagccatatcataattgtactgatactgcccaatgaaggcaaccattaggtctttccaagaatggactcgggaaggttccaagttagtgtaccaggtaacaactaccccagtaagactttcttggaagaaatgtatcagcagtttctcatcttttgcatatgcccccatcttccgacaatacatctttagatggttcttggggcaagtagtccccttatacttgtcaaagtctagcacct

SEQ ID NO: 3690 - DNA, 424 bp, Glycine max
agcttgaaggagtttattgcatcagggaacaatttcactttaaaagtgggtcctaattggattcctaattttcaacttacctatttggatgtgacatcatggcagataggtcccaactttccatcgtggattcaatcacaaaacaaacttcaatatattggactgtctaacacggggattttagattctattcccacttggttctgggaaccacactctcaggttttgcatttaaacctctctcataatcatatccatggtgagcttgtgactacattacacaatccaatatctatcccaactgttgatctaagcacaaatcacttatgtggtaaattaccctatcctctcaatgatgtgtatgagttagaactttcaaacaattcattctctgaatccatgcaagaaattttattgtacaatc

SEQ ID NO: 3691 - DNA, 344 bp, Glycine max
agctttcttaagaagattcctaaagatactagagcttagctacacatacctctctaatagctaagctcacctccttcagatgagaagctagaacttaactacacacccactataatagctaagctcacccccatgacaaaaaaacatgaaaatacaaaaaaaaaaagtccttactacaaagactactcaaaatgccccgaaatacaaggctaaaaccctatactactagaatggccaaaatacaaggcccaaacgaaggaaaaacctattctaatatttacaaagataagcgggctcatacttagcccatgggctcgaaatctaccctaaggctcatgagaacc

SEQ ID NO: 3692 - DNA, 461 bp, Glycine max
  unsure (1)..(461): unsure at all n locations
tccatcatataggccattcgcttgtttcatggaaaaccacgaagaacactatagtctcacgttcctcttcttacgctgaatatcaagcacttgcttccacaacttgtgaattacaatgtctctcttatcttctaagagatctatggattcccctttccaagtcctccgtactttactgtgatatcatagcgctcttcacattgctaccaatccagtctttcatgaacacaccaaacacttggacattgattgtcatctagtccgtgaaaagtcccaagttggactcatgttactactcccagttccttcttcaaatcaacttgcggatatattcacaaaggctcttccttctcaatccttcagcaccaatctttccaagctgcagttacaaaacattnttgcacctccagcttgtggcgggctaatagagaagacatataatcctaccttaaataccacat

SEQ ID NO: 3693 - DNA, 416 bp, Glycine max
agcttgggcaagatgaccaatgcaccatggatagtggccctaagccagaggatatgtgcatgcccaccaaagtgtgcctctttggcatgtaagagtaaagttgtagacatgggcctggcccggtagaattgggcactgggttatgtatgctggcccatcagcccaacttgttctcaattgtctaatcccatgcctgttcaattttatttaatttaaaagtgtgtaaataaataaaaataacttgtgaataaaagcactcagtgcctacatttgacagatgaggaagatgtgagagggtatatgtgatttataacagttcaaatcagtttcatatatagttggtaataacttgtagtcctacatactctttttcgtgtaaggatttaatcttttataattgaattactgtgaaatat

SEQ ID NO: 3694 - DNA, 418 bp, Glycine max
agcttgaggggctgctatttttgctgtttccgtgagcaatggggttcttgagtgaggggggggcgtaatctctcgaactacgaagatgttgtccatcgactttctagtcttaatgaaagcagaatgagtttccccaataatagtctaaagcactgccgctatgcggttagccagaatcatatatacaatcttgcataacaaattacagcacgatatgggtctaagatggataacctgagaggactggtcatgcttaagaagaagcgcaagaatatcatggttgagctgctctagaagttttccagcctctaagatatcatcaccaatgagattcccacccttcttgaggaataaaacattgaaaccatccggcccaggagctttattattatccatcacagacataacgttcccaacc

SEQ ID NO: 3695 - DNA, 431 bp, Glycine max
agcttgtatgcaacaacaccaatcttgtcttccattataaatgaaccatagtacttaggggccaactttacattggatatggcttgcactgaaacttggtgataagcatgtaattttacataaaccaagtcaccaatatgaaaactcctatcagatctgcccttatctacaagttgcttcattctgtcctgggtccttttcatgtggaatttaagtaactttaacatttcatcacgtttctgcaaactcctattaaccaaagcaatcttcaattcacttatgagataaggtaaatcaacaagaggagcttggccatacacaatctcatagggacttgctttaatagtgctgtggtaagtggaattgtaccaccattcagcatgaggcaaccacttggaccatgtgctggagagtcactacacatgcacctg

SEQ ID NO: 3696 - DNA, 334 bp, Glycine max
  unsure (1)..(334): unsure at all n locations
agctngaaaggaaaagcatgagtggaagtcgtcacttcattaggggtaacttagtcacttggatatgcaaaaagcaatgccctattgcattatccactactgaagtagaatatatttcagctactagttgatgctctcaattattatggatcaagaagcaactagagaggactacaacatccatgagagtaacattcttatctattttgataaaaaaaaaaaagctactatcagtctttctaaaaatcctacattgcatttaagggaaaacatatagaaattaaatattatgttataagaaaccatgttcaaaatcaactttgctatatattta

SEQ ID NO: 3697 - DNA, 449 bp, Glycine max
tgtcaaataaatcactgcatattgtgcagtccctatcatccttctgaggaatgtacaagagagtaggcttgcaaacaaggttccaatttggataaaagtgtaaaactacttattaattagaattttatgaatcattgtttggaatattgaagaaaaaagacaacctgacaaccagctgccctgaaggaactaaaatcatggcattcaacaagaactctgcatgctctctgcatggatatcatcaataacttgaatagctgcaagattgagaatctagtaagtataaggagctgttaactaacttgcatagctggaagactaagctcctcacgtacatgccatgctcgatctttctcgaaggttgacaaacgctctggcccagaaagcaaccgatagaagtatctgaatagtagttccaaataactatcaattactgcaaatggtcataa

SEQ ID NO: 3698 - DNA, 266 bp, Glycine max
agcttcgattcatgcgcataatatatcgaggctctcgaaagtgagcaacggaagctctcgagaaatttaaatggtcatagcttttcactcagatgtccgattcatgtgcataatatatcgagacgctcaaaatctaacaatggaagctctggagcaattcaaatgggcgtaacttttcactcggagatccgattcatgcgcataatatatcgagacgcttcaatattcaacaacggaagctctcgagaaattcgaatgggcataac

SEQ ID NO: 3699 - DNA, 412 bp, Glycine max
  unsure (1)..(412): unsure at all n locations
actaagcttcttatgtctccaaatggatcagaaaatgaatctcatctttggtattgccagttcggtcacttaggctacaacggattgaggatactttnttataagatggtaaatgggttgccttcaatcaagatttcgaagaagatatgcataacatgtttaactggccagcaacacagagactttatgcctaagaaaagtttatggagagcatcaaacaagctaccacttgtgcatgcaaacatatgcacgcctattaaaccacaatcaaacagcaacaagaggtacatcctaagttctattgatgatctcattcgtaaaacttgaatttatttcttacatgaaaaatcataagtttttctcatgtttagaaattctaaaactcgtgttgaanaggagactgatgcatata

SEQ ID NO: 3700 - DNA, 427 bp, Glycine max
gatccttaagtcacctgcagctgcagcttagattttatacgggccttcctctcttgcaggggttcacggtcatcatggtcgttgtcgatcgtttctctaaggctgcgcatttcgctgctctccccacacaccattctgcctataaggtggccgtgttgtttctcgacaccgcttgcaagttgcgcgggtttccccgtagcctattttcagaccgagatcccatttttatcagccatttctggcgtgacctattcaaacttagtggcaccaagctcagaatgagcaccgcataccacccgcaaaccgacgggcagacagaggtgctcaatcagacgctcgaacagtacttacgcgccttcgtccatcaccaaccttcacggtggtttcgattcttatccctggccgaatggtcttataacaccaccat

SEQ ID NO: 3701 - DNA, 412 bp, Glycine max
  unsure (1)..(412): unsure at all n locations
ctcactttcatttttntggtctttggttattgcttgtctctctgtttccttgcttgtgagttgccatatangaaattggaaaggaggattggtgccatatcttgaagaatttgagtcaagaagcaaggggccaaccaccttaagagatattggactaagaagcactccaaattgagtgaaacactaaagagagaatagccaccacaattgaggacttttttctttgtaattntgtaattggcaatttgctttgctttcaaattttgtaacaaaaggcctttcattggaagtaagttgggagcctccgctacgtcaccctacttccatttgtgtgtaataattctaggcaattctcccttaggatagtgagtgttttgttgggaaccttaaatgaggtcatccaaacactcct

SEQ ID NO: 3702 - DNA, 363 bp, Glycine max
  unsure (1)..(363): unsure at all n locations
agcttctaaactntatacaagaatgaagctctgataccacttgttagacaagtggcctcagatatcttaagaagggggggttgaattaagatattccaaactacttccccaattaaaaatctatttcactttttattcaagttataaattcccttaataatgaacttcttagatgttgattcaaataaaacaatttgaatatgaatataaagcaataataaacaaaggagattaagggaagagaaagtgcaaactcacatttatactggttcggccacacccttgtgcctacgtncaatccccaagcaacccgcttgagagttccactatcttgtaaattccttttacaagttctaaacacac

SEQ ID NO: 3703 - DNA, 468 bp, Glycine max
  unsure (1)..(468): unsure at all n locations
ntactatgaagagaatatccaaggaanataccttcatctgacttatcatcaaattctnctaagttatcttttccattattgaatacaaaacatttacaaacaaagatatgaagatgtgagatgtttggttttctgcgagtgaacaattaatatggagttctctttaaaatgggtcttattaaagccctatttaaaatgtagcatgcagtgttaaccgcttcagcccaaaagtattttggaagaggagtatcatttaataaagttctagcaatctcttccaatgatctatctttcctttcaacaacaccattttgttgaggggctcttggtgcagaaaagttatgcttaatcccatgcttatcacacaataattcacattctctattttcaaactcacccccatgatcactcctaatagatataatcttgagaatnttcttattttgaatgattnttgcaagtttctaa

SEQ ID NO: 3704 - DNA, 380 bp, Glycine max
agcttgtccgtcattgtttctaatttgaagtactgggtttgctacatttagtggggttttgagtggtgaatttgacattgaatgtctggtgaaacaggatccttttagcccgtaacagaacagtgaaagttgcagtttggatttgtactttcaactaataaatgtcgaggggatctgatggatcacaaaaaaagcgtttagttgctgcgatctgtgttgtggcaatttttcttggctttctgtatgtgtatggcggatccatctttggttctcagaatagtggttcatctgctcttgaatatggcagatcattgaaaagacttggctcgtcatatttgggtgcagaggatgacactgatggcaagcaagatgaatcttca

SEQ ID NO: 3705 - DNA, 420 bp, Glycine max
agcttcagatctaaattgtgcgcgtctagatatattacgggactcgttcagacatctgagtaaaaagttattgtcgctagaatttgatacgagcttccattttcaatttggagcgtctctcgataaattgcaacactctgtcgggcatccgagaaaaaagttatcgtcgtttgatattttaaagagtttccattttcaatttgaagcttctcgatatattacgggactcaaccagacatccgtgtataaagttattgtcatttcaatttgctcagagcttctagtctcaattttgagcgtctcaatatattacccgatacaatcggacatgcgagaaaaaagttattgtcgtttgaatttcctacgagcttccgttttcaatttggagtgtctcgatatattacgggactcaactggaca

SEQ ID NO: 3706 - DNA, 303 bp, Glycine max
caatttgagcgtcttgatatattatgtccccgtatcggacatccgtttgaaaacttatgaccattcgaatttctcgagagcttccgctgctcaatactgagcgtctagatgagttatgtccccggatctgacattcgtgcgaaaagttacgaccattcgaatttctcgagagctttcgctgctcaatttccagcgtcttgatatattatgtcctccaatcgtacattcttctcaaaagttatgaccattctaatttctcgagagcttctgttgttcaatttccagcgtcttgatctattatgt

SEQ ID NO: 3707 - DNA, 262 bp, Glycine max
  unsure (1)..(262): unsure at all n locations
agcttaaacattcaatttcgagagtctcgttatattacgggactcaatcagacatccgagtaaaaagttattgtcgtatgaattggcttaaagcataaacattcaactttgagcctctcgatatattacgggactcaatcagacatccgagtaaaaaattattgtcgtttgaatttgctcagaggttcaaaattcaatttcgagcgtctcgatatattncgggactcaatcagacatccgagtataaaagtattggtctttg

SEQ ID NO: 3708 - DNA, 406 bp, Glycine max
tcgattacacacatactatagtcgattaccaaaggagtcttttagaatacattctcaacagtcacatctttttatttcgcttttaaatggccatcacaggcttgcctatatgtgacttgagacaccaattttgatcagagttctgaagaacaaaaaggtcttatcctcttaacaagcaaaactgttttatcctcttaaaaattccttggccaaaacacttgtgattcaataacgaattatttgagtgctcaaattgttcaatctatctctttcaagagagattttttcttctcttctttattctgaaaagggattaagagaccgacggtctcttgtcggaaagaatctaaacacaaaggaacgattgtccttgtgtgtttataacttgtaaaacgaatgtacaaga

SEQ ID NO: 3709 - DNA, 427 bp, Glycine max
  unsure (1)..(427): unsure at all n locations
agcttttaaaatacactctcttcccttcaaaatctcctcatattatctctctctctctaaaatcacaaattacaaaatccccttccattctctctctaaaaccatcatgtcctccactgcgcctcctgtcctccccatctccaacccccaaaccactgcaagaaccaccagtgcaggcggcggcgccatcaaggctccggcgaacaacctgaccttctgtgccttcatcaacaacctttccacctccctccaccacggcctcgaccaatgtcgcccctggtcggagctcgcagaccgctccacgttctcgaaacccgagtcctccaaagccacccttcgtgtccgcaaaaacttctcctactttcacaccaactactancgtgtcgttcactcatcctcgcagtctcttctctactgngaatgtatg

SEQ ID NO: 3710 - DNA, 392 bp, Glycine max
gcttatgccaagaggagatggaccttctctagtctcggagaggatcaataacatgcctataggtttaacctcctataagagtatggagtcagcaacaccacttttaacatttctaatttaatttcttttgcaggtggagctgatattgaggaggatgaaccaatagatttgaggtaaaatcgtcttcaagggggaggggatgatacaatactccctaggaaggaactattcaccaaagccatgagcaagagactccaagaggattgggctagagttgctgaagaaggccctatgattctcatgaaccccagggtagaattttgagccaatgggccaaggttgggtccacttatatttgtacatattagatttggatttcattatttttgggc

SEQ ID NO: 3711 - DNA, 344 bp, Glycine max
agctctcccttttcataaaagaaaaacgtatctgaggtgaataaatatgaaaaacatattcttatatcgatttattacgctacaaaaagattatttactaacattaaaggtttgtcttttggtaaatttacattgacatagacttttactagtggaaattaaaattaaattgttagtataactattgttagtagtcttttaagagaaatattgttagtaagtctacattaatattaagtgtccttataaacatatattttactctcttacatacaactatctatttttttctacctctctatatttttctatatattacatactatatctattattcttttctc

SEQ ID NO: 3712 - DNA, 427 bp, Glycine max
  unsure (1)..(427): unsure at all n locations
acatcttgacttgctttccaatctgacattcaccacagattctgccttatgctattttcagatggggaatgcctctaacagcacctttgtcaatgattttcttcatgcctcttaagtgcagatgtccaaatctttgatgccatatattgacttcatcttctttggagactagacatgtggaggagtaactggtttcttgaggtgtccatangtaacagttgtcctttgatctgctgcccttcattaggacttcactcttctcatttgtcaccaagcattctgactttgtgaagtttacattgagtccttcatcacacaactgactgatgctgatcaagttcgcagtcagtcccttcaccagcagtactttgttcagactaggaagtccttcatggactagctttcccattccagtgatcctttcttt

SEQ ID NO: 3713 - DNA, 418 bp, Glycine max
agctatgccataaacagcgttcacaaaagtcaagtttctccaccttatcttcatttagcacgttctattttcccagttcaatcaaccccctctcactcacatgtcctaaccttctgtgccatagttcagtctttgacaaccttttgacagaaactgcaacagctgatccaatcatcacttctccaatcagagaatacaagccattcttttgcatccctttcatgaatattatggagcactttagaacctttagaactccattctcctctttgaacacatagccttgtttgtcaaactcactcagagaaatcaaatttctcttcaaatctgggataagccttacattcttgatgactctcttagcaccatcatgaagcttgaaccttacagacccaattctagtgatcttacaagactt

SEQ ID NO: 3714 - DNA, 326 bp, Glycine max
ctgccgcaagagtctagtggatatgctcttctgctgaccaccatacagactgttgcccttccatgcaacaacctggagcaattgagtagcctgaagcttatgctgcaaacatttacaatagacctcctcaacctcagcagcataatcaatcacagctgaacaattatgacctctccagctacagatacaatccctggatggaggaatcaccctaatctcagatggtctaaccctcaacaacaacaacagcagcctgctccttccttcagaatgatgctggcccaagcagaccataccatcctccaccaattcaacaactgcaacag

SEQ ID NO: 3715 - DNA, 345 bp, Glycine max
  unsure (1)..(345): unsure at all n locations
tgaatagttcgttcagtctgaccatctgtttgaggatgataagctgaactaagcttcagctttgtccccaaggcttcatgtagacttgtccaaaatcgcgaagtgaaccttggatccctgtcagatacaatactagaaggaattccatgcaaccttactacttccttgatatacaactccactagctnttccattctatacctcatattcactgcgataaaatgagcagaattggtgagtcgatctactatgacccacacggcatcatgcncacgactagtctngggtaaactagatacaaaatccatagatatgctctcccatttccattccggaatctccaat

SEQ ID NO: 3716 - DNA, 439 bp, Glycine max
agcttatcaccatttgcacctttctcatcaactaatttgtcactgagaggtgacagagacttgaataatccaagtaactaagcaagtgtgtcgtaatctccagaaccagttcctccatcatggacgatcccattcatcaacaccaccagccctggagtgggactgggcccaagcattttagtgcggccgccgttgaggtagggcacgacggcggcaccagaattggaggtgcaatcgcagtggtgaagggagaaaaaggatcttatgaaagagaaaagtgtgaaaaggaaacaaagcttatggtttcgagagagagaaagagggtactgagaagtgagcttgcgagggtcttatgtaaaaacctgaacatcggtttgttgtttgagctttcacaacatcgatttttaaaaaaccaatgttaaaatcattttgttaacat

SEQ ID NO: 3717 - DNA, 301 bp, Glycine max
catcatcaatagtctcagacgggacaggctctttcttatcagctgattttgactgagttattaaagatggaacgtaccaaacttaaatttagtttggcttaccaccctaaagctgatggccaaactcagggtggcaatagatgcatagacatttatttgcaatgtttaaaagttcacagcgtaagcaatggccaactgtctcaggtgggctgagtattggtataacaccaataatcatggcaccactgcatgtacctggcttctttttaccttaatttataatacagacgattcattcttt

SEQ ID NO: 3718 - DNA, 436 bp, Glycine max
agcttgtctctcaacactacaaagctattcacctttaatccttttgttaaaatatctgccagctgcatttcagtgctgcaatacctcaaatccagctgcttcttgctcaccttttccctcagaaaatgaaatctagtctcaatatgttttgatcttccatgtgctactggattcatggccaaactgatagtagatttgttgtctacatacaatctaactggcctctgaatttccaccttcaattcttcaagcaaggagtccaaccacaaggcttgacatgcagcatagcaagctgctatgtactctgcctcacatgaggataaagccaccacttgctgtttcttggaacaccagcttattgatgtacccagaaacttgaaaagatagcctgtagcgcttttcctttccaccttgtctccgcaccaatcagaatctg

SEQ ID NO: 3719 - DNA, 434 bp, Glycine max
agctttaaactgtatggctgctcatcatcaatagtctcagacagggacaggctctttcttatcagctgattttggactgagttattcaagatggaaggtaccaaactcaaatttagtttggcttaccaccctcaagctgatggccaaactaaggttgtcaatagatgcatagagatgtatttgcaatgtttaacaagttcaaagcgtaagcaatggccaactgtctcagttgggctgagtattggtataacaccaataatcatggcaccactgcatgtacctggcttctttttcccttaatttataatacagacgattcattcttttccattcttttttccccctttcattctatacgttcttgagtaatttggttacagatctaacccagtctagaaaggggtgggtcctaacatccttctatactatttaga

SEQ ID NO: 3720 - DNA, 473 bp, Glycine max
  unsure (1)..(473): unsure at all n locations
tttccagaccatacttcttcgggcaactgataattcatatgaactgatggtcctctattgatgagatatgctactgtgtttattgctcttgctcagaatgctctatgcaagccaaattggatccgcatacaccttactctctcgttcaaggttctattcatcctttctgtaacaccgctttgctcacgtgttcctggtattgacttgatcattctgatcccatgttcttgacagaagtctttaaactcctgactatcatactccccgccattgtcagatttcagactnttaacctttagacctgtctgattntcaacttctggttntcaccttgtaaacacagaagacacatcagaattattgttaagacacataacacatacctctctggtagagtcattgataaaggtgacataatagtgtgagtttccaacagatttcactggggttgggaccaaacatctgtgtgcacc

SEQ ID NO: 3721 - DNA, 437 bp, Glycine max
  unsure (1)..(437): unsure at all n locations
agctcngggaaactaagtgctatgttgtgctggtgtggagtgctataatgtggcagtttttcttcttgggagcaataggagttatcttttgtgcctcgtctttgttgtccggtattataattgctgcttttcttccagtagcggaaggtttggctgttattgtatacaaagagagttttcatgcacagaaaggggttgctttggtgctctctctttgggggtttgtatcctaattctatggagagataaaacaagacaagaaaaagaacaagagtcgttgtcaagaaacagagctgcctcaaagtcttcctcccaatgcatgattgcaagtaaagtttatttcactatcttggcttgtgttgaattgtcaatattgaaggctagctttggccccagatagaggaaaaccacataaaggcaaagtcatttctcaccct

SEQ ID NO: 3722 - DNA, 437 bp, Glycine max
  unsure (1)..(437): unsure at all n locations
agcttgtaatcgattacacacatactgtaatcgattaccagaggagattntcagatcatattcttagcagtcacatcttttcattnggttcttgaatggccatcaaaggcctatatatatgtgacttgagacacgaatntgctaagagttttcagaacaaaatggtcttatcctcttaaaaggcaaaatcgttttatcctcttacaaattccttggccaaaacacttgtgattcaataaggaattatttgagtgctcaaattgttcaatctatctctttcaagagagatttcttcttctcttcttctttattctgaaaagggattaagagaccgagggtctcttgttgtaaagaaatctgaacacaaaggaagggttgtccttgtgtgattcagatcttgtaataggcttttacaagatagtggaactctcaagcag

SEQ ID NO: 3723 - DNA, 419 bp, Glycine max
  unsure (1)..(419): unsure at all n locations
agcnttgatgcaacatttggagaggttaatgaaactacgagatgaaaatagaacatgttttctcatgcaacgactatgaggaggaccaaaaggtgaagcttgctgccacggagtttttcgactatgctcttgtgtggtggaacaagctacaaaaggagagagcaagaaatgaagagccaatggttgatacatggacagagatgaaaaagatcatgatgaagcggtatgtgccggctagttactcaagggacttgaaattcaagctccaaaaactaacccaaggcaacaagggggttgaggagtattttaaggaaatggatgtgctcatgattcaagcaaagattgaagaagatgaggaggtaactatggctcgatttcttaatcggttgactaatgatatccgcgatattgctgagctg

SEQ ID NO: 3724 - DNA, 369 bp, Glycine max
  unsure (1)..(369): unsure at all n locations
ctgtaagacctgcaacttctctattgatcatgctggttaggaaaggaagttgcaactaagtgagctagatgagatatgtttagaagcctatgagaattccaaattctacaaggagaagaccaagaagtgccatgacagcttgatagctaagaaggacttcatggctggacagaaattattattgtataactctacgctcggactcatgactggtaagtcgaggtcaaagtggattggtccttttgcggtgactaaagtttttccttatggtacaattgagatcaanagtgaatccacatataagagcttcaaggtcaatggacaccggctgaaaccattcctcacacatccctccttggtggatgtagt

SEQ ID NO: 3725 - DNA, 438 bp, Glycine max
  unsure (1)..(438): unsure at all n locations
agcttccacactagtatcctttaattntagggtatatttttttatacgtgtatatgaagaaaaatgaaagatatcaataattgtatgctatatcataccgtttaatttttttttatgtacaaatgattaaaaaatgatttttttagaataggttttgaaaagatatttgattcgatatcgttagtttgttatgttattgattttaaatttaatttaaatctttattatctttggaattaggggtgcaccaaaaagaaaaaattaaagaagaatacaaaaaacaatctttttaaagaagataattaggggtgtattagattaagatttcaaaagatttttttaaaaaaatattgtggtattcaattaaaaattgtaaataatataaataagttgtatgatatttaattaaagtttttaagattttgtatagaagacaac

SEQ ID NO: 3726 - DNA, 420 bp, Glycine max
  unsure (1)..(420): unsure at all n locations
agcttgaccaagtatatgctatttagntgaactgatcaatttttttaacaataactgcacacagttttaggtttgtgacttttctgtttcatganagtagacatacaaaagggcataatgatattttttttggagtcttatttaccttgttcttgtctggccaaagtttcatttacaatgaagagaacagtattcttttcaatagttcttcaacagaagatttcagcagcaatgataattccaaatctctttacaggttggttctcagagcacaacaatgaagatgactcgtgttcctattcatggaggactatcttggaaagcgtttaatgaagaaacaaccactactgatgatagttcgttcactgtgactggcttgttggagcagataaatgcaaccagagatttatctgattactt

SEQ ID NO: 3727 - DNA, 433 bp, Glycine max
  unsure (1)..(433): unsure at all n locations
tctatttcaacagatgaagatgaatctgtggccatatcatggactcttctaatgacaatagcatcacttcttgcactgaattgttgggagttggaagccatcttcttaatcagattcctagcctcaacatgagtcatatcaccaagagctccaccattggcagcatcaatcatactcctctccatgttgctaagtccctcatagaaatatngtaggaggagttgctcagaaatctggtggtaaggacaacttgcacacaatttcttgaatctttcccagtactcatacaagctctctccactaagttgcctgatgcctgaaatgtcttttctgatggcagtggtcctagatgtacggaagaatttctccaagaacactctcttaatgtcatcccagctggtaatggacctaggagcaatgtagtacaaccaat

SEQ ID NO: 3728 - DNA, 440 bp, Glycine max
  unsure (1)..(440): unsure at all n locations
agcttaagacaactctntatggacttaaacaagctccaagacaagggtatgagagacttaccaacttccttcttgaacaaaagtttaaggaaaagttgataaaacacttttcattaaaaagtcctctcataacattttacttgtgctagtttatgtggatgacatcatttttggttctactaacaaatctctgtgaagattttgtgcacaagatgcaaggngagtttgaaatgtcaatgataggggagttaaattactttgttggtttccaagtgaagaaaatggaccatggaacatttcttcgtcaaacaaactgcaagaaacttctcaaaaagtttgagatggataaaagcaaggattctgcaactcctatggctactaattactaccttagtgcagatgaaaagggaaagacaattgatcttagttccttactttac

SEQ ID NO: 3729 - DNA, 474 bp, Glycine max
  unsure (1)..(474): unsure at all n locations
tatcttgaataacgttctatatggcttcaaatttttttatgtacgctnttggtattgtgccgctgaagttgttggaagagacataaaaatgactaaactgngaaatccatgcttggtctttaaactggcaatgggaccgtacaactttgtggctcgcaaaaccaatactttcagttcttgtagagtttgaagccaatggggaaagacatcctttattngattggttccaagatctaataccttcagactagtgcaattggacaaagattctggcaaaaaaccttctaattggttgccattgagatccagagtactgagccgacagntatttgcanaggtacttggcanagtgccatgaagctcgatcagttgtagatccaaaacttcaagggatgatgagttagcacggcatcgtggaatgattccagtcaacttgttgtgagacaagttgagaacattaattgaacttgcatt

SEQ ID NO: 3730 - DNA, 430 bp, Glycine max
  unsure (1)..(430): unsure at all n locations
agctntgaatgctctattcaatggagttgacaagaatatcttcagactgatcaacacatgcacagtggccaaagaagcatgggagatcctgaaaaccactcatgaaggaacctccaaagtgaagatgtccagattgcaactcttggctacaaaattcgaaaatctgaagatgaaggaggaagaatgtattcatgacttccacatgaacattcttgaaattgccaatgcttgcactgccttgggagagagaatgacagatgaaaagctggtgagaaagatcctcaaatccttgcctaagagatttgacatgaaagtcactgcaatagaggaggcccaagacatttgcaacatgagagtagatgaactcattggttcccttcaaacctttgagctaggactctcggatagggctgacaagaagagcaagaac

SEQ ID NO: 3731 - DNA, 427 bp, Glycine max
agcttttggaaggatcaaaaagtgctcttatgaatcctctcgtgcttatgccaccagtacctggaaggcctctcattttgtacatgacaatcttggacgagtcaatggggtgtatgctggggcaacatgacgaatccgggaagaaagagcgcgctgtttactacctaagtaagaagttcacgacctgtgagatgaattactccttgctcgaaagaacgtgttgtgctttagtatgggcatcccatcgcctaaggcagtacatgctgagccatactacctggttgatatccaaaatggacccggttaagtacatctttgaaaagccagctctcacgggacgaatcgcccggtggcaagtcctgctatccgagtttgatatagtctacgtcacccacaaggcgataaaaggaagcgccttagcagatta

SEQ ID NO: 3732 - DNA, 438 bp, Glycine max
cgacatggtttgcaggaaagagcacttccttggatgaaccttctcttgtcatctgggttttcaccattgacatttagtaactttacagaatcccaggctgagtgtttggtgcagaggactcctagcaaggggttccatgttgagaagaggcagtcttcccttgttctttgctggcaaaggaaggatctcatctcagtttcaacttggagatgctaagcagagccattctgcacctttgaacgaccaattaattctatattcgaaggtgctacataacttaccgcttctattgatctttcttgcttgaatttgccttggctatggttctatgctaattgtctgtgtttaggaattattattctcatgtaaggaagtgaacatattaattagcaatggcaacttatgagccctgatatgaagtgtattattataaacatg

SEQ ID NO: 3733 - DNA, 431 bp, Glycine max
  unsure (1)..(431): unsure at all n locations
agctnttcttagacatttttaaatggctgcaaacaatagaatatgccaacatatgctaaattcatgaaggatttgcttacaaacaatagaataattatggatgatgaaacattggagctagaggcaggttgtagtgcaattattcataaatccattctatagaaatctcgagatcctagtagtttcacaattcctgtgactattagaagattattaataggaaaggcagttctttatttaggtgcaagtatcaacctaatgcccttgtccatgatcaagcggataggagaagtagacattagaccaacaaggatgactttgcagtttgctaacagaactatcaagcatccttatggcattattgaagatgtattggtaaaagttgacaaatttctctttctagtcaactttatggtgatggatatgaagac

SEQ ID NO: 3734 - DNA, 411 bp, Glycine max
  unsure (1)..(411): unsure at all n locations
tcgncttcttctttagtccagtcttcttctggcttcaattcatcagtgggctttccttctgtgtccagcatcttgggatgttcccagcctttgatgacagctttccaggttctgctatccagtgatttgagaaaggccaccatccttgctttccagtattcatagttggtcccatcccagaatggtggtctgttcactggtccgccttctttctccatgttcatcagaatntatctccctagatctcactcagtgatttcgagtgcctgctctgataccaattgaaattctgatactgnggacagatgtcgtacaggatgtcacgacatcacgcttcagaacatgcagatngtctttgactgtatgaacacgatanacaagtaaataacacaagagaattgtaacccagtt

SEQ ID NO: 3735 - DNA, 441 bp, Glycine max
agcttgccttggcccttgatatatttgagggactcatggtcactatgaatgactaattccttgggataaaggtagtgttgccatgttttcaaagcccgtactaaggcatacaactccttatcataagttgaatagttaagggtaggaccacttaacttttcactaaaataagcaggaggatggcctgtttgcctcagcgcagccccaatcccaacatttgaagcatcacactcaatttcaaaagatttttgaaagtttggcaacgcaagtataggggcattagttagcttttgcttaagaacattgaaagcttcttcttgtttctctccccatttgaaaccagcatttttcttgagcacttcattgagaggtgctgccaatgtgctaacactcttcacaaatcgtctataaaaacttgctaagccatgaaaactcctcacc

SEQ ID NO: 3736 - DNA, 430 bp, Glycine max
  unsure (1)..(430): unsure at all n locations
agctntaaaagaatggctaagattttgttaaaacatattcacttagacaatgaaggaaagctggagttgctgcacatgatgtccaacgttatgtcaaagaataagatcgggctgcacaatgcacaaggcaagataaagtgtcaaatgaagaattgaagctgcaggattcacgatgtcggatacaatgtccaggacatcctgcctgaaaatactggaattgctaaaagcattgaagctgcaagatccacgatgtcggatacaatgtccaggacatcctgcccgaaaatactggagttgctaaaagcattgaagttgcaggatccacgatgtctgatacgatgtccaggacatcttgcccgaacatactggacatataaatctgttatatctttaacagattattgtgcagttagcaagagattagatgatc

SEQ ID NO: 3737 - DNA, 422 bp, Glycine max
  unsure (1)..(422): unsure at all n locations
ttcgaggatttcataaaacagagcataaccaaaggtgtcatacaactagcacctatgcatagtgagtgagattcagatgttactcgagtgacttgaagtcttaaactctatctccgacgtcaaaccacacacaaccttttgataggtgtatactatacagcccgtgcgttaaacgtgatgcacgtctattccggtatagtgaacgctctagaaatttgtgcccaacatctcatatgaagcggnccccacttccacattcacatangtgagtctatcaagagtactcctgtagcctacgtattacactcaacataaagtatagatctcatgaagaattaagaattgttctcataactgatactcaggttacttcaggaatcatgctactttcacgtataacagcatgtgcatctcatatcact

SEQ ID NO: 3738 - DNA, 449 bp, Glycine max
  unsure (1)..(449): unsure at all n locations
taactaatcaaatgggacagttggctacacagttaaatcaacaacagtcccagaattctgatagattaccttctcaatctgtccagaatcccaaaaatgtgagtgccattacattgaggtcaggaaagtagtgtcaaggaccttaacctgtagcatcttcatcatctgccaatgaacctgcccaacctcactctactccagaaaaagatgatgacaaaaatttaaagagtaagttacctaacaatntctatgcaggtgaatctaaagagaagcaacatatccctcttccattccctccaagagaaatttccaacanataaatggaagaggcaaagaaggagatcttggaaacatttagaaaagtagaggtaaacatacctctgctggatgcaatatagaaaattccaagatatgctaaattcttgaaggagttgtgcctaataagcgga

SEQ ID NO: 3739 - DNA, 440 bp, Glycine max
  unsure (1)..(440): unsure at all n locations
agctntattcaagacaaagaaattaaagatattcatgatggatgatcaagacagtctctagagtcttaggaagagtatattaaataggaagggaattcctaattgaagtagcaaaaggtttgaccaagaaatttaagttaaaaagtctttctcaagagatttactctctgataatcgattaccagtggccaaaaatgatttacaacaactattaaaatttgaattcaaaatttgcactgtgtaatcgattacacatatatggtaatcgattaccagcagttattgaacgttctaattcaaattttaaagcttgtaatcgattacacacatactgtaatcgattaccagaggagattctcacgacatattcttaacagtcacatcttttcattcggttcttacatggctatcacaggcctatatatatgtgacttgagaca

SEQ ID NO: 3740 - DNA, 435 bp, Glycine max
agctttattcaagacaaagcaattaaagatattcatgatggatgatcaagacagtctatatagtcttagaaagggtatattaaatacgaagggaatttcaattgaagtagcaaaaggtttggccaacaaaattaagttaaaaagtcttttacaagaaatttactctctggtaatcggtggtaatcgattaccagtggccaaaactgatttacaacagctattaaaattcgaattcaaaatttgccctgtgtaatcgattacacatatatggtaatcgattaccaacagtttctgaacgttttaattcaaattttaaagcttgtaatcgattacacatatactgtaatcgattaccagagcagattttcagaaaatattctcaacagtcacatctttctatgtggttcttgaatggctatcaaaggcctatatata

SEQ ID NO: 3741 - DNA, 436 bp, Glycine max
  unsure (1)..(436): unsure at all n locations
gttatcgtcatgtgaatttcctcagagcttctgttttcaatttcgagcgtctcgatatattacgggactcaatcaaacatccgaataaaaaagttattggcgtttgaatatgctcagagtntctgctttcaatctcaagtgtcttgatatattatgggactcaatcggacattcgaataaaaatctcttgtcatctgaatatgctcagagcttctattcttaatctcgattgtgtcgatatattacgagacccaatcgaacatccaaatgaaaagttatagtcgtttgaatttgctcagaagctttgttttcaatttcgagtagctcgatatattatacgtatcaatcggacatccaagtagaaaagtattatgcgttgaacttgcttagagcatatacttttcaatttcgagtgtcttagaatattaacggactc

SEQ ID NO: 3742 - DNA, 407 bp, Glycine max
agcttgaaggcaaactggatgcattggttaacatggtaacccagctggccttgaatcacaaatctgtacctgtcgcaagggtttgtggtttgagctcctctgctgaccaccatacagacctttgcccttccatgcagcaacctgtagcaattgagcagcctgaagcttatgctgcaaatatttacaatagacctcctcaacctcagcagcaaaatcaaccacagcagagcaattatgaccttctcagcaacagacacaaccctggatggaggaatcaccctaacctcagatgttccagccctcagcaacaacaacagcagactgctccttccttacaaaatgctgttggcccaagcagaccatacattccttcaccaatccaacaacagcaacaaccccagaaacaa

SEQ ID NO: 3743 - DNA, 432 bp, Glycine max
agcttatgctgcaaacatctacaacagacctcctcatcctcagctgcaaaatcagccacaacagaataattataacctctccagaaataggtacaattccgaatggaggaatcatcccaaccttagatggtcgaatccttcacaacaacagcagcaacaacaacaaccttattttcaaaatgatgctggcccaagcagaccatacgttcctccaccaatccaacagcaacaacaacaacagccccagaaacaacaaacagttgaggcccctccgcaacctctccttgaagaacttgtgaggcaaatgactatgcaaaacatgcagtttcaacaagagaccagagcctccattcagagcttaactaatcaaatgggacagttggctacacagttaaatcaacaatagtcccagaattctgatggattaccttc

SEQ ID NO: 3744 - DNA, 464 bp, Glycine max
  unsure (1)..(464): unsure at all n locations
agcttggctaactctatgggagatggggctatggttatgggtccagcaccgggtaccaagtcaatggaaaacttgatctctctctcaggtggtaaattggatatatcctcaggaaactctctgacaatagggaggtcacacatggaaaccttagtctctacttctaggttagacaagatcatgtacacttgagaatcttcttttaaagatgtcaacacttggttggtagagataaacatttcatccttactcattctagaatcatcaaacatgacagttttatcaaaacagtttaacaagacatggttggaagataaccagtccatacccaanataacatcaatttggctcacaggcaaagaaatcaaatcaattaagaatgttctaccaaaaatttcacacgacaactcacacatacattaaaaagaataagatgatntcatatctatcttaagcccctactt

SEQ ID NO: 3745 - DNA, 387 bp, Glycine max
tccttaagaagattcctaaagaagctagagcttagctacacatacctctctaatagctaagctcacctccttgagatgagaagctagagcttagctacacaccccctataatagctaagctcacccccatgacaaaaaacatgaaaataataaaaaaaaagtccttattacaaagacaactcaaaatgccccgaaatacaaggctaaaaccctatactactagaatggccaaaatacaaggcctagacgaaggaaaaacctattctaatatttacaaagataagcgggctcatacttagcccatgggctcgaaatctaccctaaggctcatgagaaccctagggcctttccttggatctctagcccaatctacttggagtcttctag

SEQ ID NO: 3746 - DNA, 404 bp, Glycine max
  unsure (1)..(404): unsure at all n locations
atggacctctcaagtgcttganagaatcaatgacaatgcttactaagatgagctgcccggtgagtatcatgttagttccaccttccatgtctctgatttatctctttatgatacagatggagaatccgatttgaggacaaatacttctcaagatggagagaatgatgaggacatgaccaacagcaatggcgaggatccacttgaaggacttggaggacctatgacaagggctagagcaaggaaagccaaggaagctcttcaacaagtgctgtccatactatttgaatacaagcccaagtttcaaggagaaaagtccaaggttgtgagttgtatcatggcccacatggaggactaaatgacaccactttatttcaatgttagagtgtntagtttgtctaaataat

SEQ ID NO: 3747 - DNA, 348 bp, Glycine max
  unsure (1)..(348): unsure at all n locations
gctatncaaatactcaaatggtcataactnatcatatctgttgtccgattgtggcgcggagtatatcgagacgctcgaaaccacacaccgaatactctcgagaaattcaaatggtcttaacttttcaaatagaagtccgattcacacgcataatatatcgagaagcttgaaattgaacaacggaagctctccagaaactcaaatggtcataaattgtcacaccgaagtactattcaagcgcataatacatcgagacgctggaaattgaacaacgaatgctctcgagaaatgcaaatgatcataacttttcatacagaagtgcgattctggcgcataatatatcgagaa

SEQ ID NO: 3748 - DNA, 337 bp, Glycine max
  unsure (1)..(337): unsure at all n locations
ntgccacanacacacttctgggtctgtttcttcctcgttntttatcacaagattgccactgtccaaaagcactactacaggattctgtgcttgtttgtgagagttgttggtgtaccagacaagatacgcattttgggtgagaacaagattgcctgtgttgttgagtgttatgatacccgaggaatcattgatggggttggccttattagcaacccaaacaactgtctggattgggatgttcttgtaccaaatacccacataacgtttatgggaataacctggtgatgtgccatcattttcttctattttctaaaccctttttgcaccattntaatta

SEQ ID NO: 3749 - DNA, 372 bp, Glycine max
  unsure (1)..(372): unsure at all n locations
agcttacattggtgtattganatctaacgctgatgaacgacatctattaatcaaatatgctgatgagttgcagcttctcacaaacagtctttggcagtcctgcacttagaagcatgcacctcactctttacacaatggttctattcatactttctgccaaaccatactgctgtggagtgtgacggactgtgttgcgccttttgatgcctattttactgcgacactcattgaactgctctgacacacactctatgccattgccaggtcttacaacttgaaatgctgataccaatgacagatgtcccaccggatgtcacgacatcacgcttgagaacatgcagatgatgtntgatccgatgaacagattaaaca

SEQ ID NO: 3750 - DNA, 462 bp, Glycine max
  unsure (1)..(462): unsure at all n locations
cttatagaacatatcataaaagaactatgactattgaagaatctattcatgtttcctttgatgagtctaatgctatttctccaagaaaggatattttagatgatgttgcagaatctttagaacaaatgcatattcatggacaagattctaaaggaaaagggaaaggaagcaatgaagattctccagaagaagccaaatcaaatgatgaactntcaaaataatggaaagcttcaaaagatcaccctctagacaacattattggtgatatctgagaaggggtaacaactagacattctcttaaagatttatgcaataatatggctnttgtgtctatcggtgaacctaanaatataaatgaagccataatagatgatcattggatagttgctatgcaagaagaactaaatcagtttgaaagaaacaatgtgtgggaactagtagagaaactttgaaactacccca

SEQ ID NO: 3751 - DNA, 431 bp, Glycine max
catcagttgttggatgaaatgatttctagaggagttaaaccagactcttggagttataatgcaatacaagcttaccattgtgatcattgtgaggtcaataaagccctgaggttaatgtttagaatggaaaaagatatctgtcttcctgatcgccatacatataacatggtgctcaaattgctgattaggataggaaggtttgataaggtaactgaagtttgggagaacatggtggacaaaaagttttatccttctgtctcaacatattctgtcatgatccatggtttttgtaagaagaagggaaagctagaggaggcatgtaagtattttgaaatgatgattgatgaacgaataccaccatatgttactactgttgagatgctgaggaatcggcttttgggtttacggtttatagatcacattgaaatact

SEQ ID NO: 3752 - DNA, 417 bp, Glycine max
agctcgcgcctactttgttactgagcaacatgccatggctattcactcacaagtaattaaaagagggtttcaggaagatactgttctttgtaatgccttgatgcatgcttatgcgaggtgtggctccttagctttgtcggaacaagtattcaatgaaatgggctgccatgatatggtttcttggaattcaatgctcaagtcttatgccatacatggtcaagctaaagatgcactggagctcttccacaaatgaatgtctgtcctgattctgcaacctttgtcgcgcttctctcagcttgcagtcatgttggacttgttgacgaacgagtgaaattgtttaactctatgtctgatgatcatggtgtctgttctcaactagatcactacttctgcatggttgacctttatggacgagct

SEQ ID NO: 3753 - DNA, 394 bp, Glycine max
  unsure (1)..(394): unsure at all n locations
gtcacctgcggcatgcaagctttctccactaagtttcctgatgcctgaaatgtcttttctgatggcagtggtcctatatgcagggaagaatttctccaagaacactctcttaaggtcatcccagctgaaaatagatctgggagcaaggtagtatagccaatcttttgccactccttccagagaatgaggaaaagcctttagaaagatatgatcttcttggacatcagagggctctatggtggaacaaacaatatggaactccttaagatgtttatgaggatcttcacctgcaagaccatgaaacttgggtagcaaatgtattactccagtcttgagaacatatggataaataggacaaaataagacaataatacttaaaaaacaaaaaanactt

SEQ ID NO: 3754 - DNA, 439 bp, Glycine max
  unsure (1)..(439): unsure at all n locations
agctctgtccgcananatcactcacaaccattctaatgtccaatgccttaaacagtcttctttgcttttatcggttaacatggaccgttcaaaaccataaaatcaacatgtaactttaccacttttgcaagaactacgtaggtctgaattcctcatcgcaattgaggatacgtaggagcaaaagccccacttttgttgaccatcccaagagatcgttaatggtccaatgccttaacgtttctctcctttcaaaaacaagagatcgttaatggtccaatgccttaacgtttctctcctttcaaaatcaaaagatcgtttaatggtccaaacgccttagatgacctttgttcggttaaaattgatcttgtggaanaagatcacaacaacttaaccaacgtttagttctgaaagaactacatangtctgatttcctcatcgc

SEQ ID NO: 3755 - DNA, 430 bp, Glycine max
agcttgtccatccacgatgtctccaatagaaaggtccacccctaaccatttgctcacacgaacatgaaattggacatcaccataatcaaatccatgtgtcccacactcaaagataagcttacaaaataattataattaaaacaatttaagaaacatcaattaactatgacataaactctatcatctttagatcatggtatttgaaagtaaataaaaccaataacatccagctcacataagccaaacatctcatattcaactatcatgaaacaattcaagaatcaacatcatgcatcaactatcaagcattatcaacatgagttcatcaatcatcatcaacatgaacaccaaacatcaacaccaacgacagactctacttcatggatatttacaccacatgaagggaataaccaagtacattccttaacat

SEQ ID NO: 3756 - DNA, 432 bp, Glycine max
cgtaatcgattacacatatactgtaattgattaccagagcagattttcagaaaatattctcaacagtcacatctttttatgtggttcttgaatggctatcataggcctatatatatgtgacttgagacacgaatttgctaagagtttttcagaacaaaaaggtcttattctcttataaagcaaaatcgttttatcctcttacaaattccttggccaaattacttgtgattcaataaggaattatttgagtgctcaaattgttcaatctatctctttcaagagagatttcttcttttcttcttcttcattctaaaaagggattaagagaccgagggtctcttgttgtgaaagaattctaaacacaaaggaagggttgtccttgtgtgtttagaacttgtaaaaggaatttacaagatagtggaactctcaagc

SEQ ID NO: 3757 - DNA, 384 bp, Glycine max
  unsure (1)..(384): unsure at all n locations
cggctatgactatatacatacacccaatgcgagatatatgcctattatcatttacagattgacgatgacttgttttangaataaggatcatgaaggaagcattgctgcctataggaaaccttccatcaaagtcgagttcatccacaatatctctttgattcacgtttcaaaacccttcaacaagccttaataaaattgaaattaaatccatcgggtgtcgggcatttgcctccaccacaattccaaacagcctctctaatctcttggtcagaaatagaggaagtgatcccctctgttngattcaactatctcagatttattagagggtgcactataacgatcagcaccaatctgtacttctttctcgtctaccagctcaatatc

SEQ ID NO: 3758 - DNA, 444 bp, Glycine max
  unsure (1)..(444): unsure at all n locations
taacanaaggcatgcgaagtgggtggaattcctagagcaattcccttatgtttatcaaatataaaaaggcaaaaggtaatatagtagccgatgctctttctcggcgtcatgcattactttctatgcttgaaacaaaattggttggtcttgaatgtttgaaaagcatgtatgaaaatgatgaaacttttggagaaatttttaaaaattgtgaaaatttttcagaaaatggtttctttagacatgaaggctttcttttcaaagaaaacaaattgtgtgtgcctaaatgttctactagaaatttgcttgtttgtgaagcacatgaaggaggtttaatggggcattttggggtccaaaagactctagaaacattacaagaaccattttattggcctcatatgaaaaaggatgtgcagaaattttgtgaacattgcattgtatgtaaaa

SEQ ID NO: 3759 - DNA, 386 bp, Glycine max
  unsure (1)..(386): unsure at all n locations
agcttganattgacaaacgaacaccctcgagaaattctaatggtcataacttgtcacacggaagttcgattaacgcgcagactatatcgagacgctcgaaattgagcaacgaatgctctcgagaaattcatatggccataacttgtcacacggatgtccgattcaggcgcataatatatcgagatactcgaaatctaacaacggatgctctcgaaaaattcaaatggtcataacttgtcacacggaagtccgattcaggcgcataatatatcgagacgctcgaaattgaacaacgaatgctatcgagaaattcaaatggacataacttgtcacacgaaagtccgattaacgcgcataatatatcgagaaatctatatgcgcataac

SEQ ID NO: 3760 - DNA, 505 bp, Glycine max
atctctgagtcacctgcggcatgcaagcttcaacatcagaccacttccagggtgctggatctacttcacatggacttgatggggcctatgcaagttgaaagccttggaggaaagaggtatgcctatgttgttgtggatgatttctccagatttacctgggtcaactttatcagagagaaaacagacacctttgaagtattcaaagagttgagtctaagacttcaaagagaaaaagactgtgtcatcaagagaattacgagtgaccatggcagagagtttgaaaacagcaagtttactgaattctgcacatctgaaggcatcactcatgagttctctgcagccatcacacctcaacaaaatggcatagttgaaaggaaaaatagaactttgcaagaagctgctagggtcatgcttcatgccaaagaacttccctataatctctgggctgaagccatgaacacagcatgctatatccacaacagagtcacacttagaagggggactc

SEQ ID NO: 3761 - DNA, 449 bp, Glycine max
tattaactttgttgtttagaggagaagatatctgaaatgagtatcaaaatactttataataaaaatattaaaaaatactatatgaatgaatcttaatcaagtaattcacatattatatcatgtaaaacattaaaacatatagatattcacttatatcaaagcaatcaaacacaagtattgaagaataatgattatagatattattaaaatatttgaatgaaaatttcatgctaataagataaactcaatcaagaacacatactcaaaatttcaaacaatcaaaacaaacaaatgaaaaattgttagttatcataatcaaattgattgaagaaattttttaataagagaatagttttgatattacctttctcatgattaaggtgtctaaatcttcaaagatgaggatcttactttttctctatgtttatcattcttgagaaatgttctca

SEQ ID NO: 3762 - DNA, 233 bp, Glycine max
tgcttgtttgtgagagatgttggtgtaccacacaagatacgcattttgggtgagaacaagattgcctgtgttgttgagtgttatgatacccgaggaatcattgatgggggtgggcttattagcaacccaaacaactgtctggattgggatgttcttgtaccaaatacccacataacgtttatgggaataacctggtgatgtgccatcattttcttctattatctaaacccttt

SEQ ID NO: 3763 - DNA, 308 bp, Glycine max
  unsure (1)..(308): unsure at all n locations
ctgcagcttcccatcgcaccacttccagggtgctggatctactgcacatggacttgttggagcgtatgcaagttgaaagcctgggaggatagaggtatgcctatgttgttgcggatgatttctacagatatacctgtgtctactttatgagagagagcgcatactcctttgaagcattcaaatagccgagtatattacttcaatgagaaaaagactgccgaatacagacaatgcngcgtgaccaccgcaaacagttagatgaccgcacgttgagtgtatgctgcccatatgacagcctctctcatgag

SEQ ID NO: 3764 - DNA, 436 bp, Glycine max
tgctgtgaaaattattagccttcgctccaacctactcagtggttatcttcctgctgacattggttctcttccttctcttcagtatctctacctccaacataataacctttctggtgatatacctgcctcattgtctctccaactcgttgtactcgatttgtcatataattccttcaccggtgttattccgacgacatttcaaaatttgtcggaattaactagtttgaatctccagaacaactcgctatccggacagatacctaatctcaatgtcaatctgctcaagcttttgaatttaagctacaaccaattgaatggctcaattcctaaagctcttcagatttttccaaattcttcctttgaaggaaactctctcttatgtggaccacctctaaagccatgctctgtggttccccctacaccttctccttcctcg

SEQ ID NO: 3765 - DNA, 410 bp, Glycine max
  unsure (1)..(410): unsure at all n locations
agctnggcagcaatatagctcaatacattacatgttatagaaacccttatacctaaaacaccaccagcaacttactacaccaaatccttgcaatttttttccctatcttcctaatagcaggggtctcttacatgccacataaacctccaaaacaaacgaaacctatcaataaaaattaaaaaaaaaaaagaagaacaaactagcctccaaatccggagagggttcttccttgtctcttgagagcataaaccacatccattgccgtgacggtctttctcctaacgtgctcagtgtaggtaacggcgtcacgaatcacgttctacacaaagatcttgagcacgccacgtgtctcctagtagatgagaccactgatacgcttcacaccacccctgcgagccaaacgccgaatc

SEQ ID NO: 3766 - DNA, 429 bp, Glycine max
  unsure (1)..(429): unsure at all n locations
agctctgagccaattcatacgacaataactntntattggatgtctgattgagtcctgtcatatatcgagacgctcgaaattgaatgttgaatctctgagccaatccaaacgacaataactttttactcggatgtctgattgagtcccgtaatataacgagactctcaaaattgaatgttgaagctctgagctaattcaaacgacaataacttttaactcggatgtctgattgagtcctgtcatacatcgagacgctcgaaattgaatggtgaagctctgagccaattcaaacgacaataactttttactcggatgtctgattgactctcgtcacatatcgagacgctcgaaattgaatgttgaagctctgagccaattcacacgacaataactttttactcggatgtctgattgagtcccgtcatatat

SEQ ID NO: 3767 - DNA, 444 bp, Glycine max
  unsure (1)..(444): unsure at all n locations
nggagaggatgctntaatggaggaaaagaaagagagaagaggggagcacgaaattgaaggaataaaagagggagaaaagtgtaactttgaagtgtgtttcatactactagaatgaccaaaatacaagacctaaaagaaggaaaaacctattctaatatttacaaagaagagtggatccaaccttgacccttgggctaaaaaatctaccctaaggttcgtgagaaccctanggccttcctttggatctctggcctaatctacttggagtcttctatccaatgtccttgtgggataggattgcatcagccacccncttatgcatcattntttaaggagacctttcggatgtctggttggntctttntttttctctcatatccatggatgtcattgatgattaagttcttatataactgggtaagtcacccnccttatgcatcattt

SEQ ID NO: 3768 - DNA, 415 bp, Glycine max
  unsure (1)..(415): unsure at all n locations
acgcttgcaagagtttctacatccagccctatctgatataaaacatcttatgccttgaatttctaactcgacacgcaaccaattggcaaatcttattagaggaggtttacgaccatgtagtcctataaagacatcacaactctttagtctataagaagaaagtgatctacaacctggggttgatgatgttcttttgtttctgcctctcttgcttctcttctctttcagcccagaataaccatcatcataaggatggcaataaccagacacagtgctactagagatgccgactgaggaagatatgcgatcaaggttctgcaaatcacctgcattacagccagctggagatgcagccacctcagagaaggagcatccaacattcacaatagactntggttctggaatccctgaaatg

SEQ ID NO: 3769 - DNA, 456 bp, Glycine max
  unsure (1)..(456): unsure at all n locations
agctnttaaaatatataataaaagaactattattattgaagaatcaattcatgttgctgttgatgagactaactcagtctaagaaaggatatacttgatgacattacagatactttagaagatacacatattcatgaagaagtccacacaaacaaagaagaatgaaatagcaaagattctcaatccaaagaaaatcaaataaatgtggatcttccaagggagtggagaacttcaaggtgtcaccctcttgacaatatcatagttgacatctcacaaggggtaataactcaacactctcttatagatgcatgcaataacatggcttttgtctctttaattgaacctaaaaacataaataaagccataattgatgaatatctggatattactatgcacgaagaattaaatcaatttgcaagaaatcaagtatgggaattacgtgatagacttaatgat

SEQ ID NO: 3770 - DNA, 437 bp, Glycine max
tatcctgatgagggtgctccatatgttctcaagactggactaatacatttgctgcccaagtttcatggtcttgcaggtgaagatcctcataagcatcttaaggatttccatattgtttcttccaccatgaagccccctgatgtccaggaagatcatatctttctaaaggctttttctcgttctctgaagggagtggcaaaagattgactatactaccttgctcccaggtccattttcagctgggatgaccttaagagggtgttcttggaaaaattcttcccttcatctaggaccactgccatcagaaaagacatttcatgcatcaggcaacttagtggagagagcttgtatgagtactggtaaagattcaagaaatggtggtgcagctgtcctcaccaccagatttctaagcaactccttctgcagtatttcaatga

SEQ ID NO: 3771 - DNA, 407 bp, Glycine max
  unsure (1)..(407): unsure at all n locations
gggatcaactcatattactttntagtattttactttgttcaaaaaattagacaagcgctaaatattgaaatgtctgatatttatgaaccacaagcagacattgttacagcttctttgtcaacatgtaattggactntgcaactatccaatcaatcatagttataaattagtaatcatatcacaaattatagatgaaaattacttatccattcatttaaagattaaccattggttaaaagaanaacttatacgatatcaattaattacatatataatatctatatctagaactataatgatctaattgtctaattgacacgattacaaacgtctcgtttaatatctttccgtcaagaataccttagcttatgttatatatatttcgcaacgacttcgttgacattaat

SEQ ID NO: 3772 - DNA, 447 bp, Glycine max
agcttaacaattcaaggtgaacaagatctgcttgcctcagccattttatttattgtacaatcttgtatttggaaatctataattgacaacatctgcttgcctggattgctaatctagtgctggccttgcatcaatgtctccgggtgcaagaaattcaaggatattcgcccttgaaaaaatgattgctacttcttctacaacattgctgtcaatggcatctcatttgtcacaggcagaagagcgggaacgggttttcagtggcaagggacgttggaaccaactccgttcccttcctgaagccaagaatttgatgaatcatttgttcaatctggcatcttcctccaggtagagtagctttatctgcaaacaaaatttatggtccatgttgtgatgaatgactgaatctttgtctatgcctttctatatttcacgtgttcattgcgagat

SEQ ID NO: 3773 - DNA, 429 bp, Glycine max
  unsure (1)..(429): unsure at all n locations
ctanaagaatggctaagaatttgttaaaacataagcacttagacaatgaaggaaagctggagttgctgcacatgatgtccaacgttatgtcaaagaataagatcgggctgcacaatgcacaaggcaagataaagtgtcaaatgaagaattgaagctgcaggattcacgatgtcggatacaatgtccaggacatcctgcccgaaaatactggagttgctgaaagcattgaagttgcaggatccacgatgtcggatacaatgtccaggacatcctgcccgaaaatactggagttgctgaaagcattgaagttgcaggatccgcgatgtcggatacgatgtccaggacatctggcccgaaaatactggacatataaatctgttatatctttaacagattattgtgcagttagcaagagattagatgatctat

SEQ ID NO: 3774 - DNA, 265 bp, Glycine max
  unsure (1)..(265): unsure at all n locations
nttagccaatacacacgacagacaactttgtgctcggatatctgattgagtccagtaatataacgagacgctcgaaattgaatgttgaagctcttagcgaattcaaacatcattaagtgtttactcggatgtgtgatgctgtcccgtcatatatcgagacgctcgaaattgaatgttgaaactctgagccgattagaacgacaataactttttactcagatgtctgatagagtcccgtcatatatcgagacgcttcgaattgaat

SEQ ID NO: 3775 - DNA, 355 bp, Glycine max
agctcttgcggggacatcttgacttgctttccaatctgacattcaccacagattctgccttcttgtattctcagattgggaatgcctctaacagcacctttgtcaatgattttcttcatgcctcttaagtgcagatgtccaaatctttgatgccatattttgacttcatcttctttggaggatagacatgtggaggagtaactggcttcttgacgtgtccataggtaacagttgtcctttgatctgctgcccttcattagaacttcactcttctcatttgtcacgaagcattctgactttgtgaagattacattgaatccttcatcacacaactgactgatgctgatcaagtttg

SEQ ID NO: 3776 - DNA, 259 bp, Glycine max
gaataaaaaatctgcacatgttacaagagtttgtggtctatgttcttctgcagatcatcatacagatctttgtccttctttgcatcaatctggagtcaatgagaaacctgaagcttatgctgcaaacatttataatagacctcctcagcagcaaaaccaacaacagcaaaataattatgacttttcaagcaatagatacaatccagattggaggaatcatccaaatctgaaatggacaagtgtcataccctaatttcgt

SEQ ID NO: 3777 - DNA, 430 bp, Glycine max
tcaacattcaatgtcgagcgtctcgatatgttacgggactcaatcacacatccgagtaaaaagttattgtcgtttgagttggctcagagcgtcaacattcaatttcaaacgtctcgatatatgacgggactcaatcagacatccgagtaaaaagttattgtcgtttgaattggctgagagcttcaacattcaatttcgagcgtctcgatatgttacgggactcaatcagacatccgagtaaaaagatattgtcgtttgaattggctcagagcttcaacattcaatttcgagcgtctcgatatgtgacgggactgaatcagacatccgagtaaagagttattgtcgcttgaattggctcagagcttcaaccttcaatttcgagcgtctcgatatatgacgggactcaatcagacatcccgagtaaaagata

SEQ ID NO: 3778 - DNA, 435 bp, Glycine max
  unsure (1)..(435): unsure at all n locations
agctntgagcaaattcaaacgacaataacgttttactcgaatgtctgcatgaatcccgtaatatatcgagacgctcgaaattgaatgttgaagctctgagcaaattcaaacgacaatgacgttttactcggatgtctgattgagtcccgtcatatatcgagacgctcgaaattgactgttgaagctctgagaaaattcaaacgactataactttatactcggatgtctaattgagtcccgtaatataacgagacactcgaagatgaatgtcgaatctctgagccaattcagacgacaataactttttactcggatgtctgattgagtctcgtaatataacgagacgctcgaacatgaatgttgaagctctgagccaattcaaacgacaataactgtttactcggatgtctgattgagtcccgtaatatatccaca

SEQ ID NO: 3779 - DNA, 410 bp, Glycine max
  unsure (1)..(410): unsure at all n locations
gggactngatcttggattagtgggctgaaccataactgaaattttgtaatcataattagtgaaattttggctccacaaattgaatttcaaatttccctccaattttatgtgacacttatgctataaatagaggccatgtgtatgcattttttcaactttaatcgtttgaaaattacacttcaaagttcaaagctcatttgaggaacaacattttgtgctccttctctccttctccctcccctcatcttctcctatcttcaaggtcttatccatgactttttcatcaatgtggtaattgatgccctctctaggagacacacattgttttgctccctaggagctcaaattttaggatttgataacatttgggacttgtatgctgtagatgaacattnttctcccattcatga

SEQ ID NO: 3780 - DNA, 444 bp, Glycine max
  unsure (1)..(444): unsure at all n locations
tgttttccaacattcaggaataatggaatgtgatgttgcaaattttaattntccttgtaataaatcagtaaagtaaaaatgttaaattattcattctttcattgtaataaagaattgaaccttggaataattttttgttatataattaaactgactaaaaataactagcccaggtcttaacctttccagcattcctcatagttgcaattctttttttcttaaaaaccattttgcttctttcttaaaaatataacttctgctggattgcttangcactttcttgcatataagtagagcttaatatctttttctaggaattgtaaaattgtctagtaattgccatttttcctttggcagattgagaagcttagtgatacacagtgccagcctgaatcacagcttaagttcataacagaggcctcggtacaggtaaatgaagcttat

SEQ ID NO: 3781 - DNA, 451 bp, Glycine max
agcttcccttgctcctctctgacttcgctgaccagcttcatgacctcacccttttgatcttcaagaacttccaaaacctctcccttgtcgtgcagaagtgaaatcacagtgtacattttcatccccatcgctcttgctaacaagctcattcttatgggcaaacggaagtagatgttcctcaaccatggattatgactaagaacttcttgtgctggagtgcgacaacagtctattgccacccagaattgtcccttttcgtttattcttacgttgtctggaaaccccggaaggtcagctaatagttccacacttccacttttaggaccctctgtccaaagcttcattagcctgtcatcgtgtcattttggaatgaatgtgttacgttatacatattacatatagagcacatattgtatatattcttatctaattacaatatattttttcaccc

SEQ ID NO: 3782 - DNA, 425 bp, Glycine max
  unsure (1)..(425): unsure at all n locations
agcttattccttatttttaattntttttctttacaaatttaggttaattacaatggtaggaaaatttaaaatgtaacaagaaaattattttataaataataaaaataaatcttatatttatgtttctttctacttttcatattgaacaaattggtttggccgaaacaaagaaacatttttttttatttataaagagatttttagtaaaaaaaattcaaataacttctattttattttttaagttttatgtttagttctaaattttaaagttacttttaaatcctatgtgtcttatcttctaatctatcatatttggatcttatctttattagatattaatattttttgtctctattaaatatnttcttgtacttaaataacattttatttttatcatatatggctatttgtatttgaggtttctc

SEQ ID NO: 3783 - DNA, 414 bp, Glycine max
  unsure (1)..(414): unsure at all n locations
tcgcactttgatatggagacacatgaacagcgctatgccatgacattcattgtgcttccaaccaagggtgaatatgggagaatggctttgagggtcccacttangccatcatgaaacttaacttccaacttcaaaatgggagacacatgaacaggccctaagcaaatcatgtggcttcggaacagaacgagaatggaggatngcctttgaggtcctctcttangcaatcatggaacacagcttcaaactcgaaagtggaggacacatgaacagccctaagcaataacattcatgtggctccggaacaggatgagaatggaggattgccttgagggtcctctcttangcaatcatggaacacagctccaaactcgaaagtggaggacacatgaacagccctaagcaaattcatgt

SEQ ID NO: 3784 - DNA, 363 bp, Glycine max
agctttaatcgattacaatgttttggtaatcgattaccagtgactctgaacgttgaaattcaaattcatatgcgaagagtcacatcctttcacataaaagccttgtgtaatcgattactcgatttgcgaatcgattaccagtgactgtttctgaaaaaatcataagatgtaactcttcaaaaaggttttgactttttcaaattggatttaagtttttctaaaggatataactcttctaaatggtcttcttgaccagacatgaagagtctataaaagcaaggctttgatttggattatcaattaattcaattctttcaatcttgaatacttttccaatcaatctcttacaatcctttactagcc

SEQ ID NO: 3785 - DNA, 461 bp, Glycine max
tatatctggtcgagtgcaggtctgagcatacataatactcctaacaactgatacatacagaattgcttccatttgcttccgttccagatcatttttaggacattgtgcgagactaaatttgtctcctttctgaattggaacgggagatgctgagcacttttccatcctaaatctctctagtactttattgatatatgctttttgagacaagcctaacaatccttgtgatctatttcggaatatttctatccctatcacatagcttgcctcacccatatccttcatttcaaagttactagaaagaaacttcttagtctcatgaagaagaccaagatcattagttgcaagcaatatatcatcaacatacaggactagaaacataaccttacttccactgaccttcagatatacacaccgatcaatagtgttttccttagatccaaaggaaacaatggtatcat

SEQ ID NO: 3786 - DNA, 454 bp, Glycine max
gaagcttggagccaaaatttcactaattatgattattgaattttagttatggttcagcccactaatccaagatcaattgcaagattctccactaagtgtgcttaggtgtcatgaggcatgtaaagcatgaaggacatgcacaaaatgtgattatatgatgtgacaatggggtgtagtaagcaaatgctcacctcctcctctaaaatttaattggattgggcttcaaccaattcaattaaatttatttccaactacacacatcaaatattcacttagtgcatgtgaaattacaaaactacccctaatacaaaaactagtctaggtgccctaaaatacaatggctgaaaatcctatatttccagcgtaccctacctacattatggagccctaaatacaaggccaaaaaataatgaaaccttaatctaatatgtacaaagataagtgggctcatact

SEQ ID NO: 3787 - DNA, 450 bp, Glycine max
agcttccttgagataattcctaaagaagctagagcttagctacacacacctctctaatagctaagctcacctccttgagatgagaagctagagcttagctacacaccccctataatagctaagctcacccccatgacaaaatacatgaaaatacagaaaagtccctactacaaagactactcaaaatgcctcgaaatacaaggctaaaaccctatactactagaatggccgaaatacaaggcctaaacaaaggtaaaatctattctaatatttacaaagataagcaggctcatacttagcccatgggctcgaaatctaccttaaggctcatgagaaccctagggccttcccttggatctctggcccaatctacttggagtcttctatccaatgcccttgcgggatatgattgtatcattcctccctccttctcattctctctatttggtc

SEQ ID NO: 3788 - DNA, 441 bp, Glycine max
  unsure (1)..(441): unsure at all n locations
tgaaggtgtgtagcccaccatcttttcatagtagtatattggtaatgcgtctactattattggcatcattgattttctctgtcattgaggtgctacttgagctgccaagtctctccacctttgggcgtatcctttgaaagatctgtgccctctttttgcacatgttctgtagttgcatcctatccgaagccattatactgacactgcctaacgaaggcaaccactaggtccttccaagaatggactcgggaaggttccaagttagtgtaccaggtaacagctaccccagtaagactctcttggaaggaatgtatcagcaattcctcatcttttgcgtatgcccccatcttccgaaaatacatctttagatgggtcttggcgcaagtagtccccttgtactcgtcaaagtccagcaccttgaacttgggangggtgatgata

SEQ ID NO: 3789 - DNA, 419 bp, Glycine max
  unsure (1)..(419): unsure at all n locations
tcacanaaaattcaaaaccaatagcaacaaccatccaaaaattgttacaaacaaaaatacaatcatgcaacaacatcgcaataggaaaaaatcagtgaacgcttaaacaaaatcactgaacaccttcaaagggaacataccacttacctggaagacgattaccttacgaccggaacaaaataggaaccaccaccaatggaagaagtgaatggtagaagaacaccggaacaacaacaatcacgaccaaatgaccagaacaggaacacgaaccgaaacacgaacgaacgaccgtaacacgcgcgtaggcaaaaaaagaagaacaagcggataagaggaagatgaagaggaaatagcaccatatgaaatgtgagaagcanatgcactgtacgaatgactaactntaggattntatagtaata

SEQ ID NO: 3790 - DNA, 313 bp, Glycine max
  unsure (1)..(313): unsure at all n locations
agctntgactaaaccaatggcatgctacactgtataagactaaactctattatcaaaattgtaactgttttctctatcctagggagttatgccacggaccaagggtacaggtggcttggttttctttattttatccaccaatatagcttgagtagttagaactgcaccagcaacagaaactgcactttgaagagcacaccttgcaacacgactaggatccgctactccagcattcaaaagatcttcatatgtgcctgtcattgcattatatccaattctccaatcatgtgttctaatcttctggacaacaatg

SEQ ID NO: 3791 - DNA, 444 bp, Glycine max
  unsure (1)..(444): unsure at all n locations
agctntccattctcttggaagttcatcattggatttgacttcttccggaggatcttcattgtttcctttatcatttcctttggaatcttgttcatgaatattcatatgttctaaagaatctgcaatatcatctagcatattctttcttgacagaatagcattagattcatcaaaggtaacatgaatggattcctcgatattcatagntcttttattatatatcctatatgctttgctttgtaatgaatatccaagaaaaataccttcatcagattttgcatcgaattttcctagattatctttaccattattaagcacaaagcacttgcaaccaaaaacatgtagatgagaaatattaggttttctaccattatataactcatatggggttctctnntaaatgggtcttatcaaggccctattcatgatgtaacatgcagtatt

SEQ ID NO: 3792 - DNA, 353 bp, Glycine max
  unsure (1)..(353): unsure at all n locations
tctatactntatacaagaatgaagctctgataccacttgttatacaagtggcctcagatatcttaagaagggggggggggggtgaattaagatattccaaactacttccccaattaaaaatctatttcactctctattcaagttataaattcccttaacaatgaacttcctaaatattaatccaaataacaacaatttgaatctgaatataaaccaataataaacaaacgagtttattggaagacaaagtgcaaactcacatttatactggttcggccacaccctggtgcctacatccagtccctaagtaacccgcttgagagttcactatcttgtaaattccttttcaagtt

SEQ ID NO: 3793 - DNA, 454 bp, Glycine max
  unsure (1)..(454): unsure at all n locations
tgtcaggttcaactntaattaagcgcttggggcatcctatggactgagcgaaaaggctcaggacatcaaacactacgcatcttttaaagcacaaagcgaggatcagaacctcaaccctatgttcatttaaaatactgcgatgagaaaattatagaggacaggaacccttgggggaaaccaagaagaacatacaaaagataaaaacatgcagcaacttctttaattgccccagatcttaagcgtagtatcgcttgacaacgtcggagttcatgggtgaaggtagctcctcgtcatccatgttggcgagcaccagggcccctccttagaaagccctttttacaacgaaaggcccttcgcagttcgaggcccactttcctctattgtcctttagagcttgggagactttcttcagcaccaagtccccttcgctgaacctgcgcgagcataccttctt

SEQ ID NO: 3794 - DNA, 456 bp, Glycine max
ctttagtaaataaataaatatagagcacataataggctgagtaccctaggtataaataactatgttaagtgaggtgtctcctcttggcctcattttcgtttttccccttctcttctcaaaactctttctttgtaccgcagcccaccaaacctgtctgagaaaaacgacgatctcagactcatttaccgttggatcgtcgtgaaattttagcagcacgttcgtaacccaattccgagcattctcactactgggaattgcaaaaacatgtcagagctaagagaaatacccttcgcaccgtagctttctcttttcccgcagaaacccaaaacagtctcagtaaaactatgatcccagtttctttaaccggtggattttcataaaatttgggtatgttgttcgaaattcaattgcgcacactttcaccgttgggtttcgcgagataatattcgtggaggg

SEQ ID NO: 3795 - DNA, 447 bp, Glycine max
  unsure (1)..(447): unsure at all n locations
agctngaaggtaaactagatgccttggttaacctggtaacccaactggccatgaataaaaaatctgcacctgtcgccagactctgtggtttatgctcctctaccgaccaccacacagacctttgcccttctgtgcaacaatctgaagcaattgaacagcttgaagcttatgctgcaaacatctacaacagaacaattatgacctctctagcaacaggtacaatcccgggtggaggaatcatcccaaccttagatggtcgaatccttcacaacaacagcaacaacaaccttattttcaaaatgctgttggcccaagcagaccatgcgttcctccactaatctagcagcaacaacagcaacagcaacagccccaaaaataacaaatagttgaggcccctccgcaaccttcccttgaagaacttgtgaggaaaatggctatgcaaaacat

SEQ ID NO: 3796 - DNA, 458 bp, Glycine max
tcatcctcctctttgtgacaatcactggcttcttctcatcattgttttcagcatcatttcccaaagggtactcttcagtgacactactactagactttgttgtttgctttccgaatgaatgctcggattgaggcacaatattgttctttggtgcaacacttgttgtcccaatggacttgtttctcacacttgtcatgcttctcaaccttcctttccctaagtgatgctcgcaaagagagtaacccaccaaggtttgttgaaaacacctccatcctcttccgtttacacgactgcaccttgaaccttccattagtgcactaccccttaccctcttcttaccaacgtttgcttgttcgggtttcgtttcctttgttgccgcctcttcttggttctctacctcttcttcattgctatcgtcttgcctcgaactcttgttcatcttcctcttcattctcttc

SEQ ID NO: 3797 - DNA, 456 bp, Glycine max
  unsure (1)..(456): unsure at all n locations
ntgtgcgtaggaatttccagttatgtgcagganaagtttaatatgtctatgatgggagaaatgactttcttccttggacttcaagtcaagcaaatgaatcatggaaccttcctatgtcaaataaagtactatacaaaattgattaagaaattcagtgtggagaagtgcaaagaaacatcaacaccaatggcaacatccacttatcttgacttagacaaaaaaggtaaattggtagacgagtcaaagtacagacatatgattggttcacttctttatttgactacaagtcgacccaatattatgcatagtgtttgcttgtctgcaagatatcaagcaaatcccaaggaatccaatttaacttctatcaaagggattattaagtaacttaagggcacaaccaatgttggtttgtggtatcccaagggtacctctntgagnttaattcacttttctaat

SEQ ID NO: 3798 - DNA, 433 bp, Glycine max
agcttagatggagaagaagacagagcgcgagcttcataggtctcaccatattttttaaaatataagttcaacattggttttttaaaaaacaccgatgttaacatcagttttctggaaaaaaaaaaaaacaatgttaacatatcaaacgttaacatcggttttctaaaaacccgatgttaataaacatatgttaacatcggttattaaaaaaccgatgttaactaataaatgttaacatcggttctccaatgaccgatgttaatgaacttcgttaacatcgatttttcacaaaaccgatgttaacatatacacggtatttacaattatgtcaccgcgcatatgttaacatcggtttttttaacaaccgatgttaacacaccgatgttgaatccgctttttgtagtagtgatagctgcccttataagattatagt

SEQ ID NO: 3799 - DNA, 459 bp, Glycine max
  unsure (1)..(459): unsure at all n locations
tataaactntgttacctgacattntgctctgttctcatctaaacgagttaaagcatgaanaatttttgcaggaatgttaggagcattcttcaagcatattaatgcactgcatttaaatacacatgaacgtttgcataaacaggcacaacatgcaatttcaagtttactcataaaaagccaagcttactttgtattgcaagggtttcccactactataactttgacattgcgggatgcaacggcatttaaagctcttccctgttgtacaaaaggtataatgtcattataattaacttcactttagcagaaagcaataagtatggtttaaatttcattatcattttacctgcgctgcataaatctgcccatttatgtctaacaagtctgctcgttccattccaggtcctcgaggctttgcacctattagcaaagcccattctgcatcttggaacacttcat

SEQ ID NO: 3800 - DNA, 442 bp, Glycine max
  unsure (1)..(442): unsure at all n locations
agcttgtaatcgattacacacatactgtaatcgattaccagaagagtttttcagaaaacattctcaacagtcacatctttgtgtgtggttcttgaatggctatcataggcctatatatatgtgacttgagacacgaatttgacaagagtttttcagaacaaaaaaggtcttatcctcttataaagagaaatcgttttatcctcttacaaattccttgggcaaattacttgtgattcaataaggtattatttgagtgctcaaattgttcaatctatctcttgcaagagagatttcttcttctcttgttcttcattctgaanagggattaagagaccgagggtctcttgttgtgaaagaattctaaacacaaaggaaggattgtccttgtgtgtttagaacttgtaaaaggaatttacaagatagtggaactctcaagcgggtt

SEQ ID NO: 3801 - DNA, 456 bp, Glycine max
  unsure (1)..(456): unsure at all n locations
tattacggacctatgaatactcaagcttgagaatttcaaatgagaataactttntactcagatgtcttattgagtcccgtaatatatatcaagacgctcgaaattgaggaaagaagctctgagcaaattcaaatgacaataactttttactcggatgtcagattgaattcggtaatatatcgagacactcgaaattgtgatccgaggcgctgagaaacttcaaacgacattaactttatacacggatgtccaattgagtcccgtaatatatctagatgctcccaattgaaaacggaagctcatagaaaattcaaacaacaataaaattatcaaatgatgtccaactgagtcccgtaatatatcgagccgcaacgaattgaaaacggaagatcgtaccaaattcaaacgacaataactntttactcggatgtctgattgagtccccgtatatatcga

SEQ ID NO: 3802 - DNA, 437 bp, Glycine max
  unsure (1)..(437): unsure at all n locations
agcttccgttntcaatttcgaccgtctcgatatattaccggactcatccggacatccgtgtataaagttattttcatttcaatttgctcagagcttctagtctcaattttgagcgtctcgatatattacccgattcaatcggacatccgagtaaaaagttattgtcgtttgaatttgatacgagcttccattttcaatttggatcatctctcgataaattacgacactctggtgcgcatgcgaataaaaagatattgtcgttagacttttctaagagtttccatttgcaatctggagcgtctgcatatattacggcactcaaccacacatccgtgtatactgttagtgacattcaaatgttctcagagcttctagtctcaatttggagcgtctcgatatattacccgattcaatcggacatccgagtaaaaagatat

SEQ ID NO: 3803 - DNA, 438 bp, Glycine max
  unsure (1)..(438): unsure at all n locations
tagcccataaggttntccaaaagtggctatggaacttagcatctctatctgacacaatggtcctaggcaaaccatagagtctcacaacttccctaaagaagagttctgagatgtgagaaacatcatctaccttgtgtcatggtataaagtgtgtcatcttgctaaacctatccaccaccacaaagatagagtctacacctctttgggttctaggaagcccaaggacaaagtctatactaatgtctacccacggtgcaaatgggatgggtaagggtgtgtatagccaatgaggcatcaccttagacttggcttgtaaacaagtcacacacctagtgcaatgcttatggacatctctcttcatatgggattgttaacaacgagtgctcttttgatgtcaccttttgtggcacaatgattctccttcttaacaatcttctt

SEQ ID NO: 3804 - DNA, 448 bp, Glycine max
  unsure (1)..(448): unsure at all n locations
tcgatgccaccactgccttattgngaaaatgttggtggtgattctgagtgtgtttctactttggaggtaggttactgctaaatacttttttattttttattttaatttggatgtgtatcatttgatcactattatttacttttgagatatgtgtggtttttttactatagggacatgaaaatgaagtgaagtgtgtgtcttggaacgcggctgggacgttgcttgcaacttgtagtagagataagtctgtttggatatgggaagtgctgcccgggaatgagtttgagtgtgtgtcagtgctgcaaggacacacgcaggatgtgaaaatggtgaagtggcatcccacagaggatatcttgttttcatgttgctacgataatagtgttaaggtattgttgccaatgctaaaagagtatctcnctctttaatttcatttttgttcatttat

SEQ ID NO: 3805 - DNA, 455 bp, Glycine max
  unsure (1)..(455): unsure at all n locations
agcttgcctaattaagctaaaattgagagaaaatgattattaagcacacaaaatagaagtactaagtatttattacctatacttaacaaaaaatacttataacactacaaaataacaataaattggaagagtttgatacaatttacacaagttttatacataaaagttagtcgtattcatcgactaacagttgtcgggaggtttgcgtggaacatatgcaaattcctagcatcatatgcaccaccttgtgaagttgagggcatctgccttgagtgtcggccaattttagccactgcatactaccttggttgccaaagagcgacccccagtatgcaggtcgcagtttcctttatgcaacttccacatgacgtagtctacttgttggttgttcaggcacttaagcaagggtgttgtcatccttattntgaatagttcaccatcaaggatgacatagt

SEQ ID NO: 3806 - DNA, 369 bp, Glycine max
agcttgaaggcaaactggatgcgttggtcaacttggtaacccagctggccttgaatcagaaatctatacctgtcgcaagggtttgtggatggtgctcctatgctgaccaccatacagacctttgtccttccatgcaacaaacctggagcaattgagcagcctgaagcttatgcatgaaatatttacaatagacctcctcaacctcagcagcaaaatcgaccacagcagagcaattatgacctttccagcaacagatacaaccctggatggaagaatcaccctaacctcagatggtccagccctcagcaacaacaacagcagcctgctccttccttccaaaatgttgctggcccaagcagaccatacatt

SEQ ID NO: 3807 - DNA, 450 bp, Glycine max
  unsure (1)..(450): unsure at all n locations
cgcanagttnttctctgatggcgatgggaccaacactggtgaagcttctgaagctacagaatgcagatggctagtggctttccatgcaggcacgagagggcacagcaaccctgcatttgaatgattttttagtgaaaatcgttgctgaaacagagctggtcttttcagacgttcgtaacaagttccaacatgtggggaaaggttggagttggatctcaagtgaagctggccagcaagcttttgttctattgtcgggtaccgttgtttatcaaccatcattgcttgagtagctgagtacttagaattactataaactgcaacagaataaattatgtttagctatttatggacttaaatgaaatcaaggcctaggttatttgagttcaagagtaacactgaattccaaattacatttaagaagctaattcacagcttctgtttatttctaac

SEQ ID NO: 3808 - DNA, 333 bp, Glycine max
agctactgttctggaggtggcgatcaaagacaatgatgttgttgcggatgactccgtacggagagagatgtttgatattaatgaactcccagaacgtgtgcctccagatagccctttggctccacatcggttcaggctgtaagatacgaggggtggctcagcctaaggacagtatacgttggcgcgttgcacgggaactcaggcagaccaggcatttcttgatgcatggccttctgatgcagcatctgttgtgcctcgacctgttgcaaacatcagatcaaaggtttaccttatccctactctctggtgtgtgacggtcaatgatattgacgc

SEQ ID NO: 3809 - DNA, 393 bp, Glycine max
  unsure (1)..(393): unsure at all n locations
tntatcttttgcatatacatgtaccaattgaatcatagctatttattttcactagacattgggtgccatccagggaaaccttttcaaatttaaaccatcttaaataatctgaattacagtatatgcatctaattgacgttgtttgcttgcaaactaacttagtaccatggaggaaccaactttgggagaacagcctctgcttatgttataacaggctattatgatcaagccccacttgatgaatatggcaagtgcacaaaattattattttaacacctcatctcatttgatgtttataaatgttgcacactttcttattaggtttgctagggaacccaagtgggacatctcaagcgttacatgaagtaataagtcttgctctacacattatac

SEQ ID NO: 3810 - DNA, 346 bp, Glycine max
agctcgaactattatacttattctaactttagatctcactagtaaccggaccattcaacatgtggatgttgacaatgcatttttaaatggattgctggagaaggattattatgacgacacagccccgggctttaaattagaaaaaaaaaaatctgctcttggttgtaagcttcagaaagctatttatgacttgaaacagactgctcaggcttggtaagagaggcctactaaaaccctcattgggtttggatttgttcagagtaaatgcgatccatctctcttagttctcaagactattgctggctgactttatgagctcatctacgtagatgacattatcttaaca

SEQ ID NO: 3811 - DNA, 356 bp, Glycine max
agcttgcgaaatgtgttgtacaatcgttcaaatgaaggtgcacaaatagcatggatattaacaagggttgtagccaagtccctagcattattcagccaccccccaaaaccaatcccttcgatcaaaaaagtgtaagtaggttcatttggcagacaccctttgtccaccatcgcagccaacacttcagtagcatcactaactctacccactctgcacaacccaagaagaacaatgttgtaactaacaacactgggcttacactcactactctccatctgcatgttcaccaacaactcaatggcctcatgcaccatcccatccctgcacaaacaagatataagcgaattatacgcgat

SEQ ID NO: 3812 - DNA, 452 bp, Glycine max
  unsure (1)..(452): unsure at all n locations
ctggagtttccaagtgccaattcgtcttcttcttttgtccagtcttcttctggcttcaattcattagtgggctttccttctgtgtccagcatcttgggatgttcccagcctttgatgacagctttccaggttctgctatccagtgatttgaggaaggccaccatccttgctttccagtattcatagttggttccatccacaatgggtggtctgttcactggtcctccttctttctccatgttcatcagaatttatctccctagatctcactcagtgatttacagtgcccgctctgataccaattgaaattctgatactgaggccagatgtcgtaccggatgtcacgacatcacgcttcagaacatgcagattatatttgactgtatgaacagattaaacaagtnaataacacaagagaattgtaacccagttcggtgcaacgtcacctacat

SEQ ID NO: 3813 - DNA, 454 bp, Glycine max
  unsure (1)..(454): unsure at all n locations
tgcttcaaggtggaggcaattgagcgagaagttgaccttggaagtacttgtcaatgcgactgtaccatgctctcagtgcttgttntagtccataaaaagccttctttaacttgagaactttgtcttcttctaatgtcacctttaatgccaacggatgttcgatgtacacttcttgcacgaggactccattcacgaaggtagacttcacgtccatttgatgaattctccactagtgttgagttgccagagagattattagtacgatggtctccaggcgagcgaccagagcaaacacctcaacataattgataattgtgaaatttgaggtcatctgatagtccattttggctaagaatgattgtaatttctttactgtattgtttttttaataaaataataaagaaattaatatctttgcagttcttgattaacagaagttaaaagaacaatattt

SEQ ID NO: 3814 - DNA, 450 bp, Glycine max
  unsure (1)..(450): unsure at all n locations
agcttgtaagagcttggtcacttcctttntcaccacatctataatgacggggttgagtcgtcgctgtggctacctcactggcttagctgcatcctctaaaagtatcctatgcatgcaggtagatgggctaataccaggaatgtctgctaaagtccatccaatggccttcttgtgcttcttgagcaccggcaacaacttctcctcttgctcaacatcaagggaagcagagatgatcactggaaatttgatgcaatcctaccccgcaagggcattggatagaagactccaagtagattgggccagagatccaagggaaggccctagggttctcatgagccttaaggtagattttgagcccatgggctaagtatgagcccgcttatctttgtaattattagaataggttttttccttcgtttaagccttggtatttggccattctagtagtat

SEQ ID NO: 3815 - DNA, 451 bp, Glycine max
  unsure (1)..(451): unsure at all n locations
agcttctccaagacatttaagaaagcaaattacataatcttattctcggtgttgtttaatcacattcttatctcaagtacaatttggagtagctcttggatcttccagagttacgaaaacatatcattaatatttattgatatttgatgatattttctaaattttatcaaaaaaagttagtaatatttttgcttagtgttagaccaaaaaatgttcttaaagatcaggtagtgaaagttcaacccaaaaaatatacttagaaaatatgagcataatgccactaaaaataacattnttttaaactatacttgacacttgtcatcagtaatttgattattgtcaaaatacttatactatttgattcatcaataatatctttgacccatttattagaaaaatctcatttattaatatgagtatttaataataattaatgttatactccatttct

SEQ ID NO: 3816 - DNA, 428 bp, Glycine max
  unsure (1)..(428): unsure at all n locations
ntgagcaaattcaaacgacaataactttntactcggatgtctgattgagtcccgtaatatatcgagacgctcgaaatggaataccgaagctctgagcaaattcaaacgacaataactttttactcggatgtcagattgagtcccgtaatatatcgagacgctcgaaatggaataccgaagctctgaacaaattcaaacgacaataaatttttactcggatgtctgattgagtcccgtaatatatcgagacgctcgaaattgaataccgaagctctgagcaaattcaaacgagaatcactttttactcggatgtctgattgaatcccgtaatatatcgagacgctcgaaattgaatatcgaagctctgagcaaattcaaacgacaataactttttactcggatgtctgattgagtcccgtaatatatcg

SEQ ID NO: 3817 - DNA, 425 bp, Glycine max
agcttctacatgtcaattactagcgtttcgagatattacgggactcaatcggacatccgagtaacaagttattgtacttggaattagctcaaggctactgtataccatttcgagcgtctagatatattacgggactcaatcggacatcagagtaaaaagttattgtagtttgaatttgctcagagcttcggtattccatttcgagcatctagatatattacgggactcaatcagacatccgagaaaaaagttattggagtttgaatatgctcagggcttcagtattccatttcgagcgtctcgatgtattacgggactcaatcagacatccgagtaaaaagttattgtcgtgtgaatttgctcagagcttctacattcgatttcgagctttacgatatattacgggactcaatcagacatccgag

SEQ ID NO: 3818 - DNA, 438 bp, Glycine max
  unsure (1)..(438): unsure at all n locations
agcttgtcatgattgtaaggtctaaggaaagatataacaggagcaaccaaaggctntaaggaagttataatctagatttttgttgaaagggacagtatatggaacattaaaattcagagaggcagcaggcaatctatttatcaagtatactgctgtagtgcaagcaaaatcctataacattttggtgatgagtgtgaggacagatcaatctctgagtaataccttggtttgctaaaaaattggttagaggtctgaactgccctccccagtctgtttgaactcttttaattttggaatcaaactgaagttcagccattagcttgaactggtggaaaacagtgaaggtttctgaattattttaagcaaatagatccatgtaatagtaaaaaccatattttgaaggaatgtatgcaggactccatagatcactatgtatta

SEQ ID NO: 3819 - DNA, 343 bp, Glycine max
  unsure (1)..(343): unsure at all n locations
tgagcaacttcaaacaacaataactttntactcggatgtctgactgagtcccgtaacatatcgagacgctcgaaattgattatcgaagctctgagcaaattcaaacgacaataacttgttactcggatgtcagattgagtcccgtaatatatcgagacgctcaaaatggaataccgaagctctgagcaaattcaaacgacaataacttttttctcgaatgtctgattcagtcccgtaatatatcgaaacgctacaaattgaataccgaagctctgagcaaattcaaacgacaataactctttactcggatgtctgattgagtcccgcaatatatcgagacgct

SEQ ID NO: 3820 - DNA, 380 bp, Glycine max
  unsure (1)..(380): unsure at all n locations
agcttcaacagttgaatttgagcgatttgatatattacgatacttaatcggacatccgagtaaaaagttattgtcgttagaatttgctcagagcttcggtattccattacaagcatctcgatatattacgggactcaatcagacatccaagtaaaaagttattgacgtttgaatttgctcagagcttcgagaatcaatttcgagcttcttgatatattacgggactcagtcagacatccgagtaaaaagttattgtcgatcgaatttgctcagagcttcggtcttcaattacgagcgtctcgacatattacgggactcgatcacacatncgagtaaacaagtgagtgtcgtttgaattgagctcagagcttcaacattca

SEQ ID NO: 3821 - DNA, 450 bp, Glycine max
  unsure (1)..(450): unsure at all n locations
tcacttcacttcttcaagtggtgcaggatatgcttccagaggaaaacacttttccaaaaagttactattaggcaaagaagatactatgtccgatgggtatgaagtaccagaagattcatgcatgccctaatgattgcataatgtacataaatgagtttgaagaaatgcacaactacccctggtgtggggtatcacggtacaaagtgaaggatgatgacgagtgtagcaatgatgaaagcaccaagaaaggccccctaacaaaggtgttatggtatctttcgatcattcaaaggctcaagtgtttgtttgctaatgcagatgacacaaaagaccttacatggcatgcagatgggagaaattgtgatggaatgctccgccatctggattattcctcttagtggaagaagattaatagtctgtattcanaattacgcaaagaggcaagaaatc

SEQ ID NO: 3822 - DNA, 448 bp, Glycine max
  unsure (1)..(448): unsure at all n locations
agctntagtaacacccattggccaatctgaaattccccatcataccttcttaagaactccttccaaaaattgctcacgaaaacaggatccctgtcactaattatgacaactagtgctctatgtagtttgcaaatctggtccatgaaatattgagcaagtgttgccgctatatatggctgtgaaagggccacaaaatggacatacttgctcattcgatcaataacaacccacatggtgtccttgcaattggatttgtgagggccctcaataaaacccgttgttatactttcccaaatccgactaggaattggaagagggtgcaaagtctaggggtggcaattgtatcatacttacaccatgcacatgtatcacaatgttcaatgaaatcctgaacatctttaatcatccttttccaccaaaatagggatctcaatctctaatatgttgc

SEQ ID NO: 3823 - DNA, 456 bp, Glycine max
cgacaagtcagtctgtttaagtaataataataataataattataataataatatataattattattattattattattaaatacctattattactataaaaaaaaagcttgttaagctttgtgttttaacgacatgaattcaatatgattctatttatcaattatttttggatttgtacattacttatacgaaattttataagtttctttttttagttaatatttcactaagttttaaaataattaattgatcaaagatatctttaagcaaacttttaaatagacttgaagacaaagtcgaacttttatgtaagtcaagccgagcctttgaaaaaaagcctatggcaggtaatgagttaagatcaagccttgggtattcaacttaagtcaagttcaagtctaataaaggttggcttgactcggcttattttcacccctagttatgatttaatttca

SEQ ID NO: 3824 - DNA, 414 bp, Glycine max
  unsure (1)..(414): unsure at all n locations
ntcattntcaattacgagcgtctcacaatcctacgggacacatttggacatccgagtgaaaagttattgtcgtttgaatttgtttagagcgtatgttttcaattacgagcgttttgatatcccacgggacacaatcggaaatccgagttaaaaattattgtcgtttgatttttctaaaagctttcattttcaattacgagcgtctcaaaatcctacgggacacaatcgaacatccgagtcaaaagctattgtcgtttgaatttgctcagagcttcagttttcaattacgagcgtctggatatattacaagactcaatcagacatccgagttaaaagttattgtcgttcgacttttcatagagctttcgttttcaattacagcgtctcgatatattacgagactatatcggacat

SEQ ID NO: 3825 - DNA, 428 bp, Glycine max
  unsure (1)..(428): unsure at all n locations
tgacaggttcaggtgcacgtgctgctactagtggagggacttcaatttgcttgccagacctcaaggtgatggcactcacattcttcggattctgcatagtttgtgaaggcaatttgtcagaattttgggactgagcttggttcaactgagtatccatctgtcccttttgatttgtcaaactctgaatggaggctctngtctcttgctaaaattgcatattctggatggtcattttccccactaactcctctaaggaaggttgagaaggggcctcagttgcttgttgtctttgttgttgttgctgctgttgcattggaggaggaacatatggcctgcttagactagcagcattctggaagagagggacaggctcgttgtgctgctgttgttgttgtggaggatttgcccatctcacacttggatgattc

SEQ ID NO: 3826 - DNA, 453 bp, Glycine max
  unsure (1)..(453): unsure at all n locations
tccatcattntctaagttaccagagtatttactctctggtaatcgattaccagtttcatgtaatcgaataccagtgaccaaatttgatttcaaaatgtttttaactgatttgcaatgttccaaaatatttttcaaatagtgtaatcgattacctgtgtatctgaacgttggaattcaaatccaattgtgaagagtcacaacttttcataaaatgcattgtgtaatcgattacatgactatggtaatcgattaccagtgataacttttgaataaaaggtcaaaagttgtaactcttgacatgattttctcaaggttataactcttccaatggttttcttgatcagacatgaagagtctataaaagtaagaccttgacttgcattcaatagaactttntacaactctttgacaattttttagaacttctaagaattcctttctactcatctcact

SEQ ID NO: 3827 - DNA, 445 bp, Glycine max
taataagtccatctatggattgaaacaagcctcccgtttatggtatttaaaatttcatgaggtcatttcttcatttagctctgaagagaatgtcatggatcactgtatataccagaaggtcagtgggagtaagatttgtttccttgtattatatgtagatgacattctgcttgcgactaatgataagggtatgctatatgaggtgaaacaatttctctcaaagaactttgatatgaacgatatgggagaggcatcttatttcataggcataaagatccatagagaaagatctcgaggcattttaggcttgtctcaagatacctatatcaacgaagttttagagagatttaatatgacagattgttaccaagtgtagctcccattgtgaagggtgacaaatctgctttgagtcaatgctccaaaaatgattctgagcgggaacaca

SEQ ID NO: 3828 - DNA, 458 bp, Glycine max
  unsure (1)..(458): unsure at all n locations
tgagttcttgagctattcctctcagccaaagagcttcctttatagcctctatcagtgcaatatactctccctctgtagtggataaagccaccaccttttgcaggcttactttctagctgatagttgtaccgaatgcattaaagttatatctagtgagtgatttcctagtgtcaaggcagccaacataatcaaagtccacaagcccttctatggcagctgaactgtaactgttcttatcagctctgccataagccagaccctttccaagtgaacctttgatgtatctcagaatccacttcaaggattgccaatgcaccttccttggatttgacatgaatatactcaccaaactcactgagtatgctatatcacgtagagtatacaccatggcatacatcanagagcctattgcatttgcataaggaattntagccataaattccttgtctctttctgag

SEQ ID NO: 3829 - DNA, 452 bp, Glycine max
  unsure (1)..(452): unsure at all n locations
tgtcttgtacacaccaagaaaaatcaataaatagatgacagggaataacaattttataaattaattntatcatgatttattcattctgtttttgtagcccacatcattaatattataagagttataggtggaaaaacattagttaattttacattgaaaaattgaaatgataattatttcaaaataatcttttttttacttgataattattatgggattgaggaactactctcttttatttaataatgttagttttttaaaatattttttcacctatttattagtcttaggttgtttcacctatttttaaaaattattctaaataaagaataataattntataaaactaaccttattaaacaaacgaaagaaagtactccctctatctatactaatcctcacgtaagaagaacaaatttgttctaaaataattcttattctagattttaatg

SEQ ID NO: 3830 - DNA, 446 bp, Glycine max
  unsure (1)..(446): unsure at all n locations
nggacaaaatntcccatgctactatgaataactccaccacatgaagcaacacctgccacttgagcagaattggccctagtgtaaaacagctaaaatttgaactttgggtctaccaatatttattattaattttttaaagtaaaaaatatcacacatgttaattaaaagaccttacatattattattttctttaaagtaaaaaaatatattttaatttttattctaggtctcattttctattggaccgacacttcagttgagattaaaaatttcactaggagaatagctccaagtatttgtattgtagcatcactaacaacatcgtgtccattggttgcagcacacaggtattcacaactattcttcatgtccggaattagtgattcgatcaaaatactaatcaacatatgcggagatataaggtgggatagatgaataagatcact

SEQ ID NO: 3831 - DNA, 432 bp, Glycine max
  unsure (1)..(432): unsure at all n locations
agctntcaattgccatgatagcaaagtaaccccaaagcactgaggttggtatcttcttcaagagaggcatagcagcaacacaagctgcaaccatcaatgcctgcagcagattgctgaggcgctgttctttaacttcaactggcaaaaggtcatcaacatccttatctacatcgaaaacagcctcgtcaacaggggaatcaatgtatccatgacttgaagccagttggatggtggattccttcagctcctttagcccctgcttgaagaacaatatataggataaaggagagagagataacaaatttcaagtcaaattggaaatcataggattatacttaccagggcaggtggtatttggcgggctaatggagtctgcatttggtcatatgcttcttgcatatttcggtataattgacacaggttcatattttt

SEQ ID NO: 3832 - DNA, 429 bp, Glycine max
  unsure (1)..(429): unsure at all n locations
tctttgaggcttaaattcaccagttgggctttcattcactatgatagatatggatgccgatgaaagggaccccttgacccagccaatccacctttcatgaaaccccattcttcttatcatataaaagaagaattgcccagacacccagtcataccctttctcaaaattcactttaaacaccaaacaagggcttttagatctnctaggctnctcaacaacctcataagcaatcaatactccatgaagcagctgtctgcccttgacaaaggctgattgcctttcatctaaaaggtgattcataaccttgctcagcctattagatagaactttagcaatgactcttgtaacacagcctatgacggatattggtctgaaatcactaatgaatcgagggtccttaatcttacggataacggcaatgaatgatga

SEQ ID NO: 3833 - DNA, 385 bp, Glycine max
  unsure (1)..(385): unsure at all n locations
tgtcaaaaagggaagcaagttaaaaactctnttcaattataaaacgttgtttctacttcaaaaccctttgaactacttcacatagacttatttggtgcctctagaactatgagtttgggtggtaattactatggcttagttatagtagatgattactcaagattcacatggactttgtttttgaaaaccaaagatgaagcttttgatggtttttgcaaacttgccaaggtcattcaaaatgaaaaaaggtcttaacattgtttcacttagaaggtatcatggaggtgaatttcaaaatgagtctcttgaaatgttttgtgaagaaaatggaattcaccacaacttttctaccctaagaacacctcaacagaatggtgtcatggag

SEQ ID NO: 3834 - DNA, 405 bp, Glycine max
  unsure (1)..(405): unsure at all n locations
tgaccccaatttgatcaaaggtaaagctaacttgtattatacctattgcatcaagtggcctcagaataattaaaaatggggggttgaattaattattcctaaacctttactaattaaaaaattactcttctaaggattttactatgttgttaagtgaataaagagtagaagagaaacttaaccaaaactaaaagtggaaattaaatgcacagtggaaattaaaagagtagggaagaaggagacaaacacacaagagtttttatactggttcggcaacaacccgtgcctacatccagtccccaagcgacctgtggtccttgagatttcttttcaaaccttgtaaaaatctttntacaagcaaaaatccataagggatgtacccttccttgttctcttgaacaacct

SEQ ID NO: 3835 - DNA, 429 bp, Glycine max
  unsure (1)..(429): unsure at all n locations
agctttgctgcattaagggnnnattttatttatatatatncactaaaagagtnggaatatagatgtaaaataatcaaatatttaatttagatgtcaataaacaagaatattattgtatcggatattacttatattagatttgattttcttaaataacagtttaaatttgagtattgtggataaaaaaatataattcaaatgagagatctcattaaagataatgactcaaatacttcaacaaaaattaatcatagataaaacttattagtacttcacaccaatgtttaatgttttggtgataaaaaaaataaaatactattgaaaaaaaaggaattagtctttctatttaatagattctatatgattatatccaataataaagaatatattttctcacataatagtaataaagaatatatcgaaaagaaa

SEQ ID NO: 3836 - DNA, 404 bp, Glycine max
tatgctgcagacatttataatagaccccctcagcagttattaccttcaacagcagaataattatgatcttttaagctacagatacaatctaggttggagaaatcatccaaattcgagatgggcaagtcctccacaacaagaatagcatgtccctcccttccagaatgttgctagtccaagcaagccatatgttcctcctccaatagtgaggcaaatgaccatccataatatgcaatttcagcaagagacaagagcctccattcagagtctgacaaatcatatggggcagatggctactcagttgaaccaagctcagtcccaaaattcagacaaattgttttcacaaactatgcagaatccgaaaaatgtgagtgccatcaccttgaggtctggcaagcaaattg

SEQ ID NO: 3837 - DNA, 375 bp, Glycine max
  unsure (1)..(375): unsure at all n locations
ttttccaacccttaaggacaaaataacgaccgctctagtgctagttttgcctaacccgagagaaccctttgaggtgtattgtgatgcatcaaagatgggtttaggttgagtgttgatgcaaaatggcccaagtagtggcctatgcttctaggcaactcaagactcatgagaggaattatcccacccatgatttggagttggttgctgtagttntttcccttaagatgtggaggcattacctgtttggctccaaatttgaggtgtttagtgatcataagagccttaagtacttgtttagtcagaaagagttgaacatacatcanaggagatggttagatgatgcaatcctaccccccccccccaagggcattggat

SEQ ID NO: 3838 - DNA, 393 bp, Glycine max
ataacttcaaatagatcattagcagaaaagaataataattgttcacacttcacaggaaacaaaagctatgaaaaggactgaaaatttaaacagcagaatgagtttgtacctgtacaaacttggcaaagccagacccaagaggggatccaatgtacagagccattgaagctccatttagcaaggatgcgtatactagccatggccccatcatccgtccaagattagtgggccagcacactacatcacctttacgaacgtccatgtggcaccatgcatctgcagcagcttttagagagtaatattggtccatggaattgcctttggatcacctataccaccaaatgaggtacattatattagcttttggctagcttcatatggtgagtgaagtct

SEQ ID NO: 3839 - DNA, 422 bp, Glycine max
agcttaataaatctatatatgggggataactagcttcccgtcagtggtaccttaagtttcatgggataatttcttcatttggttttgaggaaaaccccatggatcaatgcatattccacaaggtcagtgggagtaaaatatgtttccttgttttatatgtagatgatattttacttgcagccaatgatcggggtttgctacatgaggtgaaacaatttctctctaagaattttgacatgaaggatatgggtgatgcatcttatgtcatcgacattaagattcatagagatagatctcgatgtattttgggtctatcacaggaaacctatatcaacaaaattgtagagagatttcaaatgatagattgttcaccaagtgttgctcccattgtgaagggtgataggtttaatttgaaccaatgt

SEQ ID NO: 3840 - DNA, 421 bp, Glycine max
  unsure (1)..(421): unsure at all n locations
ngtaatgattataaaattaaatgtgctaagaagaaanatcgtttatacgtaaacacgacattgaagtaacttgggatgagtataaaatttgtgaacaaaccactttggctaaggaaatattgtacatgttatgatttatcatagaaaagctctcaaagatgttaggtacacctcaggtttttattataagaaattagagaaattgtattttatactatcacttatttctgataataagaataaaaaatagtataaatgtataccgtaagatatagacatgaatggacaccgcattaatatcttttatcaaatagatatctatttgattatttcaaaaatattattattgtaaattttagtaaagtaactaataataataattaggaatctcatatttctaaattaatgtctaattctacat

SEQ ID NO: 3841 - DNA, 416 bp, Glycine max
  unsure (1)..(416): unsure at all n locations
tcttagtctcagctgatgaagatgaattctnggctacttangctctcctctaatgacaatagcatcacttctggcactaaattgctgggagtttgaagccatcttctcaatcaaatttctggcttcagcaggggtcatgtctccaagggctccaccactggcagcatctatcatacttctctccatgttactgagtccttcacaaaaatattggaggcgaagctgcttagaaatctggtggtgagggcaattggcacatagtttcttaaatctctcccagtattcatataagctttctccactcagttgcctaatgcctgaaatatcttttctgatggtcgtggtcttggaagcagggaaatttttttctaagaatactttcttgaggtcatcccagctcgtgatggaccttggag

SEQ ID NO: 3842 - DNA, 415 bp, Glycine max
tctatagaaggttcatttctaattgctcttcttttgtatcacctctcaatgagctggtgaagaagaatgtggcatttacctggggtgaaaaacaagagcaagcctttgctttgctcaaagaaaagcttactaaggcacctgttctagctcttcttgatatttctaaaattgttgagctagaatgtgatgcctctggagtgggagttggagctgtattgttacaaggtgggcaccctattttttattttagtgaaaaacttcatagtgccacccttaactaccccacctatgataaagagctttatgccttaataagagccctcctgacttgggaacattaccttgtttccaaggaatttgtcattcatagtgatcatcaatcacttaagtacactagagggcaaagaaatttaaa

SEQ ID NO: 3843 - DNA, 396 bp, Glycine max
  unsure (1)..(396): unsure at all n locations
nttcctctaatttgctttgatagaatttccaagggttatatagaaagaaaagagattaaagccttcattttgtactgtcttcatgcgattcacttttctctctccatgaatattattttgcaaattacaacggtgaatgtgtgcgaaattgagttgcgaactaagtgtctatatttcacaatgatccaacgattaacgagttcgggatcctagttttactagacaagttttgagtctctacgaaaaaagagaaaactacgatgtgaatgacttttctcttagctttgacattttttcacaatttccaacggtgagaatgctcggattaagttgcgaacctggtgctgaaatatcacgacgatccaacggttaacgagttcgagatcatcattttac

SEQ ID NO: 3844 - DNA, 424 bp, Glycine max
  unsure (1)..(424): unsure at all n locations
agcttaattgactattntattaatcattgtctaataaaacctgaattttaggtagcatatatcatataattgattatttaactgcatgccttgagtaggaatttttgttgttgttctggtgtaggattatagcagcaaagtgtattttatgaagcaaaccgtgggtaatgcttgtggtacaatagggttgcttcatgcacttgggaacataacctccgaagtcaagcttggtatgtttccaacaatcacgcagcctcagttaaagttnttagtatatcaatcattaaatctcattcagttgtgttgcttttgttcttaccagttgaagggtcattctttgataagttttttaaatctactgcaagcatggatccattgcaggttatttgtttcttcctagccaaacctcctctcttttctttct

SEQ ID NO: 3845 - DNA, 414 bp, Glycine max
tggttcccaatgctctattcagactctctcataatctgtatgtaaacctagaatctctattagacactatgctagatggcacaccatgtaatctaacaatctcactaatatacaaggaggtcaacttctccaaggaaaatatgatattaatgggaataaagtgagcaaacttggtcagtctatcaacaataacccagatagaatctaaatctctaggggtcctatgtagtcctccaacaaaatccatggaaatactgtcgcactttcactggggtatctccaagggttgtaacttccctaaaggcatctgatgttctatcttagccttttgacagactaaacatgcatacataaactcactaacctctgtcttcatgttgggccaccaaaacattatcttcagatctttataca

SEQ ID NO: 3846 - DNA, 422 bp, Glycine max
  unsure (1)..(422): unsure at all n locations
acctgcatgctgcagcttttatagacttcagagntttganccgttgagagatcccaattagttgttgtctaatagctttggcacttgacacgaggttgctattgtacgaagagagagtgggggccacaaacactttagttagtagtgtttatggtagggtcgatggtctagggtctaaggtttaaggtgtatgttttacttattttaaggtttaggggttagttagtttatggtttagattttacgtgattagggtttatgcatgctatttaaatgaggattgagtgttataggttttcccattataggaattanggttttgttagcattgggtttaaggcttacttatttttggggttagggtttatggattttatggttagcgtttacttattttatgaattaaagtttaacatattcta

SEQ ID NO: 3847 - DNA, 421 bp, Glycine max
agctttaaacttatacaaatattagctctgataccacttgttggacaagtggcctcagatatcttaagaagggggggttgaattaagatataacagactattccccaattaaaaattctacttttaatttaacccaacaacctatgattccttttaaacaagaactccaagataataatgcaaattaatcttactaaatagaaataataagcaataaacaataaaggagtttaagggaaaagaaaatgcaaactcagatttatactggttcggcgacacccttgtgcctacatccagtccccaagcaacccgcttgagagttccactatcttgcaaaatccctttacaagttctgaaccacacaaggacaacccttcctttgtgttcaaatttctttacaacaagagaccctcggtctctt

SEQ ID NO: 3848 - DNA, 416 bp, Glycine max
  unsure (1)..(416): unsure at all n locations
tcaacattcaattntgagcgtctcgatatatgatgtgtctctttcacacatccgagtaaaaagttattgtcgctttaattggctcagaggttcaacattcaatttcgagcgtttcgctatattacgggactcaatctaacatccgagtaaaaagttattgtcgcttgaattggctcagggcttcaacattcaattttgagcgtctcgatatatgacgagactcaatcagacatccgcgtaaaaagctattgtcgtttgaattggctcagaggttcaacattcaattttgagcgtctcgatatgttacgggactcaatcagacctccgagtaaaaagctattgtcgtcttgaattgctcagagattcaacatttaaattcgagcgtctcgatatactatgggactcaatcagacatt

SEQ ID NO: 3849 - DNA, 419 bp, Glycine max
  unsure (1)..(419): unsure at all n locations
agctntgaatgcactattcaatggttttgacaagaacatcttcagactgatcaacacttgcacagtggccaaagatgcatgggagatcctgaaaatcactcatgaaggaacctccaaagtgaagatttccagattgcaactcttggctacaaaattcgaaaatctgaagatgaaggaggaagagtgtattcatgacttccacatgaacattcttgaaattgccaatgcctgcactgccttgggagagaggataacagatgaaaagctggtgagaaagatcctcagatccttgcctaagagatttgacatgaaagtcactgcaatagaggaggcccaagacatttgcaacatgagagtagatgaactcattggttctcttcanacctttgagctaggactctcggatagggctgaaaaga

SEQ ID NO: 3850 - DNA, 333 bp, Glycine max
tcccgatcacatagcttgcctcacccatatctttcatttcaaaggtgctagagagaaactgcttagtctcatgaagaagaccaggatcattagcaagatatcatcaacatacataattagatagaggaccttacttccactgaccttcaaatatatgcaccgatcaacattgttttacttaaatgcgaaggaaacaatggtttcattgaacttgagataccataggcgggagacttgcttaagactatatattgatttcttataatgtgcacattttgtatttctttgcttgaactaagagtcccattggttggtgcatatgaacattcttct

SEQ ID NO: 3851 - DNA, 420 bp, Glycine max
  unsure (1)..(420): unsure at all n locations
taagctccttcaactgcacaaggctcttattattcgtttatagtatcctnggagaacacttgcacccgacgacttaccactgagcaaaaactctattcttctctctcttttggaccaaagtaatggcaagtctgtggggcacagtaatattttctttcccatcaagacctntggatgcaacttgtgatcgtatccccatatcagctagaccttgacgggtattcaagcaatcctttgtcttgccttgaatgttaaggagcgtcccaatcacactgtcacaaacatttttctccacatgcattacatcaatacaatgtattacgtctagatcagaccagtgctaaagattaaagtaaatggacctcttattccatatgcactcttactttattcttcttttgggtctttccaaatccattt

SEQ ID NO: 3852 - DNA, 428 bp, Glycine max
agcttcttatccaaggcaattcttgttgttgaagctccttcttccttggcttattccctagtggatggtgcctcccctatcctcttctcctttgccttccgctgcatctccatggtgaaaaatcaccattgaaggacctcattgaagctcaaagatccagcctccatagaagctccacaagcaagcttccatcatgaatgaagtgatttctaatgttagtgtgtttagtcctctcatgatggacttgatccttggcaaaacaaaatgcatttagacagtggcaaaaaatgatagccttttttttgtggaaacccaagattgctaattagacccttcagccaagttcattcctttactggttcttccaacgccatgtactctacctttgtaatggatacagccaccatgggttgaagtgtagtcttcca

SEQ ID NO: 3853 - DNA, 394 bp, Glycine max
  unsure (1)..(394): unsure at all n locations
ntggagtttccagtgccattcggcncttcatagttcagacntcttctggcttcaatgcatcagtgggctttccttctgtgtccagcatcttgggatgttcccagcctttgatgacagctttccaggttctgctatccagtgatttgagaaaggccaccatccttgctttccagtattcatagttggtcccatccagaattggtggtctgttcactggtccgccttctttctccatgttcatcagaatctatctccctagatctcactcagtgatttcgagtgcctgctctgataccaattgaaattctgatactggggacagatgtcgtacaggatgtcacgacatcacgcttcagaacatgcagattgtctttgactgtttgaacagatttaa

SEQ ID NO: 3854 - DNA, 422 bp, Glycine max
  unsure (1)..(422): unsure at all n locations
agcttcttagtttcatatgatgcatttgggtttgnagctacctcatgcactcctctaatgactatggcatcatttctggcgctaaactgctgggagttggaggccatcttctcaattaaatttctggcttcagcaggagtcatgtctccaagggctccaccactggcagcatctatcatacttctctccatattactgagtccttcataaaaatattggagaagaagctgttctgaaatctgatggtgggggaaactggcacatagtttcttaaatctctcccagtactcatacaggctctctccactgagttgtctaatacctgagatatccttcctgatggctgtggtcctggaagcagggaaaattttttctaagaatactctcttaaggtcatcccagctcgtgatggatcttggagc

SEQ ID NO: 3855 - DNA, 394 bp, Glycine max
  unsure (1)..(394): unsure at all n locations
cggatgtgcgattgagtcccggaatatatcgagaggctccaaatngaaaacggaagctcatatcaaattcaaaggacaataactttttactcggatgtccaatagagtcccgtaatataatgaaacactccaaattgaaaatggaagctcgtatcaaattcaaacgacaataactttttactcagatctccaatagagtcccgtaatatatcacgacgctccaaattgaaattggaagctcgtatcaaattcaaacgacatttacttttaacttggatgtccgattgagtcccgtaatatatcgcgatgctccgaaatgaaagcagaagctctaagcaaattcaaacaacaataactttttattcggatgtccgaataagtcccgtaatatatc

SEQ ID NO: 3856 - DNA, 421 bp, Glycine max
tcatggcaaagtatgtatggtagaacttcattattgttatttattatatacaaataagcttgttgcaattcttctagacttagagtgataacatgcagtcctcttgatcccttatctctcactgtctcgttatgccgagactccgaaaccacaacaagttttatcttttccatgtactcgaaacaaaactcagtagcttctttcgcaatgtacttttcaacaataaatgcttcaagacggcgtagattctttgtatacccttttaagatcttcatgtatcgctcaaccgggtacatccaccgcaaataaatgggaccacaacatttaatttccctcaccaaatgaacaattaagtgaaccgtgatgtcgaaaaatgaaggaggaaaatacatctccaactgacacaagataatagtagtct

SEQ ID NO: 3857 - DNA, 409 bp, Glycine max
  unsure (1)..(409): unsure at all n locations
ntgaagaagcgtcaaagcaggaagtatgggtcaaggctattgatttgagatacagatgatcgagaaaagcaacacatgggagttagtaaatcgtccccatggaaaagatatcattagggttaagtgggtctataagacaaagctcaaccctgatggcaccatacagaaacacaatgcgaggctagtagctaagggttactcacagcaacccgaaattgactacaatgagacatttgcaccagtagcttgtcttgataccataagagctctaatagctcttgcgtcacaaaaaggatggagtatccatcaactagatgtcaaatcagccttccttaacggcgtacttgaagaagagatctatgtggagcaaccacaaagattcgtgtctgaaggcaaagaaaacaaagtg

SEQ ID NO: 3858 - DNA, 414 bp, Glycine max
  unsure (1)..(414): unsure at all n locations
actatgcagagaatatcctttttanatttccttatcngacttagcatcaaattttcctaagttatcttttccattattcaatacaaaacatttacaactaaagatatgaagatgtgagatgtttggttntctgccattgaacaattcatatggagttttctttaagatgggtcttattaaagccctatttaaaatgtagcatgcagtgttaacggcttcagcccaaaatttttttggaagaggtgtatcatttaataaagttctagcaatctcttccaaagatctattttttctttcaacaacaccattttgttgaggggttcttggtgcagaanaattatgctcaatcccatgcttattacaaaataattcaaattctttattttcaaactcacccccatgatcactcctaat

SEQ ID NO: 3859 - DNA, 331 bp, Glycine max
taacccagctggccttgaatcagatatctgtacctgtcgcaagggtttgcggattgtgctcctctgctgaccaccatacagacctttgccctttcatgcagcaacctggagcaattgagcagcctgaagcttatgctgcaaatatttacaatagacctcctcaacctcaacagcaaaatcaaccacagcagaacaattatgacctttccagcaatagatacaaccctggatggaggaatcaccctaacctcaaatggtccagccctcagcaacaacaacagcagcctgctccttccttccaaaatgttgttggcccaagcagaccatacat

SEQ ID NO: 3860 - DNA, 411 bp, Glycine max
  unsure (1)..(411): unsure at all n locations
agctntaagcgttgtccattgtcgttctctttcttctcaaagntctcttctctagggtccaccaattctactgctccgagaggtctgacttctttgattatgaacggccctgaccatttggactttagcttacctgggaatagccttagccttgagttaaaaagtagtacatattgccctggctggaattctttcctttgtagcttcttgtcatgatatgccttcatcttttgcttgtagattctggatgactcataggaattcagtctcatttcttccaattccagtaactgtagcttcctcttttctctgcatgcactatcatcgaaattaagcaatttgagagcccaatatgctttgtgctccaactccactggtaagtgacatgcctttccatatactagctgaaat

SEQ ID NO: 3861 - DNA, 386 bp, Glycine max
taacaaaaggcatgcgaaatgggtggaattcctagttttctatccttatgttatcaaacataaaaagggaaaaggtcatattgtagccgatgctctttctcggcgtcatgcattactttctatgcttgaaacaaaattgattggtcttgaatgtctgaaaagcatgtatgaaaatgatgaaacttttggagaaatttttaaaaattgtgaaaaattttcagaaaatggtttctttagacatgaaggctttcttttcaaagaaaacaaattgtgtgtgcctaaatgttctactagaaattttcttgtttgtgaagcacatgaaagaggtttaatggggcattttggggtccaaaagactctataaacattacaagaacatttttatt

SEQ ID NO: 3862 - DNA, 418 bp, Glycine max
  unsure (1)..(418): unsure at all n locations
agctttggaaagcgtnngtttttattttctcgctaagccaaaagggggctccactcattcaaaggcaacaatctaaaaacctgagaagaagttgttgaaaagtttctaaagaaatacttcccagagtccaagactgcagaagggaaagctgcactctcttcatttcatcagattcctgatgaatttctgagtgaagcattggagagattcagaggcttgttaagaagaactcccactcatgggttttccgagccaatccaattgaatatgtttatagatgggctgagaccacaaaccaagcaactgttagatgcttctacaaggggaaagataaaattgaagaccccggaagaagctacagagctgattgagaacatgtcagccaatgatcatgccattctacgagacagacacccat

SEQ ID NO: 3863 - DNA, 411 bp, Glycine max
ctaaactttgtacaagaatgaagctctgtataccacttgttagacaagtggcctcagatatcttaagaaggggggggttgaattaagatattccaaacttttctcctaattaaaaatctatcttactttttacttaagttatgaattcccttaatgacaatcttcttaaatattaattcaaatgaagcaacttgaatataaatataaagcaataataaataaaggagattaagggaagagaaaatgcaaactcagttttatactggttcggccacacccttgtgcctacgtccagtccccaagcaacccgcttgagagttccactaacttgtaaattccttttacaagttctaaacacacaaggacaacccttcctttgtgtttagagattctttacaacaagaaacttac

SEQ ID NO: 3864 - DNA, 422 bp, Glycine max
tgaaggtaaactagatgccttggttaacttggtaacttatctgaccatgaatcaaaaatctgcacctgtcgccagactctgtgatttatgctcctctgtcgaccactacatagacctttgcccttctgtgcaacaatctgaagcaattgaacagcctaaagcttatgctgcaaacatctacaacagacctcctcaacctcagcagcaaaatcagccacaacgaaacaattatgacctctccagcaacaggtacaatctcgggtggaggaatcatcctaaccttagatggtcgaatccttcacaacagcagcaacaacaacaacagccttattttcagaatgctgctggtccaagcaaaccatacgttcctccaccaatccaacagcaacaacagcaacagccccagaaacaacaaacagttg

SEQ ID NO: 3865 - DNA, 393 bp, Glycine max
tgccgccacggagttttccgactatgctcttgtgttttgtatcaagctacaaaaggagagagcaagaaatgaagagccaatggttgatacatggacggagatgaaaaagatcatgaggaagcggtatgtgccggctagttactcaagggacttgaaattcaagctccaaaaactaacccaaggcaacaagggggttgaggagtatttcaaggaaatggatgtgctcatgattcaagcaaatattgaagaagatgaggaggtaactatggctcgatttcttaatggtttgactaatgatatccgtgatattgttgagctgcaggagtttgttgaaatggatgatttgcttcacaaagcaatccaagtggagcaacaattaaaaaggaagggagt

SEQ ID NO: 3866 - DNA, 424 bp, Glycine max
gtgagcaaattcaaacgacaataactttgtactcggaattctgattgagtcccgtaatatatcgagacgctcgaaatggaataccgaagctctgagcaaattcaaacgacaataactttttactcggatgtcagattgagtcccgtaatatatcgagacgctcgaaatggaataccgaagctctgaacaaattcaaacgacaataaatttttactcggatgtctgattgagtcccgtaatatatcgagacgctcgaaattgaataccgaagctctgagcaaattcaaacgacaatcactttttactcggatgtctgattgaatcccgtaatatatcgagacgctcgaaattgaatatcgaagctctgagcaaattcaaacgacaatatacttttactccgatgtctgattgagtcccggaatat

SEQ ID NO: 3867 - DNA, 424 bp, Glycine max
agcttctacattcaaattcgagcctttttatatattacgggactcaatcggacatccgagtaaaaagttattgtagtttgaatttgctcaaggcttcggtattccatttcgagcgtctcgatatattacgggactcaatcggacatcagagtaaaaagttattgtcgtttgaatttgctcagagcttcggtattccatttcgagcatctcgatatattacgggactcaatcagacatcggagtaaaaagttattgtagtttgaatttgctcagggcttcggtattccatttcgagcgtctcgatgtattacgggactcaatcagacatccgagtaaaaagttattgtcgtttggaattgctcagagcttctacattaatttcgagcttttcgatatattacgggactcaatcagacatccgagt

SEQ ID NO: 3868 - DNA, 400 bp, Glycine max
  unsure (1)..(400): unsure at all n locations
tttaaaanaatgaagataaaaataaaatagtgagtatattattaatttctaaattatttaatacaaaatattcaaaatataaaataaaagtttcttgcccgtacaacaattttatttaacatattaaaataattattaaaataaaagtttcactatttttctcatattaaaataattattttaacatattaaaataattactaatatactgaagaaagagtaatagagccacacttcaaatcatttatgtatgttcataatctatttaaggcaaaaatttataataaatcttttcttttgtgggactcaatcctaaattatttaaaatataaaaaaagataacatgttattcaattgacactactagaaaaagctgttttttcttttattaattaattaa

SEQ ID NO: 3869 - DNA, 336 bp, Glycine max
taaagttattggagggagaataaaacaaatcattttcttttgtaccctccaagtaacgaagaattctttttgcggcttttatatgagtagaggtaggagccttcataaagcgacacacaactctcaccgcatatagaatatcgggccttgtattggttagatacctcaaactccccacaagactcttgaagatcgtggggtctaccttctctccttcatcaaactttgataacttcaagccaccttccataggtgtgttcacgggattgcaatcaagcatattaaatttcttcaacacttattttgtgtagctttcttgtgagacaaagattccat

SEQ ID NO: 3870 - DNA, 365 bp, Glycine max
agctataatagcaatctttctttttgttgacaagtttcagtagtccagctgtcttgatgaggtacatgatctccttgcaatccaaggcatttcttcccagttctctttctaaagcaagccttcgttgatatacaaatttccacctttcaacattgccaatggagtggaaagaaatgttgtccaatggagcatcagggacatttccaggcacctttttccctgatttcttggcccgcttgatgtcgagaacatctggctcgacattatcatcagaatcagatgaggaaatttctttcctcttcttggacgggattgcaactatgctccatctggatgcggtaagagtgagtggagtgctcttcttc

SEQ ID NO: 3871 - DNA, 393 bp, Glycine max
  unsure (1)..(393): unsure at all n locations
agctttttattggaancttgtatttatgacaacactctgatttctgaaatttttgggataaaaatggttattgactagtcccttttccatgacttaaccaaattacccagtgacggtgtaccatttgaaggtacagtgaatgacgactggaaatttgatttctctgcccatgatgcccgccagttggtttgcaccaacaatgcggatatgaccggacgtcttcttgccgggtcattggcttttgaaagccgcatccttcactatttaattgtacgtattttgcttccacggtcttccaaccttgcccaggtttctgaggaagatctaattatcatgtgggcctttcatacagggcgtcaacttgactgggcacacttagtcagatatcgcatg

SEQ ID NO: 3872 - DNA, 392 bp, Glycine max
  unsure (1)..(392): unsure at all n locations
gctggactcgttgtgcagtgatttccttggcaatntgatgctcagaaacatcaatatctattactccatcagagggtctgcccagacatttgttgatcacagccggtgagaatctaatacactttcctctgacaaacactctttgataatcatcactctttctgtttgatatgtcagagggaatgttgacaatgaattccctgactaagccttcatagcactctcccaacttgctgacagtcttcagcagtccagcagccttgatgagatccacgatctccttgcaatccatggcagctcttcccagatctctttccaaagcaagtctacgttgatacacatatttccacttttcaacattgccaatggagtggaaagagatgttgtccaat

SEQ ID NO: 3873 - DNA, 437 bp, Glycine max
agcttcttcacatagtccgcctttgcttgaccttctttatgcttaaaaacagaaacattaggcataggcaaaagatcaagaggagttagtgggttaaaaccataaacaacttcaaaaggagaacaattagtggtgctatgaacagctctattgtaagcaaattcaacatggggtaaacaagcttcccaagtttttaagttcttcctcaaaactgtcctaagcaaagttcccaaagtcctattaacaacttccgtttgcccatcggtttgtgggtgacaagtggttgaaaataacaatttagtgcccaacttgctccacaaagtcctccaaaaatggcttacgaacttagagtccctatcactaacaatgctccttggcataccatggagtctcacaatctccttgaaaaacaaatcagccacatgggaagcatcatc

SEQ ID NO: 3874 - DNA, 322 bp, Glycine max
ctatgctcttgtgtggcggaacaatctacaaaatgttagagcaagaaatgaagagccaatggttgatacatggacggagatgaacaatatcatgaggaagcggtatgtgccggctagttactcaatggacttgaaattcaagtctcaaatactaacccaaagcaacaatggggttgaggagtatttcaaggaaatggatgtgctcatgattcatgcatatattgaagaagatgatgaggttactatggctcgatttcttaatggctcgactaatgatatccgtgatattgttgagcttgacgagtttgttgaaatggatgat

SEQ ID NO: 3875 - DNA, 454 bp, Glycine max
  unsure (1)..(454): unsure at all n locations
ngccgccacggagttntccgactatgctcttgtgtggtggaacaagctacaaaaggagagagcaagaaatgaagagccaatggttgatacatggacggagatgaaaaagatcatgaggaagcggtatgtgccggctagttactcaagggacttgaaattcaagctccaaaaactaacccaaggcaacaagggggttgaggagtatttcaaggaaatggatgtgctcatgattcaagcaaatattgaagaagatgaggaggtaactatggctcgatttcttaatggtttgactaatgatatccgtgatattgttgagctgcaggagtttgttgaaatggatgatttgcttcacaaagcaatccaagtggagcaacaattaaaaaggaagggagtggctaagaggagttntaccaactttggttcttctagttggaaagacaaaggtaagaaagat

SEQ ID NO: 3876 - DNA, 465 bp, Glycine max
  unsure (1)..(465): unsure at all n locations
cttcctacgaaaactgtctatgctccacatagttagggccactagacgcattctgcatctctcangcattgaacatatgttatcccctagtaaattctagggtagagtgtttagttttctactaaccctgattggaaaagaaaacaaaggataagcattatggtttcctaaaactaagtatatttataaaacactatattacgaaatggagcattccaaatgctttttttaaacacaatctgtttatccaatgctcaaatgctcaagattaggattaggggtgttcatactcggtttgattcggttattcattaaaaagtcatctaaaccaaacttataaacaatatgcgattcaatttggttcaattttcattaaaaatataatctgaatcaatccaaaccaatattgtacggtttgatttttgcaatgtttactaaaacattatttcattaaatgntatatac

SEQ ID NO: 3877 - DNA, 446 bp, Glycine max
  unsure (1)..(446): unsure at all n locations
agcttgcttctcctgaatatcaaattcattttaggaaaaagaattggacaaattangattatttagtagggcactaactgaaattaaattgaatttgattttaggaatgtaaccaacattatgcaagactaaggtgttggttaagcaaactgaaccaatggcaagaatgggtataatgtcactattaggaagagttacagttttatcaaaaacaagctgatgagatctaaaattatgaagagagcaagtaatatgaatgcttgcactagaatctaaaagtcaacaatcatgaagaaaattggaagtggaagtagaaagaatcataccacttgaggaagaaacactgtgaggaatgacaacattggtagcatgactttgtaaaagattcatcaattgactatattgttgagcagtaagttgaaactatgaacccaagtcaacagaag

SEQ ID NO: 3878 - DNA, 468 bp, Glycine max
  unsure (1)..(468): unsure at all n locations
tggacaatggcacggaaatcttgctaaaatcctagataaatctcttgtaaaacttggatgtcgcagaanagaacgtacttcccgcacagatgcgtcgtaaggaagagaagtaataacatcgatctttgccttatcgacctcaatacctctactagagactgaatgccctaagactatacctccatggaccataaaatgacatttttcaaagttaagaacaaggttagtctcagcatcggtcaagaactctacagaggttatccaaacatgcatcanaggaagaaccataaacaatgaaatcatccataaacaccttcatacaactctataataaatcagaaaagatactcaccatgcacctttggaaggtgccaggagcgttgcatatgccanagggcatcctggtgtaggcaaatgggataaatgatctcggcaactagtagcttcataacctctttcttcatcaca

SEQ ID NO: 3879 - DNA, 440 bp, Glycine max
tcatgatgatgaactaagcaattatgatgatgcctaaagcccaagtgattgattcaatattgattcaagacttcaagatcaagcatcaagaatccaatccaagattcaagattcaggagaagaaatcaagaagcaacaagtcaagacttcatattggataagtattaaaagaatttttcaaaaaccaaatagcacagttttgttttacgaaagaattttctctaattctctaaagttacagagtgattactctctggtaatcgattaccagttaacagtaatcgattaccagtgaccagattggttttcaaaatgctttcaaatgatttgtgacgttccaaaatgattttcaaatagtgtaatcaattacactatattagtaatcgattacaagtgaatctgaacgttggaattcatatccaattgtgaagagtcacaac

SEQ ID NO: 3880 - DNA, 450 bp, Glycine max
tgcttgtccacctgagggttccaatcttgctcgtagaatataacctataaaatgccatgcaatagtaaattctcaaaatatgttttaaacagagtacacttactctaattgttgtgatacattccataattagcacagaatttattttgtaattagtacagatttgattagtacagattttgttccattgtattttgatttgtactgattttgtttcattgtatgtctttccttaattaagtcgctagcagcttataaataagtcatgtattcactctgtgaaatacagaattataataatatttatattattatctttcaagtataatacttgcaggtgataacataaacttacaataatttaacccacctgttaaagaaatggaagtgctattccagcggattttatgattaacttaataagctacttctcattctcccataattaat

SEQ ID NO: 3881 - DNA, 442 bp, Glycine max
  unsure (1)..(442): unsure at all n locations
nggtcgtgtattgagcactagatatgagggaaccccaactgcctacatactaattggcaattgacttttcttgtggctttgctgaaagcatattatataacttttatgtttcgtaatgcatgatgtatcaaactatatatgatgtatcaaactagtttataaagtacattatcatatgactgaaaagctgcttataatgaatatttttatgcatggccacttgtttataaatatacataataccaaagaaagaaacaccacgtgcatcatgcttcttcttgcttataatcaatattgatttgcagatattgggagaatgagaaggtgcggttagattacaggccagtgcacatgaatacgttggatgatgaggtggaatcattccctcctaaagctcgtgtttattagtattcttgtaaattattactatggatgatctata

SEQ ID NO: 3882 - DNA, 417 bp, Glycine max
  unsure (1)..(417): unsure at all n locations
agctntataaattcatcattgttaatattctctacacaaaaacttaaatgatgttaatttaacaagtatttgctcaaaaaggaaaaattataatagaaaaattacaaattcctctataattgaacccccaaaatatactcataattagcatttataaggtggattgtgattttagaagatgtaaagcctttttgttcaacaacaaagttatcatttgaagtataagcttaacaaaattgataatagatttttgtaagacaaattcatatgatagaaatagattttgcaaaacaaaataagtttttcaaaaattaaattaaattcaaaccctaagccaatttaaaacagaagattaaccagaagaatataagacacaaagatttatattggtttgtgcctaccactaagaatacattc

SEQ ID NO: 3883 - DNA, 425 bp, Glycine max
  unsure (1)..(425): unsure at all n locations
agctntactgcctgagaattgcggtgtcctagcctattgtgcaaatgtatagagttaggcacagtgttattacaagcaacagaagaaacagtgtttatacaagctggagaagacagctgagaagaattgaagattgggaaactgatacgatccatcaggtccaacatctccttgtagaaggatcatattggaatcctgngatttaacaaagcaatgattagcatggaattcaaagaaaacatgattatctttggcaaatntacttacactaatcagattcttggtgatttgaggaacaagaagcatgcttttaagaataagtttgacattaggactgaaaggagaaacaaaattggagtgaccagacgctgagatattcagacctttgtcattaccatgaagatctgatcttcaaaacgagaagt

SEQ ID NO: 3884 - DNA, 422 bp, Glycine max
  unsure (1)..(422): unsure at all n locations
agctntacaagcccttcgaccttggcttggttagctttcacctcctcttcactaaatgtagcattgcctttggtgaaaaattggacatgtaccttcctaatggatcctccatttgagccttccaccaatttgctttcaaatgaaaccttctccaatgtgtcagacaaggcagtgcccccgattatgctgaagttatatacataggctgcctcatcaattgcatcaactctgtgcagcacatactttgttttgtcacctgcatatgcacccattaattcatctaattaaaatcatgactaatttcattaatttgtactatgtattataattaaggttttaaatattggtcgcaatagtattattgcgatttatcagtttgttgatattgcaataaagtacagacaaatatgactgatgcaatc

SEQ ID NO: 3885 - DNA, 408 bp, Glycine max
tcaacattcaatttgagcggtttgatatattacgatactcaatcagacatccgagtaaagagttattgtcgtttgaatttgctcagagcttcgacattcaagtccgagcgtctcgatatattacgggactcaatcagacatctgagtaaaaagttattgtcgtttgaatttgctcagagctttggtattccatttcgagcgtctcgacatattacgggactcaatcagacatccgagtaaaaaagtgattgtcgtttgaatttgctcatagcttcaacattgaattctgagcgttttgatatattacgagactcaatcggacatccgagtaaaaagttattgtcgtttgaatttgctcagagcttcgacattcaagttcgagcgtctcgatatattacgggactcaat

SEQ ID NO: 3886 - DNA, 383 bp, Glycine max
  unsure (1)..(383): unsure at all n locations
agctntgagcaaattcaaacgacaataagtttttactcggatgtctgattgagtcccgaagtatatcgagacgctagaaattgaataccgaagctctgagaaaattcaaacgataataactttttactcagatgtctgattgagtcccgtaatatgtcgagacgctcgaaattgaataccgaagctctgagcaaattcaaacgacaataactntttactcggatgtctgactgactcccgtaacatattgagacgctcgaaattgattatcgaagctctgagcaaattcaaacgacaataactttttactcggatgtctgattgaatcccgtaatatatcgagatgctcgaaatggaataccgaagctctgagccaattccaa

SEQ ID NO: 3887 - DNA, 435 bp, Glycine max
  unsure (1)..(435): unsure at all n locations
tatacagcctangatgtggttntgtgactaaattcaatttagacacaagtcttgcacttgccacattggtacaactccctccatcaatgatcaccatgcaaactttgccattgatcaatcatctagtgtggaaaatgttttctctttgagtttcctccaaagacttcaattgatggccaagtaaccgcctaatcatcaacaattcttcctctagtgttttctccacttccttctcatcatcctcactctcttctcccttttcaacttcggactcactaatgtactctccatctctaagaaatcatggctttcttgttagggcattcatatgcataatgtcccaagccttggcactgaaaacacttcacatcccaactcttttttgaagactgttcttggaattttggaggagttttcgatggtataggtgttgca

SEQ ID NO: 3888 - DNA, 367 bp, Glycine max
  unsure (1)..(367): unsure at all n locations
agcttcgcggngtcgtgcgcacatgcatgcgaaaacctaatcaaaaaagctttatattttttaaaaaatgaacaaaggcggttttctatttacacccgttgtacaaataagtcctacaaagacgggtctcgaagaccgccgtaattatcttaccactatttacaaaaatgtcactgagggacattctaagacggttcctgcaaactgccttagaatgtgcgtcctaaaaacagctccttttagtagtggccatgtcctatctggctgcatcatgcaaagcaagaatctgagtgtctcactagagagatctcaacacctttagggtaccacaagtcgacatgtaaggttcctctaagatacttcatag

SEQ ID NO: 3889 - DNA, 453 bp, Glycine max
  unsure (1)..(453): unsure at all n locations
ggtaatagtcatctacatatgggtcattactatgagtcacagcatgttgcattctgagaatgctttctattgcatcacttgtcatatacttggaacgaaactgaaatgaaccactgtcactctcttggctaccggcatcagaaccatgtaaggaaaaacgaagactatgtttacctttatgaagtgattttgatctatgatctctaccatcggcgattccatgcatatgttcatatttgctaattacagatgagccagaggaagggtggggattgaataaatgggactggaagccagataagtagcctgcagatcgctgaccaggatgatgcagtctatgctgctgctgttgtaatcgagccatcaagtgatgagataccgatccattatgaaggtgtaattgttgctgtaacatattattaacgagatntgaatgatctccatgatacaacc

SEQ ID NO: 3890 - DNA, 452 bp, Glycine max
  unsure (1)..(452): unsure at all n locations
tgcctagcccctngatatattcgagggactcatggtcactatgaatgacaaaggccttgtgataaaggtagtgacgccatgtcatcaaagcccgcactaaggcatacaactccttatgataagttgaatagctaacggtaggaccacttaactcttcactaaaataagcaattggatggccttcttgcatcaacacagccccaatcccaacatttgaagcatcacactcaatttcaaaagatttttgaaagtttggcaacgcaagtatgggggcattagttagctcttgcttaagaacattgaaagcttgttcttgtttctctccccatttgaaaccaacattcttcttgagcacttcattgagaggtgctgtcaaatgtgctaaaatccttcacacatcgtctataacaacttgataagccatgagaactcctcacctcggtcacagactt

SEQ ID NO: 3891 - DNA, 437 bp, Glycine max
  unsure (1)..(437): unsure at all n locations
agcttganattgatcaacagatgctctcgagaaattcaaatggtcataattggttacacggaagtccgattcatgcgcataatatgccgagacgctcaaaaatgagcaacggaagctctcgagaaattcaaatggtcataacatatcacacggaggtccgattccggcggatagtatatcgagaagctcggaattgcacgacgaaagctctcgagaaattcaaatggtcataacttttaaaacggaagtaagattcaggtgcataatatatccagaaagttgaaattgaacaacggaagctgtcgatatattcaaatggtcataacttatcacacggaagatcgattcaggcgcataatatatcgagacgctcgaaactgaacaacggaagctctcgagaaattcanatggtaataacttttcaaacggaagtctga

SEQ ID NO: 3892 - DNA, 450 bp, Glycine max
  unsure (1)..(450): unsure at all n locations
ggcgccaatctaacaacttcctttaggcttcatctagttaaatactaacacatattaggatagcagttattgtctcaataattctataaactacaactaagcaataagaagagtgtgcttgatatatataattaattttaacgtgtccaaccaaatataaagtagtccaagcttcggttggacatgtattcatagatcaacattttttcttcttctatgcagcaacctacaagctntacaagattagggtgccgaagtttgacaattagtgccacttcatttttgaactcatccaacccttgtccttgtaacatcccaatttttgtaatctatattaaaaaggagtgttatttataaataaatagagttttagaaaaatgatgagattctataaataaataaataaggcgatataattattaattaagataatgatttgagagagaataa

SEQ ID NO: 3893 - DNA, 463 bp, Glycine max
  unsure (1)..(463): unsure at all n locations
tctaaactntatacaagaatgaagctctgataccactttntagacaagtggcctcagaaatcttaagaaggggggttgaattaagatattgcaaactattcccccaattaaaattctatttcactttcaatgcaagttacaaattcccttaaaaataaactcttaaataatgattcaaatagaacaatctgaatataaatataaagcaataataaataaaagattttaagggaagagaaagtgcaaactcggatttatactggttcggccacacctttgtgcctacgtttagtccccaagcaacccgcttgagagttccactatcttgtaaaatccttttacaagttctgaacacacaaggacaatccttcctttgtgttcataattcttttacaacaagagaccctcggtctctcaatcccctttgagaatttagaaagaagagaagaatgaatctctcttg

SEQ ID NO: 3894 - DNA, 439 bp, Glycine max
  unsure (1)..(439): unsure at all n locations
tataaaactaagcttaaggcaatccttctcagttgatgtccacttctacatctattccatatgctgagtttcctacttcaaatgctactgtcaataatacttctaatattgcttcaaattctgatgttacctcttccagtagtgctaatctttggcatgctangttaggtcatcctaatgagcatgtaatgaaaattattctcgaatagtgtaatatttctcaactgaataaaaacatcacagagttttgttcctcttattgtatgggtaaagctcataggttaccctctcacggctcaacttctgtttattcacctttagaattcattttcactgacctatggngaccctcccatgttacctcttatgttggctatacatattatgtttccttcattgatgctttctctangtataaatggatatttcctataaagtc

SEQ ID NO: 3895 - DNA, 448 bp, Glycine max
  unsure (1)..(448): unsure at all n locations
gggtcttaattataaaaagatagatgcttgtccaaaacactgcatgtnngtattgggagatgatgaanaaagtttggatgcttgtaagcattgtggtacatctagatggaaacccaacaagaagaagaaaatagctgcaaaggttntacgttactttccattgaaaccaagattgcaaagattgttcacatgtcgtaagactgcaaaagatatgagatggcatgttttggaagacaataaagatgggttgtaaggcatccaagagatggagaggcatggaagacantttgattaatccatcctgagttttcttcagatcctcgaaatgttcgtttaggccttgctactgatggttntaatcctgctaggaccttgagttctacctatagcatctggtcnagtttcttaattccatataatcttccaccttggatatgtatgaaccaca

SEQ ID NO: 3896 - DNA, 434 bp, Glycine max
agcttggttaatgggaaggccagatatgggtggagtgacaaaagttatagtttgcttcttaaagtagtgcacgatatgcttctagaggaaaacaagttgcctaaaagttactatcaggccgagaagatactgtatagacatgaatttcaagaaatgcccaagtgccctaggtgtggggtatcacgatacaaagtgaaggatgatgcggagtatattagtcatgaaaactcaaacaagggccccccagtgaaggtgttgttgtatcttcccataattccaaggtttaagcatatgtttgctaatagagacgatgtaaaagaccttacatggcatgcagatggaagaaactgcgatggaatgctccatcatccggctgattcctcccactggaagaagattgatcgtttgtatccagatttcggcatagacgcaag

SEQ ID NO: 3897 - DNA, 432 bp, Glycine max
  unsure (1)..(432): unsure at all n locations
agcttgccttccaagaatgatattgcggntatcatgtacacaagtggtagtacaggtctgccaaaggtttgtttcttcgtcaagttttgttaaaggtgtccctttctgtgtgtctgtgaatgtataatctcttattcatatttgcgatttgatgcaaagtgcttttgtccacagtcatgcttgtgaataatgattttgggtgataaaatatcaacaagaaccatatcaagacattgtattaatataatgaaaattttcttgtctgcaacattgagaaccaataggatctccctcagctcagttctatgattccctttgatttgacagggtgttatgattactcatggaaacattgtagcaacaacagcagcagttatgacaattattccaaatcttggtagcaaggatgtgtacatggcctacttgcccctt

SEQ ID NO: 3898 - DNA, 416 bp, Glycine max
tccattgttcaatttcgagtgtctcgatatattatgcgcctgaatcggacctccgaatgaaaagttatgaaccattgaatttctcgagagctacctttgttcaatttcgtgcgtctcgatatattatgcgcctgaatcggacctccgagtgaaaagttatgaaccattgaatttctcgagagcttccgatgttcaatttcgagcgtcttgatatactatgcgactgaatctaacctccgagtgaaaagttatgaccatttgaatttctcaagagcttccgttgttcaattttgagcgtctctaactgtgatgcgcctaaatcagacattcgagttgaaaagtatgaccatttgatttctcgagagctttcgatgttcaattttgagcgtctcgatatattatgcgcctgaatctga

SEQ ID NO: 3899 - DNA, 448 bp, Glycine max
  unsure (1)..(448): unsure at all n locations
agcttcagtggcttagtgaagatgaagaggtaaaagtgactcaacaggttgaggtgtgtctcaccattgggagatataatgacaaggtgctgtgtgatgtggtcccaatggaagcgacccatgtgctgttaggaagatcgtggcagtatgataccaaggcagtgcatgatggcttcaccaacaacatctctttcaagcaagctgacaagaagattgttctcaaaccgttatctcctcaagaggtttgtgaggatcagataaaaatgagagaaaagaaaaagagtgagacacttgagaggaaaaagagtgagacacttgagaaggaaaagtgaggaaagaaaaagagtgaaacacttgagagggaaaagagagaaaacaaaaagagtgaaacacttgagggcaaacagctntatttagcaacaaaaagggaggtgaggagggtgctttg

SEQ ID NO: 3900 - DNA, 319 bp, Glycine max
  unsure (1)..(319): unsure at all n locations
agcttccagatccatttcaggctgcgctagcatcagcactggcattatctgttggcgttttggcgccaccgatagctgctgtgtttataaggaatcacaagattagaatgggagttgttgctgctgcggttagcttggcattgttggtgtttggaggagtaggggcagttcttggaaaaactccggtgacaaggtcttgtcctatggttctggttggaggttgcatggctatggacataacattnggcctcaccaaattgatcggctctgttgatctatgaatgtgattgtttactagtcattcaagtacactcccata

SEQ ID NO: 3901 - DNA, 442 bp, Glycine max
  unsure (1)..(442): unsure at all n locations
tgttaaccatttcaagcaactgcatgagagtgagcacacganaatgatgaaccagatagagtctgctagggggagcaggagggtgaagttggtggccaagtattctatgaaaatggaaaagtataagaaggctgcaagtgatattctcactcccaaagtggggtacggtttggcggatgagctcaaacgggctggtttttgggttcgaacagtgtcggataagccacaagctgcagatcaagcactgcanagccacattgtggatatcatggatcatangcgggttgagtgtgtggtccttgtgtctgatgattcctgatttgttgatgtgataaacgaagcaaagatgcgatgtctgaagacgggtgtcattggggatattgatgaacgtttcttgaagaggactgctgatactgcattntcttgggaggaaattctgatg

SEQ ID NO: 3902 - DNA, 446 bp, Glycine max
  unsure (1)..(446): unsure at all n locations
agcttctcccataagttaaaattagctttcttaggagttaaataagagattttatatatattagtttatggataaactaattttaacttatgagggaagattaatccattttatctttctattttgttattttataagtgctcattgcgaagcttacccaaacagagccatatctaaaatctaatgcattctctttgacatgtntaatctcaacttctggctcacttgcgtttctcaatttttgcagtgtagctcatccatacctgcttgccgataatcgccattaccctttttatctttggaggaaagttatcatggctcactggccaattaaatatcttttagtcccagtttatatatgctcatggctctctatgatccacatgttgggttagtacatagacatactatgcattcgtgtttgattcaactgcttgtgggattat

SEQ ID NO: 3903 - DNA, 439 bp, Glycine max
ttctttgagcaaagcaaaggcttgctcttgtttttcatcccaggtaaatgccacattcttcttcaccaactcattgagaggtgatgcaattgtagagaaagtatgaacgaaccttctatagaagcttgctaacccatggaagctcctaatatctcctacactatttggggtgggccattcttggatggccttgattttctcagggtccacttggatcccatttctaccaactacaaaacctaagaaaactatattatctacacaaaagttgcatttctctatatttgcatagagggtgtttttcctaaggattgaaagaacttgcctgagatgtcctaagtgatcatctaggctcctactgtacactaaaatatcatcaaaataaacaactacaaatctacctatgaaatcccttaaaacattatgcataagcctcata

SEQ ID NO: 3904 - DNA, 380 bp, Glycine max
  unsure (1)..(380): unsure at all n locations
ntacaagagattctaacaatgtcgtgaaatccctgtttatgcacctctngccagcatttttctccagatcccatattctcatgacctcattcttcaagtccagttgggcattaagagagatgagatgattggaacccttgccatctttggtgtccaacctctccttagattacttagggcacaaaccgcatcccttggaagtcctgcttttatgtacaaattggccgcaatagaataagtattccagtccatgacaatgtttggctgagtctccatctctttcaatactctttccactccaccaaaatcagacctcacaccataagaaattatacagatcctggtactgaagttgtctggcaagacttgtgtttgtttca

SEQ ID NO: 3905 - DNA, 438 bp, Glycine max
  unsure (1)..(438): unsure at all n locations
cttccctaattaanaattctaatttgattntaacccanaacccatgattcctttcaaaatgaattcctaaataattatgcaaattaaacttactgaatagaagcaataagcaataataaataaaagagtttaaggaaagagaaaacgcaaactcagatttatactagttcgaccacacccttgtccttacgtccagtccccaagcaacccacttgagagttccactatcttgcaaaagccctctacaagttctgaaccacacaaggacaacccttcctttgtgttcagattactttacaacaagagaccctcggtctcttaatcccttttcagaaataagatgaagagaagaagaaatctctcttgaaagagatagattgaacaatggaacactcaaaataattccttattgaattgaagtgtattggcaaggaattt

SEQ ID NO: 3906 - DNA, 422 bp, Glycine max
  unsure (1)..(422): unsure at all n locations
caatcactacgcatagctccaaactcgaaggtggaggacacatgaacgaaaacacaattcatggggctccgaaaaaggggttgagaatggagaattacactaagcaatcactactcatagctccaaacttgaatgtggaggacacatgaacgataacgcaattcatggggctccgacaagaatgagaatggagaattgcactacgcaatcactacgcatagctccaaacgcgaaggtggaggacacatgaatgaaaacgcaattcatggggctccgaaaagattgagaatggagaattgcactaagcaatcactacgcatagctncatactcgaaggtggaggacacatgaatgaaaacgcaattcatgcggcttcgaaaagattcgaatggagaattgactaagcaatcactacgcatagc

SEQ ID NO: 3907 - DNA, 286 bp, Glycine max
cgacaatcactcttttactctgacgtctgattgagtcctcgaatatgtctagacgctcgaacttgaataccgaagctctgagcacattcgaacgacaataactttttactcggatgtctgactgaatcccgtaatatatcaagacgctcgaaattgattatcaaagctttgagcaaattcaatcgacatataacttctactcggatgtccgattgaatcccgtatatattgagatgctcgaaatcgaatactcaacctctgatcaaattccaacgacaattacttt

SEQ ID NO: 3908 - DNA, 412 bp, Glycine max
tcagcttgatcttctcaatataggacatgcgtgatggccgttgacactataaccacttatagtgccatatgttggatagtcattaatggtacaaaaaaccattgcacgcaacctaaaggtatgctggagattcccatcccacacatctaccccatcttcccacaatgtggtcaagtcttcgatcaacggagtcagatacacgcctatattgatgacgacatgaccaagagcatgggcaatgatccacttgtaggacttggatgacctatgacaatggctagagcaaggaaagccaaggaagctcttcaaaaagtgttgtccatactatctgaatacaagcccaagtttcaaggagaaaagaccaaggttgtgagttgattatggcccatatggaggaggactaaatgactcc

SEQ ID NO: 3909 - DNA, 382 bp, Glycine max
  unsure (1)..(382): unsure at all n locations
ctgttgaattacctttctagttggaaagtcagacgctatagaacctaagataaccagtttggttgacaccattactcttgtgtttaaaacatttgtattttgcacagatgaaaattgaaccttcttttctctaggtcaagtatctntaatgccatggttggaattgcactaagtgcttcctttgttaagctagtttcgtggtatgacaatgagtgaggatacactaatgtgtgcantttgtgtatgtagagtgcaaaaatntctgttcatgcaaacctttaattgataactttgaatggtttttgttgcagcaaccgagtattggaccttatagagcacatggcattggttggagctcanaatggaacaccattagtgtatg

SEQ ID NO: 3910 - DNA, 450 bp, Glycine max
  unsure (1)..(450): unsure at all n locations
caagctctatcctatcttgcaattncctttgaactatttccaccttcacttctccttgtatactctttaccatcattggaggctttctttcataaactacctcaaatggcgtaatgcctattgaatcttgataggtggtattgaaccaagattcagcccacggaagccaaatgacccatccctttggctaatccatgataaagcacctcaagtatgtttccaggcaccgattagtgacttcgatttgacaatcagtttgaggatgataggttgtgctcatcttgagtgttgtaccttgtagtttgaagaattctttccagaacagactcataaacaatggatcacaatcactcacaatagaattgggtaccccatgaagcctaatcacctctcttacaaatatttcagctatgtcttgtattgngtaagggtgtcttaatggaatgaaat

SEQ ID NO: 3911 - DNA, 419 bp, Glycine max
agcttgtgaaatcaatggaatctaagattccgtttgacccaagtcgttcaattctgttcttagaaatgtgacctaaacgcttatgccataatgctcatgagtttgtattatcaattctacgcttagtaccacgtaattgcgcattaaaggattcaacatacgaaactacagtattaagtaaatatagattatcataagccaagagtgaaccagttccaacaatacctgaattgaaagacaacctaaacacattgtttccaaatgaacacaaataacccaatttgtctgaataagaaactgaaaccaaattccgtctaaatgacagcacaacaaaagtgtctttcaaatccaaataaaaattagtacataataataatctaaagttccctatagcttccacttccaccgatttaccatct

SEQ ID NO: 3912 - DNA, 439 bp, Glycine max
agcttcaaccaaggggagatggaccatttcaagtgcttgaaagaatcaatgacaatgcttacaaagttgagctgcccgatgagtataatgttagttccaccttcaatgtctctgatttatctctttttgatgcagatggagaatccgatttgaggacaaatccttctcaagagggagagaatgatgaggacatgaccaagagcaagggcaaggatccacttgaaggacttggaggacctatgacaagggctagagcaaggaaagccaaggaagttcttcaacaagtgctgtccatactatttgaatacaagcccaagtttcaaggagaaaagtccaaggttgtgagttgtatcatggcccaaatggaggaggactaaatgacaccactttgtctcaattttagagtgcttagtttgtctaaataatggcccaatccttg

SEQ ID NO: 3913 - DNA, 447 bp, Glycine max
  unsure (1)..(447): unsure at all n locations
gacactatgaaactcagcttacacaggcaagtgtttcgtcttaattccaaatcacagatatgtcataaattgattntgcaagtcatttcccatcaaatcaaagataatgtgcataatcatcatgggtcaatgggactttccaaggtcgaactttgtaggaaattggttttggttgctctggtctttcccccttcttttttgtgtgagtaggagagcaggtacaaagatttggctagtaacttanacgggcgatcacttcctatcccctcatgtcttaaccaagttactattgttccccctccttcttaatgtttacaacaactctgtacatggttcagacattgtttgttctaaagaacttgtttttccttttctattttccttttgctcttttctattttgtttgatagattttntttggttcccttttctttctttctttctttc

SEQ ID NO: 3914 - DNA, 435 bp, Glycine max
agcttgtaagaagtatagcaatatgggagaatgtttttggttgattgataaggacttagtgatgcaatcctaccccgcaagggcattggctagaagactccaagtagattgggctagagatccaaggaaaggccctagggttctcatgagccttagggtagatttcgagcccatgggctaagtatgagcccgcttatctttgtaaatattagaataggtttttccttcgtctaggccttgtattttggccattctagtagtatagggttttagccttgtatttcggggcattttgagttgtctttgtaataaggacttttttttttattttcatgttttttgtcatgggggtgagcttagctattatagggggtgtgtagctaagctctagcttctcatctcaaggaggtgagcttagctattagagaggtatgc

SEQ ID NO: 3915 - DNA, 403 bp, Glycine max
  unsure (1)..(403): unsure at all n locations
ttcaaatgacaataactgttgactcggatgtccgattgagtcattttataatttgagacgctcaaaagtgaatgcaagagctcttaccaaattcaaatgccaatatacttttactcggacgtgcgattgagtcccgtaatatatgtagatgctcaaaattgaaaacagaagctctgagcaaattcaaacgacaatagctntggactcggatatncgatagagtcatttaataattcgagacgctcaaaattgaatacagaagctgtaatcaaattcaaatgacaataactttagactcgaatgtccgattgagtcattttataatttgagacgctcaaaattgaatgcagacactctaaccatattcagatgacaataacttttgactcggatgtccgattga

SEQ ID NO: 3916 - DNA, 425 bp, Glycine max
  unsure (1)..(425): unsure at all n locations
agcttgcttcagtataataggaagcaccaatataaatatgttgatgcctactattgatatatagcattgaccatacatgaaactagcgagagagaatacaaactgttgataatagtacactccataggtagtgatgctgtgtaaaccactacaacaagaaagcactttaaattatagtattacgtagaaatttctatggttgtgttgatcatgctcgccctcactttanattggcaattggattgtgccacattgaagcttttcacagttctgccatcactggtggtgacttgaaaagagagggattgcccattgaggtatgagtttctctgtcaattttgcccccaatttcttgacatgggtttccaccctggtttggaccctttgatggacactgaattcatatcaccagcttcacccacatt

SEQ ID NO: 3917 - DNA, 461 bp, Glycine max
  unsure (1)..(461): unsure at all n locations
tgcttctacatggagttcatcatccattgccctaacccaacaaacatctttatcttgggaataacatgtagaatagttgttccagataaagtagtagtaagagaaacgtgtccaaaacaggcggcagatcatgagcgagaagggacaaagtaggattgttcctgacataaactttacctggttagcaaggaagatgcagacaagtcagttcaagcacgcagcananatgcacaaatgctcaaggttagaaaaggcagaggctaatgatttttaggtaatgatgcaatcctccctatgaagggaccaatcactagaaccatgagcaagaggctccaagaagatttgactagagctgctgaagaaggccctanggttctcatgaaccttannggtagattctgagcccatgggccaaggttgggtccatntatctttgtacatattagactangatgtcatta

SEQ ID NO: 3918 - DNA, 435 bp, Glycine max
  unsure (1)..(435): unsure at all n locations
tcgcacttgataatggagacacatgaacagcgctaggcaacgacattcatggcgctccgaacaaaggtggagtatggaggattgccttgagggtccgcacttangcaatcatgaaactaagctccaaactcgaaagtggaggacacatgaacaaccctaagcaataatattcatgtggctccgaaaaaggatgagaatggaggattgccttgagggtcctctcttaggcaatcatggaacacagctccaaactcgaaaacggaggacacatgaatganaccgcaattcattcacgtggctccggaacaggatgagaatggaggattgccttgagggtcctctcttatgcaatcatggaacacagctccaatcatggaacacagctccaaactcgagaacggaggacacatgaatgacaacgcaattcattcacgt

SEQ ID NO: 3919 - DNA, 394 bp, Glycine max
  unsure (1)..(394): unsure at all n locations
cgtaagatggacttgaggaaggttactctacctgtcattgtcaacatataagcctaccacgagctctagttactattgactttatcgaggataaaatcaaatgtatgattagtaaatttcttgtcaagaattgaaatccgggtacttatctaagtcctcgatttacttaaatccacttggcaccactatatcctacttgacttgccagctagcattattatataaaaagatgcgggagttttcatcactctctttagctccagaactatcacaaaacaatntaagggtcaacttgatggcatctatctaatccgtcgaggcttctacaaatagcagaatatcattcgcagagacaaggtatgaaattatgagccccctttgtttaactggatgg

SEQ ID NO: 3920 - DNA, 400 bp, Glycine max
  unsure (1)..(400): unsure at all n locations
tgtaggcctaggatcttcttcatcaatggattcctttgctttttagaagatgaatggcagtggaatggagaaggaagagagagaggagatgccacttcaaggagaagatgagtctagaagaagctcaccaccatagaaggccatggctaagagcttggaggaagaagaagatgaatgaagggagaggaagagaagagcacgaaattttatgctctaaaagagctctgaaatctgaagtttaattttcaaatgatcaaagttgcaaaaaatgcacacacatgacctctatttatagcctaagtgtcacacaaaattggaggaaaatttgaatttcaattcaaatttcacttgaatttgaaattgaatttgtggagccaaattntcactaattatgattagt

SEQ ID NO: 3921 - DNA, 385 bp, Glycine max
agcttcatttctttttcactcatgtgtccaagtctttgatgccacacggttgaattattgacaacctcagtaattgttatcatatcctcatctgcaattatgtaaagagatcattgcttctttccatgagccacaacgagattgccttttgttaccttccaagctccatctccaaaagcggtgtaatgccccccatcatccaactgccctatagatattaaatttctctttaaggcaagaatatgtctgacattatgcaatgtccatagggatccactggaagtcttgatgtcaatatcacctcttccgacaatgtcaagagaatttccatctacaagggaaacttctccaaatcttctagacatatagttagacaataaatctt

SEQ ID NO: 3922 - DNA, 424 bp, Glycine max
  unsure (1)..(424): unsure at all n locations
gattcttaagttacctgccgcatgcaagcttggcatccatacctaatgaggattttatgtgttcttaanactggtctctattatttgcttccaaagtttcatggccttgcaggtgaagacncgcacaaacatttgaaagaatttcacattgtctgctccaccatgaaacccccagatgtccaagaggatcacatatttctgaaggcttttcctcattcattacagggagtggcaaaggactggttgtattaccttgctccaggtccatcacgagctgggatgaccttaagagagtattcttagaaaaaattntccctgccttcaggaccacacccatcaggaaggatatcttacgtattacacaactcactggagagagcctgtatgagtactgggagagacttaagaaactatgtgccagctt

SEQ ID NO: 3923 - DNA, 418 bp, Glycine max
tcaacattcaatttcgtgcgtctcgatatgttacgggactttatcttacatccgagtaaaaagttatggtcgtttgtattggctcagagcttcaactttcaatttcaagcgtctcgatatgttacgggactcaatcagacatccgagtaaaaagttatggtcgtttgaattggctgagagctgtaacattcaatttcgagcgtctcgatatgttacgggactcaatcagacatccgagtaaaaagttatggacgtttgaattggctcagagcttcaacattcaatttcgagcgtctcgatatgttacgggactcaatcagacatccgagtaaaaagttatggtcgattgaattaggtcagagattcaacattcaatttcgagcgtcttgatatgttacgggactcaatcatacatccg

SEQ ID NO: 3924 - DNA, 413 bp, Glycine max
agctatgatttcctttgttccggaaacctttcttttctcatgtgcacccaaactcaatctccgggttcgaagacaaccttctttcttcctttgttggcttgtttagcatagcttttatttttcctctcaatttgatctttgactctctcatgaagcttcttcacatagtcccgctttgcttgaccttctttatgcttaaaaacagaaacattaggcataggcaaaagatcaagaagagttagtgggttaaaaccataaacaacttcaaaaggagaacaattagtggtgctatgaacagctctatcgaagcaaattcaacatggggtaaacaagcttcccaagtttttaagttcttcctcaaaactgtcctaagcaaagttcccaaagtcctattaacacacttccgttgccat

SEQ ID NO: 3925 - DNA, 464 bp, Glycine max
  unsure (1)..(464): unsure at all n locations
tgtctccttgcaaggaacttcctatggnggggtgttcaatggcatatattaatcccttgggtgaaatgggaagtagtgtctctctctaaggaggatgggggtctaggaatcaaagatatttctaaattcaatacagctctgatgggtagatggatatgggctttatcttctaatcataatcagctgtgggttagaatcttattgtctaaatatggtggatggtcagatcttagcagtgggagggataaatcttggcagtctcattggtggagggacctccgaaagttatatcatcagcctgaattcagtattatccagcagcagatggtttggaaggtgggaggaggggaaaanataaaattctggacagataattggttggnggaagaatataatcttgaacagcaattcactcagctattcctgataatgagcagcaaacaatacatattaacatgggaatc

SEQ ID NO: 3926 - DNA, 451 bp, Glycine max
  unsure (1)..(451): unsure at all n locations
gtcacctgcggcatgcaagcttctagacaatggttntgtaagttctccattaccttcttagtcatgggttccatcagtccaagcatgattacttcctattcaccattggttcaaggaattccttaatcattctactaatgtatgtagatgacatcatcctgtctggaccaaattctacctctgtgcaggctattcagacccaattgcaatctatgtttcaattgaagatccttggccctttgaaatatttccttggcttagaaatagctaaatccagcagaggtatctcactcgcctagaaaaaatacattggcatgcaaaccttccaatcttncaatggatcccaacttgaagctcaatcttcatgatggagacttacntcctgatccctcaatgtataagagggntaattggtagaaatggttatctgaccatttcacgtnctgatata

SEQ ID NO: 3927 - DNA, 435 bp, Glycine max
  unsure (1)..(435): unsure at all n locations
agcgtagatatggacctgggtgttgcctatttttatcatatcttctgtaatactcatcacctctatcatatctaataatnttcacatttatgtctaattgcccttttacttcattgtagtaaatttctaaggcattcattgcctaagaaatctcaggcagtaagtagacataaccataacgtgaataatcatcaataatggtgataaagtatcattcctttctgaaagaactaacatcaaaaggtccacaaatatcagcatccacaatttcaagaagctgagtgcttcttgtagctcttttctttgtatgttnntgttagtntcccttaatacaacccacacaaatatttagatccataaaatctagataaggaagaatttcattctttattaatcttctcatcctttctctagaaatgtgacctaaacgtttat

SEQ ID NO: 3928 - DNA, 368 bp, Glycine max
  unsure (1)..(368): unsure at all n locations
agctntgtgtattttcgtggagcttacagactatgtcgaggaataatacgactaccttgtatgctgtatggtgggcaaaaagagcaccaaaatgagcccccttggataatcggtctacgaccactaatatcaccgtgaaaccgtgggatgatggcagtcctatgatgaaatcgagggacaaatcttcccatatgcgggaaggtatgggaagaggttatagcagactgacaacctctttgtttcatatttaatctgttggcacatgggacattgcacgacgtaccagcggacatctttctgtatatgtggccaatcaaaattctgtcgtaaacgatgaagtgtctttgatacctctgtgtgaccgtcga

SEQ ID NO: 3929 - DNA, 417 bp, Glycine max
ctcagcttttatttagctgatgaaataattcgggctcttttgcactcgtctaatgacaatagcatcatttctagcactaaattgttgggagttggaagtcatcttctcaattaaattcttggcttcagtaggggtcatgtctcctagggctccaccactggcagcatctatcatgcttctctccatgttaccaagtccttcataaaaatattggagaaaaagctgctccgaaatctggtggtgagggcaactggcacatagtttttttgaatctctcccagtattcatataggctctctccactgagtttcctaatgcttgaaatatcctttctgatggtcgtggtcctagaagcaggaaagaatttttctaagaatactctcttgaggtcatcccagctggtgatggaccgtggag

SEQ ID NO: 3930 - DNA, 416 bp, Glycine max
tagggatggaacacttacttgttggtgatgaataaaagctcatatacggaatcaaaaaatgcgaaaaaggatgaccctagggctgcaaactcgtcaatcccgtgggtatggcttttgaaagggggggaaaagaagtttttgaatgcaaaaacgccccccctttcgtcattcttataatttggtgcaggggtggctctatctgatcctgacactggttaaggaatgatcaagatgaagaagaacataactcatggcttttacttggtaaaggggagatcaggtcatgccatggaagactatcttgttgctcaattcaagctagttgacgacaatgaattgggtttatttgcaatatttgatggccactcacgctacagtgtacctgattactcgatgtctcattagcttgataatat

SEQ ID NO: 3931 - DNA, 301 bp, Glycine max
tcggacatccgtgtgaaaagttatgacgatctgaatttctcaagatcttccgttgttcaatttcgagcttctcgacatattatgcacccgaatcggatatccttgtgaaaagttatgactatttgaattttccgagaatttccgatgtttaatttcgagcgtatcgatatattataagcttgaatcggacatccgtgtgaaaatttatgaccatttgaatttctcaagagcttccgctgttcaatttcgagcttctcgatatgtgatttgcctgaatctgacatccgcgtgaaaagtatac

SEQ ID NO: 3932 - DNA, 293 bp, Glycine max
gctatgcttaacaagccaacaaagggagaaagaaggttgtcttccaacccggagattgggtttgggtgcacatgagaaaagaaaggtttccggaacaaaggaaatcaaagcttccaccaaggggagatggaccatttcaagtgcttgaaagaatcaatgacaatgcttacaaagttgagctgtccggtgagtataatgttagctccaccctcaatgtctctgatttatctctttttgatgcagatggagaatccgatttgaggacaaatccttctaagagggagagaatgatg

SEQ ID NO: 3933 - DNA, 415 bp, Glycine max
  unsure (1)..(415): unsure at all n locations
tcaagaaaatgaactntgttagataaattgtctatgtttctgttttgtggagtactcgtgttcaaaagttttcagtcagatatttctcagagacctgattctcattgtttcataactctcaattttctgggttttctattctgactgtcttttgatatgattgtgttgcttgcaggaaaaagttttgggctcatctgatcctgattctggtaaaggaaagagcaagatgaagaagaacataactcatggctttcacttggtaaaggggagatcaggtcatgccatggaagactatcttgttgctcaattcaagcaagttgacgacaatgaattgngtttatttgtcaatattgatggccactcangtcacagtgtacctgattacttgaagtctcatttgttngataatatcttg

SEQ ID NO: 3934 - DNA, 358 bp, Glycine max
  unsure (1)..(358): unsure at all n locations
tgccgcatgcaagcttctctaaaaacccttaatctctctatgtatacattcataggntnttgtctgttaatcctatgagcaaatcgaggcttcagctgcttgatgtttcttccatgctcattgcttcgtaagcttttgcttttaactcttacaatggtttcctctccttaatctattgaagcatcacagattcacagctgcgttcttttctaatatgtaggaagtatgaggaagttaatccacccggtgttgacaaattctatagcatcactaataacacttatgaaaaggcagaggtaagtaaatatgtcggtccgttattcttctttttttgcttcgctattttccacttacttgg

SEQ ID NO: 3935 - DNA, 444 bp, Glycine max
  unsure (1)..(444): unsure at all n locations
tgccgcatgcaagcttgtccaaaatgcanacaataataattgttttaacggatatccaattgagtattgtaatatatcgagacgcttgtaatggaaaacagaagctcgtagaaaatgcaaatcgcaataacttttaactcggatgatcgattgagtccccgaatatatcgagacactcgaaattgaaagcagaagctctgagcaaattcaaacgacaataacttttgactcggatatccgattgagtcatttaataattcgagacgctcaaaattgaatacagaagctctatgcaaattcaaatgacaantaactttgactcggatgtccgattgagtcattttataatttgagacgctcanaattgaatgcaggagctcttaccaaattcaaatgacaataactntntactcggatgtccgcatgagtcccgtaatatatcta

SEQ ID NO: 3936 - DNA, 418 bp, Glycine max
  unsure (1)..(418): unsure at all n locations
tacttgcggagattcctttatgggaaagaccgataccagctatgttgattcattgtgatagtactgcgactattgaataaattgagaatcgttattacaatggtaagaaatgacagatacgtcgtaagcacaacatttttagagaattactctcaacaggagctgttagagtggatcacgtacgcactgatgataatttagcagatcctttgaccaaaggattagctagagagaaattcaataacacttctaaaagaatgagactattgcccttactatgatgatcattcataatggtagcccgacctaaatgattggagatcccaagaactatggtcaatgggtaataaccaagtacaaagtgatatgagatgaacatngctgtataagtgaaagcagcatgattcctgaagtaaca

SEQ ID NO: 3937 - DNA, 449 bp, Glycine max
  unsure (1)..(449): unsure at all n locations
atggcgggaatggaatggaatgtgttattggggtgtcgcaactgcattcatggacagaagggaaagatggaacagacctgaagtagaattagtggagatcatgcatttaatctgggtagctgaagctggatcaaaatctgcctgaacgtncgcgtggaggttgatggattcgcccaagtacgaaaaatgcatcgtgaaggaggcgtaattggtgataacaggccccaaagtccgaagccactctacgcccaagacgacctcggctccgctcaggggtagtacccttagcgtcactataaacgtatgtccttgtatacagagctgtgtattggcacatagctgattgcactccattactgaaccattacctaccatcactctaagaggcatggngtcttcaacggccaagttcatgaattatcaacgcgaggctgaatgataatatgagt

SEQ ID NO: 3938 - DNA, 454 bp, Glycine max
taaacatgagagcttgcttgaggggtcagaattctatttgactaattgtcacctttgaggaacctgattagctacattaattaagtttttcttcttaatcacgttttttttcatttgaaaaactctaacataagaatttactcgaggagtccaaacctagttccacttgaaatagttggttcgaaagtttttcattcaaaaagtaaaaatgaatgtttccttgtactaaacaaacccttaatcttcccccaaaatttcaacatgaattcacatatcagtaaatataatacatgcataccagatagaggtcaagatagtcaagttgcaattcctgtaatggtttatccaatggctttggcacatcttctggtgcatgatctgaacaccctaaaatatagccaacaaatcataggatcctttcattcagcaccaaacttgtccaaacacatacaat

SEQ ID NO: 3939 - DNA, 331 bp, Glycine max
  unsure (1)..(331): unsure at all n locations
ttaatctctctatgttatacattcatacgnttttgtgtgttaatcctatgagcaattcgacgcttcagttgctcgatggttcttccatgctcattgcttcgtaagcttatgcttttaacttttacaacggcgtcctctacttaatctattgaagcatcacagattcacagctgcgttcttttctaatatgtacgaagtatgatgaagttaatccacccggtgttgacaacatctatagcatcactaataacacttatgaagaggcagaggtaagaaaatatgttgctncgttattcttctttttatgcttcgatattttccacttacttgg

SEQ ID NO: 3940 - DNA, 266 bp, Glycine max
  unsure (1)..(266): unsure at all n locations
agcttggtcttattcgtgcatttgtgcgcaattcataattgccggnacaccacttcaaaacagtgtgtcacaaaggcggaatagaactttaatggatatggctaagagtatgttaatcaattaaactttatctgtatccttgcggatgtataccttgaaaactgccacgtagttgttgaacagggttcctagtaaggtagttccaaaaacaccttttgaactatggacaaataggatacctagtataccgcacctgcatgtttggg

SEQ ID NO: 3941 - DNA, 331 bp, Glycine max
tcggtattctatttcgagcgtctcgacatattacgtgactctttccgacatccgagtaaaaagttattgtcgattgaatttgctcataactaccgcattcaattgcgagtgtctcgacatattacggtactcaatcgcacatccgagtaaaaagttattgtcgtctgaatttgctcagagcttccgtattcaatttcgagcgtctcgagatattacgtgactcaatccgacatccgagtcaaaaggtattgtcgttagaatttgctcagagcttcggtattctatttcaagcgcctcgagatattacgtgactcaatccgacatccgagtc

SEQ ID NO: 3942 - DNA, 388 bp, Glycine max
tttgtgcaagaaccagtccatccaatggaatgatgactgtcaagtggcattcggaaggatcaagcaatgccttatgaatcctcctgtccttttgccgttggtgcccgggagacctcttatcctatacatgacggtgttggatgaatcgatggggtgtatgctggggcagcatgacgattccagaaagagggaacgagttgtctactacttgagcaaaaagttccccgcctgtgagatgaattactctctgcttgaaaagacgtgttatgtcttggtatgggtagcccattgtctaaggcagtacatcctaagccacaccacttggttggtatccaagatggacccagtcaagtacattttcgagaaacccactctcaccagatggact

SEQ ID NO: 3943 - DNA, 437 bp, Glycine max
  unsure (1)..(437): unsure at all n locations
ngactactntggactgaacatattctcggatgaaataatgatcaatgtctatatgctnggatcgttcatgatgagcagggtttgaagcaagacttatagcagatttattatcacaaaatagtatcacaaagggcacatcaacttcatagtaaagaagtaatttgcttaaccaaacaatttcactagtaacagaagacaaggcatgatattcagcttcaatggatgattttcaaacaatgggttgtttcttataatgccaagaaagaaggttgtttcccataaagacacaaaagccagaagtggatcttctggtatcaacacagttggcccaatcagcatcaacaaaggcagtgaggttgagagagttctgagcanggaaaaacaaaccttgtccaggagcaaatttgatatactgtagaagatgataaacaacatgt

SEQ ID NO: 3944 - DNA, 402 bp, Glycine max
  unsure (1)..(402): unsure at all n locations
nntgatttccttgttccggagacctttcttttctcatgtgcacccaaacccaatctccgggttcgaagacaaccttctttctccctttgttggcttgtttagcatagcttttatttttcctctcaatttgatctttgactctctcatgaagcttcttcacatagtccgcctttgcttgaccttctttatgcttaaaaacagaaacattatgcataggcaaaagatcaagaggagttagtgggttaaaaccataaacaacttcaaaaggagaacaattagtggtgctatgaacagctctattgtaagcaaattcaacatggggtaaacaagcttcccaagtttttaagttcttcctcaaaactgtcctaagcaaagttcccaaagtcctattaacaacttccg

SEQ ID NO: 3945 - DNA, 384 bp, Glycine max
  unsure (1)..(384): unsure at all n locations
agcttacaatannatgatacgctcgaattattatcggaaactctcgagaaatttaaatgggcataacttttcccacggatgtccgattcgggtgcataatatgtcgagagccttcaaattcaacaacagaagctcttgagaaattcaaatggtcataacttttcaaatgtatgtctgattcacgcttataatatatcgatacgctcgaaattaaacatcgaaaactctcgagaaattcaaatggtcataacttttcacacgaatgtccgattcgggcgcataatatgtcgagaggctcgaaattgaacaacagaagctcttgagaaattcaaatggtcataacttttaacacggatgttcgattcacgcttattatatatcgat

SEQ ID NO: 3946 - DNA, 460 bp, Glycine max
  unsure (1)..(460): unsure at all n locations
tacggacactttaatctaagctataatgttcttaagaaatagctaactaatgccctcatacttgcgttgccaaactttcaaaaatcttttgaaattgagtgtgatgcttcaaatgttgggattggggctgtgttgatgcaagaaggccatccaattgcttattttattgaaaagttaagtggtcctacccttaactattcaacttatgataatgagttgtatgccttagtacgggctttgaaaacatggcaacactacctttatcccaaggaatntgtcattcatagtgaccatgagtccctcaaatatatcaaggggcaaggaaagcttaacaaaaggcatgctaagtgtgtggaattcctatagcaattcccttatgttatcaaacataaaaagggaacaggtaatattgtagccgatgctctttctcngcgtcatgcattactttctatgcttgaac

SEQ ID NO: 3947 - DNA, 237 bp, Glycine max
agcttctagatgatttatgtctgcgaatcggtcatcctgcgagatgttatgaccatctgtagttctcgagtgctcacgctgtaaattgtcagcggctccacattttatgttctccaataaacatcagagcgagctgtcatgaccattctgatttgctgagagcttccgtatttcaatttccagcgtctagatgacttatgtcacccactcctacatctcattgaaatgccttgacca

SEQ ID NO: 3948 - DNA, 453 bp, Glycine max
  unsure (1)..(453): unsure at all n locations
tgacaaataattntcttaggtagtgtgcaataccccaattattagcttcctgtaaagcactaataaattcttgatcactacctaggaagccttttgcaaaacatgcttccctaaatgtatgatataccagaccgttgactgttctaatgtcactgtaagactgtgcacctttggcagtggatagcatcattctaaggtaaaacagttcaccagctgaaggtgggacccacatgagtctgcctattgtattcccttgttttcttggttgccaacatcttttgcgggcaacataaacaaatcttgagatatattgatgatatgtaagatcccatccataagaatatattntgttagaatgcatccaagctgtgaacatggattcttttattggtgtttttgatagaacttcacctacttgtngatcatctgtccagtaaacatgtntgttgattt

SEQ ID NO: 3949 - DNA, 371 bp, Glycine max
gactaagtgctcaccaacactagatattaatcccttatttggtatcatgtaaacctgttcttctagatcaccattcatgaacgccattttttcatccatgtgatgcagctcaagatcaaaatgagctactaatgccaaaattactcgaagagagtctttcttagatacaggggaaaaggtctctctgtaatcgattccttctctttgagtgaatcctttagcaacaagtcttgccgtatgtctctcaatgtggccttctgagtctgtctttgtttagaagacccatctacatccgatggcgtggacaccagcatgcaactcaacgagatctcaaactcggttagatgccatagaatccatctcatccctca

SEQ ID NO: 3950 - DNA, 392 bp, Glycine max
  unsure (1)..(392): unsure at all n locations
tcaaaccacagcaacacanaatctaggtatccaaaacccctcaatttaatggattttcaaggtttgagaagtgaaattgagaatgagctaaatttgaagcaaactctcacctcacacaagtctataacatcaatttaaacttgttcaaactggatttacgcctaaaatttcaccgaatcaaaatttgactcctcaacacccaaatttaccctagaaatgactctttgttcactttggtcatttgtttttctctctagcacagcccanactttctcattgaaattctgataccaggggacagatgtcgtaccggatgtcacgacatcacgcttcagaacatgcagattatatgtgtccgtatgaccagattaaacaagttaataacacaagag

SEQ ID NO: 3951 - DNA, 417 bp, Glycine max
  unsure (1)..(417): unsure at all n locations
atacggacacttaaaactaagcttaagttgctnggatagcaacttgtttcgggccagcaaatcgtcctgtgatgaaagctccagcaggcttcttttggttgggatgtgtgctctatcacacaagattgcatggtcactagcagccatattctcaatcaattccatggcttcttcaggggtcttcaattttatttttccccctgtagaagcatctaaaagctgcttggattgtggccttaccccgtcaatgaaaatattgagctggatcggttctgaaaatccatgagtaggcgtctttcttagttacccacgaaatctttccaaagcctcactcaagggctcgtctggaaattgatgaaagaatgagatggcagcttttcctttagtagtcttggactctgggaagtatttcttcaa

SEQ ID NO: 3952 - DNA, 465 bp, Glycine max
  unsure (1)..(465): unsure at all n locations
agcttgagagggttatggaacgaacgatagattgtcttatccaaaatanactgtatgtagatagctgaagtcttctttttggctcaaaacgatcaattgctgtgataagtcccttaactcctgcctgacaaagatcttgaaacctcgggccacttgcaaaatcttgaaaatatttgttgatcacgaacaatacaagccggagattgtgctgcaaacgatatcaccatgatttcttaatctcagtataactattactcattccaaagaatagcaacaaacacagcaacaattaatccattcatatccaaagagacagagaaagagtagtaaaaggaatggagatgtaacatatcactgatcttcgaaggcttcttataagcaaatctaanataagagttgaacattccatgatacctttatgaagttgtttctcgcagctcgaccaacctctatagcttttcttac

SEQ ID NO: 3953 - DNA, 378 bp, Glycine max
  unsure (1)..(378): unsure at all n locations
tgtgcattcaatatcctgataagggtgttccatatgttctcaagactgtactaatacatttgctgcccaagtttcatggtcttgcaggtgaagatccttataagcatcttaaggagttccgtattgtttgttccaccatgaagccccctgatgtccaagaagatcatatctttctaaaggcttttcctcattctctggagggagtggcaaaagattggctatactaccttgctcctaggtctattttcaactgngatgaccttaatagggtgttcttggagaaattcttccctgcatctaggaccactgccatcagaaaagacattntatgcatcangcaacttagtggagaaaacttgtatgagtactgngaaagat

SEQ ID NO: 3954 - DNA, 417 bp, Glycine max
  unsure (1)..(417): unsure at all n locations
cctgccgcatcaagcttctaaactttatacaagaatgaagctcttataccacttgttggacaagtttcctcaaatatcttaagaagggggggggggttgaattaagatatcacaaactatttccccaattaaaattttatttcactttctattcaagttataaattcccttaataatgaacttcttaaatactgattctaatggaacaatttgaatatgaatataagacaatcataaataaacgagtttaaggcaagagaaaatgcaaactcatatttatactggttccggcacacccttgtgcctacctccagtcccaagcaacccgcttgagagttccactatcttgtaaacacctattacaagatctgaaccacacaacgacaaccctctcttttnttcacatttctttacaac

SEQ ID NO: 3955 - DNA, 478 bp, Glycine max
  unsure (1)..(478): unsure at all n locations
cactatgaatactaaccttataccgatatgggctcaaaacggcagcaggtatcttcattttctgagtaagcggtctccatggtttgttcatcaattcagtgggctgaacaaaatcatcctctctttcattgacaaaaccaccttcctttggccatatagcattgccatagccataggtgccctttgttcaaagagccacctatcatgatcaaaatctccagtttggctcctcaccagtgctgacttcgttgacttcatcatggacaatctcctctacattctagacattccacttggtggaggaagtagaaggggatgcccactatctatagccacttcatctagctctgtgttctgatatgggtccgcgcatcctgggcatataccacctnctggtcttactgcatttatataacaatctctgcatatcttaaaatgacactcacatggaaaaatatcatcacacagttcatcgctc

SEQ ID NO: 3956 - DNA, 393 bp, Glycine max
  unsure (1)..(393): unsure at all n locations
caaaatagtgatatttatattactcaattgtaagactatatttgagttctattcaactcgaccatcaacacattggtaaatattttacttaaatgggttcagtagatgtttagtcttctaatatttcaaaacttagattttaatccttgaataagagcttaactagtcaagtctcaacttcttttttgttaaaattntagtctttcaacaaaagcttgaccagatccttaaactttntaaaaattatattctaaatgattaaatagaagtttaaatctcattattttatttatttatctatctaataagaggttagaagttaaaaattaaaatcttaaaaaccttgatgaatactttgtgttcatagaatacagacctttaacaaaaaagaaa

SEQ ID NO: 3957 - DNA, 419 bp, Glycine max
actaagcttgaggtccactagatgccttagttaacctggtgacccatctggccatgaataaaaaatctgcacttgtcgccagactctgtggtttatgctcatttgtcgaccaccacacagacctttgcccttctatgcaacaatctgaagcaattgaacagcctgaagcttatgctgcaaacatctacaacagaccttctcaacctcagcagcaaaatcaaccacaatagaacaattatgacctctccagcaacaggtacaatcatgggtggaggaatcatcctaaccttatatggtcgaatccttcacaacagccgcaacaacaaccttattttcaaaatgttgctggcccaagcagaccatacgttcgtccaccaatccagcagcgacaacagcaacagccgcagaaacagcaaaca

SEQ ID NO: 3958 - DNA, 395 bp, Glycine max
tatgtattcaatttcgagcgtctcgaaatattattcgactcaattggacatccgagtaaaaagctattgacgttagaattttctcacaccttctggattctatttcgagcgactcgatatattacgtgactttatcgaacatgcaagtaaaaagttattggcgctagaatttgctcagagcttctgtattcaatttcgagcgtctcaatatataacgcgaccctattggacatccaagtaaaaagttattgtcgatagaatttgctcacagcttctgtattctatttcgagtgtgtcagtacattatgggactcactcaaatatacgagttgaaaggtgtcatcatttgaatatcctcatagcttcctgactgcatttcgagtgtctcgatgatg

SEQ ID NO: 3959 - DNA, 467 bp, Glycine max
  unsure (1)..(467): unsure at all n locations
tctaagcttgatctaacaatggtttatgagtttattgtccaatgtatagagatgtcagactttataaaagctctaatatgaaataacctattcccacccataatgggtataggtaatccatgatctcaaaccaaccgaaattgacccaattagtttggttcaaatatttttagcttaggtcaaacccaacacaacccaatcctgcctgttcaatttacaagccaagtaagatgttttgtttttttaactcgtgacccaacccgtaacatataattaaattcattatatatataattaaattattaaacacaaaacactatatactttttctaacataatgtattaaattaaatcaattatactcttttctgtttcagttgttctttttattgttatcttgatnttgttttctcatgctaatacaatattttatttctatctaaaataaaaatattgtattagcattg

SEQ ID NO: 3960 - DNA, 451 bp, Glycine max
  unsure (1)..(451): unsure at all n locations
tgtgctgcaaacatttataatagacccnctcagcagcaattccaacaacatcagactaattatgatctttcaagcaacatatacaatccaggttgcaggaatcatccaaatctgagatgggcaagtcctccacaacaaaaacaacctgtccctcctttccagaatgctgctagtccaaacaagccatatgttcctcctccaatgcagcaacaacagcaacaacaacaaagacaactagaacctgaggctcctcctcaatcttccttagaagagttagtgaggcaaatgaccatccaaaatatgcaattttagcaagagacaagagcctccattcagattctgaanaatcagatggngcagatggctactcagttgaaccaagctcagtcccaaaattctgacaaatggccttcacaaactatgcagaatctgaaaaatgtgagtgtcatca

SEQ ID NO: 3961 - DNA, 408 bp, Glycine max
tctacactctatacaagactgaagctctgatacttcttgttatacaagcggcctcagatatcttaagagggggggttgtattatgatatcacaaactattccctaattgaaaattctattgtgattataacccaaatcccatgattccttttagaatgagttgctagataattattcaaattatacttactgaatagaaccgataagcaatgataaataacagagtttaacggaagaagaagtgcatactgagttttatactggttcggacgcacccttatgcctacgtccagtctccaaacgacccggttgagagttccaccaactcgcaaaaaattctttacatgttgtgaaccacacaaggacaacccttcctttgtgtcagattgattacaacaggagaccctc

SEQ ID NO: 3962 - DNA, 400 bp, Glycine max
  unsure (1)..(400): unsure at all n locations
tctanactntatacaagaatgaagctctgatacttcttgttatacaagtggcctgagatatcttaagatggggggttgaattaagatatcacaaactattccctaattaaaaatactattttgattatagcccgaatcccaagattgcttgtacaatgaattactagataattattcaaattagacttactgaatagaaccagtacgcgataataaataaaagagtttaagggaagaagaagtgcaaactcattttatactggttcggtcgcacccttatgcttacgtccagtccccaagcaacccgcttgagagtgccaccaacttgcataagatactttacatgttctgaaccacacaaggacaacccttcctttgtgatcagattgatttacaacaa

SEQ ID NO: 3963 - DNA, 416 bp, Glycine max
acattgtttgaatgacaactattgtagttggacagctatcacatagtttgtccaccttggtatgctttatgttcctattgggtataggtttggtatgctttatgttcctattggctatagctttggtgctagaatattcaatttggaggtcacaagaggaggatcttcatatggtgttggagtttttgctggagaaggtacaagacaagccagtgaaatggagctggagcttgcagagtatcatggccagtatacatgaaattagcgcataaaagctagattggattctgtgactacaaattcatttagcgcttctagctaggtcagcattctagtctggttcaagcttttgacctctagatcaaacttcttaatgcactcaaacaaaccattggtgacctcacaatcaaactcca

SEQ ID NO: 3964 - DNA, 435 bp, Glycine max
agcttaagctctttcaactgcacaaggctcttaatatttgaagagtatccttgtggaaccttcacccgatgaagacactgacaaaaacttatcttctcctttttggacaaagtatggtaggctaggggcaagtaaattttcttcccatcagaccttggatgcaactgtgatcgtatgcccatatcagctagatcttgacgggtattcaagccatccttcgtcttgccttgaatgttaagaagcgtcccaattacactgccacaaacatttttctgcagatgcataacatcaatacaatgtgtaacgtcaagataagaccagtacggaagatcaaagaaaatggacctcttcttccatatgcaactcttacttttatccttcctttgggtcatcccaaatacagtattcaggtgttgaacccgctcatatacctgc

SEQ ID NO: 3965 - DNA, 344 bp, Glycine max
agcttcaacattcaatttcgagcatctcgatgtattacgggactcagtcagacatccgagtaaaaagttattgtcgtttgaattagctcagagcttcaaaattcaatttcgatcgtcttgatatattacgggactcaatcagacatctgagtaaaaagttattgtcgtttgaatttgctgagagcttcaacattccatttcgatcgtcttaatatattacgggactcaatcagacatccgagtaaaaagttattgtcgtttgaattagctctgaggttcagaattcaatttcgagcgtctcaatatattacgggactcaatcagacatccgagaaaaaaatatt

SEQ ID NO: 3966 - DNA, 316 bp, Glycine max
tatcctgacgacggtttttcatatgcactcaagactggactaatacatttgctgtccacgtatcatggtctctcatgcgaagaccctcataataatcttaaggagtttcatactgtgtgtttcaccatgaagccccctgatgcccaggaagatcatatctctctaaaggctcttcctcattctcttgagggagtggcaaaagattggttgcactaccttgcttccaggtccattcttcgctgggatgaccttaatagggtgtttttggagaaattcttccctacatctacgtaccactgttcttataaaagacttt

SEQ ID NO: 3967 - DNA, 397 bp, Glycine max
agcttgagggaaaacttgatgccttggtcatcttactaactcagctcgccatgaatcagaaatctgcacctgttgcaagagtctgtggtctatgttcttctacagatcaccatacagatctttatccttctttgcagcaatctgtagtccatgagcaacctgaagcttatgttgcaaacatttataatagaccccctcagcagcaaaatcaacaacagcagaataattatgacctttcgagcaacaaatacaatccaggttggaggacaatcatccaaatctgagatgggcaagtcctccacaacaacaacagcctgtccatcctttttataatgctgctggtccaagcaagccatatgttcctccttcatgtagcagtagcagcaacaacaacaat

SEQ ID NO: 3968 - DNA, 417 bp, Glycine max
  unsure (1)..(417): unsure at all n locations
tgatagganaaacacacttgggaaattcactagtatcttggaattacaagacacaagcttgtgtagcactatccactacaacagcaaaatacattgtagttggaagttgttgtgctaaaagtctctagatgaaacaacaacttgaagactttggggtaacccttgatcccattcctctaaaatgtgacaacataagtgctattaatctgtctaacaatccggtcatgcattctagaactaaacatatagagattagacatcattttctaagagatcatgtatcaaaaggtgattggtgcattgagtttgttgatagtgaacatcaactagctgacatctttattaaacctctttctggagataggttcttctctattagaaatgagctacgtatcctacatggatcgagtatcgaaa

SEQ ID NO: 3969 - DNA, 410 bp, Glycine max
catgcaagcttgcaacagacttcatcaaatgctaatctatatcctcgcatataaatcgctaagcggtttggcaatcacttgaaatgtctattatgaatcgcctattaaaaccatcatgttactagacaagctatctcacgtcctaatgacactttacgtggcaggaggtgagttatttcaacgacattaatctaagatttgcctacctgaatctcccttacaataattttatgccccaacacagtgccttcatgaaccataaaatgacatattttctagttaagcaccaagttggactctacacatctctgcaacaccctttgcaaattccatggatcgcactctatagaagagccatagagatacaaatcatccataaaacattcaatacacttcttcaccatatctaa

SEQ ID NO: 3970 - DNA, 107 bp, Glycine max
agcttcaacatcagaccacgaccagcgtgctggatctacttcacatggacttgatggggcctatgctagttgaaagccttggaggaaagaggtatgcttatgtgtgt

SEQ ID NO: 3971 - DNA, 317 bp, Glycine max
ctttagatcatcacttactccaagcaatacacactgtttgtttttgtcatccacccttgtccctttctgatcacgtacatggacatgacttccgcacccaaatactttaatgatatctactttaggtttgattccactccacatctcttctggagtttcatctttcactgtcaatgtcagacctcttgtgagaacatgaactgcccattttcgcatcttctggccacaaaacctctggcacttgtttgtcacaaagcatgcacccgaccatatttataatggttcgatctttacactccgctacgccgttttgctgt

SEQ ID NO: 3972 - DNA, 388 bp, Glycine max
agtcttgatgcaacatatggagaggttaatgttacaacgagatgatgcgctccatgagaggttggatcaaatggagaatagagatcataatgaagaagaaaggaggagaagagggaatgatggtgttcctagacaaaaccgaattgatggtattaaactcaacattcctccatttaaaggaaagaatgatccggaggcctacttggagtgggagatgaaaatagagcatgttttctcatgccacaactatgaggaggaccagaaggtgaagcttgccgccacggagttttccgactatgctcttgtgtggtggaacaagctacaaaaggagagagcaagaaatgaagagccaatggttgatacatggacggagatgaaaaagatcatg

SEQ ID NO: 3973 - DNA, 432 bp, Glycine max
agcttcttggcagttgtggttggaattctgttctttcttttgaccagcttttctgatccagggacaataaacactgagaatgttgctcactatatttctgcttatccctatgataatattatttattcagagaaagaatgctccacttgcaaaattccaaagtgagtttgctactgttgctgaattttgttgaaatattggttaaatctatctataaaactgtcttaatttttttatgcagacctgctaggtcaaaacactgcagcatttgtgatcgctgtgttgctcgatttgatcatcactgtggatggatggttagcaatctttgaaattctccctctttataagattgcttgcattgttctcatttaatatacatcatgtgtttttttggagttgtgctgaaagttgttttactcacagaacaattgc

SEQ ID NO: 3974 - DNA, 401 bp, Glycine max
tgtagggttacagtctcatgactgtcacgtgcttatgcaacaattgttagtcgtggctatacgagacatcttgccaaacaaagtcaggttagcgataactcgcctgtgcttttttttacatgctatatgtagcaaagacattgatcctgccaagtttgatgagttggaaaatgaggccgcaattatattgtgccacttggagatgtatttatcccctgctttctttgacatcatgattcacttgattgtgcatctggtcacagaaatcaaatgttgtggtcctgtttatctactgtggatgtacccgattgaccgatacatgaagatcttaacagggaatacaaagaatctatattgtccagaagcatctattgttgagaggtacattgtagaagaagcca

SEQ ID NO: 3975 - DNA, 421 bp, Glycine max
  unsure (1)..(421): unsure at all n locations
tgtattctgatatggtttgattcacgaaagaagaaatatatgtagtttaaaattgcttctaaatttggtgctaatggtgcaatgttattttggtcaccagatgaacacctatctctcaatggatggtgtcctctatcgcaagccacactttgaacagcttttcaaggaatctggcaatttcagcaagaactttcaaacaagtaagatgtaaccatcctttgttcatcactttgtttactaattttattcaaccgcaatctcattgagtacaaattcatatgcacctgtcactttctattgacttggctaacatgttatgttgttttcatgaccataattgcggcacagcaaagtcttctgataaacaaaatgagacggtatgnttacgatccagnctaaacacatatgttgcattttgagt

SEQ ID NO: 3976 - DNA, 339 bp, Glycine max
  unsure (1)..(339): unsure at all n locations
tagtcataaagccctcttctagtaatagacttaagctgaggagattacttttcatacctggtacaaagagtacatcactgatgcaagaatgacctctatcctttgttttgataaggaccttcccaattcctttagcactcaaagttctatcatcagcaaatttgacttgactcttcacagattgatcaaggttgagaaaccactctcttcttcctgtcatatgagttgagcaacctgtgtctatgtacgaacatttatcacttgccccttcaatntgantanntaccattaacagtacctgttcagtgtcatcatcttcttcctgagccaattatgcat

SEQ ID NO: 3977 - DNA, 421 bp, Glycine max
tgcttctacattataggtcatgaaaatgatggttatgctacaattgaaattcttgcccacctactcattaatgaatatgatgatccaatcaatgctatagtcaaatcaacattcccagacttagaccagcaccacaataatcctcaattcttcaaatctagggcaatactagcttcaacaaatgaaacagtagaacagatcaatgattatgtactatccttcattccacgtaattatctcattagttatttaattgacatttctttagtcaaaaatatgcccactgaaattggaattctgcaaaccatatgtgaccacatggaatatctacgctctgattccgttgaccacatccagttggccaacttattgtatcaagcttaaaattagaagtactataatgctcttaacgaacctcgac

SEQ ID NO: 3978 - DNA, 433 bp, Glycine max
agcttcaacaacaacctggaactgatcctttatcagcccacagcagcttagaacccaaccaataatgctgcaaggtcgacacaaattccccttttcagtgaaccagtttttttgcccagtcctccctgcagcagcaacaattagcaaaccaaaacaccaaataaccaaccattgacgaataaacatttcactgcttcaaatttctatctaacaaattcaaaagcccgagctgcaatttctatactctaaacaaaactgtaacctcaatttaaaatcaaatgcactctcaaccgtaaatgcaacaatcagcaaacctaaacgccaaatcaccaacgaacaaacatttcaccgtttcaaatttcaatctgcaacagcaaatagcaattgcagccacaacactacaatttcaaaagcctcactgtaattgctataa

SEQ ID NO: 3979 - DNA, 451 bp, Glycine max
  unsure (1)..(451): unsure at all n locations
tgtaatcgattacacatatactgtaatcgattaccagagcagattttcagaanatattctcaacagtcacatctttttatgtggttcttgaatggctatcaaaggcctatatatatgtgacttgagacacgaatttgcgaagagtttttcagaacaaaaaggtcttatcctcttaaaaagcaaaatcgttttatcctcttacaaattccttggccaaattacttgtgattcaataaggaattatttgagtgctcaaattgttcaatctatctctttcaagagagatttcttcttctcttcttcttcattctgaaaagggattaagagaccgagggtctccttgtaaagaattctaaacacaaaggaaggattgtccttgtgtgtctagaacttgtcaaaggagtntacaagatagtggaactctcaagccggttgcttggggactggacgt

SEQ ID NO: 3980 - DNA, 367 bp, Glycine max
  unsure (1)..(367): unsure at all n locations
ttacgtgacactatgaatctaagcttaatttttgaaagttttagctttcgcaattaaagtaatatttgagaacaaaaaanaacaatcaaaaataaaaattgttaccttaacttcctcttnctctatttctaattatccaagttttttacttatccatgcataggttttttactgaagggtattattataagtatttatataactatttttttaattaaaattagagttttactctggtgaagtgtgtaatatttattgtctttattgtgcgagttactaaatgaaactctaattttagtttataaacattataaaaaacatttaaggtgctactcttacgttntataaaaagataaatagaatagat

SEQ ID NO: 3981 - DNA, 374 bp, Glycine max
tcaaagtccaccccaagaaggacattagaggattctatgttgccatggattaaggatgaaacttgatggatgtaagcaagtccttgtgctacatgttctgctattttcaagcatgatgtccaatgcaatggttttgccctcgctgatcttgaacctgggcataataatcatcatcaaacatcaattgggcaataactgatagcatgtttgacgtggccgtgaggtgagtcaaaattaattttaatttcatggtagatgtgaaacacattattttggaaaaatcatggtgacaacgattcttttttatcagatgatgctgattatgaggtaactaccatgattttaatggtatacaaacatgctatggaactgat

SEQ ID NO: 3982 - DNA, 456 bp, Glycine max
agcttcaacatcataccacttccagggtgctggaactacttcacatggacttgatggggcctatgcaagttgaaagccttggaggaaagaggtatgcctatgttgctgtggatgatttctccacatttacctgcgtctactttatcacacaaaaatcacacaccttcgaagtattcaaggagttgagtctaagacttccaagagaaaaagactgcgtcatcaagagaatcaggagtgaccatggcagagagtttgaaaacagcaagtttactgaatactgcacatctgaaggcatcattcatgagttctctgcagccattacaccacaacataatggcatagttgaaaggaagaacatgactttgcaagaggctgctatggtcatgcttcatgccaaagaacttccctataatctctgggctgaagccatgaacacagcatgctacatccacaaca

SEQ ID NO: 3983 - DNA, 435 bp, Glycine max
tattggagatgtgctacaggaaatatgtccaaacagtggacaaatcatttagcaatggtagaactatggtataataccaagtttcatacaaccacccaaatgacactttttgaggcctcatatgggtatggacctacaagtcctaatttaatagacaagggagaaactctaattgaggcagtagattacactgtgaagacaagagagcagattggaagaatgttgcaagacaaactcagtaaagctcaagagagaatgaagatgtatgcagacaagaagaggatagacaaagagtttaattctggagatcttgtgtacttgaagattcaaccatgcaagcaacactccttggcaaatacatactttcacaagctattggtgaggtattatggtccctacaaggttattgacaggatatggaaggtagcatacaaa

SEQ ID NO: 3984 - DNA, 452 bp, Glycine max
  unsure (1)..(452): unsure at all n locations
agcttaaggattcttagggaactactagagacatcactatcactgccaaactacacacatcagcctgcttagaggtaagggatgagtttatcgcaattgaggttaaaatgaacatatgtagtgatgtagatccatgtgcagcttgtaggccttggatcttcttcatcaatgaagttttttgcttcttgaagatcaataaaaggggaatagagaaggaagaaagacgattagagatgtcacttcaaggagaagatgagtcaagaacaagctcaccatcaaaagaagccatggataagagcttgaaggtaggatgagatgagtggagggagaaggagagaacgagcatgaaattntatacctcanatgaggtctgaactttgaagtgtaaatctaaaatgatcaaagttgaaaaaagtgcacacacaaggcctctanttatagcctaagtgaca

SEQ ID NO: 3985 - DNA, 447 bp, Glycine max
  unsure (1)..(447): unsure at all n locations
agacttaacatcagaccactttcagggtgctttaactacttcacatggacttgatggggcctatgcaagttgaaagccttggaggaaagaggtatgcctatgttgttgtggatgatttcttcagatttacctgggtctactttatcagagaaaaatcacacacctttgaagtgttcaaggagttgagtctaagacttcaaagagagaaagactgtgtcatctaaagaatcatgagtgaccatggcacagagtctgaaaacagcgagtttactgaatactgcacatctgaaggcatcattcatgagttctctgcagccattacaccacaacataatggcataagtgaaaggaaaaacatgactctgcaagaggctgctagggtcatgcttcatgccanagaactttcctataatctctgggctgaagccatgaacacagcatgctaca

SEQ ID NO: 3986 - DNA, 446 bp, Glycine max
agctttgatgcaacatttggagaggttaatgatacaacgagatgatgcgctccatgagaggttggatcaaatggagaatagagatcataatgaagaagaaaggaggagaagagggaatgatggtgttcctagacaaaaccgaattgatggtattaaactcaacattcctccatttaaaggaaagaatgatccggaggcctacttggagtgggagatgaaaatagagcatgttttctcatgcaacaactatgaggaggaccacaaggtgaagcttgccgccacagagttttccgactatgctcttgtgtggtggaacaagctacaaaaggagagagcaagaaatgaagagccaatggttgatacatggacggagatgaataagatcatgaggaagcggtatgtgccggctagttactcaacggacttgaaattcaagctccaaaaac

SEQ ID NO: 3987 - DNA, 440 bp, Glycine max
  unsure (1)..(440): unsure at all n locations
tcacagtccaccccaagaaggacattagaggattttaggttgccatggattaaggatgaaacttgacggatgtaagcaagtccttgtgctacatcttctgctattttcaagcatgatgtccaatgcaatggttttgccctcgctgatcttgaacctgtgcataataatcatcatcaaacatcaattgggcaataactgatagcatgtttgaggtggccgtgaggtgagtcaaaattaattttgatttcatggtagatgtgaaacacattattttggaaaaatcatggtgacaatgattcttttttatcagatgatgctgatattgaggtaatcaccatgatttttaatggtatncaaacatgctatggaactgattggtcccccacacaccaagaagttaggtcttttgcatagaatactatagaattgaaattttgaat

SEQ ID NO: 3988 - DNA, 459 bp, Glycine max
  unsure (1)..(459): unsure at all n locations
agcttcaacatcagaccacttccagggtgctggaactacttcacatggacttgatggggcctatgcaagttgaaagccttggaggaaagaggtatgcctatgttgttgtggatgatttctccagatttacctgngtctactttatcagagaaaaatcagacacctttgaagtattcaaggagttgagtctaagacttcaaagagaaaaagactgtgtcatcaagagaatcaggagtgaccatggcagagagtttgaaaacagcaagtttactgaatactgcacatctgaaggcatcattcatgagttctctgcagccattacaccacaacaaaatggcatagttgaaaggaaaaacaggactntgcaagaggctgctagggtcatgcttcatgccaaagaacttccctataatctctgggctgaagccatgaacacagcatgctacatccacaacagag

SEQ ID NO: 3989 - DNA, 439 bp, Glycine max
  unsure (1)..(439): unsure at all n locations
agcttcaatgtacacatacaactaaataacaattctcaaccaagatgagatacatctacctacttcagnttgtaaagcatcacgaactgctgcaagtaagctatcacgagacgtgcttgcataaacctacaattcatgccacatgcgtgagaaaatttaaaacataataaattataactaaatagcacaacaaaatcttacatggatggggcatccatcactaaattcaattgcaaacatctgtggctcttcagcaaaccgaacaagagcagttactgaagataacggacgaacagtaacagcctgcaaacatctagtaaaaattctcaacacttgacataacacttctcattatgagtaagactcagctttcatagacatatanatgcattaataagagagtggttgcattaacaacacgtaaagccaacataaaact

SEQ ID NO: 3990 - DNA, 415 bp, Glycine max
  unsure (1)..(415): unsure at all n locations
atgcttaaaacagaaacattatgcataggcaaaagatcaagaggagttagtgggttaaaaccataaacaactttcaaaggagaacaattagtggtgctatgaacagctctattgtaagcaaattcaacatggggtaaacaagcttcccaagtttttaagttattcctcaaaactgtcctaagcaaagttccaaaagtcctattaacaacttctcgttgcccattcggttgtgggtgacaagtggttgaaaataacaatttagtgcccaacttgctccacatagtcctccaaaaatgcaaatcatcaagcctaggtataggatgcctatatttaatggtgatgttattaagggctctacaatcagaacacatgcgccatgtcccatcctttttanggaccanaatcactgggacag

SEQ ID NO: 3991 - DNA, 429 bp, Glycine max
tttctttgagcaaagcaaaggcttgctctagtttttcaccccaggtaaatgccacattcttcttcaccaaatcattgagaggtgatgcaattgtagagaaattaggaacgaaccttctatagaagcttgctaacccatggaagctcctaatatctcccacactttttggggtgggctattcttggatggccttgattttctcagggtccacttggaccccatttctaccaactacaaaacctaagaaaactatattatctacacaaaaggtacacttctctatatttgcatagagggtgtttttcctaaggattgaaagaacttgcctgagatgtcctaagtgatcatctaggctcctactgtacactaaaatatcatcaaaataaacaactacaaatatacctatgaaatcccttaagacatgatgca

SEQ ID NO: 3992 - DNA, 461 bp, Glycine max
  unsure (1)..(461): unsure at all n locations
agcttcaaccaaggggagatggaccatntatttgcttgaaagaatcaatgacaatgcttacaaagttgagcttcccggtgagtataatgttagttccaccttcaatgtctctgacttatctctttttgatacagatagagaatccgatttgaggacaaatccttctcaagagggagagaatgatgaggacatgaccaagagcaagggcaaggatccacttgaaggacttggaggacctatgacaagggctagagcaaggaaagccaaggaagctcttcaacaagtgttgtccatactatttgaatacaagcccaagtttcaaggagaaaagtccaaggttgtgagttgtatcatggcccacatggaggaggactaaagggcgccacttcgtctcaattatagagtgtttagttggtctaaataatggcccaatccatgtaaagttggctgaccaaaaatat

SEQ ID NO: 3993 - DNA, 435 bp, Glycine max
  unsure (1)..(435): unsure at all n locations
agctngccttgccccttggatatattgaggttttcatggtcactatgaatgacaaattccttgngataaaggtagtgttgccatgttttcaaagcccgtactaaggcatacaactccttatcataagttgaatagttaagggtaggaccacttaacttttcactaaaataagcagttggatggccttcttgcatcaacacagccccaatcccaacatttgaagcatcacactcaatttcaaaagatttttgaaagtttggcaacgcaagtataggggcattagttagcttttgcttaagaacattgaaagcttcttcttgtttctctccccatttgaaaccagcattnttcttgagcacttcattgagaggtgctgccaatgtgctaaaaatcttcacaaatcgtctataaaaactngctaagccatgaaaactc

SEQ ID NO: 3994 - DNA, 427 bp, Glycine max
  unsure (1)..(427): unsure at all n locations
ngatcttntagttttntatctttaatctttaatccgcgaatgaactattcaagtttgtaattcgaactttaattatcttttaattcgttcctaaagatagatcgccaaatctgttgctaactgcacaataatctgttaaagatataacagatttatgtgtccagtatttcgggcaggatgtcctggacattgtatccgacatcgtggatcctgcacaatctattaaagatataacaaatttatgtgtccagtattttcgggcaggatgtcctggacattgtatccgacatcgtggatcctgcagcttcaattcttcatttgacattttatcttgccttgtgcattgtgcagcccgatctgattcttgacataatgttagacatcatgtgcagcaactccagcttntcttcaatgtctaagtgcttat

SEQ ID NO: 3995 - DNA, 448 bp, Glycine max
agctcgtgcaatcagtatcctgataaggatgttccatatgttctcaagactggactaatacatttgttgcccaagtttcatggtcttgcacgtgaagatcctcataagcatattaaggagttccatattgtctgttccaccatgaagccccctgatgtccacgaagatcatatctttctaaaggcttttcctcattctctggaaaaagattggttgtactaccttgctcccaggtccattaccagctgggatgaccttaagtgggtgttcttggagaaattcttccctgcatcaaggaccactgccatcagaaaagacatttcaggcatcatgcaacttagcggagagagcttgtatgagtactgagatagattcaagacattgtgtgctagctgtcctcaccactatatatctgagcaactgcttctgcaatatttctatgatggac

SEQ ID NO: 3996 - DNA, 467 bp, Glycine max
  unsure (1)..(467): unsure at all n locations
agctnttcactcggagatctgattcaggcgcataatatatcgagacgcttgaaaatgaacaacggaagctctcgagaaattccaatgctcattacctttaactcggaggtctgatttaggcgcctaatatatcaagacgctcgaaattgaacaacggaagctctctagaaattcaaatggtcataacttttcactccgaggttcgattcaagtgcatgatatatccagacgctcgaaattgaacaatagaagctctcgagaaattcaaatggtcataaccttaaactcggaggtccgatttaggcgcataatatatcgagacgctcgaaatttaacaatggaagctcttgggcaattacaatggtcataactttcatctcggaggtccgattcgagttactaatatatcgagacaatcgaaattgaacaatggatgctctcgagatatcaaatggcataactttaac

SEQ ID NO: 3997 - DNA, 451 bp, Glycine max
tcaagaataatggcctcagcaaacttcttattcccagaaggaaattcgataaataggctctctatttttaatggagagggttaccactactggaaaacccgaatgcaaattttcattgaagcaatagacttaaacatttgggaagccatagaagttggaccttatgtacccaccatggtggctagaaatacaacaatagagaaacctagagaagagtggtttgaagaagaaagaagattagtgcagtacaatttaaaggctaaaaacattattatttctgccctaggaatggatgaatattttagggtttcaaattgtaagagtgctacggatatgtgggacactctacaagttacacatgagggaacaactgatgtcaatgcaattttcccaacaggggcctcatcattcacagtcgggcccgccttctccttctcgcctatattcgcct

SEQ ID NO: 3998 - DNA, 421 bp, Glycine max
tagcacttggaacccagacccttcattgactagcttgtttatgctgggcagagggaatgcgtctttggggcacgccctattcaaatcaatgtagttggtgcacatttgtcatttgtcgttggcctttattaccatgatgacattggcgagccaagtagaatacctaacttctgttatgaagctatcattaaggagtttgtcgacttcttctttgatggctttacgtcgatattctctcatattccttttcttctgtgatattggattggcctggagacaaatagcaagtttgtggtagattatgctgggataaattctcggcatgtcagctgactaccaagcaaaacaatccgtattcctgtgtaacacgtcgatgatgcaccagtgctcatggcttgtgacgttcttattgagccgcgtg

SEQ ID NO: 3999 - DNA, 413 bp, Glycine max
  unsure (1)..(413): unsure at all n locations
ntgagaaaattcaaacgacaataactttttactcggatgtctgattgagtcccgaaatatatcgagacgctcgaaattgaataccgaagcgctgagcaaacttaaacgacaaaaactttttactcggatgtctgattgagtcccgtaatatatcgaaacgctcgaatgtgaatgtagaagctctgagcaaattcaaacaacaataactttttactcggatgtctgattgagtcccgtaatatatcgagacgctcgaaatggaataccgaagctctgagcaaattcaaacaataataactttttactcggatgtccgattgagctcccgaatatatcggaacgctcgaaattgaatgtagaagctctgagcaaattcaaacgacaataactttctacctcgatgtctgattgag

SEQ ID NO: 4000 - DNA, 401 bp, Glycine max
atccttaagtcacctgcggcatgcaagcttctacattcaatttcgagcttttcgatatattactggactcaatcggacatccgaggaaaaagttatcgtagtttgaattcgctcaaggcttcggcattccatttcgagcgtttcgatatattacgggactcaatccgacatcacagtgaaaagttattgctgtttgaatctggtcagagcttcggcattccattacgagcatctcgatatattacgggactcaatcagacatccgagtaaaaagttattgtagtcttaatgtgctcagggcttctgtattccatttcgagcgtctcgatgtattacgggactcaatcagacatccgagttaaaagctattgtcgtgtgaatctgctcagagctcctacatt

SEQ ID NO: 4001 - DNA, 463 bp, Glycine max
  unsure (1)..(463): unsure at all n locations
tactaagcttttaataanaatatgagataaattacatttttatttcgataaatagatatgaaattatttttaattnttttttttttgaaaaaggtcagtatccatatctctctaacattataaatagaagcatcaacttgaggcaacatgcattagacacatactaaaaaagtttaagtctaattttagacatgaagactagaaggagaatttatcctttagagtttcattcatcaaataattgatatagattggtttgtgaatatacttagagtcttcacactatatttgaagaaaaattttactacttaaagaatatatatccgggtatacaaatctatttttttctatgtattatcattggatatcttgaatacaaaataaatcctaattcttttatgtaaatattaggaacacttttatgtaactactaactatcatgcatgtataaatcaacactata

SEQ ID NO: 4002 - DNA, 398 bp, Glycine max
tcctgttgttgttgttgctgaaggaactcaagttaagacttttgaagagattcgatacaccgttcactatgtccaatgcgttgttgctgagctccaaagaagtgttgagaaccctagccatggtcttgccagcctcgttggtcgtgttctcgaacccatccaaacatgtctgttggtgagcgagagtaccggcgatccagaccttgagatcataggcgtaatcgttcaacttgtttagttcaaactcttccaacttgcgaacggattggtgcatgtcatcgacagcgtaacctagaactctcttgcagatgtccatgcgctgtttgttcatgtcgtcggtggcaagatcgtggtagagcgtacagtattttatatgctctgcgatctcttcggccgtg

SEQ ID NO: 4003 - DNA, 443 bp, Glycine max
  unsure (1)..(443): unsure at all n locations
tagcccttaagccagtgacatgttgaagccaagtaacagaatgaatcaaatcttcaatgccaaaacctgcagcaagttttgatggttttttaaccactgatactaaattttcttggtctttgcaattctcgccaaaggcagcccttgaagcaattgtgtaaattgatgtaagtactgcttcagtgaggttgatggnggatcctttctttgaatcaatccatttgacaagattgaagagctcatcttctctaattggctggaatgagttgacgcgttttaggcttaaaagctccaatgtgcatatttttcttagctggctccaataatttccatagccagcaaaagctatacttgtggaattgtaagacattatctcaatagctagaactctaggccttgtggcaaagttaatgtcatgggttctcatcactctcctagcacac

SEQ ID NO: 4004 - DNA, 439 bp, Glycine max
  unsure (1)..(439): unsure at all n locations
agcttgagtacactatgaacgcacaccctatcctgatacctcaagactccatcagttcccactctaaaactactctctctccctgcgactatggactctaactgggctgacaagaatgggtcaaacttctgaccctcacggatctcgctcaaaagttcgctggtgactctcaacatacccaacttaatgctactagaggtgatctcacatgccaaactcatgtctctaaactgctctaagaggcccaactctctaaccatcaaagcagacatttgaagggattttctacttaaggcgtcagctactacattggctntacctggatgatagctaagctcanaatcgtaatccttaaggaactctaaccatctcctctgcctcatgttaagctctttctgatcaaacacatatctaaggctcttatggtcactaaacacct

SEQ ID NO: 4005 - DNA, 405 bp, Glycine max
  unsure (1)..(405): unsure at all n locations
tgatgattgcctatgggcatataaaacaaccttcataacacccattggcctctccccgtttcaaatggtgtacggaaaagcatgccacctacaagggtagttagaaataaaagcttattgggccatgaagttcctcaactttgactctacaacatgtagagagaggaggaaggtaaagctacaggaacttaaagagatgcgcctcaacgcatatgaatcatccaagctctacaaagaaagaaccaattggtaccatgaaaaatgtagaagcaagcttcatgatgatgaatcaaatttgattcaagttgttttgatgataacaaagatgatgaaaaaaagcccaagagaatgatttcaagattgagtcaagaacaattcangagtcaagagaaatttgatatcaag

SEQ ID NO: 4006 - DNA, 423 bp, Glycine max
  unsure (1)..(423): unsure at all n locations
agctnttatatataggaggtgagttcctactatctctacactatcctcacctctcaatgcgctgttgaagaagaacgtggcattcacttggggtgacagacaagagcaagcctttgcttcgctcaaagaaaagctcacccatgcacctgttctagctcttcctgacttttctaaaactttagagctagaatgtggtgcctctggagtgggtgtgggagctatattgatgcaaggagggaacactattgctttatatagagaataccttcatggtgccaccctcaactaccccacctatgatatagagctgtatcccttaataagagccctgcatacttgagaacattaccttggtttcaaggaatctgacattcatagagatcatgaatcacttgattacattagatggcacagcaagttaaa

SEQ ID NO: 4007 - DNA, 449 bp, Glycine max
  unsure (1)..(449): unsure at all n locations
tggagggcgacaatctccaatcatacggaacagcaattattgcattagcttctatgccaaattcaatacaccacttaatccattctttccaaactgatgaaagaggtcctgccatttaaacatgtacatgatacatcagcaaaccataaagtacaaaaactacagcaaatacaggacaaaatcatatttgacaaattgacacggcataaagaaacacacctgttatataacctggatcaagttctgtaatgccagacagaccactatccggacgggacttgcaatcaggatgatctgtctggttgtaaggatccaacaccatgcacttaagccagcaattgacagcagaaagaagctgcaaaacattaattctcagtttctcacataccacactnttaactntntaaatcgcagctcattagagctaatttatacacagcaggagatat

SEQ ID NO: 4008 - DNA, 354 bp, Glycine max
  unsure (1)..(354): unsure at all n locations
tactaagcttgaatcgatacacatatactgtaatcgattaccagagcttatctttagaaaatattctcaacaatcacatctttttatgtggttcttgaatggctatcaaaggcctatatatatgtgacttgagacacgaatttgcgaagagtctttcagaacaaaaaggccttatcctcttaaaaagcaaaatcgttttattctcttacaaattccttgcccaaaacacttgtgattcaataaggaattatttgagtgctcaaattgnttaatctatctatttcaaaatagattncttcttttcttcttcttcattctgaaaagggatcaagagaccgccggtctcttgttgtg

SEQ ID NO: 4009 - DNA, 423 bp, Glycine max
  unsure (1)..(423): unsure at all n locations
tgtcaaagaatccaacctctcatggtagaagcaaacacatataaactaggtttcactatcttanggatcaagtgaacaaagagaaactaaaagtggagtactgctgcacatttgatcaacttgctaatattttaaccaaacccctcaaaggggagaagtttaaaatgttaagggatagaattggcttgatgaacttacgagatcagaattaagggagggtgtgaaagcttaattctgtttttgagtggtgtatatataattgtacattggatataagagagtaacagaattttaaaattctgttataagtgcctaccctaantgtgaaaggttgttactctgttttgcttgtataaaaagacatacatgcatcttaataatgaggattattcattctatcatgttctcagtctttagcgttat

SEQ ID NO: 4010 - DNA, 381 bp, Glycine max
ttcaattcttttggaagttcatcagttgatttggcttcttctggatgatcttcattgcttcctttccctttccctttggaatcttgtccatgaatatgcattatttctaaagattctgcaacatcatctaaaatatcctttctcggagaaatagcattagactcatcaaaggaaacatgaatagattcttcaatagtcatagctcttttattatgtattctataagctttactatgcaaggaatatccaaggaaaattccttcattagacttagcatcaaattttcctatgttttctttaccattgtttaatacaaagcatttgccaccaaaaacatgaagatgtgaaatgttgggttatctagcactaaacaattcatat

SEQ ID NO: 4011 - DNA, 386 bp, Glycine max
  unsure (1)..(386): unsure at all n locations
agcttgtaggccttggatcttcttcatcanaggagtcctttgcttcttgaatatcaatggcagcggaatggagaagaagaggagttgagaggagatgccacttcaaggagaagatgagtcaagaagaagctcaccaccatggcctctatttatagcctaagtgtcacacaaaattggaggggaaattgaatttctattcaaatttcacttgaatttgaaattgaatttgtggagccaaaatttcactaattatgattagtgaattntagctatggttcagcccactaatccaagatcaagtccaagattctccactaagtgtgcttaggtgtcatgaggcatgtaaagcatgaaggatgtgcacaaagtgtgactatatgatgtgg

SEQ ID NO: 4012 - DNA, 268 bp, Glycine max
  unsure (1)..(268): unsure at all n locations
tgtgctcattctggtatgtgtacattaactactgtattggcgctagngctcatactggatacggtgatgaagcttggaatatcttcaattcgatgcccctacgatatggcattcaacctttggtggatcattatgcttgcatggtgggcgtgcttaactgagctggtactctattataaacagcaaaattcgtgtctgagataccactcgaaccaagtgctcaagtttggggtgctctgctacaccgagcctttgtttatggtggtgt

SEQ ID NO: 4013 - DNA, 309 bp, Glycine max
tgcttgtacgccctggatcttcttcatcaattgattctttgcttcttgaatatcaatggcagcggtatggagaagaagaggagttgagaggagatgccacttcaaggagaatatgattcatgatagaatctaccacccttgcctctatttatagctctaatgtcacacaaaattggatggaaatttgaatttctattcaaatttcacttgatattgaaatcggatctgtggagccaaaatttcactaattatgattagtgaagtttagctatggttcagtccactaatccaagatcaagttcaagaatc

SEQ ID NO: 4014 - DNA, 447 bp, Glycine max
tctaagcttgctacccaaggaaccatcaagaaattacttgtgaatgagagccatgagggtgggctcatgggccactttgggatagacaagagccttgtcttactcaaagaaaagttctattggccccatatgaagaaagatgtgcataggctagtctagggtgatgcctcatgggctatacacacccttacccattccatctgcaccttgggtagacattagtatggactctgtccttgggctccttagaacccaaagaggtgtagactctaactctgtggtggtagataggtttagcaagatggcacactttataccatgccacaaggtggatgatgcttgctacatctcaaaactctatcttactggaagtgtgagactccaatggttgcctaagaccatcgtgtcaaatagagatgattagttccttgccccttctataaaaca

SEQ ID NO: 4015 - DNA, 412 bp, Glycine max
agcttatgttgcacacatctacaatagacctcctcaacctcagcatcaaaatcagccacaacaaaacaattaagacctctccagcaacaggtacaatcccgggtggaggaatcatcccaaccttagatggtcgaatccttcacaacaacaacaacaacaacaacagccttattttcaaaatgttgctggcccaagcagaccatacgttcctccaccaatacagcagcgacaacaacaacagcaatagccctataaacagcaaacagttgaggctcctgcgcaaccttaccttgaagaacttgcgaggcaaatgactatgcaaaacatgcagttttaacaagagaccagagcctccattgatagcttaactaatcaaatgggacaattggctacacagttgaatcaacaacag

SEQ ID NO: 4016 - DNA, 262 bp, Glycine max
  unsure (1)..(262): unsure at all n locations
ctcaactcttattaatgggagagaaatgttcatctagagcatacaagtccctaatattatcaaatcctaaaattagagctcctacggagcaaaacaatgtgtgtctcctagagagggcatcagctaccacatttgactttaccttgttgtatttgataacatatggaaattgctctaggtactctaccccactatgcatgccttttgcttaacttgctntgacctctaatgtacttaagtgattgatgatcactatgaatga

SEQ ID NO: 4017 - DNA, 443 bp, Glycine max
tgatgatatggttgttagacaagtggcctcagatatcttaagaagggggggttgaattaagatattccaaactacttccccaattaaaaatctatttgacttttttttaattgagttataaattcccttaacaatgaacttcttaaatattaattcaaataaaaaaatttgaatatgattataaagcaataataaataaaggagtttaagggaagagaaagtgcaaactcatatttatactggttcgaccacacccttgtgcctacgtccagtccccaaataacccgcttgagagttcgactatcttgtaaattccttttacaagttctaaacacacaaggacaatccttcctttgtggtttagaattctttacaacaagagaccctcggtctcttaatcccttagagaattagaaagagaagaagaatgaatctctcttgaa

SEQ ID NO: 4018 - DNA, 435 bp, Glycine max
  unsure (1)..(435): unsure at all n locations
tgtatnntgtggattcactttgatctcaactntaccatatggaaaaacattagtctgcacaaaaggaccaatccactttgacctcaacttaccactcatgagtccgagcctagagttatacaataaaactttntgtccaaccacaaagtccttcttagccatcaagctgtcatggaacttcttggtcttctccttgtagaatttggaattctcataggcttctaaacggatctcatttagctcacttagttgcaacttcctttcttctccagcctggtccatagagaagttgcaagtctttacagcccaatagactttgtgctctatctctacaagaagatggcatgccttgccaaaggcaacccgataaggagacattcctatgggtgctntgtaagcagtcctatgcgcccaaagagcatcatctagcctagt

SEQ ID NO: 4019 - DNA, 214 bp, Glycine max
  unsure (1)..(214): unsure at all n locations
ggaatcggacatccgtgtgagaatntatgaccatttgaatttctcaagagcttccgttgttcaatttcgagcttctcgatatgtgatttgcctgaatcggacatccgcgtgaaaagttataccacgcgaatttctccagagctttcgctggtcagttttgagcggctcgatatgtgatttgcctgaattggacatccgtgtgaaaagttatgac

SEQ ID NO: 4020 - DNA, 447 bp, Glycine max
  unsure (1)..(447): unsure at all n locations
gtgatcatcttggattgactatagaactaatctctaattttagactctgacatactgaacttgttnttacctccttcaagaatgcgtttcttaaaaatgaaatttgtgttatcctctaaaaacttaattagtatgtgttgttgattgagtcactttttttaaaaaaaaatactttcggctaaaactacttaaccagttatttttactttcaaattactctccttgttaatttttaaccgttgcattttagggaaaaaaaacttggttatgtttatctatcattcataaagaataatatcacattaattatttatttattaattatatattcttgcttatctcttaatcttaattaatttatatatgtatttatcgtgggataaaaagaaaaaagttaaataataagaaattctataactattttagtgaaatcaaaaaaattaatta

SEQ ID NO: 4021 - DNA, 426 bp, Glycine max
  unsure (1)..(426): unsure at all n locations
gtgcaacttaagcatggaaagaagatagtctacactaggcatcaaatatttctcaaagaatatcacccatatcgattgtaaaaagctcttaatggaagtccaaagtctggattttccctgatacccttatcgagaaatgaactttatgagcaggtgaaggacatacatactatctttggaaagacccaaaataaagatgcaaataagacaaacatatgaaagaagatgtcgatattttcaatcttccatactantctgtcctagatgttagacattgtattgatgtgatgcatgtggagaaaattttttgcgatagtttaatcaacacacttcttaacattaaaggcaagacaaaggataacttgaatgctcgtcaagaattcggtgacatgggtagtgagacatttaagatacttatttggagac

SEQ ID NO: 4022 - DNA, 444 bp, Glycine max
  unsure (1)..(444): unsure at all n locations
gctcgccaccacggagttgtccaactatgctcttgtgtggtggaacaagctacaaaatgagagagcaagaaatgaagagccaatggttgatacatggacagagatgaaaaagatcatgaggaagcgatatgtgccggctagttactcaagggacttgaaattcaagctccaaaaactaacccaaggcaacaagggggttgaggagtatttcaaggaaatggatgtggtcatgattcaagcaaagattgaagaagatgaggaggtaactatggctcgatttcttaatggtttgactaatgatatccgtgatattgttgagctacaggagtttattgaaatggatgatttgcttcacaaagcaatccaaggagagcaacaattaaaaaggaaaggagtggctaagaggagttntaccaactttggttcttctaattggaaagacaa

SEQ ID NO: 4023 - DNA, 425 bp, Glycine max
  unsure (1)..(425): unsure at all n locations
agcttnccaagttttaagttattcctcacaactgttttaagcaaagtttccaaagtcctattaacaacttccgtttgcccatcggtttgtgggtgacaagtggttgaaaataacaatttagtgcccaacttgctccacaaagtcctccaaaaatgcaaatcatcaagcctaggtataggatgcctatatttaatggtgatgttattaagggctctacaatcagaacacatgcgccatgtcccatcctttttanggaccaaaatcactgggacagcacaaggactcgtactatctcttacccaaccttngctaatgagttcatccacttgtctttgaatctctttggnttctcgtgaattacttctataggctggcctattggcaaagacgctccggaatgagatcaattgatgctcaattccctc

SEQ ID NO: 4024 - DNA, 419 bp, Glycine max
  unsure (1)..(419): unsure at all n locations
tgccaagtgtttntatggttcatttcanatattggagcatattggcaaagtggcttacaaactccaattaccggaagggtctcgaattcattctgtttttcacagctccgttctcaaaccattccacaaattgtctgaagattcgatttcccctgtggcattacttgaaacagaagttgacaaccaacctgtgatcacacctcttgctattattaatactcgttgagatcactctactgctgaaccccgcttgatggtactggttcaatggacaggcctgtcccctgatgatacctcatgggaagattgggctagtttgaaagctgattatcaccttgaggacaaggtgtttttagatggcataggggatgataggaaaggaaccatggcctaacatgatattactgtggatgttaatg

SEQ ID NO: 4025 - DNA, 409 bp, Glycine max
  unsure (1)..(409): unsure at all n locations
agcttcaccatgtcttgggcaactctaagaggctctctaatcaatttgaaggatgaaccactgggcttgtccacttcagttttttgtgaaagaaaaggttctaatgacagtggatttttgttccatcaccatattatcttatttttggtaggaaatagctgttgaaaatgataagaatcttgttgaaatcctagaaaacttgaatccaatagatgttgttaaatacatgaatttttcagtgcccccaagctggtgctatagctacattttcangcacaacacatgacaacttntgtggaaaatcaatcttagagttaagatatgaagcttatgttatgatggcaatatgttgtatcaaatcaatctgcacatctgctagcctatcttggaaaaattgatgccacaaata

SEQ ID NO: 4026 - DNA, 345 bp, Glycine max
ctatataatatattgtgaagataaataataaaacaagcatattttgaataggttcaaataaaacatacaatactaaaaatgaataatatactaaattacataaaacatgatccccttctttgaactgaaagagctttcttggcttgtcataataacttttatgtctgtcttgtgacattttgatctatccactaatcatcttaatcttatttgaagctttgttggctatctttggacctaagatcaaagggtttctagtaccataccatcataatgaggttcttcatcttcttccatatatacaaagccttgtatggagtcatttctattctagaatgaaaatta

SEQ ID NO: 4027 - DNA, 358 bp, Glycine max
tccgttggttcaatttgagagtctcgatatgtgatgcgcctgaatcggacatccgagtgaaaagttatgactatttgaatctcccgagagcttccgttgtccaatttctattgtctcgatatattatgcgcgctgaatcggacctcagtgtgaaaagttatgaccatttgaatatcacgagagctttcattgttcaatttcgagcgtctcgatatgtgatgctcctaaatcggacattcgagtgcaaagttatgacccatttgacttcttgagcgcttgcgttattctatgttgagcagcttgatatatgaagcacctgaatccggcatccgactgaaaagttatgaccatttgaatt

SEQ ID NO: 4028 - DNA, 369 bp, Glycine max
  unsure (1)..(369): unsure at all n locations
agctttccgctcggatgtccgattcangtgtatcttatattgagacactcgaaattgatcaatggaagctctcgagatattcaaatggtcataactcttaacaacgtggtctgattcaggcgcataaaataacaagacgtttgtaattgaacaacggaagctcgagagaaactcaaatggtcataacttttcacaccgaggtccgactcaggcgcgtcatatatcgtgatgttacgtattgaacaccggaagctctcgagaaattcaaatggtcataacttttcactcggatgtccaattcacgcacatcacatatctatacgttcgcaatggaacaaccgaagctcttgagaaattcaaatggtcata

SEQ ID NO: 4029 - DNA, 451 bp, Glycine max
  unsure (1)..(451): unsure at all n locations
ngccatnntgacgtaaatcattgttcacaatttattcctgatcaaaagttcataagtcctacattccttttggcaaatggaagtataaatatttcccactctacacatcttgtacattattcaaattctcatcactaactccacataaaaacaaatttatcactacataacagcaaattatctccaagttccattcttcaatgaatcattttgcaagatctttacctgattcctcatcaactttcttctgcattttcctctccttgcaatcagaaaagtaaatcatgcacgacagccatttcagggtatttaacacagcgaggagcccaatntgtacaaatatcccataccctcctttatagcatccaagggagacacatgacaaccttaaacaaagtcccaaagcaaagaatacaagcatcacaagtagtcctctcttctgattacctct

SEQ ID NO: 4030 - DNA, 394 bp, Glycine max
tttactcggatgtccgattgagtcctgttatatatcgagatgctccaaattgaaaatagtagctcctagcaaattcaaaccataataactttttactcggatgtccgattgtgtcccgtagtatatggtgagtgctcgaaattgaaaacataaggtctgagcaaattcaaacgacattaactttttactcagatgtccgattgagtcccgtaatatatcgagatgctccaaattgaaaatagaagctcctagcacattcaaaacataataactttctactcggatgtccgattgagtcccgtaatatatctagacgctcgatattgaaaatagaagctctgagcaaatccaaacgacattaactttttttctcgatgtacgattgtgtcactta

SEQ ID NO: 4031 - DNA, 430 bp, Glycine max
  unsure (1)..(430): unsure at all n locations
agctngactaggtcttcatgttgctccccatatctctaactatccnccatttaaacatgacttgttctcctcctttctttttcatttttcatagaaaatttgatagatttatagatataatatatttgctcttatatctatatcttacataatattttgattaaatataattaaattctaattatatgaatttatactcacaagttaaaacatcacactcacactaacaatttattaaaaaattcaaaaacaacaaattaaaaattatgaaaaacagaaaataattgatattaataattttatccaaatttaattctgaattaacataaacaataaaaatttgacagatttatacatatatatctgctcgtataggtatatcttaaaactaaaacacattacagatcttaatccaaataatcaatacact

SEQ ID NO: 4032 - DNA, 430 bp, Glycine max
ctcaagcttctcgatatgttatgcgtctgaatcggacatgcgagtgatatatcatgaccattttaatttcccgagagcttccgttgttcaatttctagcatctcgatacgctatgtgcctgaatcggacatgcgagtgaaaagatatgaccatttgaatttctcgagagcttgcgtagttaaatttctagcgtctcgatacgctatgcgcctacatcgaacatgcgagtgaaaagttatgaccattttaatttctcgagagattccgttggtcaatgtcgagcgtctcgatatgttatgtgcctgaatcggacatgcgcatgaaaagttatgaccattttaattgctcgagagcatctgctgttcagattgtagcgtctcgatactctatgcgcctgaatctgacatgcgagtgaaaagctattaccatt

SEQ ID NO: 4033 - DNA, 372 bp, Glycine max
  unsure (1)..(372): unsure at all n locations
gagaggctaatgaaatatctagatgacgcgctccatgagaggttgtattatatggagaatagagatcatcatgaagaagactggaggagaagagggaatgatggtgctcctacacaaaaccgaatcgatggtattaaactcaacattcctccatttcaaggaaagaatgatccggacgcctactcggagtgggagatgaaaatccagcatgtttctcatgcacaactatgacgatgaccatacagtgaagcttgctgccccggagttctccgactatgctcttgtgtggtggaacaagctacaaaaggagagagcaatatatgatgagcccatggttgatacactggacagagatgaanaagatcatgagga

SEQ ID NO: 4034 - DNA, 445 bp, Glycine max
  unsure (1)..(445): unsure at all n locations
cttggtactccaatgtatctccactagatntttttaactctaccagatggaagactggggtgatctcaaaaatctctgcatcgatacccaatggcccttttcttccttccttggaaccttccaacttgaacgaacccccatctttctttttcactttcagacgaagacggcctgcaaatttttccaacttggagatgatgattgaggctggcttgtcggatgtaaaccgctcttctttctttcgatcggtctcctcgaacaaaccagacaagtcaaaacctgaggaataggagatgatgtctaaagcatttaaattattacaaggctctgtagtttttgccggttcaataggatcttcattctcacaagctccaaatactccatcagcatcgagaggagccaggtcttcatcttcattctgagtaatggtaggcttctctaaccc

SEQ ID NO: 4035 - DNA, 322 bp, Glycine max
  unsure (1)..(322): unsure at all n locations
cggtacttaactcctcaacatggcagaaagtgaaatgaaataaaacaatgaacaaaccttttaatgtggctccatgtagagcttgtacgccttggaccttcttcattaatggtgtcctttgcttcatgaagatcaatggtcacggaatggagaaaaaggaaaggtgattggagatgcaacttcaaggagaatataagtcaagaacaagctcaccaccataagaagccatgaataagagcttgaatgttngagaagatgagtggaatgagagggagagaaatgaatgatattttgggagataagagggagaaatataaccact

SEQ ID NO: 4036 - DNA, 461 bp, Glycine max
caagcttacaacatctagatctaagtggaaattctcttcgcggagttatcccttctgatgtacggaatcttacaagcttacgacacttagagatctaatcttcaattcttttcgtggagaaatccattctaacgtagggatgcttacgaggcttgcaacatctagatctgagtggaaattctcttcttggagaaattccttctgaatgagggaagcttactgccttacgatatctagatctaagttataatgtggctattcatggagagatcccttatcactttaaagacctctcacaactgcaatatctttgtcttggagaacataatcgtttcggaccaatcaccttgcggcgtgggaatcttgctatctttcatactcttacacttgaaggcaattctgatcttacaattaacgatgcacagtggctatcttctctctcttttctaacactctgacct

SEQ ID NO: 4037 - DNA, 419 bp, Glycine max
cgagttaaccatattagattgcccccagtttaagtctctccatcttagaacttctaagtttaaaagtttcagacttgatggacctcttccaacgatttggccagaatcccatttcaaccttagccatgccatgcttaatttcagacttggaccaagctgtgctgacttcaaggctcaatatttcaaccaaacactgttgacaataaagaattgtgaagctctcactttatgtgagtggacttttcaggtatgttcttaatttctatcatttctcgtctactattgctcatttaatgcaattatatatctggccaatttacaacttgagcttaattttacgcgctaatagaaagacattacaataacttatcatacatgacacaacataatggaaatgggaatgcttgcacctctctata

SEQ ID NO: 4038 - DNA, 454 bp, Glycine max
cgacccttacaagtcagtttagtcaatggtaaagctaacttggagaaaacttctatgaatctccggtagtatcctgctaagcccagaaaactcttaatctcaacaacggatttaggactctcccactaaagaacgacttctatcttagagggatctacagctatacccccttgagatatcacatgccctaggaaactaactgtctctaaccaaaactcacacttggacaacttagcatagagttgtcggtccctaaaggtatgcaacacaattcttaaatgttcttcatgttcctctctagtcttggagtataccaaaatatcatctatgaatactaccacaaaactattaaggtaagggtgaaagactctattcatgtagtccataaacatacctggagcattagtcacaccaaagggcatgactagatactcatagtgaccataacgggtcc

SEQ ID NO: 4039 - DNA, 426 bp, Glycine max
cttgaagaaagaatgggaacgggtgaaatagatggaggatgttgttcctttctttctatcattaagggtacctcaatcagcatctacagcagaggattgcgtggtctaaatggccaaaacagtgaaggagcaactggggaaagatgatcctatgttttcggcggctgctgaagccatggaagagtgggtcaagctctggaagtcagttagatctgcttgaagctcccgaacttgaagactctcgtatgactggaggttattgccttattggcttctatatttctctattttatttaactaatttatatctgccttttcttcagactgtaagaactaagcttacattttacctgacacatttagactactggctgaataaaatgagtacttatcggccttgtgacaattgaataaatgctttgtctt

SEQ ID NO: 4040 - DNA, 452 bp, Glycine max
  unsure (1)..(452): unsure at all n locations
ttcttgaganaacttccttgagaagcttctttgaganaacttccttgagaagctagagcttagctacacacacccctctcataactaagctcacctccttgagaagcttccttaagaagattcctgaagaagctagagcttagctacacacacatctctaatagctaagctcacctccttgagatgagaagctagagcttagctacacaccccctataatagctaagctcacccccatgacaaaaaaagatgaaaatacaaaaaaaaaaagtccttactacaaagactactcaaaatgccccgaaatacaaggctaaaaccctatactactagaatggccaaaatacaaggcccaaacgaaggaaatacctattctaatatttacaaagatnagcgggctcatacttagcccatgggctcanaatataccctaaggctcatgagaaccctag

SEQ ID NO: 4041 - DNA, 446 bp, Glycine max
  unsure (1)..(446): unsure at all n locations
tgatatttagtgagttgaaaagtaacctcccttnttttattaactttaacacacatacatatatacacaatacaaggcttagagataagacagcttgatgggacattacaatgctgtcttctgaaacaagttaaacataaagctagaagcaagcatgtacacacataatttaacagattgaaatgggatgcataataattaattaggccaaacattgacatctatttttttatactatttatgttgtgtattggattagtgtagtactactagcacaaactcaaaccaataaggctattgtctactgttaagaactttgggagaactgcaccacaaaagctggccattttagttggagggctcaaggcctgattagaatcccatacttncaacctgggactctcaagtttcgtaccttccaagtggatcctaatatcccacaacgc

SEQ ID NO: 4042 - DNA, 365 bp, Glycine max
actcagcttatatatatcgatatgctcgaaattaaacatcggataacttttctcacggatgttcgattctggcgcataagatgtcgagaggctcgacattgaacaacggaagctcttgagaaatctaaacggtcataaacttacacacggaattccgatttagacaaatcacataacgacacgctcagaattgaacaacggaagctcttgagaaattcaaatggtcataacatttaactcgaatgtccaattatggcgcatcacatatagtgacactcgaaattgaacaatggaagctctcgtgaaattcataatggcataactttctacactgaagtccgattcatgctcataatatatcgata

SEQ ID NO: 4043 - DNA, 375 bp, Glycine max
  unsure (1)..(375): unsure at all n locations
ctcctccaactgcgcaaggctcgatacatanggagagtacacttgtggatccttcacccgagcaagactctgacaaagacttatcttgtcctttttggaaaaagcatggctagctggcggcaaggaaatatactctccatctgacctcggatgcacactatgatcgaatctcccatatcagcttgattatgacgggtgttcaagccatccttcgccttgccatgaatgttaaagagcatcccaatcacactgccacatacagttttatcctaacgcattacattcatacaatgtctaacgtctagatcataccatgcctgctgattaataacagaggacctcttcttccatatgccaccataactgttatactta

SEQ ID NO: 4044 - DNA, 438 bp, Glycine max
  unsure (1)..(438): unsure at all n locations
ggtgtatcactntccactgcagaaggcaagtatattgtagcaggaagttgttgtgctcaaagtctttggacgaagcaacaacttgaagactctggagtagaccttgatcacattcctctaacatgtgacaacacaagtgcgatcaatctaactaaaaatccggcatgcattcttggactaagcatagaaataaggcatcattttcatagagatcatgttttaaaaggtgattgttgaattgagttcatagatagtgagcatcaactagcatacatattcactaaactactttctagagataggttctttttcaatagaaatgaactaggcatcttacgtgcttctagaatagaatgacattttgtctagtgtatattatctattgcatattgcaatccatatctattgatatctctggataagtcttagtttggtgat

SEQ ID NO: 4045 - DNA, 447 bp, Glycine max
  unsure (1)..(447): unsure at all n locations
tgtacctttgaaacacatcaaatattcacttattagctacattggattgggcttctaccaattcaattaaatttattttcaaccacacacatcaaatattcacttagtgcatgtgaaattacaaaactacccctaatacaaaaaactagtctaggtgccctaaaatacaagggctgaaaaatcctatatttctaaggtactctacctacattatggagccctaaatacaaggcccaaaaataatgaaaccttaatctaatatttacaaagataagtgggctcatacttagcccatgggcccaaaatctatcctaagactcataagaaccctagggccttctcttgcatctctggcccaatctacttggagtcttctatccaatacccttgcggngtaggattgcatcaaaaggttacagagaacttacattgagaaatccttggtaa

SEQ ID NO: 4046 - DNA, 451 bp, Glycine max
  unsure (1)..(451): unsure at all n locations
tggcnttgaggacttgctccaatggctcatcatgtcttctattgaacctttcttcataggcttgaagagaatccatcaattggtctacggtcattgagtctaaatccttagactcttcaatagcacaagccacataatcaaatttagcgattaaggagcgaaggatcttttccaccacacgaacatcgttccatattttctccataacgcttcatttggttcacaatagctaataccttgttgtcaaaatctgagatagattcagattccttcatatgcaatgattcaaactctctatgtagagtttgtaggcacacctttnttaccttatcaacaccttcaagggaggttttcaaaatctcccatgcttctttggatgtggttgcatttgacaccaactcaaacatagcttcatccaaaccttgatgaatgaaagtaagtgcttgttgat

SEQ ID NO: 4047 - DNA, 474 bp, Glycine max
  unsure (1)..(474): unsure at all n locations
attcttgattctcgaaatcaaatctcctcttgaaccttgaagtgttcttgattcaatcttgaactcattcttgatctttgagctttttgtcatcatcaaaacttctttgaattaatcttgattcatcatgaagcttgcttctacatatacttccataagaatataattnttttgttattagataagaaaaataaaaatgaacatactatttcataatactggaatgtgtagaacacgtcaatatttgttgtgaattctcatacaatcttaatgttcttttttactacttttgtaaggcaagaggagaaatttaacaattataaattaaacttgactaatatgacaatttaaatgacatgtttatgctaagatgacccattcaatgaaacataatattataatcatcattaaaagagtaaaacttcttaagtgctatgtgtgccanatatgtttgaaaaaaaagaacatttatga

SEQ ID NO: 4048 - DNA, 412 bp, Glycine max
  unsure (1)..(412): unsure at all n locations
agcttgtacatgcctcttatcccttctatttgttggcaattnttcacactcctatgtctcaacaatagaatttcatatctaccatcatcatccaccctcttttcttagaaaaaacaacaaccttattgattgaaaacacatttattgagactcttattaggcatgtaatcatcaaccaacaaaagctcgttcctttttctacaatactattggatttggaccaagtttttttgttgtaacctctccatgatcgatatctccaccatgaattgttgtaacacttgcttctaatcgtggttcgcacatttcacagtaatttgagtgttattcagtaatgtgcttctacactctcacaaaccctccagaacctgacaacatctctttcctaaattccccngtcacttaacttaaa

SEQ ID NO: 4049 - DNA, 421 bp, Glycine max
  unsure (1)..(421): unsure at all n locations
ctgatggtgtcgagaagacatcacatgtgtgtcatcatcaacaatgcggagaatgtgaatgtatgtatacatgagtntgatgatgtcaaagaagaatctaacaaggctgcttcaaatgataagcatttgcttcaagaataattcaagattgcttcaacacacaaagccttgtttcaagattcactaaagaccaagccttgccttaaaacaaagtgctttcaatacatgcaaggctctggtaatcgattaccaggaagtgtaatcgattacccgaagacagggttgagaaatattctgtgaaaaaggttctgaatatgaattctcaacatgtaatcgattaccacatgtctgtaatcgattaccagcaacgaaactttggaaattcaaattcaaaagttataacccttcaaattataactgt

SEQ ID NO: 4050 - DNA, 396 bp, Glycine max
  unsure (1)..(396): unsure at all n locations
ccagtacaaaagatcaaatgatatcgaccttntcttctatatgtaagttttacttttttccttcttttgggtttttccaaatatagtatccatgtgttcaaccctctaaaaaaccagctgatcagttaacattatcggcacattttcatgctcttgactttcattaaaagctttcttcaattgctgataacggtgataaggtttcataaaacattgatgcatgttgttcttncatgtttaagttgtacgcagcttatgccttcttcacagatagggcatgcatgatggcccttaacactgtatccgctcaaattcccatatgatggaaagttattaatggtacaaaatagcattgtgcgcaaatcgaaagtctcatttcaaaaaccatcaaacact

SEQ ID NO: 4051 - DNA, 489 bp, Glycine max
  unsure (1)..(489): unsure at all n locations
tgtagaatggctagacatgatacatgtcanggcttggtttggttcaaggataaaagggatgccccacattatttccatgacacaaatgcaaaaaatgatgatttggaaattntatgcacaactggtcatgcatgcgcctatgcggacgctcaagtgtcaaatttttatggtcatgtgatgctagggctcangattcatttcctctattntaaatcaacccaatggtttcaaaatatgttcttttatcaatttgtgcattcctccaagtccatttcaaggatggccttcactttttcggggtctacctctatccctttctggcttacaatgaaaccaagcaatttccctgatttgaccccaaaggtacacttagcggggttcaaccttaattgatatttcttaagcctttcgaacaactntcgcaggttgacaaggtggttcttctcggatntagaattagcaattatgtncgtcacgtagacctcgatc

SEQ ID NO: 4052 - DNA, 183 bp, Glycine max
cgagcgtcacgatatgtgatgtgcctgaattggacatccgagtgaaaagttattagcatttaatatttttcagagcttccgttgttcaatttcgagcgtctcgatatgtgatgtgcctgaatttgacctccctgtgaaaatttctgaccatttgaatttctcgagagctcccgttgtcaattt

SEQ ID NO: 4053 - DNA, 345 bp, Glycine max
agcttgagattgaacaacggaagctctcgatattaaaaaatggtcataacttatcacacggacgtgcgattcatgcgcataaaatatctagacgctcgaaattgaacaacgaatgctcttgagaaaatcttatgtgcataacttgtcacacggatgtccgattcagctgcataatatatccagacggtcgaaattgaacatctgaagctctcgacaaagtccaatggtcataacttatgtcacggaagcccaactctggcccatcatgtttggacatgctctgaattgaacaccggaagctctcgagagattcaaatggtcctaactttgtacacggaagtacga

SEQ ID NO: 4054 - DNA, 350 bp, Glycine max
  unsure (1)..(350): unsure at all n locations
gtgtgaagtatgcaatcctgcataggattggcactgccaactgggtacccaccaatcatacttccactgttgccacaggtttgggtaaatttctgtatgctgttggaaccaagtccaaatttaattntggaaactatatttttgatcaaactattaagcattcagaatcttttgctgtcaaattacccattgccttcccaactgtattgtgtagcattatgttgagtcaacatcccaatatcttaaacaacattgactctgtgaagaagagagaatctcctctatccctgcattacaaactgtttgaggggacacatgtnccagacattgtctcgacatcanggaaagct

SEQ ID NO: 4055 - DNA, 379 bp, Glycine max
  unsure (1)..(379): unsure at all n locations
ctacaataatatatcaagacgatcgancatgaacaacataagctctcgagaaattcgaatggtcatgacttttcacacgaatgttcaattcggggacataactcatgtagacgctccaaattgaacagcggaagcattcgagaaatttgaatggtcataacttttcacacgaaagtccgattgggggacataactcatgtagacgctcgaaattgaaaaacgtaagctctcgaaaaattccaatggtcataacttttcactcggatgtccgattcgtggacataactcatctagacgcttgaaattgaacaatagaagctctcgagaaattcgaatgctcataaatttcactcggatgtccgattcggggcatagtata

SEQ ID NO: 4056 - DNA, 421 bp, Glycine max
agcttgaaccttgaatcttgattcttgattcttgaagtgttttttattcaatcttgatcatcttgatcatcttaaacatctttgaacatcttgaactcattctttgattatcatgaattgacctttgagctttttttcatcccctttgttatcatcaaaacatctttgaatcaatcttgattcatcatgaagctttgcttctacacaaaatccattgaaatattgtcccacttccactggggtatctccaagggttgtaacttccctgaaggtctctgatgttctatcttagccttctggcaaagtaaacatgcatacacaaactcactaacctctctcttcatgttgggccaccaaaacatcaccttcaaatcctgatacatcttggtagcaccagaatgtatgcttaagttattcctat

SEQ ID NO: 4057 - DNA, 421 bp, Glycine max
agcttcaacatcagaccacttccagggtgctggaactacttcacatggacttgatggggcctatgcaagttgaaagccttggaggaaagaggtatgcctatgttgttgtggatgatttctccagattcacctgggtcaactttatcagagaaaaatcagacacctttgaagtattcaaggagttgagtctaagacttcaaagagaaaaagactgtgtgatcaagagaatcaggagtgaccatggcagagagtttgaaaacagcaagtttactgaatactgcacatctgaaggcatcactcatgagttctctgcagccattacaccacagcaaaatggcatagttgaaaggaaaaacaggactttgcaagaggctgctagggtcatgcttcatgccaaagaacttccctataatctctgggc

SEQ ID NO: 4058 - DNA, 476 bp, Glycine max
  unsure (1)..(476): unsure at all n locations
atagagttcacttataataacagttttcactctaccattggcatgactccctatgaagctttgtatggtagaaggtgtaggacacccctatgttggttagagcccggagaaggcctcaccttatgaccagaagtggtacagcaaaccactaagaaagttaagttaatttatgaaaggatgagaactgctcagagtaggcagaccagttatcatgataagaggaagaaagatctggaattcgaggttggtgatcatgtattcttgagagtcactccatggactggggttggtcgagcattgaaatcccgaaaactcacacctcgcttaattggtcctttccaaattcttaagaaagttggccctgtggcataccanattgcactacncccgtctctttctaatcttcacaatgcctttcatgtgtctcaactccgtaagtatatccatgatccatcccatgtgattgaatggatgat

SEQ ID NO: 4059 - DNA, 410 bp, Glycine max
  unsure (1)..(410): unsure at all n locations
agctntatattctgccacattattggtataatcaaaacccagcctaccacgaacgatgtgaattgattcatcagagaaattaacattgccctaatttcttaccccagttcattggaattccatcaaataacataatccatttttctccatccccaggttctccgtattcaaataatgccattatgtcttcttctgggaactcaaattgcatctattcgtagtcttctataggatgatgagccaagtattctgctaggttgctaccttttacaactttntgggtgacgtaaacaataccatactctaatagtaacatntggcagcaatcaatttgaccggtgaaagtaggcttctcgaatatatactngattgaatccattttggagaccaagtggtgtgagacaacatat

SEQ ID NO: 4060 - DNA, 433 bp, Glycine max
agcttgtgaaatcaatgaaattcaagattccgtttgacacaagtcgttcaattctgttcttagaaatgtgacctaagcgcttatgccataatgttcttgagttagtattatcaattctacgcttagtaccacacagttctgcattaaaggattcaccataagaagctacagtatcaagtagatatagattatcattaaccaagagtgaaccagttccaacaatatctgaattaaaagtcaacctgaacacattgtttccaaatgaacataaataacccaatttgtccaaataagaaaccgaaaccaaattccatctatatgacggtacaacaaaagtgtctttcatatccaaataaaaactagtacataataataatctaaaatgccctatagcttccacctccaccgatttaccatctccaacaaagatcca

SEQ ID NO: 4061 - DNA, 238 bp, Glycine max
  unsure (1)..(238): unsure at all n locations
agaattctgggactgctgttgattcaattgngtagccaattgtcccatctgattggttaagctctgaatggaggctctggtctcttgctgaaactgcatgttctgcatagtcatttgcctcacaagttcttcgagggaaggttgtggaggggcctcaactgttggctgtttctggggttgttgctcgtgctggattggcggaggaatgtatggtctgcttgcgccagtaccattttgg

SEQ ID NO: 4062 - DNA, 463 bp, Glycine max
  unsure (1)..(463): unsure at all n locations
gacatcttgactggctntccaatctgacattcaccacagattctgccttcttctattttcagattgggaatgcctctaacagcacctttgtcaatgattntcttcatgcctcttaagtgcagatgtccaaatctttgatgccatattctgacttcatcttctttggaggatagacatgtggaggagtaactggtttcttgaggtgtccataagtaacagttgtcctttgatctgctgcccttcattagaacttcactcttctcatttgtcaccaagcattctgactctgtgaagtttacattgaatccttcatcacacaactgactgatgctgatcangtttgcagtcagtcccttcaccagcagtactttgttcagactangaagtncatcatgaactagctttcccattccaatgatctctcctttagagccatctccaaatgtcacatagctagtggagc

SEQ ID NO: 4063 - DNA, 443 bp, Glycine max
  unsure (1)..(443): unsure at all n locations
atagatcctctaatctacaaagtccatttncagtttctttcttcccatgtcaactacgcagcttgcagttaacataaatggtcttcccaagattaagggaatgtcattatcttcacagatatccattacaacaaagcctgctgggaagataaaatgttttactctgaccaaaacatcttcaattactccatatggtctggtgatagagcggtcagccaactgtaaagtcattctagtgggcatgatttccaactctcctagtcttctgcacatggagtgtggcataagattgatcttggctcccaagtcaatgagagcttttccactgtgacttacctattgncaaggaatggcacactccacggtctttgtgcttcgtggaatgattttgaataccacactgcaattaccctcacaactatattttcctagtgaatgtactt

SEQ ID NO: 4064 - DNA, 364 bp, Glycine max
  unsure (1)..(364): unsure at all n locations
aatcggacctcagtgtgaaaagttatgaccattcgaatntctctagagctttcgtggtggaattccgagcgtctagacatattatgtgcccgaatctgacctccgtgtgaaaagttatgaccataagaatatctcgagagcttccgctgttgaacttccagcgtctcaatatattgtgcgcctgaatcggagctccgtgcgaaaagctctgaccatttggatntctcgacagctatcttggtagaattccgagcgtctcgacatattatgtgcgcgaatttgacctccgtgtgaaaagttctgaccatatgaatatctcgagagcttccgctgatcagtttcgagcgtctcttcatattatgcg

SEQ ID NO: 4065 - DNA, 423 bp, Glycine max
  unsure (1)..(423): unsure at all n locations
tcacttaggctataaatagaggccatgtgtatgcattnttttaactntgatcacttgagaattacactgtanagttcatacctcttttgaggcacaaaattntgtgccccttctctccctctccctccactcatcttctcctaccttcaagctcttatccaaggcttcctatggtggtgagcttcttcttgactcatcttttccttgaagtggcatctccaatcatctntcttccttctttattctgctgtcattaaacttcatgcaccaaaggactccattgatgaagaagatccaaggcctacaagctgcaatggagctacatcatgtggtatcaagagcatcttcatctaggtgatgtgctcttgcttcctttatctttntgtttggtcaactcactttacattcttgttcttcatctta

SEQ ID NO: 4066 - DNA, 427 bp, Glycine max
  unsure (1)..(427): unsure at all n locations
tgatgaaagctncaataaactcttcttattatgaatgtgaactctatcatgcaaaattgtgtggtcactagcagtcatattttcaattaagttcatggcttcttcaggtgtcttcaacttaatttttcctcctacagaagtgtcgagtaactgctttgactgcggccataacccatcaatgaagatgttcagttgtataggctctgaaaaactatgagtgggagtttttctcagcaagctatggaatctttctaatacctcactcaaagattcatcgggaaattggtggaatgaagaaattacagctcttccctctgcagttntagactntgggaaatatttntttagaaacttctcaacaacttcatcccaggtctttaaattgtcgcccttgaatgaatgcaaccatctcttggccctcccaaat

SEQ ID NO: 4067 - DNA, 465 bp, Glycine max
  unsure (1)..(465): unsure at all n locations
agtatgtatggcanaacttcattactggtgttcaagacatacaagtgagcttgtaacacatgttctacacttggagtgatcacatgcagtcctcttgaacccttaccacccactcggtcatcatgccgagactcaggaagccaataggtttagccttctctaagtattctgaacaaaattcaatggcttcttctgtaatgtacctctcaacaatagatgcttctggatgatataaattctttgtatacccttttaagatcttcatgtatcgctcaaccgggtacatccaccgtagataaataggaccacaacatttgatttatctgaccagatgcacaatcaagtgaatcatgatgtcaaagaaagcacggggaaaatacatctncaactggcacagtataattgcagcctcattttcaactcatcacacttgacaggatcaatgactttgctacatatagcatg

SEQ ID NO: 4068 - DNA, 337 bp, Glycine max
  unsure (1)..(337): unsure at all n locations
agcttgtagggttaaagtctcacgattgtctcgtgctcatgcaacaattgttagccgtggctatacgagacatcttgccaaacaaagtcaggttcacgataactcgcctgtgcattttcttccatgctatatgtagcaaagtgattgatccagtaatgtttgatgagttggaaaatgaggccgcaattatactgtgccagttggagatgtattttccccctgctttctttgacatcatgattcacttgattgtgcatctggtcagagacatcaaatgctgtggtcctgtttatctacngtggatgtacccgggtgagcgatacatgaagatcttaaa

SEQ ID NO: 4069 - DNA, 313 bp, Glycine max
agcttatgaaattgggcctggagttggagctgtgatgatttttctgtgtgtcgcggcggcggtggaagttacggtggcatccgcacgcggcgcacgttagcgagcgcggttcattggggttggatgaagaagagggcatgaattcaccgcacccatcaagcgcgtgaccacctatgctggctgcatggtttttgaggcactctttgtagaaaaccgtcctggagggtggctgttgcggcggcgacacggtggttgggtggtggtggtggtgcttgagggaaccgtttgtggtggtgttgggttgtggaggggt

SEQ ID NO: 4070 - DNA, 398 bp, Glycine max
agcttatgcagcaaatatatacaatagaccttctcaacctcagcagcaaaatcaaccacagcagagcaattatgacctttccagcaacagatacaaccctggatggaggaatcaccctaacctcagatggtccagctttcagcaacaacaacagcagcctgttccttccttccaaaatgctgctggcccaagcagaccatacattcctccaccaatccaacaacagcaacaaccccagaaacaaccaacagttgaggcccctccacaaccttcccttgaagaacttgtgaggcaaatgactatgcagaacatgcagtttcagcaagagaccagagcctccattcagagcttaactaatcagatgggacaattggcaactcaattgaatcaacaacagt

SEQ ID NO: 4071 - DNA, 325 bp, Glycine max
  unsure (1)..(325): unsure at all n locations
agctattaaccttctnttatatgatagacttttaatgaagaagaagaagcatcaatcaatttaataatgttctttaaacgtgcaacacaaaattgattgctataaaataaataaataatggaagagagaatctcaaactcgatttatactggttctgccacttcccatgcctacgttcagtcctcaaacaatccacttgagattttccactatctttgtaaatcctttacatactgtgaacacaccttgggatccatcaccctttgttggacaagtggcttcaataacttaagatgggggggggggtgaattaaatcttcaaaat

SEQ ID NO: 4072 - DNA, 486 bp, Glycine max
  unsure (1)..(486): unsure at all n locations
ctgtatggtagaaggtgtaggacacccctatgttggtcaaagcccggagaaggcctcaccttangaccagaagtggtacaacaaaccactgagaaagttaagttaattcaggaaaggatgagaacggctcagagtaggcaggaaagttatcatgataagaggaggaaagatttggaattcgaggttggtgatcatgtattcttaagagtcactccgtggactgccgttggtcgagcattgaaatcctgaaaactcacacctcgctttattggtcctttccaaattcttaagacagttggccctgtggcataccaaattgcactaccccgtctctttctaatcttcaaaatgtctttcatgtgtctcaactccgtaagtatatccgtgatccatcccatgtgattgaattggatgatgtacaagtgaaagagaaattgacatatgaaacattgcctttgaggatcgaggataggcgaacaaaacacc

SEQ ID NO: 4073 - DNA, 329 bp, Glycine max
catgcaagcttaagaaagctatctatggacttaaatatgcaccaaggcaatggtatgtgagacttagcaacttccttcttgaacaaaattttgagagaggaaaagttgataaaacacttttcattaaagagtcttctcatgacattttacttgttcaagtttatgtggatgacatcatttttggttccactaacaaatctctttgtgagagatttatacattaaatgcagggggagtttgaaatgtcaatgatgggggaagtaaattactttcttggtctacaagtaaagcaaatggaccatggaatatttcttcattaaacaaaaaaa

SEQ ID NO: 4074 - DNA, 468 bp, Glycine max
gactagacaccttaagaccatcattcaagtgacactccaagcactaacgatataaaccaaggaggtcatgatgggagataaagaggaatcagactagatgaccccctttaagaatttcttaactcaggatgtgttaccaccaaacaaaaatgaagcccaacacctgaaaaggaaggccaattactacatcatccttgaccgagaactatacaaaagagggttgactgcacccttgcttaagttcctgaatagccagcaaacagactacgtcatgcaaaagttacatgaaggaatcttcaaccttcatacaggggggcgctccctggcaaccaaggtagtacgtgctagctactattggctaacactcaagactaacaccctcaacttcatgaggagatgcagaagatgccaggaattcacaaatgttctgcgcacactccccgtcaaccttcacaacttgagctcttc

SEQ ID NO: 4075 - DNA, 445 bp, Glycine max
  unsure (1)..(445): unsure at all n locations
gagcaaattcgaacgacaataactctctactcgcatgtctggttgagtcccgtaatatatcaggacgcactcatttgaatgttgaagctgagagcaaattcaaacgacaataactttttactcggatgtctgattgagtcccgtaatatatcgagacgctcgaaattgaatgttcaacctatgagccaattcaaacgacaataactttttactcggatgtctgagtgagtcccgtattatatcgagacgctcgaaattgaatgttgaacctatgagccaattcaaacgacaataactttttactcggatgtctgattgagtcccgtaatatatcgagacgctcgaaattgaatgttgaacctctgagccaattcaaacgacaataactnnttactcggatgtctgattgagtcacgtaatatatcgagacgctcgaaattgaatg

SEQ ID NO: 4076 - DNA, 436 bp, Glycine max
agcttaaacattcaatttcgagcgtctcgatatattacgggactcaatcagacatccgagtaaaaatttattgtcgtttgaattggctcacaggttcaacattcaattttgagcgtctcgatatattacgggactcaatcagacatccgagtaaaaagctattgtcgtttgaattagctcagagctttaacattcaatttcgagcgtctcgatatattacgggactcaatcagacatccgagtaaaaagatattgtcttttgaattggctcagaggttcaacattcaatttcgagcgtctcgatatattacgggactcagtcagacattcgagtaaaaagttattgccgtttgaattggctcagacgttcaacattcaaattcgagcgtctcgatatattacgggactcaatcagacatccgagtaaaaagtattg

SEQ ID NO: 4077 - DNA, 318 bp, Glycine max
  unsure (1)..(318): unsure at all n locations
tacttgtgaaagagagccataaaggtgggctcatgggctactttgggatagacaagacccttgtcttactcaaagaaaagttttattggccccatatgaagaaatatgttcataagcattacactaggtgtgtggcttgtttacaagccaagtctacggtgatgcctcatgggctatacacacgcttacccattccctctgaaccttggtaaacattantatggactttgtccttgggcttcctagaactcaaagaggtgtagacgctatccttgtggtggtggataggtttagcaagatnggcacatttataccatg

SEQ ID NO: 4078 - DNA, 303 bp, Glycine max
agcttgtttaccccatgttgagtttgcttactatagagttgttcatagcaccactaattgttctccttttgaagttgtttacggttttaacccactaactcctcttgatcttttgcctatgcataatgtttcggtttttaagcataaagaaggtcaagcaaaggcggactatgtgaagaagcttcatgagagagtcaaaaatcaaattgaaaggagaaataaaagctatgctaaacaagtcaacaaagggagaaagaaggttgtcttcgaacccggagattggagttgggtgcacatgaaaaa

SEQ ID NO: 4079 - DNA, 400 bp, Glycine max
agcttccctttctttggccaatgctggacctgtttggcagtgatttccttggcaatttgatgctcagaaacagcaatgtccaccactccatctgttggtctgcccaggtatttgttgattacaacaggggagaatctaacacattttcctctaacaaatactttttgatactcatcactctttctgtttgttatgtcagagggaatgttgacaataaattccctgactagactttcatagcaatctcccaacttggtgacagttttcagcagtccagcagccttgatgaggtccatgatctccttgcaatccaaggcatctcttcccagttctctttctacagcaagtctgcgttgatatacaaatttccacctttcaacattgccaatggagtggaatg

SEQ ID NO: 4080 - DNA, 395 bp, Glycine max
gcgggatgaactcaggcgagggactagcattcaccaatactgaggtagaggcggattttaagcatccctcaatccacctaatacatttggacccgaaacccattcttctcagcatatataacaggaaatcccatgacactgagtcgtaagccttctcgtagtcaactttgaatacgatgcatggtttctggcctttcctcgcttcatcaaccacctcatttgctatgaccgtgctgtgtagtaaatgccttcattgaaggcagattacctttcgtcatgattaaaggcatgaccttcttcaggcggttggccagtagctctgccactatcttgtaaatccatcctatgagtgaaataggtctgtaatcgctcagaatctgtggctctgacacctt

SEQ ID NO: 4081 - DNA, 391 bp, Glycine max
  unsure (1)..(391): unsure at all n locations
ctagatgcctaggttaacctgataacccaactgactatgaataaaaaatatgcacctgtcaccagactatctggtttatgctcctctgccgaccaccacacagaccttntcccttctatgcaacaatctgaagcaattgaacagcctgaagcttatgctacaaacatctacaacatacctcctcaacctcagcaacaaaatcagccacaacagtgcaattatgacctctccagcaacaggtacaatcctgggtggaggaatcatcccaaccttagatggtcgaatccttcacaacagcagcaacaacaaccttattttaaaatgctgctggccaagcagaccatacgttcctccaccaattcagagaacaacagcaacagccccaaaatag

SEQ ID NO: 4082 - DNA, 442 bp, Glycine max
  unsure (1)..(442): unsure at all n locations
agcttcagctgcttctgtatggcagcatataataattaaataaaagctatctgaatatcatggtaatcaaatgatgtttgattttctgaagcaaattggaacacttagccaggttaatgaattttgtctgatctgcctcctacctttggtcaccactggcatgtaattaaaaggacaacaatactgaaatatatgcacaggtactaagtcaaataattatgatttaggactaagcttgtgctttntgttttttacttaaattgaataacaggttcatgcctatgagaggtcaaaccgagtttacaattacaatttagatccatgtggtcctgtatatattacagttggggatggtggcaacagagagaagatggcaatcaaattcgcagacgagcctggtcattgtcccgatccattaagtactcctgatccttatatgggt

SEQ ID NO: 4083 - DNA, 459 bp, Glycine max
  unsure (1)..(459): unsure at all n locations
tgaacttagctacacacccnctataatagctaagctcaccctcatgacaaaatacatgaaaatacaaaaaaaaaagtccctactacaaagactactcaaaatgcctcgaaatacaaggctaaaaccctatactactggaatggccaaaatacaagacctaaacgaaggaaaaaacatattctaatatttacaaagataagcgggctcatacttagcccatgggctcaaaatctaccctaaggctcatgagaaccctagggccttcccttggatctctggcccaatctacttggagtcttctatccaatgcccttgcggcgtaggattgcatcattgcctctagtcatacactacattcaacatgcacaactagttgccttgtcatgtaaataaaggtgtacgtttgaactacagctaccctcacatgatatccaaatgaattgaaattntgtgatcaac

SEQ ID NO: 4084 - DNA, 430 bp, Glycine max
agcttgtgggatttgtgatagtgatttttttggagatgttgatgatagaaaaagtactaccggatttgtattttttatgggtgattgtgtttttacatggagttctaagaagcaaggcattgtgacactttctacttgtgaagccgagtatgtagctgcaacttcttgcacatgtcatgccatttggctaagaagattgttggaggaacttcagttgttgcaaaaggaaagcacaaagatctatgttgataatatatctgcacaagagcttgctaagaatccggtgttccatgaacaaagtaagcatatagatacaaggtatcatttcattatagagtgcattaccaagaaagaagtaaaattgactcatgtgaataatcaagatcaagttgcggatattctcaccaagcctctcaagttaaagattttc

SEQ ID NO: 4085 - DNA, 469 bp, Glycine max
  unsure (1)..(469): unsure at all n locations
tgtcattgtatataactatccaaaagatattgaagcattctatatgcggctcaatgatgacttaaagacagtggttgttatggatgtgcttgtacccaaggtatatgttctgtatattttgttttcatcatgattgtaatgcatggcataatagaagcatgcaaatgtaatttcaggttggaaaactaattggtggaagccaaagggaagaacattatgatgtcatctagacaaggttcatatatctgtttactctgtcttttcttaatttctttccttgtattgntttccatgttaatattgtatttaaattgcataataaacgaaatgggtttgcctgttaagctatatgagtggtaccttgatctaacgcggtatggaatagtgaaaatgccaaatcttgccttggatctaaacgatgattctctttgccactggcttggaaatattagacatatgatcctctcat

SEQ ID NO: 4086 - DNA, 421 bp, Glycine max
  unsure (1)..(421): unsure at all n locations
taaagaagctatagcttatctacacaccccctataatagctaagctcacccccatgacaaaatacatgaaaatacaaaaaaaaatccctactacaaagactactcaaaatgcctcgaaatacaaggctaaaaccctatacgactagaatggccaaaatacaaggcccaaaagaaggaaaaacctattctaatatttacaaagataagcgggctcatacttagcccatgggctcgaaatctacccaaaggctcatgagaaccctaggtccttcccttggatctctggctcaatctacttggattcttctatccaatgcccttgcggngtagaattgcatcattccctccaccttggaaaatatttgacctcanatcgtgaggttcttcatactctgggctccttccctcaacacctgtaaaa

SEQ ID NO: 4087 - DNA, 229 bp, Glycine max
  unsure (1)..(229): unsure at all n locations
agtgattgcttagtgcaattctccattctcttctctttatcggagccccgtgaattgcgtattcgctcatgtgtcctccaccttcgagtttggagccatgcgtactgattgcttaatgcaattctccattctgaaacttttcggagccccatgaattgcgtttattgtcatatgtactccagcttatagtttggagccatgcgtatagattgcttanagcaattatcca

SEQ ID NO: 4088 - DNA, 233 bp, Glycine max
tggggacatatgggtaccttgccccagaatatatcaaccatggtagggctagcaaggaattagacatttacagtctcggggttgtagctctcgaaatcgcatgtgggacgaggactcaacaaaacggggagtttcatgtacctctcgtgaactgggcgacggcaaaatatgtggaagggaatgctcaggatgtcgaagatgagagactaaacaaggagtatgatgcggatgaa

SEQ ID NO: 4089 - DNA, 372 bp, Glycine max
  unsure (1)..(372): unsure at all n locations
ngccaaagagcatgtttgcagctatatacaagttgctgaagctttgaatctctgacgtagaagttacttggaatgctacctgtcagagcattatcagactattaagcctagaacgaatttctccatgtaccttgtttccaaccaaattcacgtatgtcaagttagaaagatgactcaaagctgttgggattgatccagataaactgttattggccaaattcagaattctcaaagattcaagacatcacttagaggaacgtaagtctntttcaagcatgttgtttgatgctgcaaagtcttggagctcttcacaaccttcaatctcttcaagtatgtggccattaatgctatccattcgtacatcaagagata

SEQ ID NO: 4090 - DNA, 449 bp, Glycine max
  unsure (1)..(449): unsure at all n locations
tatagcccacagaagaagaagaagcatcatcagcaactntcacaatactgaaccaaccagacactctattgtggtaaccaacaagcttaacagcgagtcctctttctggtagaccctcaacgatagtccacttggaaggtgggtcccacttagaaggaattggacttgggggacaccctggtctgagtgtggatggaaacacaccgaactgaatgctcttgaaaagctggccttgggtgatgaaagcgactcctgctgatcgagatgcaatctttatcggtaacccctcagagagctcgttgccagaatgcaccacagtcagagggcaagtttcgtttcctgcttttgctacttgtattccaccccgcatttctcttatcactggcaacacgaaataattgacaccgtattgaagcttatcgccgtcagtgtcgtacacatgatcatca

SEQ ID NO: 4091 - DNA, 458 bp, Glycine max
  unsure (1)..(458): unsure at all n locations
catgcaagctttntcctcccagtcttgacaatgaaatttatgctcagatttgttaccaaagcattgaggccagatatgatgagtgaaagaagcactgctgctctgttagatgccaaacctgccaactgagcaatggtgggactataatacatcacagtgttgattgccacaaactgctggaagactaagagtccaacgccggcatataaacctcttctcacagctgaagttctcaagagtttgactatgtcgatcttctctgaagagtctgcttccttaattggcatgtcaactgattccatcagagcctggatttcaccttaaacttcgtgtggcggctttatcttctttacattcgatttcgcttactctctcttaccctgtgggaacagaagtggaccacagttattatatacaatttcacctgcaaatgacaattgactaatgatgatgaacta

SEQ ID NO: 4092 - DNA, 387 bp, Glycine max
attttcaatatatttatccaatttcttaattatgattgttaaatgaattataatcttattattttttatgttatttacacttttgaggtactttatttttattaaacgtttacaatttaataagttatttatttttattttcagggaatgctgcccaacataattttagaataatagaaacattttaaaagattaaaatgactcttctaaacttaaatatctaaattgaaatgaaaaagtaaaacgacatattaaaagtatatctatttttctaatatgatctttgtataatagtagcaataagaattcaacctcatgcgtgtacttcaattataccattatctagactttgttaaatctggattgaacagcgtttttcacttttta

SEQ ID NO: 4093 - DNA, 441 bp, Glycine max
  unsure (1)..(441): unsure at all n locations
tgtatggtagaaggtgtacgacacccctatgttggtcaaagcccggagaaggcctcaccttatgaccagaagtggtacaacaaaccactgagaaagttaagttaattcacgaaaggatgagaacggctcacagtacgcacgaaagttatcatgataagaggaggaaagatttggaattcgaggttggtgatcatgtattcttaagagtcactccctggactgtagttggtcgagcattgaaatcctgaaaactcacacctcgctttattggtcctttccaaattcttaagacagctggccctgtggcataccaaattgcactaccnccgctctttctaatcttcaaaatgtctttcatgtgtctcaactccgtaagtatatccgtgatccatcccatgtgantgaattggatgatgtacaagcgacagagaatttgacata

SEQ ID NO: 4094 - DNA, 402 bp, Glycine max
  unsure (1)..(402): unsure at all n locations
tctanactntatacaagaatgaagctctgataccacttgttagacaagtcgcctcagatatcttaagaaggggggttgaattaagatattccaaactacttccccaattaaaaatctatttcactttttattcaagttataaattcccttaacaatgaagttcttaaatattgattcaaataaaacaacttgaatatgaatatgaagcaataataaacaaaggagattaagggaagagacagtgcaaactcagatttatactggttcggccacacccttgtgcctacgtccagtccccaagcaacccgcttgagagtntcactatcttgtaaattccttttacaagttctaaacacacaacgataatccttcctttgtgtttagaattcctttacaacaaga

SEQ ID NO: 4095 - DNA, 449 bp, Glycine max
  unsure (1)..(449): unsure at all n locations
gctatgctgagacattataatagactccctcagcagcaaatctaacaacaatagaataattatgacctttcaagcaatagatacaatccaggttggaggaatcatccaaatccgagatggacaagtcctgcacaacaacaacagcctgtccctccttttgagaatgttgctggtccaagcaagccatatgtttctnccccaatgcagcagcagcaacaacaacaaagacaacaagcaactaaggcttctcctcaaccttccttagaagagttagtgacgcaaatgaccatccagaatatgcaatttcagtaagagacaatagccttcattcagagtctgacaaatcagatggggcagatggctactcagatgaaccaagctcagtcccagaattctgacagattaccttctcaatctgtccagaatcccaaaaatctgagtgtcattac

SEQ ID NO: 4096 - DNA, 432 bp, Glycine max
  unsure (1)..(432): unsure at all n locations
cgcaagcttgagcaacagcattattaatttgggagccccagtgtgattgagatcttccctcttcagataaatgtgaggtccttcaccattaggcctcttgtaatgctccgtcaacctttcagcaaaataaagaggactctcccggccaacataatcttttagaatcccagccagttctgtctgcaactcaaaatctaagaaaatttccattgtttttccttccaggaaactacatttcatggtttctgaatgtagttaacatacaaatatgagagatgtgctattatgtatgagagacagaaagttattctgaatctaattgagtgaagaataacatggagttccanattgtttagttctgtatgacactctgaaaataaaagactaaagacattctgaagaatgaaatgatacacatttctacagtcacaa

SEQ ID NO: 4097 - DNA, 415 bp, Glycine max
  unsure (1)..(415): unsure at all n locations
atccttaagtcacctgcggctgcagcttgcattttctcgatatacacaacaattgatcattgcctatgtangngagtgatgaccnaatacattttctaacacaaggtgatcctgagaaggaagatgttgtgatgtccctgtggcacgacaagttgaagatgcttcttgtgactgatggagagaagggttgcacatatttcaccaaggtactatccacccatgttttgaaaatagagcttgtttgactaaattgatttaatgaagatcttatgaaggaaactgagataatacctttgatcattaactggttggtaacgtttatgtaataactaatgatctttggcttgaggtttgctttaccattcaaggtggtttttattatcttatacacatatgagctgggatgtcttttatg

SEQ ID NO: 4098 - DNA, 426 bp, Glycine max
  unsure (1)..(426): unsure at all n locations
tgtagaataaactntgtaaggcctaagggatgctatcagtgtgtcatatcattctcagctgctggcatatggtacacagtctgaaatgtaatatccaggaacaaacttaccattacttttcaatggacatgtgaacttcacgcaaaacaaaataagacaaacagttctaacctttctgaaataaggaatatggtacaaggtttgaagtagagaattcatataacaggtagctccttggttcttaagcccaacatagccagtctccttcttggaatcataagctcagtaatcaacaatcctacgaacaagaacctcagcttcgactataagagtatcattcacaagataccctctactaggatcatacaattcatcaagaggcatgaaagatgtgaaacccccctcactttcgcgtgcattaaactg

SEQ ID NO: 4099 - DNA, 280 bp, Glycine max
agcttcaacatcataccacgaccagggtgctggtactacttcacatggacttgatggggcctatgcaagttgaaagccttggaggaaagaggtatgcttatgtttgtgtggatgatttcttcatatttacctgcgtcaactttatcagagagaaattagacacctctgtagtattcaaggagttgatgtcctaagcttctaagagaaaaagactgtgtgatctctagaatcaagagtgacgcatggccgagagtttgaaaacagcaaaattactgtatac

SEQ ID NO: 4100 - DNA, 474 bp, Glycine max
  unsure (1)..(474): unsure at all n locations
tgaaggtaaactanatgccttagtaacctttaacccatcttccttgaatcagaaatctgtacctgtcacaagagtctgtggtttatgctcctctgccgaccaccacatagacctttgtccttccatgcagcaacctggagcaattgagcagcctgaagcttatgctgcaaacaattacaatagacctcttcaacctcaacagcaaaatcaaccacagcacaataattatgacctctncagcaacagatacaatcccggatggaagaatcaccttaatctcagatggtctagcccttaacaacaacaacagcagcctgctccttncttccaaaatgttgctggcccaagcagaccatacattcctccacccaatcaacaacatcaacagccccagaaacagcanatagttgaggctcctctgcaaccttccctcanagaacttgtgggcanatgactatgcaaaacatgcagttt

SEQ ID NO: 4101 - DNA, 204 bp, Glycine max
  unsure (1)..(204): unsure at all n locations
agcttgtggacccatgccaagtgagtttcattacaanatggcaaagtggtgacaacatcatcataacaaaaaaaatctttcattcaatgataaacaagagaggtcaaaagggttggatgaccataaaagtttgtcttgaacagtcttatgaccaccttaagtgggagcttttgcaggaaacctctactgacattggttgcccta

SEQ ID NO: 4102 - DNA, 311 bp, Glycine max
cacacttccaatgaaaggcctttctgttacaaaatttgaaatcaatgaaggtaagtaaattgccaattacaaagttacaaaaaagtcctcaatttttggaggttgttctctctttggtgtttcactcaatttggagtgcttcttagtccaatagctcttaaggtggttggccccttgcttcttgactcaaattctccaattgatggcaccaatcctcatttccaattccctatatggcaactcacaaacagggaaacaaagagacaagcaataaccaaagaccagaaaatgaaatgaaagctaaaccaata

SEQ ID NO: 4103 - DNA, 196 bp, Glycine max
  unsure (1)..(196): unsure at all n locations
agctntgaagatcttggaagcaagatacgcacaatgagataatgaacgatgcggctttcaaaagccaatgaaccggcaagaagccttccggtcatattcgcttggttattttataccaaccggcgggcatcatgcacagagaagtccaatttccaatcatcattcagtgcccctctccatggtacaccttcactac

SEQ ID NO: 4104 - DNA, 455 bp, Glycine max
  unsure (1)..(455): unsure at all n locations
gctccaagaatcaagattcaagaataatcaagtntacagattcaatcaagttttaagaatcaagattcaagaataatcaagatcaagattcaagaataatcaagatcaagattcgagactcaagattcaagaaacaagagaagactcaatcaagataagtactaaaaaaagttgttcaaaacattgagtagcacaggaatntttcacaagatcttttaccaaagagttctactctctgataatcgattaccttctggtaatcgattaccagtagccagcattgttttcaaaactgatttacaaagttgtgattgattaccataatcaggtaatggattaccaatatcttaaaacgttagatttcaaatttcaagagtcacaactagtgataaaacattttcaaatcattttaaacttgtgtaatcgattaaacaatactcgaaatcgattccagt

SEQ ID NO: 4105 - DNA, 430 bp, Glycine max
  unsure (1)..(430): unsure at all n locations
agcttatgctccanattagtcttgcagttgttcttcaatatatttatcatggatgcatttcaatatgttagtcgttttagatatttactccatagtttagtcttttgtaaataatatactaacaacatatcaaacaacaataacctcaataaaattaaatatgtatttcattgttcataaaattttaaaacatgaataaccatgaatatcatcgaagctaaatagacagtgttattttataaagtatattatatatttcaatcatattagttttggctctcatttagtaagttctatacaattacaattatactatgtaagtatctatgataactattattgctattaatattcattttctctcttctatatatgtttatcgtcatcatcgagaattagggacaggatggagacgatgttattgaacaag

SEQ ID NO: 4106 - DNA, 451 bp, Glycine max
  unsure (1)..(451): unsure at all n locations
ctcttaggtccttccaccagtatgaatgcccnccttgaacacgatctgactgaaaatcagacttggctccatacttggaattgataatcctggcccaaggttgttgcagatgagaagttaaggcccatatccactttcccagcaaagctatattaaatttagagatatctttaatccctagacccccctcagacttgggcaggcatacagtctcccattntacccaagaaattttcctatggtcttagtcccccccccccccataggaagttcctttgaaggctaccagtttatttactaccctttgtggaatcttgaagaaggataataaataaattggtacaacattgagaacaaaattgattagagttatctttcctccctttgatatgnttttctgggcccacttagatagtttagactcatttcttttattaaaggctcccacaca

SEQ ID NO: 4107 - DNA, 436 bp, Glycine max
tttgcaagctggaatcatttatcctatctctgacagccaatgggtgagtcccgtccaggtagtcccgaagaagaccggcctcacagtgataaaaaatgagaaggaggagctaattcctactcgggtgcagaacagttggagagtctgcattgactataggaggctgaaccaggttaccaaaaaggaccattttcccctgccattcattgaccagatgcttgaacgcctggcaggtaaatcccactactgtttccttgatggtttttctggttatatgcaaattactattgctcctgaggatcaagaaaagaccacattcacctgccccttcggcacttttgcttataagaggatgcctttcggcctgtgcaatgcccctggtacctttcagcggtgcatgattagtattttcagtgaatttttagaaaattgcata

SEQ ID NO: 4108 - DNA, 459 bp, Glycine max
  unsure (1)..(459): unsure at all n locations
ctgagaagcatgtgatcctttggcatcatcaaaacattcagcttgatcctttgtctacaatcatcaaagtacaccatcacaaatttaccaatgaattctctcaaaacatggttcattaatctcataaaattgcttggtgcataagtcaaaccgaaaggcataaccaaccattcatataatccatgtttaagtttgaaagcggttttccattcatctccttctttaatccttatttgatagtaaccactnttcaaatcacatttggaaaagaacaagcaccatgcaattcatcaagcaaatcattaagtctaggtattggatacctatatttaatggtaatattgtgtgaagctctacaatcggagcacattcntcaagaaccatctgtttttggaaccaacaataccaggacagcacatggactcatgatatctcttacccatcccttaccaatgagtt

SEQ ID NO: 4109 - DNA, 443 bp, Glycine max
  unsure (1)..(443): unsure at all n locations
cagacaactnntattttcgtacgaggctttacaaattatactatgacatcagtttaagtcttccatttcttatttatagtttatgaacttatgaagaatatacaagtggtatgctaatcatatgtatgccattgattagatgaaactcaaaggaatttggtagattggcctaagcgattcaacattatttgtggcattgctcgaggacttctttatcttcatcaagactcaagattgaggattgtacatagagatttgaaaaccagcaatattttactggatgcaaatttagatcctaaaatatcagattttggcttagctcgaacattatggggagatcaagtcgaggcaaacacgaatagggtggctggaacatagtaagtctttatctacattaatgtggtttgttcgattattctcacttaattntctttaaaattgat

SEQ ID NO: 4110 - DNA, 406 bp, Glycine max
  unsure (1)..(406): unsure at all n locations
agcttgtgggaatttgtgatagtgattntgccggatatgttgatgatagaaaaagtactatcggatttgtattttttatgggtgattgtgtttttacatggagttctaagaagcaaggcattgtgacactttctacttgtgaagccgagtatgtagctgcaacttcttgcacatgtcatgccatttggctaagaagattgttggacgaacttcagttgttgcaaaaggaaagcacaaagatctatgttgataatagatctgcacaagagcttgccaagaatccggtgttccatgaacgaagtaagcatatagatgcaaggtatcatttcattagagagtgcattaccaagacagaagtagaattgactcatgtgaaaacttaagatcaagttgcggatattttacc

SEQ ID NO: 4111 - DNA, 361 bp, Glycine max
tgagactaggccgcgaagcatgatgtcaactagtgctttatcttgtgtcaacctatgatccctgtcggattgaatactggaaggaattacatgcaaccttaccacttgctgtgatgtcaactgtactagcttatgcattctatacttcatattcaccgtaattaaatgagcgagattcggtgaatcgatctactatagcccactcaacatcatgcccatgactagtgctacgtgaactaaatacaaaatccatagatgtgctctgccatctgcattccgaagtttacaatggcttcgttgcctctgatggtcgatggcgcatagccttaaccttttgacatggctaacatcttgctacata

SEQ ID NO: 4112 - DNA, 443 bp, Glycine max
  unsure (1)..(443): unsure at all n locations
ntgagaaaattcaaacgacaataactntntactcggatgtctgattgagtcccgtaatatatcgagtcgctcgaaattgaataccgaagcgctgagcaaattcaaacgacaataactttttactcggatgtctgattgagtcccgtaatatatcgaaaagctcgaaattgaatgttgaagctctaagcaaattcaaacgacaaaaactttttactcggatgtctgattgagtcccgtaatatatcgaaaagctcgaatgtgaatgtagaagctctgagcaaattcaaacaacaataactttttactcggatgtctgattgagtcccgtaatatatcgagatgctcgacatggaataccgaagctctgagcaaattcaaacgacaataactttttactcggatgtctgattgagtcccgtaatatatcgagaagctcgaaattg

SEQ ID NO: 4113 - DNA, 356 bp, Glycine max
  unsure (1)..(356): unsure at all n locations
tgcaagctttaactcggatgtccgattcangcgcataatatatcgagacacttgatattgaattatagaggctctcgagaaattctaatggtcataacttttcacacggatgtccgattctggcgcatactatgtcgagacgctctaaattgaacaaccgtagctcttcagaaattctaatggtcataacttttcactctgaggaccgatttacgcgcataatatatcgagacgctcgaaattgactaacggaagcttcctgagaaattcaaatggtcataacttttaactcagacgtcccatttaggcgcataatctatcgagacgctctaaattgaacaccgaaagctctctac

SEQ ID NO: 4114 - DNA, 239 bp, Glycine max
cttaatggaagtcaagagcatgatattgcgccgataccgttgactggtgagcaggtatatcagcgggttcaacacctgaacactgtatttgggaagacccaaaagaaggataaaagtcagagttgcatatggaagaagaggtccattttctttgatctttcgtactagtgtgatcttgacggtagacattgtattgatgttattcattacgacataaatgattgtgacctagtcattgt

SEQ ID NO: 4115 - DNA, 418 bp, Glycine max
cgaaggaaaacttgatgcctcggtcaacctagtaacttatcttgtcatgaatcacaaatctacacctgtcgcaagagtctatggtctatgttcttctgcagatcaccatatagatctttgtccttctttgcagcaatctagagtcaatgagcaacctgaagcttatgctgcagacatttataatagacctcctcagcagcaaaaccaacaatagcagaataattatgacccttcaagcaatagatacaatccaggttggaggaatcatccaaatctgagatggacaagtcctccacaacaacaacaacctgtccctcctttccagaatgatgctggtccaagcaagccatatgttgctcctccaatacagcagtagcgacaatagcaacaacaaagacaacaagcaactgaggcccct

SEQ ID NO: 4116 - DNA, 430 bp, Glycine max
agcttcaacatcagaccactttcaggtgctggaactacttcacatggacttgatggggcctatgcaagttgaaagccttggaggaaagaggtatgcctatgttgttgtggatgatttctccacatttacctgcgtcaactctatcagagagaaatcagacacctttgaagtattcaaagagttgagtctaagacttcaaagagaataagactgtgtcatcaacataactacgagtgaccatggcagagagtttgaaaacagcaagtttactgaattctgcacatctgaacgcatcacttatgagttctctgcagccatcacaccacaacaaaatggcatagctgaaaggaaaaacatgactctgcaagaagctgctacggtcatgcttcatgccaaagaactttcctataatctctgggctgaagccatg

SEQ ID NO: 4117 - DNA, 414 bp, Glycine max
  unsure (1)..(414): unsure at all n locations
agcttgacatataaattatctaattattccaattctctcacatcatacaattgcttaatcaaagcaatctcaaacattcattttatgctaaacaatgcactgcatatcatctttaatcaattcactattcaaacacgctttacgcacaacgcaaacaactcaaagtgctgaaatttaaataactgaaataaaataactgaaatatgacaactaaactagctggaaatataaggtgtttaaccttcaccaaaacatcttcaatgactctatatggtcttgtgatggagnggtcaactaactggagggtcatgcgtgtgggcattatctctatctctccaagcccgcggcacatggaaagaagcattatatctatactaactcccaagactatgagagctttgcctaccacaacct

SEQ ID NO: 4118 - DNA, 438 bp, Glycine max
  unsure (1)..(438): unsure at all n locations
agcttcaatggatcttacatcatgtggtatcagagtcttaattaaataaaattaaattgaatttctagaagcccaatccaattaaattttagagggggaggtgagcatttggttactacacctcattgccacattatatggtcacacgttgtgcatgtccttcatgctttacatgcctcatgccacctaagcacacttagtggagaatcttggaattgatcttggattagtgggctgaaccataactaaaattcactaatcataattagtgaaattttgtctccaaagtttgggtccacaaattcaatttcaaattcaagtgaaatttgaattgaaattcaaatttccctccaattttgtgtgacacttacgctataaatagaggtcatgtgtgtgcattntttcaactctgatcatttgaaaattaaactttagatt

SEQ ID NO: 4119 - DNA, 431 bp, Glycine max
tacataagtgccattagaatttcaatacaaacaaactttatccattttaatttttggtatttgatcacgtattctgcaattgattaagaaagcacaaaatgaccagtaggcattggttgtaggcaataaatttgtcgaagacaaaatttaactgaatgtttgtcttaatatggtccaagcaatacagattccttctgtctgtctgtggataccatgaatgcgtgtcttaatgtggtccaagcaatacagattccttttgcacttatcccccttcttattttggtgtccaaagaggaggtcatggggaccttcagaatagggcctacggtaaaggtaagcaaggtctccatcatttgatcatatggctggtagaaaatgatacaaggttattcttgtatggctattatagcaaaaggatagatgcatgcaca

SEQ ID NO: 4120 - DNA, 421 bp, Glycine max
agcttgtttaccccatgttgaatttgcttacaatatagttgttcatagcaccactaattgttctgcttttgaagttgtttatggttttaatccactaactcctcttgatcttttgcctaagcctaatgtttctgtttttaagcataaagaaggtcaagcaaaggcggactatgtgatgaagcttcatgagagagtcaaagatcaaattgagaggaaaaataaaagttatgctaaacaagccaacaaagggagaaagaaggttgtcttccaacccggagattggctttgggtgcacatgagaaaagaaaggtttccggaacaaacgaaatcacagcttcaaccaaggggagatggaccatttcaagtgcttgaaagaatcaatgataatgcttacaaagttgagcttcccggtgagtataat

SEQ ID NO: 4121 - DNA, 446 bp, Glycine max
  unsure (1)..(446): unsure at all n locations
acacttaaaactcaagctgtgcttaacttccccatagactctctcataagcttttaattttacccaaaaagacctaccttcattgaagacacaaaggaaggtggtaaccccaaagcttggtcatagcaaaccactttgcatgccaaacatgagttctcagcctcttggttacatccctagaagtgcaaaaaccattctctaggtttttctttagttcatatctccgatgaacacatcgaggaagcttcttttggtgattctcctccaaacctgatttggcaagggctttatcaattattcccagtttctgcctctttcttctgcacccttttcttgcaattcggttatcaaacacaattgtccttcttctcttgttcttttgagacctataatcattgnttactctattttctatgatagattgaagactatggagttcgagagca

SEQ ID NO: 4122 - DNA, 442 bp, Glycine max
ctggaatgcagctactagttccagtgttggttttcacctgcaatgacacatctgaacaagactccaattttgatgaagatgaaggttgtgagataaggctttgactcactactccttcttcctttcccttgatcatgcgaaatgattttccaacctctgaatgccaaagttgaagaaagtgatcagggcatgttttactcgttggccatgaattgagcattgtggattccaatgacaaccttgcctctgtctcaactctcacactctcccactgtaccatgtgccgcgtcgaaggagattcggacttgacaatggattgatcaggaatcacacatagctgttttgctctttgggaatgacatgatcgaaggagacgcttctttagatgggtgttccagaagttcttaatctcattgtctgttcttccaggtagttgagatgc

SEQ ID NO: 4123 - DNA, 410 bp, Glycine max
agcttcttcttgtttctctgcccatttgaaaccaacatttttcttgagcactcattgagaggtgctgccaatgtgctcaaatccgtctataagaacttgctaagccatgaaaactcctcacctcggtcacagacttaggtgtaggccattcttgaatagcactaaccttgtcctcatcaacttgcactccttgtgaactcacaacacaacctagaaacacagcatggttagcacaaacaatgcatttatcaagattggcatacaattgttcttgtctagacacagtcaagacagattttaaatgatcaatatgcaaatcaagtgcagtgctatagataagaatatcatcagagtacaccacatcgaactttcctatgaactctctcaagatatggttcattactctcatg

SEQ ID NO: 4124 - DNA, 448 bp, Glycine max
ctacaaacgaataacacttggacccttacagacttaccagctaataagaaagctattaggtgtcgttgggtttataagattaagtatcatgctaatggctccgttgaacgatataaggctcaacttgtagccaaggggtatactcaaatggaaggattggatttccttgatactttttctccagttgcgaagctcacaacagtctgattattgttagcattggttgctattcatggttggcaccttcgtcaactcgatgttagcaatgcattccttcatggagaattaaatgaagaagtctatatgtagctgcctccaggaatgcaagtctcacaccctaatcaagtttgtcgattacaacgatcactttatggtttgaaatagactagtcgacagtggtttcatcgattgtcctcatttcttcttactcatggtttcaatcaagctt

SEQ ID NO: 4125 - DNA, 436 bp, Glycine max
agcttcaaccgtatcccataactcggcaagggacgttaaatgttattcccactcagatccaacagtgtcaaagatttcaaactagtccaattactcggtatcgtaccactaatatcattacctcccaaccttatctcaacaagagaatctaacttggcaacagaaggactcacagtcccactaagattaaacttttccaaaataatcatgtccacctttccgtccccattgcaccttatccccaaccatggcccgtgacaagggtcatttccactccaagaatcaaccaaaatccaaggataccccaaccctccaagaaactccaacaacaccatcacttcaaaagcacacataaccccggcctttgcctcacaaaattcattgttctcataactcactttactcgctgcaaattccgggatcggacccatgaagt

SEQ ID NO: 4126 - DNA, 438 bp, Glycine max
agatggtggaaaaattcaagaatagttcaataccatttcatctcttgaaaatctacacccttgtggagtggatcccacctcaagagttccaatcttacatacggagagaagatcagtggaagactcaatgacatataagcatctttataggttgatgagtactctcttttccattcttccattctacttttgaccaaggatagttgaccatattcctcagaagcatcactgaaaatctcatcagcagcctgcagcaccaaatcactttgtgactgatatgcttggctctcactatcactctcatcagtgcttgattcaccttctattttatgatcatcccattccatggatgtgaccttattataaccaaatgctagtgacctcttgcgttgacaagcctcggccctcactttcatattcattcgtttctcaagattt

SEQ ID NO: 4127 - DNA, 449 bp, Glycine max
ctatgtgtcttctttaaataaagaattggtggtaaagaccccaactagtggttttgtgttaacttctaatgtgtgtttgaattgtcctatggaaatttccagtagagcattcttgattgatctgatttgttttcctttgagccaaattgatgttattctaggtatggactagttatcttccaaccatgtcttgttaaactattttgatataactgtggtgtttgatggttcttgagtaagtaaggatatgatgtttatctttgccaaccaagttatgacatctttaaaagaagatgctcaagtgcacattatcttgtctaacctggaaatagagagagaggtttccatgtgtgacctccctgttgtcagagagtttcctgaagtgttccctaaggatatatctggtttacgacccgagagagagatagagctctccatagacctagtac

SEQ ID NO: 4128 - DNA, 449 bp, Glycine max
tcttagtctcacctgatgaagatgaattcgtggctacttcatgcactcctctaatgaaaatagcatcatttctggcactaaattgttgggacttggaagccatcttctcaattaaatttctggcttcagcaggggtcatgtctccaagggcttcaccactggcagcatctatcatacttttctccatgttactgagtccttcataaaaataatggaggagaagctgctcagaaatctggtggtgagggtaactagcacatagtttcttaaatctctcccagtattcatataagctctctccactgagttgtttaatgtctgaaatatcctttctgatggtcgtggtcctggaagcagggaaaaaaatttctaagaatactctcttgaggtcatcccagctcgtgatggaccgtggagcaaggtaataaagccagtcctttgccactccc

SEQ ID NO: 4129 - DNA, 461 bp, Glycine max
  unsure (1)..(461): unsure at all n locations
aagtcacctgcggcatgcaagcttccttntcaggtactttgatgttgtggtagtgaacctgtacccattttacgataaagtcacatcagctggaggcgttgaatttgaggatggaattgaaaatattgacatcggtggtcccgccatgattagagctgctgcaaaggttggtttatttgactaaaaatggaaattccctaacgttaaataaatttgaaatgatgacaaaaacttcccccctcccaatcgtcattacttaaaaagttttgtaaaatggctcagaaaataatcttttggccaaataccaccaagggcctaaactactgtggaaagtaacaggacctttgttcattgcataccttctttgagctaactataaggtgataaattcttatttgagtacaaccacaaggatgttttggtagtggttgatacagaagactaccctgcccttctggaat

SEQ ID NO: 4130 - DNA, 406 bp, Glycine max
ctacaaacgaataacacttggacccttacagacttaccagctaataagaaagctattaggtgtcgttgggtttataagattaagtatcatgctaatggctccgttgaacgatataaggctcaacttgtagccaaggggtatactcaaatggaaggattggatttccttgatactctttctccagttgcgaagctcacaacagactgattattggtagcattggttgctattcatggttggcaccttcgtcaactcgacgttagcaatgcattccttcatggagaattaaatgaagaagactatatgtagctgcctccaggaatgcaagactcacaccctaatcaagtttgtcgattacaacgatcactttatggtttgaaatacactagtcaacagcggtctcatc

SEQ ID NO: 4131 - DNA, 421 bp, Glycine max
  unsure (1)..(421): unsure at all n locations
agcttcaaccttttcccaaaactcggtaagggacgctaaatgttattcccactcagatccaacaatgtcaaagatttcaaactagtccaattactcggtatcgtaccactaatatcattacctcccaaccttatctcaacaagagaatctaacttggcaacagaaggactcaaagtcccactaagattaaacttttccaaaataatcatgtccacctttccgtcgccattgcaccttatcctcaaccatggcccgtgacaagggtcatttccactccaagaatcaaccataatccaaggatactccaaccctccaagaaactgcaacaacaccatcacttganaagcacacataacccctggctttgcctacaaaattcatgctcttataactcactatactcgctgcaaattccgggatc

SEQ ID NO: 4132 - DNA, 430 bp, Glycine max
agcttctggtgggacatcttgacttgctttccaatctgacattcaccacagattctgccttcttctattttcagattggggatgcctctaacagcacctttgtcaatgattttcttcatgcctcttaagtgcagatgtccaaatctttgatgccatattctgacttcatcttctttggaggatagacatgtggaggagtagctggtttcttgaggtgtccataggtaacagatgtcctttgatctgctgcccttcattagaacttcactcttctcatttgtcaccaagcattctgactttgtgaagtttacattgaatccttcatcacacagctgactgatgctgatcaagtttgcagtcagtcccttcaccagtagtactttgttcagactacgaagtccatcatgagctagctttcccattccaatga

SEQ ID NO: 4133 - DNA, 439 bp, Glycine max
  unsure (1)..(439): unsure at all n locations
taccatgacaaagacagccatggcatggggtttgagcttgnggttttcctccaaaggaacagatgaatccttcaagaatgagaacaattgctgagctgctggagcaatctccaatattctaaatgtttaattgaattagtcatatatcactcattacttcaattgttcaaaaacatgcattaagttgtgttactaactaacattagctgatagaatataaaaaaaacaaaatgtgtcactaactacctagttggagataaggttgaaagatatgaacaaattaaacggcttacttcttgaaaaaatatagaccgagttcttgagaattcttcttcatttcgttccatgatttcaccaccagagcttcgtgctcttgcgtgagacctttgccctccatgttctctactctctagctactagctaagatcggtatatatga

SEQ ID NO: 4134 - DNA, 443 bp, Glycine max
  unsure (1)..(443): unsure at all n locations
agcttgtagaagcaaaaggccagctatggttntcatggtggattntgaaaaggcctatgactcagtctcatgggcttttttggattatatgctgcaaagaatgggtttttgtcccaaatggagacactggatttctgcctgtcttaattcagcaagcatttctaaaagatgtccaggtttaattctctgatttgacgctagtcaacaaattgtttctgacaagtcatcaagctaacaagcttgtaaggattctaccgaaatcattgtgattgaaaggaaaagataatagaaagtaaatatgatgctaggacaacaaatggttgtcattttgagatgattaatacactggcttagtacttcaatttattctttagaaccaataaggagactgagtattttaaagtaaaaatacagaggacttctatattttggaaacatgaatg

SEQ ID NO: 4135 - DNA, 427 bp, Glycine max
tgaggcctgtaagctcgcgggattctgtgatagtgactgtgccggatatgttgatgatataaaaagcactaccggatttgtatgtagtatgggagagatcacccgcatggaggaatacacaccaggcgttgaacgctttctaaacgggaagccgatcttgaaacatgcaacgttcgttgcacaccgtcagagcctcttagtcgtgaaaaagaatggcagtagtgaacattcatcttgttagcgcaaggaaagaccgagccatctatagatgataatagacctgcacaatatcttgacaagaatacggtgttacatgaacgaagtaagcatatagatgcaaggtatcatttcattagagagtgcattaccaagaaagaagtagaattgactcatgtgaaaactcaagatcaagttgcggatattttca

SEQ ID NO: 4136 - DNA, 346 bp, Glycine max
tatgttgatgatacaaccagtactaccggatttgtattatttatggagagaatgtgtccctacatggaggtctaatacacaacgcattgtgacactctgtacttgtgaacccgagtatgtacctgcaacttcttgcacatgtcatgccatttggcttagaagagaggcggaggaacctcacttgtggcaaaaggaaagcacaaagatctatgttgataatagatctgcacaacagcttgccacgaatcccgtgctccatgaacgaacgaagcatatagatacgaggtatcatttcattagagagtgccttaccaagaaagacgtagaattgactcatgtgaacact

SEQ ID NO: 4137 - DNA, 443 bp, Glycine max
tggtgcactagatatctcgagatgggatatacatatgttggccatatcatacaccctcatggaatggtcaacaatatgttatatcatttatagacgattactccacatatgcatacttgtttgttatacatgaaaagtcacaatctctggatgtgttcaaaacatctaaagttgaagttgaaaatcaactcatcaaaagaatcaacagtgtcagatttgacagtagtggtgaatactatggcagatatgacggttcaagtgaacaacttccgaggcctttcgccaggtacctagaggaatgtgaaattgtcccatagtacaccatgttggagtcacctaacatgagtgatgtatctgaaagatgaaatagaactcttaatgatatggtgagaagcatgatttgtccttctaacttaccagagtcactctggggagaggcactg

SEQ ID NO: 4138 - DNA, 423 bp, Glycine max
  unsure (1)..(423): unsure at all n locations
tctagcttaagaaaaatggcctcagcaaattccttatttccagaaggaaattctatcaataaacctccaatctttaatggagagggttaccactactggaaaacccgaatgcaaatttttattgaggcaatagacttaagtatttgggaagccatagaaatagggccatatatacccaccacagtagaaagaattacaacagatggtagcacatcaagtgaaagcataacaatagaaaaacctacagatagatggtctggagaggatagaagacgagttcaatacaatcaaaaagccaaaaacataataacatctgccctgngaatggatgaatatttcagggtttcaaattgtaagagtgctaaggaaatgtgggacactctacaattaacacatgaaggaactacagatgttaaaagatct

SEQ ID NO: 4139 - DNA, 426 bp, Glycine max
  unsure (1)..(426): unsure at all n locations
ctattacgtgacactatgaaactaagcttaatcattcaatttgagcatctcgatatattacgggacttaatcagacatccgagtaaaaagttattgtcgtttgaatttgctcagagcttcggtattccatttcgagcgtttcgatatattacgggactcaatcgaacatacgagtaaaaacttgttgtcgtttgaatgtgctcagagcttcaacattcaatttcgagcgtttcgatatgttacgggactcaatcggacatccgagtaaaaagtaattgtcgtttgaatttgctcagagcttcggtattccatttcgagcgtctcgatatattacgggactcaatccgacatctgagtaaaaaggttattgtcgttagaatttgctcagagcttcaacattcaattntgagcgttcggatatattac

SEQ ID NO: 4140 - DNA, 457 bp, Glycine max
  unsure (1)..(457): unsure at all n locations
tgagcacgtaagcttctgtcanaaatccttgttaatatattaaggtccttccttcatgatttgattagggccttgcaatttagtttcataccgaggcggnggaccaaagataatgctaatattctttatgaagtggtgcaccatatgaggatgtccaaaaggaaacaaagagatgtggtcctctagttgtatcttgagaaggcctatgatagggtggattaaggcttcctcaagcagactcttcagctttttggttttcttgaagttattgtctccctaatcatgcacgatatttcttccactagcatctccatttgttggaacgacaataagcttgagggatctaccctagtaaggggactcagaccagggatcccttatctctatatctttntgtcttgggtatgaagtgctttggagccaagaacaacaaggaggtccatgagggtaactggga

SEQ ID NO: 4141 - DNA, 452 bp, Glycine max
  unsure (1)..(452): unsure at all n locations
gtgtcagagaaagaagtgacaatgaacaatagttataacttatgtgaagttaattagttgaatttgacagtttaccaagaattaaacgacataatttcagttgaagagatagaccaatataaaacttcttgtgcctaatctttttgtcttccttaaagttttaaacttgggcaaaagatgtgaatttgtttagatatcttgtgtttctaaaaacatttacttcatctaatagatttttcagaaaaatcatttatttgtttttaacaaagaaccatcggatgagggctttgtttttaaaaggaaaaaagttttaaattttctaaaatcataattcaactctctttcttataatattagtctttacatacatacagatcaataatagtcacaatgcgatcccacaaagctaatggagaaagtgtccataggtnaatggtctattatgttttact

SEQ ID NO: 4142 - DNA, 465 bp, Glycine max
  unsure (1)..(465): unsure at all n locations
tgangcacgtaagcttgctaagatacatggcccaataatgagcctattgctgggacaaataaccactgttgttatgtcttcagcacaaatgcccaaataggtgcttctaaccaatggccaattcttgtcaaaccgaaccattccccaatctgtgccagttctaaactatgaacaatacaaccttgctttcatgcccatttcacctctttggagggaactcagaaaaatatgcaacacttagttatttgcccataagtctcttatgctagccaagacgttaggcgtaagatagtgcaataactagtctccgatatacatcaaagcagacatattggtgaagcagtggatattggcacaacaacattcaagactaccataaatcttctatcaaacactattttctctgtggatttgattcactctacaggtaaagcagaagagttgaaggacttggtgaccaatatc

SEQ ID NO: 4143 - DNA, 183 bp, Glycine max
gaagtgaacctcggatccctgtcggatacaatcctggaaggagattcatgcaaccttaccacttccttgatgtaccactctactatcttctacattctatacttcatattcaccggaataaaacgaaccgatttggtgagtcgatctactataacccacacaacatcatgcccatgactagtc

SEQ ID NO: 4144 - DNA, 415 bp, Glycine max
  unsure (1)..(415): unsure at all n locations
tagctntcactcgcatgtccgattcangcgcatagtgtatcgagacgctagaaatctaacaaaggaagctctcgagaaattcaaatggtcataacttttcactcgcatgtccgattcaggcgcataacatatcgagacgctcgaaattgaacaacttgatttctcgagaaattcaaatggtcataacttttaactcgcatgtccgattcaggcgcataacatatcgagacgctcgaaattgaacaacggatgttctcgagacattcaaatggtcataacttttcactctcatgtgcgattcaggcgcataacttatcgagacgctcgaaattgaacaacggaagctctcgagatattcaaatagtcataacttttcactcgcatgtccaattcaggcgcatagcgtatcgagacg

SEQ ID NO: 4145 - DNA, 406 bp, Glycine max
  unsure (1)..(406): unsure at all n locations
tctgctntcagcanattctaacgataatagctttntattggatgtccgaattaatcccgtaatatatcgagacactcaaaagtgaaaccaaaagctctgagccaaatcaaatgacaataactttttactcaaatgtctgagtgggggccgtggtatatcgagacgttggaaattcaaaatagaagctctgagcaaaatcaaacgacaataaattnttactgggatgtccgactgtgtcccatagtatatcaagacgctcaaaattcaaaacagaagctctgagcatattcaaacgacaataactttttactcggatgtccgaattaatcccgtaatatatcgagacactcgtaattgaaaatggaagctctaagcacattctaacgataataactcattactcgga

SEQ ID NO: 4146 - DNA, 415 bp, Glycine max
  unsure (1)..(415): unsure at all n locations
tgtagctgcaacttagccctgagaaactgggtttataagatttagggagtgaagattgctgaaaaccctagctctgcaacaagtcctatggaagtagacccggagatggacaagaaaatccgcagtattgtgagtagcattctgaaagatgcttctgtgcctgatgctgagaaagatgttccaacatcttccaccccaagtgtttccgtgcctgatgctgagaaagatgttccaacatcctccgctccaaatgctgaagccctcccgtcacccagtgaagaggaatcaacagaagaagaggatcaagcctcagaggagactcctgcaccacgggcaccaganactgctccaggtgacctcattgacctggaagaagtcgaatctgatgaagaacccattgccaacaggttggcac

SEQ ID NO: 4147 - DNA, 467 bp, Glycine max
  unsure (1)..(467): unsure at all n locations
ctgttatgcacctactagttccagtgttggttntcacctgcaatgacacatctgaacaagactccaattttgatgaagatgaaggttgtgagataaggctttgactcactactccttcttcctttcccttgatcatgcgaaatgattttccaacctctgaatgccaaagttgaagaaagtgatcagggcatgttttactcgttggccatgaattgagcattgtggattccaatgacaaccttgcctctgtctcaactctcacactctcccactgtaccatgtgccgcgtcgaaggagattcggacttgacaatggattgatcaggaatcacacatagctgttttgctctttgggaatgacatgatcgaaggagacgcttctttagatgggtgttccagaagttcttaatctcattgtctgttcttccaggtagttgagatgctatagaagcccacctaagtgaatac

SEQ ID NO: 4148 - DNA, 447 bp, Glycine max
  unsure (1)..(447): unsure at all n locations
ctcatcttggaggagaagctccttctttcatggcttattccttaatggatggcgccttctctcacctcttttactttggtttccgtgcatctacatggtggaaaatcaccattaaaggaccccattgaagctaaaaaattcagccttcatagaagccccataagcaagcttccatcacaaaggacttcactgatgaagaagatctaaggcctacaagctccacatggagctatttcagaggttgacaaagctaacgtggaagtcattgaaaaattaccaccaccagcaaatgtcaaaggcatcagaagttctttaggacatgttggattctacaagcanttcatcaaagattattctaaaatttccaaacctttgagcagatctttgaatcaagaagtgtcatttcattttgataattatgtcttaaagctcttgatactttgaaac

SEQ ID NO: 4149 - DNA, 421 bp, Glycine max
  unsure (1)..(421): unsure at all n locations
cttgcatacaacaatggagcttatccaatggacttatcaatgctaagaaaattcaggatctaaagatttagctgaatgctttggaggttggtatttctggcagaatcctgactcaacctgaagtggagctcaagaagtcttttcaggagcaactntgacatgcaactaatgcctatgaatccatgttgaggcaaaaggctagagtgaaatggttaaaggaaggggacagaaattcagcttacttccataaactgataaatcacagaagaagacaaaatgctatacaaggtttgatcattgaaggggggtgggttcaggaccctagtagggttaaaaatgacgctcttaatcattttaaagatagattctctgagcagaatcttaacagaccaaccntagatggtgtgcaactaccttccct

SEQ ID NO: 4150 - DNA, 307 bp, Glycine max
tcaattacgagcgtctggatatattactggactcaatcggacattcgagtaaaaagttattgttatttgaatctgctcacagcttctgtattcaattatgagcgtattgatatattttgggactcaatccgacatacgtggtaaaagttattgacgcttgcatttgctacgagcttccgttttcaattacgagcgtctcgatatattacgaaactcaatccaaccgtcgagttagaagttattgtcgtatgcatttgctacgagcttccgttttcaattacgagcgtctctatatattaccggactt

SEQ ID NO: 4151 - DNA, 337 bp, Glycine max
ctccatgtagcaactaacaaatccaatcgcataaagaatatcaggccttgtgcatgttaagtactgcaaatttccaactaagctcttaaagagtgtcggatctatcctttcttcctactcatgctgtgatagcttgattccacattacattggtgtgttgacaggatcagagacatccatcttgaactccttaatcacttccgtagcatgaccttctcgagtgatgaaaatgtatctatcctatcactctagttcaatgccaaggtagtaagacatgagaccaaggtcaatcattgcaaactctgccataattccttgtttaaattcatcgaacatg

SEQ ID NO: 4152 - DNA, 448 bp, Glycine max
agcttatgctgcaaacatttacaatagacctccttttcctcagcagcaaaatcaaccacaacagaacaattacgacctctccagcaacagatacaaccctggatggaggaatcaccctaatctcatatggtctagccctcagcaacaacaacaacagcctgttccttccttccaaaatgttgttggcctaagcagaccatacattcctccaccaatccaacaacagcaatagccccagaaacagccaacagttgaggctcctccacaaccttccctcgaagaacttgtgaggcaaatgactatgcagaacatgcagtttcaacaagagaccagagcctctattcagagcttaactaatcaaatgggacaattggctacacaattgaatcaacaacagtcccagaattctgacaagctgccttcccaagctgtccaaaatccccaaaat

SEQ ID NO: 4153 - DNA, 387 bp, Glycine max
  unsure (1)..(387): unsure at all n locations
gagctcatatatatcgagatgctcgaaattaaacatcggaagctctcgangaaatcaattggtcataatttatcacactgatgtccgattcgggtgcataatatgtcgagacgctcgaaattgaacaacggaagctctcgagaaattcaaatggctataactcttcacacagatgttcgattcaggagcatcacatatagagacgctcgaacaacagatgcactcgagaaattaaatggtcatagcttttacacccagttccgagtcacgcttatgatatattgatacgctcgagatcaacatcggaagctcacgagatattcaaatggtcattacttttcacactgatgctcgagtatggagaatgccattattagatgctcaaaa

SEQ ID NO: 4154 - DNA, 472 bp, Glycine max
  unsure (1)..(472): unsure at all n locations
tagatagacaatacttcattcataacatcaaataaactattttagtcatccacaatattcaaataaaacatatatgaataattaaaaaaaaataaaacaaaataccaaaagtaagtacataccactagtcatatatcattaaagtaattaagtttaaaacacataatcataaacaaccaagagcaagtcaatataatcatcatgttcagtcatactaagcaagtattaaaagaaatactaagtattcaaatttcataaaaacatagccaaatacaaggcttaaaaacaaaatataattataatctaaatctattatcagagaatcaaaacttaattctaagtaacaaaaattagttatgaacacatacatggtaactcattacttatctcaattattttagcatatcaatataattctgacaaaaatccaatcatgtcanatcatanataaatgggataacatacaataaat

SEQ ID NO: 4155 - DNA, 410 bp, Glycine max
tatagcttcatcaagatgagcggagggacagggagatatagatcatgccattatatgcctcacacgaggtctgaacattgaagcataattcctaaatgatcgaagttgataaaaatacacacatatgatctctatttatagcctacgtgtcacacaaaattagagggaaattcgaatttctattcaaattctacttgaattggaaatcgaatttgtggagccaaaatttcactaattatgattattaaatgctagctatgattcagcccacaaattcaagatcaagctcaagattctccactaagtgtgcttaagtgtcatgaggcatgtatagcatgaatgacatgcacaaagtgtgactatatgatgtggcaatggtgtgcagcaagcaaatgctcacctccttctct

SEQ ID NO: 4156 - DNA, 435 bp, Glycine max
tctgttttctattgcgagcgtctagatatactacaggacacaatcgtacattcgagataaaagttaatgtcgtttgaatatgctcagagcttcggttttcaatttcgagcgtctcgatatactacgggactcaatcggacatccgagtaaaacgttattatggtttgaatttgctaggacctactattttcaatttggagcatctcgatatattacgggactcaatcggacatctgagtaaaaagttattgtcgtttgaatatgctcagaccatatgttatcaatttcgagcatcacgatatactatgggacacaatcggacattcgagtaaaaagttattgtggtttgaattcgctaggagctactattttcaatatcgagcatctagatatattacgggactcaatcggacatccgagctaaagcttattgtc

SEQ ID NO: 4157 - DNA, 418 bp, Glycine max
  unsure (1)..(418): unsure at all n locations
tctgctntgagcaaattcaaccgacaataactcttatcttggacgtcagattgagtccggtaatatattgagacactcgaaattgaaaacagatgctttgagcaaattcaaacgacaataactttttactaggatgtccggttgtgtcccgtagtatatcggcacgctcgtaattgaaagcggaagcttgtagcaaattcaaacgacaataacttttaactcggatgtgcgactgagtcacgtaatatatcgagacgctcgtaattgaaaatgttagcttgtagctaattcaaacaagaataactttctactcggatgtccgaatgagtctcgtactatatcgagacgctcgaaattagagcagatgctttgagcaaattcataagacaataactgtttactcggatcgccgattgag

SEQ ID NO: 4158 - DNA, 460 bp, Glycine max
tctttgcatgaagcaccacctcattagagacacaagttaatagcaacaacaacaataatgcagaggaagattaaccttgaaatggaagaatgccccattttggttcctactaaatagagtgaacgtacaatgtcatgtttcatcattggggactttgaaaatgcgcatgattcggtttcttggggctttctaaattacatgttgatgaggatgggattttgtgaaagatggaggaaatggataaatgtttgtatgtctactgcaactatatccattttaattaatggaagtcccactagggagggtgatcccctaagagaggcttaaggcagggtgattccctaccacctttgcttttcaatatagtagtggaaggccttacaggtctgatgaacacagccatatctaagatccttttcagcagcttccaagtgggaagtcacatgaggaagttacatac

SEQ ID NO: 4159 - DNA, 466 bp, Glycine max
  unsure (1)..(466): unsure at all n locations
cataatatatcgatatgctcgaaactaaacatcggaagctctcgagaaattcaaatggtcataacttttcacacggatgtccgattcgggtgcataatatgtcgagatgctcaaagttgaacaacggaagctctcgtgaaattcaaatggtcataacttttcacactgaggtttgattcaggcttataatataacgatacgctcgtaagtaaacatcggaaactcttgagaaattcaaatggtcataacttttcacacggatgtccgattcgggcgcataatatgtcgagaggctcgaaattgaacaacagaagctcttgagaaattcaaatggtcataactnttcacacggatgtccgattcaggcgcataatatgtcgagacgctcgaaattgaacaacggaagctctcgagaaattcaaatggtcataacttttcacacggatgtccgattaggcgcatcaca

SEQ ID NO: 4160 - DNA, 314 bp, Glycine max
  unsure (1)..(314): unsure at all n locations
acatccgagaganaatctatgactatttgaatttctcaagagcttccgctgctcaatttctagcttctcgatatgcgacccgcctgaatcggacatccgcgtgacaagtcataccacccgacattctcaagagcttcccgggttcagttttcgacgcctcgatatgtgatctgtctgaatccgacatcccggtgaaaagatatgaccatttgcatctctcaagaccctccgctgttaactcccagccctccgcatattatgcgaccgaatcggacatccgcgtgaaaagttatggccatctgaatctcctcaga

SEQ ID NO: 4161 - DNA, 365 bp, Glycine max
  unsure (1)..(365): unsure at all n locations
tgaaggtgtgtagcccatcatcttttcatagtagaatactggtaatgtgtctactatcattggtatcattnttttcttcgtcattgaggtgccacttgagctgccaagtctctccacctttgggcgtattcttttgaaagattcatgccccctttttgcacatgttctgtagttgcatcctatccgaagacattatactgacactgcctaacaaaggaaaccactaggtccttccaagaatggactcgggaagggtccaagtttgtgtaccaagtaacagctaccccagtaagactttcttggaaggaatgtatcagcaattcctcatcttttgtgtatgcccccatcttcccgatatacatctt

SEQ ID NO: 4162 - DNA, 379 bp, Glycine max
  unsure (1)..(379): unsure at all n locations
cgccaaagagcatgtntgcagccaagaaaagttgctgaagctctgaatctctgaggtagaagttacttggaatgctacctgtcagagcattatcagactattaagctcagaaggaatttctccatgtagtttgtttccaaccaaattcaggtatgtcaagttagaaagatgactcaaagctgttgggattgatccagataaactgttattggccaaattcagaattttcaaagatttaagagatcacttagaggaaggtaagtctttttcaagcatgttgtttgatgctgcaaagttttggagctcttcacaaccttcaatctcttcaggtatgtggccattaatgctattcatttgtacatcaagagatattagatgc

SEQ ID NO: 4163 - DNA, 401 bp, Glycine max
  unsure (1)..(401): unsure at all n locations
tttagcctagctctggggacatttgactgcttcatctgacttacaagatctgcttctttattttagagggggatgccttaacagcacttgcaatgattttttcatgcctctttaagtgccagatgtccaacatcttttgatgccatattctgacttcatcttctttggaggatagacatgtggaggagtagctggtttcttgaggtgtccataggtaacagctgtcctttgatctgctgcccttcattagaacttcactcttctcatttgtcaccaagcattctgactttgtgaagtttacattgaatccttcatcacacagctgactgatgctgatcaagtttgcagtcagtcccttcaccagtagtactttggtcagacntatgaagtcatcatgagct

SEQ ID NO: 4164 - DNA, 443 bp, Glycine max
tagtaaagctaagcactaacaatctccccctgtggcaaattttgtctaaaacatacttaaacacttcctgagcatgtacgagcagttatgcaagtgggatcagcaacttccattatcagagtaatcaagcacagcggaaattctgtaagttgcaagtcgtttccaggatgtcaagacatctcacatgacatcagctttctgcttctgcatcccctgtctccatgcttactgcaacatcttttaacagctactagtcttctccaggatgtcaagacatctactgtgacatcagctatctgctccccctgtctccatgctcttactgcagcatcttctagtagctttcatcagtcatcatcagcagcagcagtctccccctcaaaatcgtatacatacaactccccctcaaaatcatgaatcatgcatacatcgtattctactac

SEQ ID NO: 4165 - DNA, 487 bp, Glycine max
  unsure (1)..(487): unsure at all n locations
ttacggacacttaaaactaagctaacaagcttntttatagtttgagccttgaccttttatctaaagagactntaaaaagcttgagcttggcctttatgataaacaagtcaagccgagctgagccttacataggccgagccaaaggctctcgacaagctgctcggctcatttccacccctaaccctatagcaaaagttggcatcttcagtgatgaatgtcgttttctcctcgtttggagcatgcatcctgatttggttgtatttggagtaagagtccaagaagtttagcacctggaatccagacaatccatcgactagcttgtcaatgcttgatagagggtatgcatatttagggcacgccttgttcagatcagtatagtcagtgcacatttgtcatttgtcgttggcctttttgaccatgacaatgttggcgagccangtggagtatctaacttctcttatgaagttggcattgagcagttatctac

SEQ ID NO: 4166 - DNA, 443 bp, Glycine max
  unsure (1)..(443): unsure at all n locations
tagcttgctaacccatggaagctcctaatatctccttactntntggggtgggccattcttggatggcctttattttctcatggtccacttggaccccatttctaccaactacaaaacctaaaaaaactatattatctacacaaaaggtacacttctctatatttgcatagagggtgtttttcctaaggattgaaagaacttgcctgagatgtcctaagtgatcatctaagctcctactgtacactaaaatatcatcaaaataaacaactacaaatctacctatgaaatcccttaagacatgatgcataagcctcataaaggtgcttggtgcattagtgagcccaaaaggcatcactgaccattcatacaaaccaaacttggtcttgaaagccgttttccactcatcaccctttntcatcctgaattggtgataaccactttta

SEQ ID NO: 4167 - DNA, 470 bp, Glycine max
  unsure (1)..(470): unsure at all n locations
cgatgcacaatttcattgaagagacaaatattacaatatgtatttaacatgtatataaaatgttgagataaattataaagactaagagaagaattatgacaaaaaaaatgagatgaaaagtattggagttatgattatgatcatgtcgagctttgcacaagttaacaatgtacctattaaatttggttgtgattccaaatgttgagaaaaatgtctagattcaatttccatttttccatatcaagtgtgtttttgcatgtgtatgaaaaaatgtcataaaaagtcgaataagaatggtattcattctcttaccactttntaaggttttgtaattattattttataattgaattaattattattttacatgttgtttatcattgactntatttccttagatgctgatcattacattagattcttgcttgcaagagtactaaaacaagtaaaaatatgttacaagaatattg

SEQ ID NO: 4168 - DNA, 435 bp, Glycine max
  unsure (1)..(435): unsure at all n locations
tctgcttccttcaatnggacaacagtggtgtgcctcttaatatcaccacctaagtagtgtttggttctactgccacgctgtccatgtccttttggnggttgggtcctccaatatcaccactccaagtggcataacttcattgatgaagaatggtctagaccacttggatttcagcttacctagaaacaatctcaatctagaattaaataacaaaacctgttgaccaggctgaaaattcctttctgaaagctttttatcatggtaaattttaactctttgcttataaatcttggaattctcataagcttgaaacctcagttcctcccattcatgaagttggagcttcttattttcactagttgcatttgagtcaaaattcagaaacttcaatgcccaataagctttgtgctccaactcaacaagtacgtgacaaga

SEQ ID NO: 4169 - DNA, 465 bp, Glycine max
  unsure (1)..(465): unsure at all n locations
ttatagaacgtttgttcctaatttctctacaattgcatctcctctcaatgagctggtgaagaagaatgtggcatttacctgnggtgaaaaacaagagcaagcctttgctttgctcaaagaanagcttactaaggcacctgttctagctcttcctgacttttctaaaacttttgagctagaatgtgatgcctctggagtgggagttggaactgtattgttacaaggtgggcaccctattgcttattttagtgaaaaacttcatagtgtcaccctcaactaccccacctatgataaagagctttatgccttaataagagccctctaaacttgggaacattaccttgtttccaaggaatttgtcattcatagtgatcatcaatcacttaattacattagagggcaaaacaaattaaacaaaaagcatgcaaaatgggtagagtacctatagcaatttccatatgttat

SEQ ID NO: 4170 - DNA, 470 bp, Glycine max
tatggacttgggtgttgcccaatttcatcgtatcttttgtaatactcaccacctctattagatctaataattttcacttttttgtctaattgtctttctactttattcaagtaaatttctaaggcatccattgcccgagatttctcatgcagtaagtaaacataaccataacgtgaatagtcatcaataaaggtgataaagtatctttcctttccgaaagaactaacatcaaaaggtccacaaatatcagtatgcacaatttcaagaagctgagtgcttcttgtagctcctttctttgtatgttttgttgttttcccttgatacaatccacacaaatatttagatccgtaaaatctagatcatgaagaatttcattctttattaatcattccatcctttctctagaaatgtgacctaaacgtttatgccacaagaaagcagatcgttcattcactaaacctacgttagtg

SEQ ID NO: 4171 - DNA, 392 bp, Glycine max
  unsure (1)..(392): unsure at all n locations
ncaagctttatagaaggttcgctcctaatttgtctattattgcatcacctctcaatgagctagtgaagaagaatgtggcatttacctggggtgaaaaacaagagcaagcctttgctttgctcaaagaaaagcttactaaggcacctgttctagctcttcctaacttttctaaaacttttgagctagaatatgatgcctctggaatgggagttgaagctgtattgctacaaggtgggcaccctattgcttattttagtcatagtgccaccctcaactaccccacctatgataaagagctttatgccttaataagagccctgcaaacttgggaacattaccttggttccaaggaatgttgcattcatagtgatcatcaatcacttaagtacatt

SEQ ID NO: 4172 - DNA, 226 bp, Glycine max
tctggtgggacatcttgacttgctgtgcgatctgacatttatcacaaattctgcctgtttctattatcagattgggaatgcctttaacagcactttagtcaacgattgtcttcatgcctcttaagtgcagatgttcaaacctttgatgccatattctgactatatcttttttggaggatttacatgtggatgagtagctggtttcttggggtgtgcatatgtaaca

SEQ ID NO: 4173 - DNA, 444 bp, Glycine max
tcaccaactcatcttcaatgactccatatggccttgtgatgtgagcggtcagctaactggagggtcatgcgtgtggacattatttccagctctccaagttgccggcacatggagagaggcattaaattgatactggctcccaagtctatgagatctttgcctacaacaacctcgctgatagaacacggtatcgtgataactccaggatctttgtgcttgggtggaagaatgcgttgaataacaacactacaattaccttccacaacaattctgtcactatggatgtaccggttcttcttggttagcatatccttaaaaattttggcatagaggggcatttgatgaagtgcttctccaaaaggccaagtaatttccagtttcttgaagatatcaagaaatctggccaaatgttgctctctatctattcgggaggtaccaatggat

SEQ ID NO: 4174 - DNA, 334 bp, Glycine max
  unsure (1)..(334): unsure at all n locations
acttggtaacccagctggccttgaatcataaatctgtacctgtcggaaggctttgtggtttgtgctcctctgctgaccaccatacagacctttgtccttccatgcaacaacctggagcaattgagcagnctgaagcttatgctgcaaatatttacaatagacctcctcaacctcaacagcaaaatcaaccacagcagaacaattatgacctttccagcaatagatacaaccctggatggaggaatcaccctaacctcagatggtccagccctcagcaacaacagcagtctgctccttcctttccaaatgctggtggcccaagcagaccatacat

SEQ ID NO: 4175 - DNA, 406 bp, Glycine max
  unsure (1)..(406): unsure at all n locations
agctntagtgtgttcttcgagcttctctgtgaaaccaaaagcaaagcaacatcataaagctttgaaagagcatcaacataaacgcacccgtacttataaaaatcgaaaaatcgaagctttagtgtgttcttcgagcttctctgcgaaaccaaaagtatgtgatgcaatcctaccccgcaagggcattggatagaaaactccaagtagattgggccagagatgcaagagaaggccctagggttcttatgagccttagggtagatttcgggcccatgggctaagtacgagcccacttatctttgtaaatattagattaaggtttcattatttttgggccttgtatttagggctccataatgtaggtagggtaccctacaaatataagatttttcagcccttgtatttt

SEQ ID NO: 4176 - DNA, 425 bp, Glycine max
agctcttactcggatgtccgattgagtcccgtaatatatcgagatgctccaaattgaaaatagtagctcctagcaaattcaaaccataataactttttactcggatgtccgattgtgtcccgtagtatatcgtgatgctcgaaattgaaaacataaggtctgagcaaattcaaacgacaataactttttactcagatgtccgattgagtcccgtaatatatcgagacgctccaaattgaaaatagaagctcctagcaaattcaaaacataataactttttactcggatgtccgattgagtcccgtagtatatctagacgctcgaaattgaaaatagaagctctgagcaaattcaaacgacattaacttttttctcggatgtacgattgtgtcacttagtatatctaaacgctcgcaacttaaaac

SEQ ID NO: 4177 - DNA, 480 bp, Glycine max
  unsure (1)..(480): unsure at all n locations
tgaacgaatctaagatacatcttcttcaactctggtgattcttgactccatctcattgaagcgcatatccacttgtaattccaaagtgtcaaacctttcaccaacaaaggtttgaagaccatcaaacctgtccaaaatctttgaagtgttgaaggaaaacggtaacaagatgaggctaacgcaatggagcattcaatcgcaatgccttatgcatgcgatatctaacacgatgtgcccaatcaatttgtagacctttatgaaaggcccacataacaatgagatcttcttcagaaacctgagcaaggtatgaagatctcggaagcaagatgcgaacaattagttaatgaaggatgcgactttcacaagccaatgaacccgcaagaagcctttcggtcatatccgcttggctggtgcanaccaaccggtgggcatcatgtacagagaaatcaaacttccaatcgtcaattagtgcaccttcaa

SEQ ID NO: 4178 - DNA, 430 bp, Glycine max
  unsure (1)..(430): unsure at all n locations
agctntattcttccattgtatcaaggtctgctgaacctcattaccctcctgtattatgactcttgaacccaacaccttgtctgggtacacatcagtctcctcagtcacttccaaatctttatgtaactctccctgtacctgtaagctacttcgcccatcttctccggcacctggaaaggtccatagaatcttgcagcgagtttctgatgaattctttttaccgctgattgttgtctatggggtctaagtttcaaaaagacccattctccaacttcaaaacacaagtccctcctcttcttgttagcataccttgtcatttgttcctgaggtttgagcaagtggagtttgagtagattcaaacctcatctctttcactcaactccaatgtcacagcagccaccttagtctcatagacaaaaatctcacaatg

SEQ ID NO: 4179 - DNA, 339 bp, Glycine max
  unsure (1)..(339): unsure at all n locations
acatcttgactcgctttccaatctgacattcttcacagattctgccttcttctattttcagactgggaatgcctctaacagcaccttcgtcaatgattttcttcatgcctcttaagtgcagatgtccaaatctttgatgccatattttgacttcatcttctttggagaatacacatgtgcgaggagtcactggtttattgaggtgtccatatgtaacagntgtcctttgatctgctgtccttcattaggacttcactcttctcatttgtcaccaagcattctgactctgcgaagtttacattgaatccttcatcacacaactgactgatgctgatcaag

SEQ ID NO: 4180 - DNA, 440 bp, Glycine max
  unsure (1)..(440): unsure at all n locations
agcttctactgcgaggaataaaatttagttacggcagtgatgtagctctttcttgtttactgatagcaaatttcaaacaaatattgaatctaaactcataagaagcatactaaaacactggtatttatttcttcccatgcttaccccttgcatagaagagatttgcgttcttgcaaactgggaattaagttggtcatggcgattaacctgactagcatcctgctgtctattaccaaactctcggttatctctgaggttttcccaagatctctcatctgtactagcaggaggttgtccagaacgaccacgccaatcacggttatctggctcagaataccgattttgtaattgatgaggaagctgcagaagataaagtaaacattattatataacatctgagttgtgaaaatgattacagagagaattaanaacagataata

SEQ ID NO: 4181 - DNA, 440 bp, Glycine max
  unsure (1)..(440): unsure at all n locations
tggatntcctcttagtagggaatctatctttcctaagatatatccaaactcagtccccctcattaagaactagctcatttcttcctctattgcctttagtggtatacacctttgtttggttctctatttggttcctaaccctctcatgcaacctctttacaaaatcttacctagattccccttctttatgtataaaagaagtgtcaagtgggaagggaatttggtgtaagggtgttagaggattgaacccatagacaacctcaaaaggggattgcttagtggttctatgaatccctctgttgtatgaaaattatacaagaggaagatactcatcccaagacttatggttgcctttcataattgcccttanaagggtggatagagacctattcactacctctatntgcccatcaatttatggatggcaactggtagagaaa

SEQ ID NO: 4182 - DNA, 331 bp, Glycine max
  unsure (1)..(331): unsure at all n locations
agcttgtactttcttggtttgacaactatcactgtggcaggaaagccactangagtttctgcctcaagctacaatgttcctaccataattgactctggcacagtaatcacaaggcttcctgtggctatttacaatgcattgaacaaatctnttgtgatgatcatgtccaaaaagtatgcacaggcaccaggattctccatattggatacttgcttcaaggggagtgttaaggaaatgtcaacagtgcctgagattcgaatcatatttcgtgggggtgctggcctagaacttaaggttcataacttccttgtggaaaatgagaaggtactac

SEQ ID NO: 4183 - DNA, 404 bp, Glycine max
agcttatgagcttcgagtgggttgccaatgtaataatgatttatatagtacaattaatatactcttaattgagagagattaaaatagcacatatttattgaaataacacactcgacaaatagtacatagaatttattaatgaaaaaataattattttattcacatataaaatttcaaaaaaatgcatttgactattttatcaaaataagaaattttgaaaataaagaaattcaatttctttatccagatacaaaattctgaaaataatgaaatttaatttgcttatccaaacatagacatttgaaaatgaaagaatttcacatgaagcatttgaaatttttagaattctaaaattagaattttaaattgcctcatccaaacaaactctaaatgtaatgttgatc

SEQ ID NO: 4184 - DNA, 468 bp, Glycine max
tcagagggaaggcctcgaaggagaaaaagaattcaaggctgaaatggaggttctgagtggtcatggatttggctggcctcatccaaacctggtcacgctctacggttggtgcctaaatggttcagagaagatactgatttatgagtacatagaaggtggaagcttggaggatttagtcactgatagaacacgtttgacatggaggaggaggctagaagtggcaattgatgtggcacgtgcactagtctatttgcaccacgagtgctacccttctgttgtgcacagagatgtgaaggctagcaatgtattactagacaaagatgggaaggccaaggtcactgattttgggcttgcaagagtggttgatgttggggacagtcatgtgagtactatggtggctgggacagtacgctatgttgaccagaatatgacacacatggcaagctactacaaaggggatgtgtacag

SEQ ID NO: 4185 - DNA, 382 bp, Glycine max
  unsure (1)..(382): unsure at all n locations
agctntaactcggatgtccgattcangcgctttatatatcgagacacttgatattgaataacagaagctctcgagaaattcgaatggtcataacttttcacacggatgtccgattccggcgcataatatgtcgagacgctcgaaattgaacaacggaagctctcgagaaattctaatggacataacttttcactcggaagaccgattcacgcgcataatatatcgagacgctcgaaattgaacaacggaagctcccgagaaattcaaatggtcataacttttaactcagaggtccgattcaggcgcataatatatcgagacgctcgaaattggacagcgcaagctctctagaaattcaaatggtcataacttttcacttgga

SEQ ID NO: 4186 - DNA, 397 bp, Glycine max
agcttgtgcatccaataccctgatgaggatgtcccatatgttcttaacactggactgattcattcgcttccaaagtttcatggccttgcacgtgaagacccgcacaaacatttgaaagaatttcacattgtctgctccaccatgaaacccccagatgtccaagaggatcacatatttctgaaggcttttcctcattcattagagggagtggcaaaggactggctgtattaccttgctccaaggtccatcacgagctgggatgaccttaagagagtattcttagaaaaaaatttccctgcttccaagaccacagccatcaggaaggatatctcatgtattagacaactcagtggagagagcctgtatgagtactgggagagaattaagacactatgtg

SEQ ID NO: 4187 - DNA, 458 bp, Glycine max
  unsure (1)..(458): unsure at all n locations
aactgaattagacctttcaattaacaaactccctggaaccatttcgggagacatagccactcgtataccatttgcaacatctgttattctagcttcaaatgaattttctggggagattcctgtgagtcttgcaaactgtaaatttcttaatacccttaaactcgatcagaatcgactcactggtcaaattcctccacaatttggtgttctctcacgaatcaagacattttatgtatccgacaatcttttgatgaggccagttccaatctttagcgctggagtttcaaaaaattatgcaaataaccaaggcctatgtggaggaaaatcattcgcgccttgcaaggcgaagtcttccaagagtaactnggttgttattgctggagctgctgttggcggcgtgactcttgcgacattacgattgtgtattggatcngtcttctttgtgcgacgtgtttctt

SEQ ID NO: 4188 - DNA, 471 bp, Glycine max
tggtgcctttcacgtctggaatatgaatgtagcatatagattcaaagacccttaggtgctttgttgatggcttcttcccgatccaagcttcaattggagtcttgtcttttacagacttagttggacatctgttgagtatgtaaacagcagtgtagactgcttcagcccagaatgtgttatgtagtcccttctccttgagcatcgatctagccatctccataactgtgcgattctttctctcggacactccattttgttgagaagaatatgcgactgtaagttgtcgctcaatgccttcatcctcacaaaatctttcaaactcgcgagaggtgtactctctgctgcgataacttcttagtacttttatccgttctcactttgattttagcaagggccttgaactccttgaatactccaaagacttctgacttttctcttacaaaatatacccatgtcattctagagaagtca

SEQ ID NO: 4189 - DNA, 440 bp, Glycine max
  unsure (1)..(440): unsure at all n locations
agctntgattatccttctgatacaatgctgtcttgaatgaagattgtatgagacctcaaaagaaatcttagtattcaccttacagcttggaagaatgctgattatccatttttgttttttttttttttcttgaagcagtagttctaggtcgtctcacttttttcaaaatgtttttcattattaagaaaaggtaacgaagatcaaattcgagcttgttttatagtccaggagacttcacttggggtattattctgcacccttatcctgagatctatataatgaagggaaccaaaaagtaccacagagttggaccatggaatggtttgtgtttcagtggcggcaggccaaaaactaacaatcccatttaccattacgagtttgtctccaacaaggaagaggtttattacaaatggccctcaagaatgctagtttattatcga

SEQ ID NO: 4190 - DNA, 393 bp, Glycine max
  unsure (1)..(393): unsure at all n locations
tgttgcgcgtcatgggaccatacaaactgctccttcatcataagatgtgttaaaggtatcacaatagtggcataacctttgaagaaatgtcaatagaaacccatcaatcccaagaaaccccatagagctttaagggaactaggagcatgccactgttggatcgcttggactttggcttgaaccagttccaccccatgttcagagacaagatgtcttaagtattcaacctaacgttgagcaaaggaacattgggacaatttaaggaagaatttgccttccaataacacctgaaatgctttttccaaatggaacaagtgctactcaaatgttttcctataagtcaagatttgcggtctcgctcacgtcctcatncttcactaaaatttgatggta

SEQ ID NO: 4191 - DNA, 441 bp, Glycine max
agcttctggtgggacatcttgacttgctttccaatctgacattcactacagattctgccttcttctattttcagattgggaatgcctctaacagcacctttgtcaatgattttcttcatgcctcttaagtgcagatgtccaaatctttgatgccatattctgacttcatcttctctggagaatagacatgtggaggagtaactggtttcttgaggtgtccataggtaacagttgtcctttgatctgctgcccttcattaggacttcactcttctcatttgtcaccaagcattctgactttgtgaagtttacattgaatccttcatcacacagctgactgatgctgatcaagtttgcagtcagtcccttcaccagcagtactttgtccagactaggaagtccatcatggactagctttcccattccagtgatctttccttta

SEQ ID NO: 4192 - DNA, 446 bp, Glycine max
  unsure (1)..(446): unsure at all n locations
tctggctcatttggaacttcaagctcctctgatcagtcctaattaanaatatgtttcctagcagataatgcctncatttcttcactgctaacaccactaccatcagttccctctcatatattgacttgacttgagccctgtctgacagagccttgctccaaaaagctaaaggtttctcttcctacaataaaactggccctagcccagttcctaatgcatcagtttccatgataaaattnttagagaaatctggtagtgccagaataagaagcctnctcattgctgccttaagctcttcaaaggcatgagtagcttctacgaggtatntataaaccaagttagagatagttacaatccacgtatttataaacctctatacagcagaactaacctatactaactctaacanaaagctaactaactctaacagctagctacctaactct

SEQ ID NO: 4193 - DNA, 428 bp, Glycine max
  unsure (1)..(428): unsure at all n locations
agcttcttatccaaggtaattcttggtggtgaagctccttcttccttgtcttattccatagtggatggtgcctcccctctcctcttctcctttgccttccgctgcatctccagggtgtaaaatcaccattaaaggacctcattgaagctcaaagatccagcctccatagaagctctacaagcaagcttccatcacaatatatataaattatcatccgggaaatcatcccgaatgggtaagtcctcatcagacacatgttcgatccgactcaaatgatcagcaactaaattntatgctctgctcctatcacggatctccaagtcaaattcttggagccaaagcatccatcagatcaacctaggctntgaatcagccttctgcaacaagtactttaaagctgcatgatcagtataaacaataatgcgagt

SEQ ID NO: 4194 - DNA, 433 bp, Glycine max
tgcatgcatattgacggacactgttgatgcgacatagaatgtgtactagaaggacttatcagctgcattgactaaggacaatgccgaaatgagaaccattagaagaattgcaggaccaatgcaatcgagtgggaatattgtgttgatttgacgaccctctgcaaaggctaagattattagagggagggatataagacctgagggcagaaggaatctttttgattgacccaaaaagattctgcctctttctgaactcatgtgcattaccaatatgacaagagtcaccaagttagaagctgctgttaagagaacgaccaagatatcaaccacaagagggtagtttgaacggtatgttttgtcacacaaataatggtcacggcaattgattgtatccaaggtttccttcactcgccaactgatgcatttgaagaat

SEQ ID NO: 4195 - DNA, 402 bp, Glycine max
agcttgtgtcacaattcactgtgacagtcatagtgtcattcacttagcaaatcaccaaatgtaccatgagaggacaaagcacatagatgtgaaactacacttcatcagagatgtgattgaatctgagaaggtgaaggtggagaaagtttcaacagaagaaaatccggctgatatgttcacaaagtccctctctagtgtcaagttcaagcactgcctggacttgatcaatttcgaagatgcctaaagcagtttggtagaagtgcagccctaaatcacaaggaagacacttgctgatttggagtcaaggtggagatttgtggtgtgtgactcacaatcacaatttgcacaagtgagaatgctttaaagtggcgctgtcataaatgttgtcagttattataactg

SEQ ID NO: 4196 - DNA, 451 bp, Glycine max
  unsure (1)..(451): unsure at all n locations
agcttgtttagtcaaaaaggtaggtcgtgtgtcttaagaaaagtttattatgcttgatggcccggctcatttagcaacaatgtttttttaataaaaatagtattaataataagatatataatattataattattttatttaaattataaaattattatagtggtttgatgatttaaattattttaattaatttttaaaatatgttaattcctataaacctagatgagtagcataaatattgactattttttttttggtggatttaaaagactntgctatcatgttacatgtaatatttgtatgtaagttttgtccatatcttatgatttaaaattgttttattattttaatgaanatctttgattntgttaaaaaaattatacaactattaatataaaatatgccttaaaataaactaacagatcaaacttatacaaacattagagttaga

SEQ ID NO: 4197 - DNA, 454 bp, Glycine max
agaatcggacatccgtgtgacaacttatgaccatttgaatatcacgagagcttccgctgttcaatttcgagtgtcactatatatgatgcgcctaaattggacattcgagttaaatgttaagagcatttgaatatctcaagagctttcgcttttcaattctgagcgtctcgttatgtgattcgcctgaatcggatatccgtgtgaaaagatatgtccatttgaatctctcaagagctttcgctgatagtttcgagcgtcttgacataatatgcgcccgaatcgaacatccgagttgaaagttatgaccattcgaatatctcgagagacttcgatgttgaatttcgagcgtatccatatattatatgcctgaatcagacatctgtgtgaaaacgtatgaccatatagatttcacaagagctctctgtgtgagattcgagtgtcactatatgtgatg

SEQ ID NO: 4198 - DNA, 413 bp, Glycine max
cattcaattcgtgcgtgtcgatatgttacgggactctattagacattcgagtacaaagttatggtgcgattgtattggctcagagcttcaacattcaatttcaagcgtctcgatatgttattggactcaatcagacatccgagtaaaaagttatggtcgtttgaattggctgagagcttcaacattcaattacaagcgtctcgatatagtacgggactcaatcagacatccgagtaaaaagttatggtcgtttgaattggctcaaagcttcaacatttaatttcaagcgtctcgatatgttacgggactcaatgagacatccgagtaaaaagctatggtcgttgaattggctacagcttcacattcaatctaagcgtcttatatgtacgggcccaatcaaactccgagaaaaa

SEQ ID NO: 4199 - DNA, 354 bp, Glycine max
atccacaaacttatggccagactgaggtcgcgaacttggtgcgggagcagtacttacgagccttagttcaccgcaagccaacgtcgtgcgggcaattcctgttatgggttgagtggtcatacaactcttcatgccactcaggcacaacgatcagcccgttcaagatcatctacggtcggaaaccacctgctattccggaatatttgggggggacatcgtctatcaacaccgcggatgatgtgctcaaccaacgcgaccaggttctgaagctgctcagtccgaaactgctcatggcacagcatacgatgaagtatactagatacgcacacagacgacctcaagagtctaacatcc

SEQ ID NO: 4200 - DNA, 373 bp, Glycine max
agctttctcaatcacctcattaagaactagttcgccatgcaggatgtgtctgacttttatgaaagatgaccgcctctcatcaatgagaccagatatcacttgtctcaatctatatgctaataacttaactatcacctttgtcatacattcagtcaaggagattggtctgtagtcatcaaatgactgggggtgtttggttttgggaattaaagctatgaaagaagcattactgcctctagggaagctgccatgcacatggtaatcatctacaaatcttctgatgtcagatttcatcatttcccaaaattctttaatgaatttgaagttgaagccatcctgtccaggacagttgtccgcatcacaactccacact

SEQ ID NO: 4201 - DNA, 417 bp, Glycine max
  unsure (1)..(417): unsure at all n locations
acgtgaatatcanaaatcaatttcaaattatattctatcttcaaaatttaaatatgctcaaacatgtatatgatatattatcagatactcgtaatatcaactaaacaaattgacctaacttcttatctctttttgatttatcattttcaatatcttcttattttaacttgaatttgaatagtttaaaaaaatattttttcaatatataaaaattatctatcataaatataaaatataatttatttgttcaaaaatatttatttattatatattttaattataatataatttatatatttagaagtatatctttatcataaattataaattctcatttataaaataaacatttactctatataatacatagactaaaatactagtatatctaaattaaatgcactatttaagttaaat

SEQ ID NO: 4202 - DNA, 327 bp, Glycine max
aagctcggcttttgttttactaaattgttaacaggttcatgcctatgagaggtcagaccgagtttacaattacaatttagatccatgtggtcctgtatatattacagttggggatgggggcaacagagagaagatggcattcaaattcgcagacgagcctggtcattgtcccgatccattaagtactcctgatccttatatgggtggcttttgtgcaacaaattttacgtttggtacaatagtgagtaacgtttgatgggatcgccagccacattacagtgctttcacgagaaagtagctttggatatgggactctagacgtactca

SEQ ID NO: 4203 - DNA, 448 bp, Glycine max
  unsure (1)..(448): unsure at all n locations
agcttgttcagaaacgtgcatttgtgtgcaatacacaattcccggtacaccacaacaaaatggtgtatcagaaaggcgaaatagaactttaatggatatggttaagagcatgttaatcaattagactttatccgtatccttgtggatatataccttgaaaactgccatgtagttgttgaacagggttcctagtaaggtaattccaaagacaccttttgaactgtggacaaataggatacctagtataaggaacctgcatgtttggggttgccaggcagaaataaggatttataatccgcaagaaagaaaattggatgcaagaacaatcaatggatatttcattggttatccagaanagttaaaagggtatatatcttattgttataatcatagtatgagaattgtcaaaactggaaatgcaaggttcattggaaatgatgaaatcagt

SEQ ID NO: 4204 - DNA, 421 bp, Glycine max
  unsure (1)..(421): unsure at all n locations
agcttgctaaccaatgtaaactcctaatatctcccacactntntggggtgggccattcttggatggccttgattttcttagggtccacttggaccccatttctaccaactacacaccctaagaaaactatattatctacacaaaaagtacacttctctatatttgcatagagggtgtttttcctaaggactgaaataacttgcctgagatgtcctaagtgatcatctaggctcctactgtacactaaaatatcatcaaaataaacaactacaaatctacctatgaaatcccttaagacatgatgcataagcctcataaaggtgcttggtgcattagtgagcccaaaaggcatcactagccattcatacaaaccanacttggtcttgaaagcagttttccattcatcaccctttttcatcat

SEQ ID NO: 4205 - DNA, 423 bp, Glycine max
  unsure (1)..(423): unsure at all n locations
tctcaaagatgtacttaaccaggtccatcttggatatcaactaggtggtatggctcagcatgtattgtcttagacggtgggacgcccagactaaagcacaacacgttctttcgagcagggagtagttcatttcataggccgtgaactttttactcaagtagtagacagcgcgttctcttcttccggactcgtcatgttgccccaacatacatncaatcgactcatccaaaatcatcatatacaagatgagaggccttcctggtaccaacgacataagcacgagagggttcatgagacactgtttgatccttccaaacgcctcttgacaatcctcattccaacggacggattggtttctgcgtaagagttggaataacgggtcacaattagccgtgagtcgtgatatgaatctggccatataat

SEQ ID NO: 4206 - DNA, 452 bp, Glycine max
  unsure (1)..(452): unsure at all n locations
ntgtagggtatcagctcgcgatctctagtttcccattcctctctcagctgatggattaccaatgttgagtcgccgtataccttgagtagtttgacattggagtcaatcgctgcctagacggctagggcacatgcttcatattcggccatgttgttggtgcagtcgaatcctagcctggctgtgaagggtacacattgattgtccggagagaccaatactgccccaacgccatggcctagaatgtttgacgctccgtcaaaccatacgatccatctgtcccgatcttcgtccaattnttcctcaaacaaggccatgatgtcctcatccgggaattcacgatgcatgggctgatagtcgctaagaggctgttgagccaaataatacgctcaggcgctcccttttatcgccttntgagcgacgtagactatatnaaactccgatagcacgacttg

SEQ ID NO: 4207 - DNA, 430 bp, Glycine max
  unsure (1)..(430): unsure at all n locations
agcttttagaatntaacataactatgattattgaagaacctattcatgttgttttttgcgagactaaccctataaggtcaagaaaggaaacacttgatgatattacagattctttagaagatatgcatattcatgaggaagggcacaaagacaaaggaaatggaaatgatgaagactctcaaactaatgaaactaaaacaagtacaaatcttccaagagagtgaagaacttcaagatatcatcctcttgataatatcatcggtgacatatcaaaaggggtaacaacttgacactctctcaaagatgcatgtagtaatatggcttttggttctttaattgaacctaaaaacttaaatgaagtcatagntgatgaacattgggtcattcgtatgcaagaaaagttgaattaatttgaaagacatcaagtctg

SEQ ID NO: 4208 - DNA, 436 bp, Glycine max
ggactccatctcattgaagcgcatatccacttgtaattccaaagtgtctaacctttcaccaacaaaggtttgaagaccatcaaacctgtccaaaatctatgaagtgttgaaggaaaagggtcacgagatgacgctaaggcaatggagcattcaatcgcagatgccttatgcatgcgatatctaacaagatgtgcccaatcaatttgtatacctttatgaaaggccgacataacaatgagatcttcttcagaaacctgatcagcgtttgaagatctcggaagcaatatgcgaacaattagttaatgaaggatgcgactttcacaagccaatgaaccggcatgaagcctttcggtcatatccgcttggatggtgcaaaccaaccggtgggcatcatgtacagagaaatcaatcttccaatcgtcaattagtgcacctt

SEQ ID NO: 4209 - DNA, 451 bp, Glycine max
  unsure (1)..(451): unsure at all n locations
tggttccttcatcaaaaagacattaaatgaatcataccaatataagcaaatcatattaaaataattgtactttggaaatttatgtaacctaaaatgatgagggtttgtctaccctacaaggtagcatattacagggaccacaacgagatggaagcaaactaaagagctgacaggatttccaggtagcccaaaagctagaattttgctttctatagattgaaagccaatctctgtaaatgtaaatggcttgcttggttaaatacacacctganagatataaattaaaaataaataaaataattattaattatgataacatgatttacaaaatcatactcaccaaaacactatacaaaagggaaaaatatctataacatgctacttctacaactacaacacattgcatccatggtctagattacaggacaccataatttaattaataaatagt

SEQ ID NO: 4210 - DNA, 400 bp, Glycine max
  unsure (1)..(400): unsure at all n locations
agcttccaaccagataattcttcattcatctgtgcttgagcctccttatcaagctcctcataacgggtcagatccctcctaacagtccttaggaagatcacaagaacaatgccagcaagaaaagtgatcaccataagcgaattaaggatagaaaaccaatgcactttagctccctccatcttcaagtaagcatcccatctagatggccacttgatgtcactctcctcaaaggtgacctcataagtgaaaacaacaggctgaccctccttgataggcattgccacagtggctggatcgcatctgatagacgatggatacttctcatacatcttcaaggttttcgcagaatcagcattatgcataatactacaaggaatcacctcanacccaacaaccatgt

SEQ ID NO: 4211 - DNA, 377 bp, Glycine max
  unsure (1)..(377): unsure at all n locations
ntgaatgagctccttgagtctgatgacaagtntggatttattgtcatggatggcaacggtactttgtttgggacattgagtggtaatacaagagaggtgcttcataaattcagtgtggatctcccaaagaaacatggaagaggagggcaatctgctctgccgtttgcccgtcttcgcatggagaagcgtcataactatgtgcggaagacggcccagctcgctacccaattctatatcaatcctgctaccagccaacccaatgtttctggattaatactggctggttcagcttgattcaagactgaacttagtcagtcagatatgtttgatccttgacttcaggcaaaaatacttaactgttgtgatgtctcctaccg

SEQ ID NO: 4212 - DNA, 368 bp, Glycine max
agcttgcagcacatgcctcgtattattgtttattctttttcagtgggaatgctatcgctaatgcttgctcaagcataatcctatgtgggaatactagcaagattcctactccgtgtcgtatttcactagatgatccattgatgaatagagtctaaggtagctcttgttgccttttttcacctttgctcagcgacatttaaaccatgaagttgcccatacactggaccttgagcgctagtctaggatgatattgcgaaccatattgtgacgatttgcttgcccgggttgccatccttcccactaaaatggagccgtggaatacttgcctgagtggttgatcaatccatactatgcatggatgtgcttgg

SEQ ID NO: 4213 - DNA, 364 bp, Glycine max
ttccctctttgaacaaatacccctcagccaaatagtatccatcttgggcctttttcccacaactcttgtaaatgggagagaaatgttcatctaaagcatacaagtccctaatgttatcaaatcctaaaatttgagctcctagggagcaaaacaatgtgtgtctcctagagagggcatcagctaccacatttgtttttccctttttgtattcgataacatatggaaattgctctaggtactctacccattttgcatgacaaattccttggaaacaaggtaatgttcccaagttcggagtactcttattaacgcataaagctctttatcatacgtggggtagttaacggtggcaccatgaagcttt

SEQ ID NO: 4214 - DNA, 437 bp, Glycine max
  unsure (1)..(437): unsure at all n locations
agcttctggtgggacatcttgacttgctttccaatctgacattcaccacaaattctgccttcttctattttcagactgggaatgcctctaacagcacctttgtcaatgattttcttcatgcctcttaagtgcagatgtccaaatctttgatgccatattctgacttcatcttctttggaggatagacatgtggaggagtaactggtttcttgaggtgtccataggtagcagttgtcctttgatctgctgcccttcattagaacttcactcttctcatttgtcaccaagcattctgactntgtgaagtttacattgaatccttcatcacacagctgactgatgctgatcaagtttgcagtcagtcccttcaccagcagtactttgtccagactangaagtccatcatggactagctttcccattccagtgantctttc

SEQ ID NO: 4215 - DNA, 398 bp, Glycine max
  unsure (1)..(398): unsure at all n locations
tctcaagatcaccttaatggctntcacattntccatggatactttcccaaggaaaagtgtgtcgtctgcatactgcaatatgctgactctgacttcatttctgcccacattgaaaccttgaaacaggtttttatccattgcttctttcaccagcgcgtntggtccttccacaagaatgttaaacaggaacggggatagagggtctccttgtcttaggcctctttggggaataaactcangtgtaggacttccgttaaccaatatggatatggaagcagactttaggcagccttcaatccaagttacccacctgtcacaaaaacccatcctcttcaacaaatatagtacacacctccaagatactgaatcataggccattttataatctactttgaata

SEQ ID NO: 4216 - DNA, 428 bp, Glycine max
agcttctgaacaatctttcatttgggtggtgatgaatatccataacaacccataaaaaagaaataaaatgggaacaaaggctttctttcggaagggtttgagcagaggatgaaggaaatgggtaaagggtttagttcttagagcttgggctccttagctgtttattttggagcatgttacaataaaagggtttatgacacattgtggatggaactcctatttggaaagtttgtgtgctggaatgccaatgattgcatggcctatctcagtcgagcaatttttgaatgagaagttgataactgaggttttaaagattggtgtccaagtggggagtagagaatggttgtcatggaactcaaaataaaaagagttggtgggaagagagaatgtgaatcattagtgacgaagttgatggtacagagtgaata

SEQ ID NO: 4217 - DNA, 330 bp, Glycine max
taattttttaatagatgaggtatttatatgaaagataatcttatttaaactggataaataagataattataagtgataaaactctgtctccaaatatttaacgtaattatatatgtaagactaattaatctagaataactttgcatgattaacatactcactgctataacactaatagtttggtcataactaattcattgatcaatattataaaatcatcaatatttgagagtattagaataaatcttacttccgattacaatgaaattaattagatgcagacctattaacgaaatgctttaacttcaccaaatatgtgattatgaaagc

SEQ ID NO: 4218 - DNA, 387 bp, Glycine max
agcttctcacctaaccactacccgtgcgatctctacctaagacccaatcttagatatgagaacctccgctcactccctctcactcacactctcgtgtttacaattaagtcaaagacacaccagagatcaactgtgaacaaaagagatcaactctacacactagagatcaactctacacactagagatcaactctacacacataggtccaacacttgatgttagggtagcatcaaggtggctcacaaaagactcaagtcccaaaaactcactaactaactgttcaatcccggacttggtacagaactcgtgcagactccatgattatatagcaatgtgcgtttctgggctgcaacttcttgatgctggaggagatctatcttcttctg

SEQ ID NO: 4219 - DNA, 395 bp, Glycine max
agcttgcagcaaatgctaacgacaataacattttactcggaagtccgattgagtcccgtaatatatcgagacactcaaaatttaaaaccgaagctcgctgcaaacgctatcgacaataacatttcactcggaagtccgattgagtcccgtaatatatcgtgacgctcgaaatttaaaatcgaagctcgtagcaaatttgaacgaccataacatttcactcggaagtccgattgagtcccgtaatatatcgagacgctcaaaatttaaaaccgaagctcgcagctaatgctaacgacaataacatttcactcggaagtccgattgagtcctgtattatatcgagacgctctgaatttaataccgatgctctgtgcaaattcgaacgacattaacat

SEQ ID NO: 4220 - DNA, 442 bp, Glycine max
  unsure (1)..(442): unsure at all n locations
tgtattgggataaacccaagtcccacatcagctaaaaataaagccatgttagagtatataagtgagggacaaccctcaccccttaagctagctcttgaggttgagttaggtttaaactcattctaagaatctaagatggtattagagtatatctaagcttaatccaaagggccacccacaatagttatccacgcaccacgcctaagaagtgctgggcgtgacggagtgtattgggaaaaatctaagtcacacatccactaaaaataaagtcaagttagagtatataagtgaggggcaaccctcatccttgagctaacttttggagtccagttaagcgtaaattcacattctaagaatctaagagcttgtccttacgatcacatgaacaagcattatccctcaatanttatcatactgtgtccttccctttctgtgccatctc

SEQ ID NO: 4221 - DNA, 311 bp, Glycine max
  unsure (1)..(311): unsure at all n locations
ctcactcggaggcccgattcacgcgcataatatatcgagactctctaaattgaacaacggaagctatcgagaaattcaaatggtcaatacttcgaactccgaggtcctattaaggcgcataatatatctagacgctcaaaattctacaatggaagctctttggctatacaaatggtcataacttttcactcgaaggtccgattaaggcgcataatatatcgagaccctccanattgaacaatggaagctcttgagcaattcaaatggtcataacttgtcactcggacgtccgatttagctgcataatatat

SEQ ID NO: 4222 - DNA, 264 bp, Glycine max
tgatgtaacattcggagaggttaatgattcaacgagatgatgcgctccatgagaggttggatttaatggagaatagagaccatatgaattgctcaagagcttccattgttcaatttcgagcgtctagatgtataatgcgcctcaatcggaccttcgagttaaaagttatgaccatttgaaatgctgcagagctttcattgttcaatttcgagcgtctcgatatattatgcacctgaatcggacctgctagtgacaacttttgac

SEQ ID NO: 4223 - DNA, 380 bp, Glycine max
agcttgaaggtaaactagatgccttggttaacctggtaacccagttggccttgaattagaaatctgtacctatcgcaagggtctgtggtttatgctcctctgttgacccccatacagacctttgcccttcaatgcaataacctggagcaattaagcagcttgaagcttatgctgcaaacatttacaatatacctccttaacctcaatagcaaaatcaaccacaatagaacaattatgacctctccagcaatagatacaatcccggatggaggaatcaccctaatcacagatggtctacccctcaacacaacaatagcagcctgctccttccatccaaaatgttgctggcccaagcagaccatacattcctccacctatcc

SEQ ID NO: 4224 - DNA, 396 bp, Glycine max
  unsure (1)..(396): unsure at all n locations
ntctagaagcctactccggatacaactagattagaatgcatcttccatgcgaggagaaaacaatattcatcattgaagatgccaaattttactaaagggtcatgcctttcagcctaaaaaacataggcgcgacataccaacgactgatggactgagtcttcaaacaacaaatcatatgaaaatgtcgaggtatatgtggacgacatagttttcaagtctcaaagcatatcccaacatgtggcggacaaggaagaagtcttcggggaactacgaaaatatgaatgcgccttaaccctaaaatatgtactttcggagtaggcggcgacaagttccttggttntatgatcacccaccacgggattgaagctaaccccgacacatgcactgtcataccgg

SEQ ID NO: 4225 - DNA, 396 bp, Glycine max
  unsure (1)..(396): unsure at all n locations
tgcacacaagttggttgttgttgttattggtttgattacatgataacctctcatttgtgtttagcttgtattattggttttgatgaaatccctttgctacaagtcaaacaattatacttgttgatagtgccattagggtttttcttcaccctanacacctatttacaaccaattggatccctagatggaggcagttcagtaagagtccatgtaccatttttcatcaaagcatcatgctcagtcctccttggtgcaaaccaagtaggattggaaagagcaatttatgttaacttgtgctcagaataagctagaagaagagtacgatgaagtctaggattgacaacaccagttntagctcttttgcacattgtaacaagatcaatttgagaagtagta

SEQ ID NO: 4226 - DNA, 271 bp, Glycine max
  unsure (1)..(271): unsure at all n locations
tgtcctctgccaaccaatattccaacagattcttcttgttctggttcacaaccaaccgtgataattctaatgattcaaaggcattcagctttccccttgttaaaagtgttccaaaatactgcaacagacgaggagtttgcccagcttgcacacgaacactctgccacgtaaagcagataatggcattntaaacattataactaattgaccaaacaaaaggacaccacctaaacgcaaacagtacacaaccagaacatgaatctctgtgaat

SEQ ID NO: 4227 - DNA, 405 bp, Glycine max
agcttgaggatcaaaatggggtgaagctttatttatagctgatggtgtctgtttggatgggaactcatgcaaatgaagcttttcctgaggcttggcattcatatgcatcaaaaactactggtgaaaacattgctcacactcgctccaaggaatatattcctcccaggctttgtgaccttacagttaatgagattcatgcccaatatttgtcgctaaaaaataggaatgatgtgatgctactaaatattaatatccgtaatgactcgggaattgttaactcgtaggcaagtgtaccaaaacttcacaagtagtaaagttttccgatatccgaacgtccaatccaccacgactttgcttgtacttatagtattcctgatcccattgatgcgcatgacataccaattt

SEQ ID NO: 4228 - DNA, 258 bp, Glycine max
gcttagaagaaattcaaatggtcataactcttcactcggatgtatgtattacgtgtatcacatatcgagacgctcgaaatcgaacaacacgagctctccagaaattcgaatagtcacaacctttcacaccgaggtccaattcagccgcatcacatatcgagacgctcgaaatctaacaacggaagctctgattacatacaaatgctaataacttttcactcggatgttcgattcaggcgcttcacatatcgagacgct

SEQ ID NO: 4229 - DNA, 446 bp, Glycine max
  unsure (1)..(446): unsure at all n locations
agcttaagctccttcaactgcacaaggctcttaatattagaagagtatccttgtggaacctttacccgacaaagacactgacaaaaacttatcttctccttcttggacaaagtatggcaggctgggggcaagtaaattttcttcccatcagaccttggatgcaactgtgatcgtatacccatatcagctagatcttgatgggtattcaagccatccttcgtcttgccttgaatgttaaggagcgtcccaatcacactatcacaaacatttttctccacatgcataacatcaatacaatgtctaacgtcaagatcacaccagtacggaagatcaaagaaaatggacctcttcttccatatgcaactctgacttttatccttctttntggtcttcccaaatacagtattcaggtgttgaacccgctgatatacctgttcatcagtcaa

SEQ ID NO: 4230 - DNA, 433 bp, Glycine max
  unsure (1)..(433): unsure at all n locations
agcttccttaagaagattcctaaagaagctagagcttatctacacacacatctctaatagctaagctcacctccttgagatgagaagctagagcttagctacacaccccctataatagctaagctcacccccatgacaaaatacatgaaaatacaaaaaattccctactacaaagactactcaaaatacctcgaaatacaaggcaaaaatcctatactactagaatggccaaaatacaaggcccaaacgaaggataaaacctattctaatatttacaaagataagcgggctcatacttagcccatgggctcgaaatctaccctaaggctcatgagaaccctagggccttcccttggatcgctggcccaatctgcttggtgtcttctatccaatgcccttgcggngtaggattgcatcattccctccaccttgg

SEQ ID NO: 4231 - DNA, 439 bp, Glycine max
agcttaagctccttcaactgcacaagactcttattatttgaagagtatccttatggaaccttcacccgacaaagacactgacaaaaagttatcttctcctttttggacaaagtatggcaagctgggggtaagtaaattttcttcccatcacaccttggatgcaattgtgatcgtatccccatttcagcttgatcttgatgggtattcaagccatcttttgtcttgccttgaatgttaaggagcgtcccaatcacactgtcataaacatttttctccacatgcataacatcaatacaatgtctaacgtctagatcagaccaatacggaagatcaaagaaaatggacctcttcttccatatgcaactcttacttttatccttcatttgggtctttccaaatacagtattcaggtgttgaacccgctgatatacctgctcac

SEQ ID NO: 4232 - DNA, 434 bp, Glycine max
  unsure (1)..(434): unsure at all n locations
agctnggactttctgtgttctgggaacctctctctttctcaggtgtacccaaacccaatcacttggttcacgcacgactttctttctgcttttgatggcttgccttgcatagctcgcattattcttttcaatttgaaccttcacttgctcatgcaacttcttcatatactcagctttagcctgtgcatccttatgcttaaacatagcaatgttaggcataggcatcacatcaagaggagtcaaaggactaaatccatacactatctcaaatggtgaacaattagttgtgctatggacagcccgattataagcaaactcaacatgaggcaaacaggcttcccaagatttaagatttttctttaaaacagtcctaagcagtgtgcctaaagtcctattgactacctcacgttgaccatcagattgtgggtgacaag

SEQ ID NO: 4233 - DNA, 197 bp, Glycine max
ctacatgctaaacggtgtgttatgcatgcacgtgaagctggatcattcctccgcggaatcgatgtgaaccgtttaccttctgtggttgattgcgaaaaggaagcacgtgtctcatctccaaacagcacggtttctagcgtctgtggaaagcgcaccgagagggaaaccaatggagaagacaacgacacagacagagc

SEQ ID NO: 4234 - DNA, 403 bp, Glycine max
  unsure (1)..(403): unsure at all n locations
agcttgttatcgattacacacatactgtaattgattaccagaggagttnttcagataacattctcaacagtcacatatttttatctgattctcaagtggccatcaaaggcttatatatatgtgactagagacacgaattttataatagttttgaagaacaaaaaggtcttatcctcttaacaagcaaaattgttttatcctcttacaaattccttggccaaaacacttgtgattcaataaggaattatttgagtgctcaaattttacaatctatctctttcaagagagatgtctttttctcttcttctttattctaaaaagggattaagagaccgagggtctcttgttgagaaaggattctaaacactaaggaaggattgttcttgtgtgatgagaacttgta

SEQ ID NO: 4235 - DNA, 223 bp, Glycine max
  unsure (1)..(223): unsure at all n locations
tgaatcggatatccgtgtganaagttatgaccatttgaatttctctttattttccgtagntcaatttcgagcttctcgacatattatgcgcccgaatcggacatccgtgtgaaaagttatgaccatttgaatatctcgagagcttcctatgtttaatttcgagcgtatcgatatattataagcctgaatcggacattcgtgtgaaaagttctgaccatttgaa

SEQ ID NO: 4236 - DNA, 402 bp, Glycine max
  unsure (1)..(402): unsure at all n locations
agctnttgaggaattcaaatggtcataacttttcatacggatgtccgattcaggcttataatatatcgatacgctcaaaatttaacatcggaaactctcgcgaaattcaaattgtcataacttttcacacggatatccgattcgggcacataatatgtcgagaagctcgatattgaacaacgaaagttctttagaaattcaaatggtcttaacttttcacacggatgtccgattcaggaaaatcacatatcgagacgctcaaattgaacaacggaggctcttgagaaattcaaatggtcataacttttcaccaggatgttaaattatggcgcattacgtttagagacgctcgaaaatgaacaacggaagctctcaggaaattaaaatggtcataacttttca

SEQ ID NO: 4237 - DNA, 425 bp, Glycine max
  unsure (1)..(425): unsure at all n locations
agctntaggtttgatggccccaatgacgtctatcctccacatggaaaaaggccaaggggcggacataacattcagaggatgtggcagaacattgacattgtccgcgtacgcttgacatttatgacatttccttacatgggtgcagcaatcgcttttcatagtgagccagtaataaccggccctaaggatcttcctggccatagcatgcccattggcatatgtcccaaataaacactcgtggatttccttaatcatgtagttcgcctctttggcatctacgcatcgtaaaagggtcatgtcatggttttgtatgtactggatagtaccactcacaaagaaaccagtagccaatctccttaacgttcttttgtcattgtcggaaatccctggtggatattctttgttctcaacatatttgttgatgt

SEQ ID NO: 4238 - DNA, 429 bp, Glycine max
agcttattctactagggactttatacaacatgcatttcatatttttcttttcagaatcatacagattgttcacattcatggtagcaacacgcctagagggtaccttcacatcaggatgcaaatattgtaataactctttaaaccttctatgttcaacaaaagagaatggaagatcatgctcaataatcgttatagatatcatctcatataccacactttgatctatttttttatttataaatctcccatcatgattgagaataatatttccaacatcactattagaatgcgtcttcaaatatacatcacatttcccatatgacgttgtaaggttgaagtcccattcttattgtcactgcccacataatctttcaaacaatatttgcatttactcctcacttttccatcactatgtataacagatttctc

SEQ ID NO: 4239 - DNA, 327 bp, Glycine max
ttgtataggcaagaaaacccctctgttaattaagggagttgacattccttcaacgatggaagagataaatcagttgagtagagaaggggatgaattattgtacgagttgaggagtaacctacttaaggctcacgatcagatgagaaaatatgcaaataaccatagaagagaactgatatttcaggagggagattgggtttttttgaaattgcaaccttatagaatgaggtccttagcaaggaagccaaatgagaaactgagtccaagattttatggaccctacaaggtgatacagaaaatacgggaggttgcttataagttggaact

SEQ ID NO: 4240 - DNA, 437 bp, Glycine max
tggacttcctggtgtttgggaacctctccttcctcaggtgtactcaaacccaatcacctggttcaagcacgactttctttctgcttttgttggcttgccttgcatagctcgcatttttcttttcaatttgaaccttcacttgctcatgcaacttcttcacatactcagctatagcctgtgcatccttatgcttaaacatagcaatgttaggcataggcaacaaatcaagaggagtcaaaggattaaatccatacactatctcaaatggtgaacaattagttgtgctatggacagccccattataagcaaactcaacatgaggcaaacaggctttccaagaattaagatttttctttataacagtcctaagcagtgtgcctaaagtcctattgactacctcagtttgaccatcagcttgtgggtgacaagcagtacaa

SEQ ID NO: 4241 - DNA, 395 bp, Glycine max
  unsure (1)..(395): unsure at all n locations
tgtgctattccaagttcattaatcatacctttaagccagattgattccttcactccttcagctagggccatgtattctgctttagttgttgaaagagcaacaactaattgttgatttgctttcaaactgattgttgtaccaaacaaagtaaacacatatcctgttaaggacttccttgtgtctacatttcctacaaaatctgcatctacatagcctgtgactgctgcctcgtgtgctgtcttcttgtaccttaaaccagctttcaaggatccatttagataccttagtgttcacttcacagcttcctagtgtgcgctgccaggatcntccatgaatctacttataatacttacagcatgaactaagtcaggtctgctgcaaaccattcatacatt

SEQ ID NO: 4242 - DNA, 435 bp, Glycine max
agctcggctgaaaagtacccaaaagtggtttttgtgaatgttgacatagatgaggccagggacgttgctgcacgctggaatattagcagtgttccgacattcttctttgttaagaatggcaaagaggttgacagtgtgatgggggcagacaaaagtacccttgaaagcaagattgcacaacatgctggctctttttaagtgaataccttataaagatactgatacaattaacattttcttgtttcttgtgttaacatgtccattgtgtcatacaaaaggcaaagattaattgagtttcaatgtattatggcttgacgtttcgtctgtctgattgcatgtagaaaatgttaatgctgatttgtaataagtttcatattttcaagctgattttaagtttgtgatgactgttatggggagacaccccactagcttcat

SEQ ID NO: 4243 - DNA, 434 bp, Glycine max
agcttacttgtagagattcctttatgggaaagaccgataccagctgtgttgatccattgcgatagtaccgcggatattgcaaaaattgagaaccgttattacaatggtaagaaatgacagatacgtcgtaagcacgacactgttagagaattactctcaacaggagctgttagagtggatcacgtacgcactgatgataatttagcagatcctttgatgaaaggattagctagagagaaagtccataacacttccaaaagaatgggactagtgcccttactgcgatgatcattcatgatggtaacccgacctaaatgactggagatcccaagaactaggttcaatgggtaataacaagttatgaagtgatatgagatgaacatgcagttataagtgaaagcagcatgatctctgaagtaacaagaggatgagtt

SEQ ID NO: 4244 - DNA, 417 bp, Glycine max
  unsure (1)..(417): unsure at all n locations
tatccccacaagagtgcagaacaactggtgagtctgcattgattatatgatgctgaaccaggtaacccgaaaagatcatttccccctgccattcattgaccaaatgcttgagcgcttggcagggtaatctcattattttcttcttgatggtttttctagttatctacaaatncatattgctcttgaggatcaagaaaagaccacattcacctgttcctttggcactttttcctataggaggaatgcccttggcctatgcaacgcccctggtaccttctgtcgcaacctacccttttgcgggcaagcgaggcgaggctcacgaggtgccttttcaaaggaggaaaatgcgcggagtcgtcaccaacgtttatttgtggaaaacgtcgaataaatcgaaggataccggtcaaaagaata

SEQ ID NO: 4245 - DNA, 449 bp, Glycine max
agcttgcctgcattgtgttgttagcaaggttcagcatccagatcccaatagtaaatacaagaacaacccttgttcatgtccctttaaatgctctacaattttagacatatgaatttcattaatgtatgactaaggtcatcatatctgtgaaatttaaaagtcaaagaaataaaatgagtaagaaaagaactagaggatgagaacagaaacctgcaatgctcatgtgtatcacctaatacatatccagtgtctgtagaaaatccaattaatatcacctaaattataagacttgacatagcacatatgtaatgtagtataaaaaaacaaaatcaaagtaagcaattaatgtcacaaatgcttacagctagacatatcataagagatccgccataatgaacagtgtcttctgccaccttgaagtacatttatcactccaaataccaacacat

SEQ ID NO: 4246 - DNA, 436 bp, Glycine max
  unsure (1)..(436): unsure at all n locations
aagctgtttatttgcttaaattttgatatttataaatnccaagncccattaattaatttgctttcatgttaatcctatttaaaactattatatttgatctttaggagaacattacactttagcctattaaaaaaatacgtcaacaaatcacaaacaacatttatattttacctcattcagaatataagtaaaaacatacctaatttcacattgattaagtaaggatgttaattaaattcatttaattttcttgaattaatatagagaaggaactatattctctaaaatattattaattgtatttataaattattaattaattaacttaatgacattttctttaataataacattaaatatggctaaattaattattattcttataatncaatctaccaaacataaacatttnttttatagctgaatttgtatctac

SEQ ID NO: 4247 - DNA, 457 bp, Glycine max
  unsure (1)..(457): unsure at all n locations
nggatttcctttagtagggaatctatccttcctaagatggtagccaaccaagtcaccctcattaagaactagctcttttcttcctctattgcctttagttgaatacacctttgtttggttctctatttggttcttaaccctctcatgcatcttctttacaaattctgacctagattccccttctttatgtataaaaaaagtgtccagtgggaggggaatgaggtctaacggtgttaggggattgaacccatagacaacctcaaaaggggactgcttggtggttctatgaacccccctggtgtaggcaaattctacatgagaaagatactcatcccaagacttatggttgcctttcagaagagcccttaatagggtggataaagacctattcactacctctgttttgcccatcagttgtggatgaccagtggtagagaaaagaagtctagttcctaac

SEQ ID NO: 4248 - DNA, 422 bp, Glycine max
  unsure (1)..(422): unsure at all n locations
gaagctcctggtttagctttacccgattntactcattctattgtagttgaatgtgatgctagtggagttggcattggggctgttttgatacaaaacaaaaggcctatagcttatttctcggagaaattgggaggagccagattgaactattgcacctatgacaaagagttctatgccattgtgagagctcttgatcattggaatcattatttgcgttctaatcactttatattgcattcagatcatgagtcattgaagtatatcaatgggcagcagaagttgagtccaaggcatgctaaatgggttgaatttcttcaatcttttaatttctcttcaaaatacaaggatggtaagagtaatgtggtggctgatgcactntcaaggaggtatgctttaatttcaattcttgaaactcgtttact

SEQ ID NO: 4249 - DNA, 417 bp, Glycine max
agcttgctaacccatggaagctcctaatcattctcacactttttggggtgggccattcttggatagccttgattttctcacggtccacttggaccccatttttaccaactacaaaccctaagaaaactatattatctacacaaaaggtacacttctctatatttgcgtagagggtgtttttcctaaggactaaaagaactagcctgagatgtcctaagtgatcatctacgctcctactgtacactaaaatatcatcaaaataaacaactacaaatctacctatgaaatcccttaagacatgatgcataaccctcataaacgtgcttggtgtattaatgagcccaaaaggcatcactaaccattcatagaaactaaacttggtcttgaaaggggtcttccactcatcaccttctttca

SEQ ID NO: 4250 - DNA, 339 bp, Glycine max
aaaaaaaggaaatagtctaaagatttaatatttgttaacttcttggagtaataaaaagtataaactgcaatgtgattctacagaacatctacatatttctgatgtcaaatgataggattgattattcggaaatatttctcaagaacaacaggtaatgaatagagaaagaaaaagtatcaaaattcacaaagatgtgctacctcactttcaagtgctgtatatacatcactgaattcaagaccattatatccacgtcctacaattgctatccaatcatgaacagattccagtttgagtgcctgatcacttgggatcacagtcttccctgaagatgatttt

SEQ ID NO: 4251 - DNA, 399 bp, Glycine max
  unsure (1)..(399): unsure at all n locations
agctntanaagtgtgtagatactatttatcttattcttagcgaaatgaattcgctgtggatacgatactcagtcttaccgtattatatactacttgtgcgaatcggcacacttgtcgagggacgaacaggtacgcggaatgggtcaccaatatcatgccagtacctaaaaaggatgggaaggtgcgaatatgcatagactatcgggatttaactgagccacgccagaggatacactttctttactgtacatcgatgttctcgtagataacacgaccaattttggcctgttttctttcatggatgggttttcaggctataatcagataaagatggcaccagaggatatggaaaagacaaccttcatcactctatatggaactttctgctacaaggtgatg

SEQ ID NO: 4252 - DNA, 459 bp, Glycine max
  unsure (1)..(459): unsure at all n locations
cgaagganaactcgatgccttggtcaacctggtttctcatctttccatgaataaaaaatctacacctgttgcaagtgtctgtggtctatgttcttttgcagatcaccatacagatctctgtccttctttacagcaatctggagtcaatgagcaacctgaagcttatgctgcaaacatttataatagacctcctcagcagggaaaccaacaacagcagaataattatgacttttcgagcaatagatacaatccaggttggaggaatcatcaaaatctgagatggacaagtcctccacaacaacaacagcctgtccctcctttccagaatgctgctggtccaagcaagccatatgttcctcctccgatgcagcagcagtcacaacaaagacaacaagaaactgaggctcctcctcagccttccttagaagagttagtgaggcaaatgaccatccagaatat

SEQ ID NO: 4253 - DNA, 441 bp, Glycine max
agcttgtagggttaaagtctcacgattgtctcgtgctcatgcaacaattgttagccgtggctatacgagacatcttgccaaacaaagtcaggttagccataactcgcctgtgctttttcttccatgctatatgtagcaaagtcattgatcctatcaagtttgatgagctggaaaatgaggctgcaattatactgtgccagttggagatgtattttccccctgttttctttgacatcatgattcacttgattgtgcatctggtcaaagaaatcaaatattgtggtcctgtttatctacggtggatgtacccggttgagcaatacatgaagatcttaaaagggtatacaaagaatttatatcgtccagaagcatctattgttgagaggtacattgcagaagaagccattgaattttgttcacaatacattgagaaggctaaac

SEQ ID NO: 4254 - DNA, 280 bp, Glycine max
tcaagaattatggcctcatcaaactacttgtttcccgagggatattctataaatagacctcccatctttaatggagtgggttaccactactggaaaacccgcatgcaaatctttatagaggcaatagatttaaatatttgggaagccatagaacaaggaccttatgttccctctataatagctggaagtgcaacaatagaaaaacctagagcagattggactgaggaagaaagaagattagtacaatataatttaaaggccaaaaatattattacatctg

SEQ ID NO: 4255 - DNA, 347 bp, Glycine max
  unsure (1)..(347): unsure at all n locations
ttttcggagccccgtgaattacgttntcgntcatgtgtccttcatcttcgagtttgttgccatgcgtagtgattgcttagggcaattctccattctcaaccctttttcggagccccatgaattgcgttctcgttcatgtgtcttccaccttcgagtttggagccatgcgcagtgattgcttagtgcaattctccattctcaacccttttatcggagccccaagaatggcgttttcgttcatgtgtgctccatcttcgagtttggagacatgcgtagagattgcttagtgcaattctccattctcaacccctctttcggagccccaagaatggtgctttgttcatgtg

SEQ ID NO: 4256 - DNA, 453 bp, Glycine max
tattgaaatcaaacaagatgataaattatcctcacattatattataaataaatcatgagtcatcaaaacataaatcatttgtctaagtcacttgcatctagaagtcctaattttcttctaatggtgtagaaagaatctttggttagtggttttgtgaagatgtctgcaagttggtttttagtatctacaagttttaaaaatacagtcacctttttcctaagactaagtgctaattgactaccaacacttaccaagatgaggttttgttaacatagaaggttctatcatataaaaataattttattaggaatacaatataataattctgaaaagcataaaatttttctgatcaatcaatcaagtaattcaaacatatcaaacaagatatatacaacgattgaaggatatagatcacagacattatcaaacattcagatctgttaagataattta

SEQ ID NO: 4257 - DNA, 304 bp, Glycine max
gcttctgagggcctatatgggcccttgctgaatgcacctcttaagttggcaggcaccctattttgagtttttgctcatttcctgttgaacgtccaaaatcttacgattggtgacaattggcttaagcaattcaatgtgaccagcaaacatccacatgtcgacaaacaattgtccccgaacgaaattatggtatgacacatggtatgaagtgtgccatcttagagaacctgtccaccaccacaaagatggaatccttgtcattccttgtctgaggaaatcctacaacaaagtccaaagacaagtc

SEQ ID NO: 4258 - DNA, 417 bp, Glycine max
agcttgattgttaccatgcatggagagataatttgagcccttaaagaatattaacattataattttacatatttgcgaatactaaaaaaaattacttaataatttaaaagttagttatgcaattaataatatttatgattacttaatcaatagtagattctttaattgataattgaaactgaaaataataaattacttagcgagattatattttgttttattttttaatatgaatatattacttaatataaatttcttatagtaatattatttattcactacctattctatcatatgtcgaccaccattaaaccatcaaaacttaaatcataatagttgctatgtctgatgcacctcaaatacaaaataggataacgtgtatattatctaaagaatcatctactacacgatcaaata

SEQ ID NO: 4259 - DNA, 213 bp, Glycine max
ttcaaaagatgcgacatggaccattgcagctatgttaagaaatatactaatagttatgttatccttgtcgtgtatgttgatgacatgttgattgcatgatctagtatggcagaaattaacacgttgaagcagtagatggcagacaactttgaaatgaatgatcttggtccagctaaacaaatctttggtataagaattcttagaaatagatca

SEQ ID NO: 4260 - DNA, 465 bp, Glycine max
  unsure (1)..(465): unsure at all n locations
ntgagcaaattctaacgacaataactatttacttggatgttcgataaagtcacgtaatatatcgagtcgctcgaaatagaatacagaagctgtgagaaaattctaacgtcaataactttntactcggatgtccgattgagtcacgtaatatatcgagacgcccgaaattcaatacagaaactctgagcaaattctaacgacaataattttttacttggatgtccaattgagtcgcgtaatatttcgagacactcgaaattgagtacagaagctctgaggaaattcaaataaaaataccttttgactcggatattcgattgagtcccgtaatgtatcgagacattcgaaattgaatacagaagctgtgagcaaattctaatgtcaataactttgtactcggatgtccgattgagtcactttatatatcgagacgctcganattcaatacagaagctctaacaaatt

SEQ ID NO: 4261 - DNA, 417 bp, Glycine max
  unsure (1)..(417): unsure at all n locations
tgttacataatggaaacaatttttgtagtaaatttacaaatacaataatctcattntctttcgatcatcaataatattaattgtataaaataaaattaaataatgtttgtcaataacatagatatttgtagtaattataataacaatcatatcaaacaaaaaaacatgtccaacaattgttgcaaatcttttttatatatctattttcttatatatgagttaactcttgtcacattaaatatatatatatatatatatatatatatatataaagctccaggatatggctgaaagtatataaaaaattatgaatgtctaacacagatacaagggattatataagacaaaaaacaaacatgtcaattgagaggaacagaatgagataaagaaagtcccanaatctcaagggtttgactg

SEQ ID NO: 4262 - DNA, 395 bp, Glycine max
  unsure (1)..(395): unsure at all n locations
agctggtcatcctaagtaacatgtttaggttttagtttatcttattgcatgaaacatatnctaaaatgttttttcgctgttgcattgttaaattgagtaaaaatatgacatgaaatctaatcgttaaataatctaacactaaatatttcatagagatgattgccaaagtagtacatcttgataaaggacaattaaaatttagatgtcacttcgtgaatcttacatgataaaaatcacttataatagataattgttttataaaacacccactctgataattaaatttgcaaaataacctattttgatatctaaaaaagtctgtaaactaggtaaatgggttaaaataattcttgttatttactctaatctaataaaaaaacatcttattataatct

SEQ ID NO: 4263 - DNA, 394 bp, Glycine max
agcttaccactgtccggttactccttgcccttgctgttcttcataactggcaccttcgacaactggatgtaaacaatgctttccttcatggggatcttaatgaagaggtttatatgaagctccctccaggacttgttgtggataatcccaaccttgtttgtcgccttcagcgttccttatatgggctcaaacaagccagtcgccaatggttcacacggctttcgtcatttcttctctcccagggatttcgtcaatcctcagttgatcactcgcttttattatattctgataatgataatgatataacagctattcttgtttatgttgacgacatcatcttgacaggaaataatctcgagactatagcacatgttaccaagcttctcgatcaaac

SEQ ID NO: 4264 - DNA, 261 bp, Glycine max
agcttgaatcggacatccgtgtgacaacttatgattttttgaatttcacgagagcttccgtggttcaattccgagcgccactatatgtgatgcgccaaaattggacattcgagtcaaatgtcatgaccatttaaattcctcaagagcttccgttgttcaattctaagcgtctcgttatgcgattttcctgaatcggacattcgtgtgaaaagatatgaccatttgaatttctcaagagctaccgttgttcaatttcgagcc

SEQ ID NO: 4265 - DNA, 439 bp, Glycine max
agcttgtgtttgagtgaggtgatatctcttttatcatctttgaagccattaacctctcttctcaacccgccatagtaatgagaaacaggagcatgtctcagagtaacaacatacacatcaccaaaataatatcctatagtagataaataatcatattcggatgtgcctaggtaaataacaaatgtataatgattacacctcacagaacaacatgcataaatataccagatctaaacattatgcaagttattctgacctacgtttttgtcaagagtcttggtgaactggtccaaagctggagaaaccttcaacctttgcttcagaatcctcttctctctctgaatttgaacattctttggccacttcatgaaccgagtcaagtctctcttcggaggcaacgcccctccgactctgaacttctttggacgcttctcaaaca

SEQ ID NO: 4266 - DNA, 450 bp, Glycine max
agcttgacattgaaaatagaagctatgagcaaattcatacgacaataactttttactccgatgtccgattgtgtcccgtagtatatcgagactcccgtaattgaaaacagaagctcgtagcaaattcaaacgacaataatattttactcagatgtccgattatgtcccgtagtatatccatacgctcgtaattgaaaacagaagctcgtagaaaattcaaacgacaacaactttcaactcagatgtccgattgagtgctctaatatatcgagacgctcgaaattgaaaacagaagctcttagcaaattcaaaggactataacttatatctcggatgtccgattaagtcccataatatatcgagactctcgtaattgaaaacagaagctcgtagcatattctaacgacaataactctttactcagatgtccgatcgtgacccgtagtatat

SEQ ID NO: 4267 - DNA, 366 bp, Glycine max
agctcggagctcggagtctttttgaagttcctcatctgacttgtagtagaatgagacatattgtttcacccaagacttgatagcatctcatatctctagcccatcagaagcataaggatagtcctcaatcaaaagtcgaactccatggggagcagatggatccttaacagcaactcctctgaattaaaagcacccaaataacattgattagcacaagagttatatcaagcctgaagccttttttcttcttatgccattgatgactttttatatcatgcattcatgtgttcccccaatgtatgcactttgcgatttcttttctttcttaatctattgcccaacacaaaactcgagctgaatccgaac

SEQ ID NO: 4268 - DNA, 409 bp, Glycine max
  unsure (1)..(409): unsure at all n locations
actcagcttagtggctcatgagcaggggaaatgataatcaatcaattatgtaagatagtcttttctataggagattactgtgaggaagttttatgtgatataatccctatggaagcagggcacattntgttaggtagaccatggcaatttgacaagaaagcaatccacaatggtctcaccaatgaaataaccctcacccatggaagcaaaaagctcaaacttgttcccttgacaccttcacaagtgattggggatcaagtacaaataaaactcaaatggaatgaggaaaagaatagaaaaagaaaagaagaacaacctttaatggttaacgaggagtgtaaggaggtaagtgatgtgaacctgagtaagagcggatcgtttgatacaggctacggagatttggatgaca

SEQ ID NO: 4269 - DNA, 448 bp, Glycine max
tcttaagtcacctgaggcatgcaagcttcaagaataacggtctcatcaaattatttatttcccgaatggaattctataaataggccttctatttttaatggcgtgggttaccattattggaaaacccgcatgcaaatttttatagaggcaaaagatcttaatatctacgaagcaataaaaattgggccctacattcccattatggtagcaggaaatacaaccatataaaaacctacggaagaatggagtgaggaagaaaagagattagttcaatacaatttaaaagccaaaaatataattgcatctgctttaggaatggatgagtacgttacggtatcaaattgtaaaagtgcaaaagatatgtgggataccctacaagtaacacatgaaggtacaatagatgtaaaaagatccaggataaatacattgactcgtgaatatgaattat

SEQ ID NO: 4270 - DNA, 296 bp, Glycine max
agcttcatacaagattatatggcttgaaactatcaccgaggcggtggtacacgaagcttaatgaggttatgaccacctcaagattcaacagatgtgacatgcaccattgttgctacattaagaaatatactaatagctatgttatccttatcatatatgctgacgacatgttgattacacgatctagtatggcagatattaacaggtagaagcagtctttggcaaagaacttagaaatgaaggatgttgttccagctaaacaagtgcttggtataagatttcttacaaatagatca

SEQ ID NO: 4271 - DNA, 460 bp, Glycine max
  unsure (1)..(460): unsure at all n locations
ggcatgaagaaacgttaaataaaaaagcacagganaagttattagggaaaggtacaatgggaatntaaaanaattgttgagttatatcaaaactaaaagaggaaaggaagcccattatacgattacaaatagtggggactagagagtttcttttctatttttttataaattacattcttttatttaaaaaattattaaattataactttttgttttgaaatcatactttattttgaatagattaatatacattacattgaatttaattaaaaatttaatctatctatattttgtttgataaaaaaaaattatccaatccatttattaactatttttaaaaataaacattaatatttatatantaatttatacccagatactcttgaatatngattcaaggattccttaatgaacggtgtagtatctaattcaatagaatacatattatattaaataattc

SEQ ID NO: 4272 - DNA, 580 bp, Glycine max
agcttaagggggagtgctcgtctcgaaaatgggatatttttttgtacatgctttcagatagttgtcatcatcaaaagagggagaatgtgaatgaatatgtatgaagattttgatgatgccaaagacagaagcaatacaagtttacttcaagtccaaatcaagatcatgtaaacaaaatatcaagagaaaaaacccgccttagtctatttttgttaaaagaatctcttaatgattgaaaaggtttggcctcaaaacataatttttaaattaattataaaaagttttaaaatattttaacatttctgaaaaaaggaatttttcctctggtaatcgattactagaagttgtaatcgattaccagaagcaaaattgttttaaaagcttttcaggaagttgaaatttgaattttgaaaactgtagtcgattatcatttgtatgtaatcgatcaccaataacggaactcctgaaatttcaaattgaaaaggcatgatccctcattgcataactatgtaatcgattaccagtgaggaaaattgaaaaattgctttgaaaagtcacatcctttcatgagtttttgaaa

SEQ ID NO: 4273 - DNA, 596 bp, Glycine max
agctttaattagattgttttctatctacaatttaaaagaaaatctttattagattccttcttttaaaagctttattagattcttgggtaacaaccagaaaggaaatgaatattaaaagagagaggataaagttacgaaactatactgtatagccgaagaagttcttaaattaaataatgaaatcattggaacaaaaaataggttatatatatatatttaaaacacacacacactgcgttttgaataatcactaaaacttgagacttgagagcgcagctaagctaagctgatcatgcaagacataaaattaagaagtgggaccaattgtgtagaagtttaatcctattctccattagcctaaaggtaaaagggtagacagtacacactacatagtacacacacaaagatcatgttaaaagttaaaacgatttttttcttagaaaataatatttggtgaaaaaattgagcaaaaaagaccattctagaaccaatagtaaaaaataactataaacttatatatatgccagcaacataattttctgctaaaagtgtatactcgcattaaacgaaaaccagccttttttttaaaagaaaaa

SEQ ID NO: 4274 - DNA, 444 bp, Glycine max
ttgggtggaaaatgatagtgagactcaacttggatatcaaccttgtgctacaacaattgcaacaagacccactatccacaatgagagaacaatttttgtttaaaaccttacatcttgtatgaaagatgttctctctttgagttagggttaggttacaagattgactcccaaggagccttctcaccattagaagattaccttcttcataggtgtaaacctcattaatatgctcatcacccttggcttcacccttacttccatttgaggagggagaagaagtagcctcctcttggctactatagatgtcttgactcctcatgatcgtggttttctttgtggggcattgagaagcaatgtggcctttcccaatacatttgaagcacttgatgttactagttctatcttgtgaactagcctttggagtgatttcctctatgtttttac

SEQ ID NO: 4275 - DNA, 374 bp, Glycine max
ttcaagcggggtgcatgtgagtaaccaggtttcccatctggttcgtgcaactctgaatggaggctcttgccttttgctgagaatgcgtatgatggagggtgattagcctgacgaagccttatacaaaaggtatacgaggagccttaaaggcctgatcgatatcgtgtgaaccgctgctgcataggaggaagcccacttagcttgtttgtgccaaaagaattttttaatggatggacaggcttgggctgatagcataagactttgaccctcttataataagatgatacctacttcctgaattgtgaatgaaggaagaaatgctctggttattcagtactagaaggtgtttccgctgacgaggtccattattgatg

SEQ ID NO: 4276 - DNA, 562 bp, Glycine max
  unsure (1)..(562): unsure at all n locations
agcttattgggcagtgaagacttgcaacttctttatggaccaagctggtgaggaaagaaagttgcaactgagtgagttagatgaaatccgcctagaagcctacgagaacgccaagttctacaaagaaaagaccaagaagttccatgatagcatgatagttaaaaaagacttcgtggttgggctaaaagtgttattgtataattctaggcttggactcatgagtggtaagttgaggtctaagtggattggtccttttgttgttactaatgtttttccttatggtacagttgagatcaaaagcgactccacaaacaagagcttcaaggtcaacggacatcgacttaagccattcctcacgaacccttctttagtggacgtagtggtggaagagacttccttactccaccctactcttcctccaccatgacttanggagtttttcttttcctatctccttccttgcttttattacacttgtccgattctttttgatgatttaattgtttttaatcttttaattgtgctacattgagggcaatgtgttgtttaagtatgggggggg

SEQ ID NO: 4277 - DNA, 373 bp, Glycine max
  unsure (1)..(373): unsure at all n locations
tgccgccacggagttttccgactatgcttttgtgtggtggaacaagctacaaaaggagagagcaagaaatgaagagccaatggttgatacatggacggagatgaaaaagatcatgaggaagcggtatgtgccggctagttactcaagggacttgaaattcaagctccaaaaactaacccaaggcaacaagggggttgaggagtatttcaaggaaatggatgtgctcatgattcaagcaaatattgaagaagatgaggaggtaactatggctcgatttcttaatggtttgactaatgatatccgtgatattgttgagctgcaggagtntgttgaaatggatgatttgcttcacaaagcaatccaagtggagcaa

SEQ ID NO: 4278 - DNA, 397 bp, Glycine max
agcttgcgcatccaataccttgatgaggatgtcccatatgttcttaaaactggactgattcatttgctttcaaagtttcatggccttgcaggtgaagacccacacaaacatttgaaagaatttcacattgtctgctccaccatgaaacccccagatgtccaagaggatcacatatttctgaaggcttttcctcattcattacagggagtggcaaaggactggctgtattaccttgctccaaggtccatcacgagttgggatgaccttaagagagtattcttagaaaaaactttccctgcttccaggaccacagccatcaggaaggatatctcaggtattacacacactactggacagagcctgtatgagtcctgggagagatttaagaaactatgtg

SEQ ID NO: 4279 - DNA, 406 bp, Glycine max
aagcttggttcatctgagtaaccatcttttccatctgatttgtcaaaccctgaatggaggctcttgtcttttgctgaaatcgcatattctggatggtcatttgcctaactaagtcttctaaaaaaggttgcggaggagccttaaacgcttgttgactttgttgtgactgctgcggtattgtaagacgaacatatggcttgtttggaccagcaccattctcttaaggagggacaagatgctgctgatgcctaggacttgtccatctcacatttacatgaatcctccaacctggaatgtatctgatgcttgaaaagtcctacacattctcttgttgctggacttacagatgaggaggtgtataataaatgtttgcaccctaaccttccagacgctcactgactcccta

SEQ ID NO: 4280 - DNA, 585 bp, Glycine max
agcttgtatacatgattttgaaatttatgatcctcaaaaaactaggagattgggaaacaaaaacttcctcatcaatatatccatttagggaaacactctttacatccatttggtacaacttaaaattcattattcaagcataagcaagaagtaaccttacaacctctaatctagctaccggtgcatatgtctcatcaaagtctataccatcttgtgggttataacctttggctacaaggtgagccttgaaaacctattttcctagttataacactattttcatcaagcttgttcttaaaaacctatttagttcctatgatgttcaagttattagtacttgttatcaattcccatacatcattccttttaaattgatttaactcatcatgcatagacataatccaaaactcatcttttaatgcatcatcaaaatttaagggttcaacttaagacacaaaagccatatgttcacaaaacaaacttaaagagtgtctagtagatactctcttctcaatatcaccaatgatattgtcaatatatagatttctaggggttcaccattctttgggaagatcttgtgatggg

SEQ ID NO: 4281 - DNA, 439 bp, Glycine max
tctaaaccttgtacaagaatgaagctctgataccacttgttatacaagtggcctcagatatcttaagaagggggggttgaattaagatattccaaactgtttcccctaattaaaaatctatttcactttttactcaagttatgaattcccttaatgacaatcttcttaaatattaattcaaatgaaacaatttgaatatgaatataaagcaataataaataaaaggagattaagggaagagaaaatgcaaactcagttttatactggttcggccacacccttgtgcctacgtccagtccccaagcaacccgcttgagagttccactatcttgtaaattccttttacaaattctaaacacacaaggacaattcttcctttgcgatatagatcctttacccaagagactcacagtctcttaatcccttagagaatgagaag

SEQ ID NO: 4282 - DNA, 447 bp, Glycine max
tagactcagctcgtcttaccatccacaaacagacggtcagactgaggtggcaaatcggatagtagaacaatacttgagggccttcgtccatcgcaagccagcgttgtggggacgatttctgttgtgggcagaatggtcgtataatacttcgtgccattcgagtacgggattaactccgtttgaaatcaccttcgccgaaaaccaccagctatccctgaatacataggtggaacatcacaggtgtcataccctaatttcgtccggggaccatccgtttgttgggatgcgaccctcgtttgaccacttcgaggtacttggcacccatcgttaggcaatctgtgaagtttcgtgacatgctggaagtcaaaaggaagcattgttgcacaatccgtgaagttccatgacatgctggaaatcaaaaagaagcatttgtgcacaatccgtgaa

SEQ ID NO: 4283 - DNA, 434 bp, Glycine max
tctgcttataaaggctatgggatggtgatcttgcatgagaacagctcttacccccactcctaaggcatcaacctccactataaaagtctttgtaaaatcaggtaaggccaatacaggtgtctgacttaactgatccttaagacactaaattgcaagcttggcttcctctgaccaagaaaaactatcttttttcaacatgtcatttagtggtttggctatggtgctatatctccgcacaaatcttctataatatccttccaaacccaaaaatcctctcaactatttgggggtctaaggaagtggccaattcctcatcgcttccaccttatcagggtcagtagagactccttctccagtgataaaatgtcctaagtattctactcgaataaccccaaagtagcacttagatttcttggccaacaagacatttgctc

SEQ ID NO: 4284 - DNA, 453 bp, Glycine max
tgccaacccatggaagctcctaatatctcccacactttttggggtgggccattcttggatggccttgattttctcagggtcattttggaccccatttctaccaactacaaaccctaagaaaactatattatctacacaaaaagtacacttctctatatttgcatagagggtgtttttcctaaagactgaaagaacttgcctgagatgtcctaagtgatcatctaggctcctactgtacactaaaatatcatcaaaataaacaactacaaatctacctatgaaatccctcaagacatgatgcataagcctcataaaggtgcttggtgcattagtgagcccaaaaggcatcactagccattcatacaaacaaaatttggtcttgaaagcgggtttccactcatcaccctttgtcatactgatttggtgatacccacttttaagatcaatttttga

SEQ ID NO: 4285 - DNA, 419 bp, Glycine max
agctttaagaaaaatcaaacgacaataagtttttactcagatgtcggataaaggcccgtaaaatatcgagacgctcaaaattgaaaacagaagcactcaacaaattcaaacgacaataacttttgactcggatgtccgattgtgtcccgtaatatatcgagacgctcgaaattgaaaactgaagctctgagaaaaatcaaacgacaataactttttactcggatgtccgattgagatccgtaatatatcgagacgctcataattgaaaacagaagctcttagcaaattcaaacgacaataactttttactcggatgtccgattgagtcccgcaatatatcgagacgctcgtaattgaaaacagaagctctgagcaaaatcaaacgacaatcacttttgactccgatgtccgattgagtc

SEQ ID NO: 4286 - DNA, 675 bp, Glycine max
  unsure (1)..(675): unsure at all n locations
atcaaacttggagaaagagctcttggggtctatacatganaaccaatcaagcataatggtactttcttcactaaagcggggatccatctccacacatattttatcaatagccacataaaaaatctctgcacggcaatgatgaaaattagtgatagatctcccttctgctcttgaacgaccccgaactggtatttcgtcatccatatttggttccagaatacttttagcaacacaaaatccttggacatcggcaaaaaaattattccagccactctttcattgtgcccaaccgagctttgacaacatcaactaattccatggcattcacaatataaagaccttctctttgccatatatgggaaagctcgttcgcaatcccaacaactttaaccattaccccaaaataaaagcaaatttaagctctacaattatttttgaaaaaattggcacatgccaaacctccatttcaattttttcatttaaaaccatacccttaggcaaccctttttaaccccgggggggaacccacatttttgtattccaaaccaaacgccacttgtttgtttatcgaaagggtggaaaccccccccattttttatagtttttcccccggggggtctctcagtgggagaaacaaaataggaattgggcgtgtaaaagccccccccctttccc

SEQ ID NO: 4287 - DNA, 658 bp, Glycine max
agctttgagccaatatcctgactcaccataaaccttgacccagggtgagaatgtcaatccttaccctcggaagcggaaagaatagaagggaaatttccaatcaaagaaaaggaaagaaagaagatttccaatcaaagagaaagcaaacaaagaaaagaaggaaaattccccaatcaaagagtgggagaaagccaaaagaaaagaaagaaaattcccaatcaaagaatgggagaaagtaaaaaaggaagaagaagaaggaaagaaagctcctgatcagggatcgaaggaaaacagaagaaatgtgcagaaaggtctttggaccggacaatatctgaacaatacagaattgtcaccaaatgaacaaaaagaaggaaaggaaaccacgacctaaaatggtcttctccctttgattaccaaccaaaatcccgtgcgctagcgactttttcgccccgcactaaacaaaaacagaaaaagaaaacgccaacaaaaaaatccaaagccaaaaacacacaaaagccgaaaaacccatcaagaaaacccatttcccaaggcaagtcctattgatccatgatcacgcatgtaatttttgatttgataagaaataatttgcacagtccagtcatgacatatctatggtttggaattaggatgaaacact

SEQ ID NO: 4288 - DNA, 389 bp, Glycine max
gaatggagaattgcactaagcaatcactacgcatagctctcaactctaaggtggaggacacatgaacgaaaacacaattcatggggctccgaaaaaggggttgagaatggagaattacactaagcaatcactacgcatagctccaaactcgaaggtggaggacacatgaacgataacgctattcatggggctcccaaaagattgagaatggagaattgcactacgcaatcactacgcatatctccaaacgcgaaggtggaggacacatgaatgaaaacgcaattcatggggctccgaaaagattgagaatggagaattgcactaaacaatcactacgcatagcttcaaactcgaaggtggaggacacatgaatgaaaatgcaattcatg

SEQ ID NO: 4289 - DNA, 512 bp, Glycine max
agctttgagcaaattcaaatgataatagctttttactcggatgtccgattgagttccgtaatatatcgagacgctcgaaattaaatacgtaaggtactagcaaattcaaaccagaataactttttactgggatttccgattgagtcccgttataaatcgagaatctcgaaattgaatacgaaagctctgagaaaattcaaacgacaataacttttttctctgatgtccgattgagtcccgtaatataccgagacgctggaaattgaatacggatgctttgagcaaattcaaaagacaataaacttttactcggatgtccgtttgagtcctatagtatatcgagaggctcgaaattgaatacataagctcctagcaaattcaaaccaaggaggaatgatgagaaaaagaaaggaattgctcttaaagcttcatcttcaactcaaggaagaagtgataaggaggatttcaatgaaatagacgaagatgatgatctcagtctttttgtaaaaaga

SEQ ID NO: 4290 - DNA, 477 bp, Glycine max
tttaagttcttcctcaaaactgtcctaagcaaagttccctaagtcctattaacaacttccgtttgcccatcggtttgtgggtgacaagtggttgaaaataacaatttagtgcccaacttgctccacaaagtcctccaaaaatggcttaggaacttagagtccctatcactaacaatgctccttggcaaaccatggagtctcacaatctccttgaaaaacaaatcagccacatgggaagcatcatcaatttttttacatggaataaaatgagccattttagaaaacctatcaacaaccacaaaaatggaatctctaccattgcttgtttttggcagccccaaaacaaaatccatggataaatcaatccaaggatactccggaattggcaatggagtatacaatacatgaggctttaccttagactttgcctttttacatacaatgcaatgttcacaaaatttctgcacatccttttta

SEQ ID NO: 4291 - DNA, 572 bp, Glycine max
agcttgttgaagctcatcttgagtgatgtatccacttccatctttatcaaaataagcgaaagccgcaactaaatgatcttccctgtcaaccttgtttagatgcaatgttgcagctatgaattctccatattcaattgtgccactgttatcaacgtcagcctgtaaaccaaaacaaaattgggttccatggatcaaaataatatactactaaaagattataccttttctaattttattacgcactatcaatatatcattataataaaaatgtcttattaaatgatacttagaacacctctttgcgcttgatcataatcataaacaatgaatagcaaacaataaattgctcccaggatccaggtgccatgaaaaattagttacgcatccctatttatgcatgaaatccactttaatgtaattataataatagcataaccagcatataaaaataagagaacaatgcaacaaattctttgaaagtctcctcttaacactattattatgtgaaaattgaaatcctaggctatccccactaaatggaagacatggagaaaatgtatgttttatgaaat

SEQ ID NO: 4292 - DNA, 406 bp, Glycine max
tttcaactctttttgcaaggtcaatttgttctcaaaatttcaaagtgttcattcacccaggcgcagattgaatatttgcatcacgttgtgtcaactcaaggggtccaaccagttgcctctaaagtccaggcagttcaacactggccaatacctcatagcacgagagctttacgcagcttctttggtttggccggattctatcaaggtttattcgaggatatgtctttttgacagcaccattaacatctttgatgatgaaggaaccttttctatggtctacagaagctcaacttgcttttaataagatcaaggaagccttatcatctgctttggttttgtccctccctatttcacccttccatttacagtggaaacagatgcttttggacaggtattgggcgtgttt

SEQ ID NO: 4293 - DNA, 431 bp, Glycine max
tgtaatcgattacacgcatactgtaatcgattaccagaggagtttttcagaaaacattctcaacagtcacatctttttgtgtggttcttgaatggctatcataggcctatatatgtgtgacttgagacacgaatttcataagagtttttcagaacaaaaaggtcttatcctcttatagaacaaaaaggtcttattcaaattgttctatttgaatcaatatttaagaaattcattattaagggaatttataacttgaatagaaagttaaatagaatttttaattagggaaataagttgtaatatcttaattcaaccccccccccttcttaagatatatgaggccacttgtccaacaccatagattcaaacagaaaacgttaatgaaacatgaagcagaaacgtacattacggatacgttgatgagacagaaa

SEQ ID NO: 4294 - DNA, 261 bp, Glycine max
cgcggcatgcagcctccatgactaccgggacttgaaccgaccccggcctaaagacaatttttccctgccacgcattgatctattggtagataatacaaccaagttgccacattttcttatttatggacggcccctccgggtataaccaaataaaaagggtccccgaacatgcacagaagacccctttcgtaaccctatgggggacgttctgctatacagcgatggccttcgggctgaaaaatgctggggcaacctatcagc

SEQ ID NO: 4295 - DNA, 514 bp, Glycine max
  unsure (1)..(514): unsure at all n locations
tgcatttaaaaatgttttaaaaatacttttaattaatatttgtatttttattcctttattaatatatatgtgaggggtagagggtgtcacaacatgtcttgaagttaattttgacagttttgaattttgaaattagatacgatatatttttaacacatgttcatattatgttttgaatctttccaaccctatttagtgtcttatattcttttaaaagatataagttatttcctttgtgcaacattgatttactcagctttgttgtaagttgtttttgttggaattttttgttccaataattaatgtgagctaatattataagacaattatattagttatttatcattagtgagttttattttatgtgatcagattaattgagtccgttagacaactaaatcagatgatgtagacttagatgaacatgtgttggcccattataggataatgataaccctattaagttaacatactataaaaaggctgttgtccncaatataccagccatcacata

SEQ ID NO: 4296 - DNA, 400 bp, Glycine max
cgcttaaccaattagatggaacaattggctacacagttaaatcaacaccactcccataattttgacatattaccttctcaatctgtccagaatcccaaaaatgtgagtgccattgcattgaggtcgggaaagcagtgtctagaacctcaaccagcaacatcttcctcatccgcaaatgaacctgcccaacttcactctactccacaaaaagatgatgacaaaaatttaaagagtaagatacataacaatttctatgcacgtgaatctaaagagaagcaggatatcccttttccattccctccaagaccaattttcaacaaaaaaaaggaagaagtatagaacgagatcctgcaaacatttataaaagtagaggtaaacatacctttgctggatgcattaa

SEQ ID NO: 4297 - DNA, 384 bp, Glycine max
tggctctggccaccagaaccatctgattcttaagctcatccatcttattacagatgttgctgtcatgcaagtgcttttctgcatcaaacaaatcaaatttgatcttttgatcatttacacccattttcattatacctttccccatatccaccacacaattggcgattaacatgaatggacgacccaaaatcagtgggatctcagtatcctcttcaatgtccatgacaacaaagttcgcacagaaggttaactgttgcaccttgaccaaaacatctttaatcactccataaggtcttgttatagatctgtctgctagctatagtgtaattctaactggcataatcttcaactctccaattcttctgcacatggatagcgacgaaa

SEQ ID NO: 4298 - DNA, 353 bp, Glycine max
ctataggagacggaccattccaagtgttggagaagattaacgactatgcctacaagattgacttggctagtgagtataatgtaagtgccactctcaatgtgtctggtctatctctttttgatgcagatggaggagccttggatttgaagacaaatccttttcaagaaggagggagtgatgaggacatttgataaaatttggtgagaggttctctctgggttccttgttgaaccaattatcagacttatcaaggtaatccttgtggcgtctacccagacttatcttccttcattggaagtggcgtctacccggacttatcttccttcaccggaagtggcgtctacccagactta

SEQ ID NO: 4299 - DNA, 389 bp, Glycine max
tctcggtatattatgcacctgaatcagacctccgggtgacaagttatgaccatttgaatttctcgagagcttccgttgttcaatttcgagcgtctcgatatcttatgcgcttgaatcggacctccgagtgaaaagttaagaccatttgaattgctcaatagcttccactgttcaatttctagcgtctcgatatattatacgcctgaatcggacctccgagtgaaaagttgtgaccatttgaatttctcgagagcttccgttgttcaacttagagcgtctcgatattttatgtgcgtgaatcagacctccgagttaaaagttatgaccatttgaatatctcgagagcttccgttgttcaattgcgagcgtctctatatgtgatgcgcctg

SEQ ID NO: 4300 - DNA, 369 bp, Glycine max
  unsure (1)..(369): unsure at all n locations
taagctccttcaactgcacaaggctcttaatatttgaagagtatccttgtggaaccttcacccgacaaagacactgaaaaaaacttatcttctcctttttggacaaagtatgagaagctgggggcaagtaaattttcttcccatcagaccttggatgcaactatgatcgtatccccatcttagctagatcttgacgggtatttgtcgcaaatgcccttttgcgggcgtgtgaggcgaggctcacgtgtgcgctttccaaaggaggaaagatgcgcggagtcgccaccaacgtctatgtgtggaaaacgtcgganaaaccaaaggaaaccggtcaaaatgaaaattctaagttcgggaattgtatttacg

SEQ ID NO: 4301 - DNA, 592 bp, Glycine max
agctttcaaaaatttctccttatcgtcaaaagttaagtccaggtaaaatatttattttcttccatcataactcttgatcaatgtacatgcatacactatcaaatctcaaagatatttcattattctcagaaaaagcaacatcacttgtaactttcctcacactatttgtttcttatatcatgtctttgagtgagaaaaatgataaaaagaaatttcttcaaatgcccatccaaatcgattgagtaacacaattattaaaatagaagaaaatttaaaataattttgttcactcttaatttatataatctgcactaataaaaatagaattatataatatgccatgtaatcctaaagaaacgggactattaaaagaatatttaaaaaaaaaacatttaaaatcatgataagaatgtattagtaatattatttaagacaattattaagtactatggaaaaaaatgtaaaattaattatatctttatgaaattatttgtatacaataactttttttttctacccgtcatgaaaaggataggaagacaagagatacacttacagtatgttatagtaaccttataacactagatgatgt

SEQ ID NO: 4302 - DNA, 483 bp, Glycine max
agcttgtgcattcaatatcctgatgttgtgtttcatatgttctcaaaactagactaatacatttgctgcccaagtttcatgatcttgcaggtgaagatcctcataagcatcttaaggagttccatattctttgctctatcatgaaaccccctgatgtccaacaagatcatatctttctgaaggcttttcctcattctctggaaggaggggcacaagattggctatactaccttgcgccccggtccattttcagctgggatgagcttaagagggtgttcttggagaaattcttccctacatttaagaccactaccattagaaaataccatttaggcatcaaacaacttactggagagagcttgtatgagtacctagaaagaatcaagaaattgggtgcgagctgccctcaccaccagatttttgcaaaactcccttttccatatttctatgagggaccttgccaacatggagaggagtatgatt

SEQ ID NO: 4303 - DNA, 356 bp, Glycine max
atcaactctgaacaaaagagatcaactctacacactagagatcaactctacacactaaagatcaactctacacacataggtccaacacttgatgttagggtagcatcaaggtggctcacaaaagactcaagtcccaaaaacttactaactaactctttaatcccggacttggtacaaaaactcgtgcagcctccatgattatatagcaatctgcgtttctgggcttgaaactttttgatgctggaggagatatatctttttttgaaaaaatctgccgttaaagaaactaaaagaaaaacttttgaacttttaactagaatcctccaatcctaaatcttataatcccctaacgaact

SEQ ID NO: 4304 - DNA, 578 bp, Glycine max
gcatgcaagcttctcacctaaccactacccgtgcgatctctacctaagacccaatcttagatatgagaacctccgtttactccctctcactcacactctcgtgtttacaattaagtcaaagacacaccagagatcaactctgaacaaaagagatcaactctacacactagagatcaactctacacactagagatcaactctacacacataggtccaacacttgatgttagggtagcatcaaggtggctcacaaaagactcaagtcccaaaaactcactaactaactcttcaatcccggacttggtacagaactcgtgcagcctccatgattatatagcaatctgcgtttctgggctgcaacttcttgatgctggaggagatctatcttcttctgaaaaaatctgcagttaaagaactaaaagataacttttgatcttttagtttgaatctttaatctttaatctttaatccctgaacgaacttttctactttgaaattcgaacttttattatcttttaattcgttcccagaagatagatcatctaatctcttgctaactgcacaataatctgttaaag

SEQ ID NO: 4305 - DNA, 354 bp, Glycine max
agggctaaagtctcacgagtgtcacatgttgattcaacatttgttagcagcggctatacgagacatcttgccaaacaaaggcaagttatccataactcgcctatgcttttatttccatgccatatgtagcaaagtcggtgatgctgactaatctgatgagctggaaaatgacgctgctattatatcgtgccagttggagatgtatttaccccctactttctttgacatcatgattcacttgattgtgcatctgggcagagaaatcaaatattgcggacctgcttatttgcggtggatgcacccggctgagcaaccaatgaagatgttaaaagggtataccaagaatctatatca

SEQ ID NO: 4306 - DNA, 632 bp, Glycine max
cctttaaactcagccactaaatcgatcatacaaatatcacatgccatcaaatacagatatcactttctaaccagaattttacttccctggccatctatttgtagcgactacttacaaatcctaaacaaacagattaactaaaatttcaagtttcatgctatacactctacactatatctcataccagctccttttattagtgatcattattactatgtattccaagtttttagaaagataagtcctagcataacaagtagaataagaaaaaagattgatgttaacatggaagagatgaactaatttaatgaatccttcatatttaaatataagggtaaaatatatacaccctctgaactctgaattattgccctatatcagcttaccctttaaagttcatcattatttttttctttaactaagtatctctccttctatctcttctaaatgtctctttcaaaaacactagaaataactgaaaacaaattacaaaaaccaaatgcaaatgatcccaattatcaaatattttaattaatataaaattaactacatctagttcaaatacataatgtaaatataactatataaccattactaccaaaataagattataaaatacatgaataaaataa

SEQ ID NO: 4307 - DNA, 579 bp, Glycine max
cttgccccttgatatatttgagggactcatggtcactattaatgacaaattccttgggataagaggtagtgttgccatgttttcaaagcccgtactaacgcatacaactccttatcataagttgaatagttaagggtaggaccacttaacttttcactaaaataagcaattggatggccttcttgcatcaacacagccccaatcccaacatttgaagcatcacactcaatttcaaaagatttttgaaagtttggcaacgcaagtatggggacattagttagcttttgcttaagaacattgaaagcttcttcttgtttctctccccatttgaaaccaacatttttcttgagcacttcattgagaggtgctgccaatgtgctaaaatccttcacaaatcgtctataaaaacttgctaagccatgaaaactcctcacctcggtcacagacttaggtgtaggccattcttgaataaccctaaccttctcctcatcaacttgcactccttttgaactcacaacaaaaccaagaaacacaacatggttaataccaaagatgcattttttaagattggcatacaat

SEQ ID NO: 4308 - DNA, 452 bp, Glycine max
gcttgacatctattgatatatcatacaaccagtttgagggcccacttcctaaaactgtagccttcaacaatgctaaaattgaagcattgagaaataataaaggcttgtgtggaaatgtcactggcttggagcgttgcccaacatcaagtgggaaatctcataatcatatgagaaagaaagtcataacagtaattttacccattactttgggcattctaataatggcattatttgtttttggagtctcgtattatttatgccaagcttcaacgaaaaaagaagagcaggctacaaatttacaaactccaaacatatttgcaatatggagttttgatggcaaaatgatattcgagaatattattgaagccacagaaaactttgacagcaagcatctcattggggttggagggcaaggatgtgtttacaaggcagtgttgcctacaggtctagtt

SEQ ID NO: 4309 - DNA, 545 bp, Glycine max
  unsure (1)..(545): unsure at all n locations
ccctggaagctnctaatatctgccacactttttgggttggacctattttggatggccttgattttgtcagggtgtacttggaccccatttctacaaaccacaaaccctaataaaactatattatctacataaaaggtacacttctctatatttgcatagagggtttttttcctaagaactgaaagaacttgcctgagatgtcctaagtgatcatctaggttcctactgtacactaaaatatcatcaaaataaacaactacaaatcccttaagacatgatgcataagcctcataaaggtgtttggtgcattagtgagcccaaaaggcatccctatccattcatacaaaccaaacttggtcttgaaagcggttttccactcatcactctcttcaatcctggtttggcgataaccacttttaagatcaatttttgaaaaaatgttggcatcatgcaactcatcaagtctaggaatggggtgcctatacttaaagtaatgttcgtgatggccctgcaatctgtacacattctccacttaccatcctttt

SEQ ID NO: 4310 - DNA, 505 bp, Glycine max
ttcttattttcagatgatgcagatgggtttttaattaccttatgcactcctttaatgactatggcatcatttttggcgctaaactgctgggagtgggaggccttcttcttaattaaatttctggttttagcaggagtcatgtctgcaagggctccaccactggcagcatctatcatacttttctccatatgactgagtccttcataaaaatattggagaagaagctggtccgaaatctgatggtgggggcaactggcacatactttcttaaatctgtcccagaactcatacaggctctctccactgaattgtttaaatacccgagatatcctttctgatggctgtggtcctgggagcccggaaaaatttctctaataatactctcttaaggccatcccagcccgtgatggaccttggagcaaggtattacaacccagtcttttgccctcccttgtatgaatgaagaacagcccttaaaaaaatgtgtatctttttggacattagg

SEQ ID NO: 4311 - DNA, 571 bp, Glycine max
tttaaattttatttagtgaaaaagatgagggtacttaataaactaagaggggggtgaattggatttcaataaaaacgaacttttaaaattatagttacaaaaactttttttggacagattgtattacaaaacttttataatctaaatttaattaattcaccctttacacgaaatcccttattaaagttattttttttacaaagatatatttttgaacctttttaaaattgattaatactagaatgagagataaagattaaattaagggaagaattatacaacctttttatattggttgactttatattagaagagaagctaatctagttatctaattcaaaaccagaattagatttccattatgtatatagaatctttaaaagtaattaaaactaatttacaattggtagcatagaaaaaagatttatgtatcttaaacttaggtttttagtgaataagaacctatgagaaaatttaccttatgtggaaattatataaacctattctagcatgtttttatggatttatttacaaaaaaaattattttgtaaatccttatggtataacctag

SEQ ID NO: 4312 - DNA, 387 bp, Glycine max
gcatgcaagctttagcaagaccttagacaacaatatgaaatcatttagtgactattttgtacatattcaagtgatcaccaaattcaaggaattggtaatggtctcattccaagtgtactggatgttcatctactaaatgaagttaatcaggtaccttcgtatagtcttgtcttcaagcttgtgtctcttcacgtctggaatatgaatgtagcatatagatccaaagacccttaggtgctttcctgatggcttcttcccgttccaagcttcaattggagtcttgtcttttacagacttagttagacatctgttgagtatgtaaatagcagtgtagactacttcagcccaaaatgtgttaaggagtcccttctccttgagcattgatct

SEQ ID NO: 4313 - DNA, 529 bp, Glycine max
agcataattgagtttcaaacttatagtctatatgttctatccatacttttgctgatccattgtttatggggttagaaagggtcataattgaatcctaaccatgtagcctaacttcttatttcttatctcccttcttcagaaaaaataaatctacattaactaacataatatatatcggaaacaatcttctagatattatttatcaatgttcgaggcgatattacatggaaaaaaatggtaccttgcggagattatcttccttggtgaggcgagagagacgagcgacgaagagagtgcaataagggtcttcagcagccctgggatcaccaaatgggtcatctgcaaaattcaatttgtaagcataaaatggaacacaaatgaaatttttgaaaaaggaaaatgaatatgaagaaaaaacaaacaaaggccaatggaggaacagagttgagcgcgaataacggcgttgtcgtgaggaacaacatcggtgccgtccatgctgccaacttgtatgggatggtatgaatctgcg

SEQ ID NO: 4314 - DNA, 546 bp, Glycine max
  unsure (1)..(546): unsure at all n locations
agcttgcttntacaatctccccctttttgatgttgacaaccctaaaatcaagaaacacatgcgcattctttttcctagtcgatcactcacttaattctccatattcttcccctttgtttttgagtttaagcttcacttgaaattaagctatttaattatatgagttcttgatttaatccctattttctctccccctttggcatcaacaaaaagccaaagtgtgttagaaatataaaacatacataaatgattataaagcataataccaaatgtaagcacatatcactagacatatgtcatcaaaataattaagcttaaaactcataacaattaagagtaagtcaatataatcatgttaagttatactaatcaaatattaaaagaaatactaagcattcaaacgtcataaaaatataaatcatttgggtaagtcactagcatctagcagtcctaattctctcctaatggtgtagaaaagaattttcgttactgggtttgtgaagacgtccgaagttgatttttactatctaaaaattctaaaacact

SEQ ID NO: 4315 - DNA, 456 bp, Glycine max
aaacgacaataactttttactcggatgtctgattgaggctcgtaatatatcgaaacgctcgagattgaatgttgaagctctgagccaattcaaacgacaatatctttttactcggatgtctgattgacgcccgtaatatatcgagacgctcgaaattgaatgttgaacctctgagccaattcaaacgacaataactttttactcggatgtctgatagaggctcgtaatatatcgagacgctcgaaattgaatgttgaagctctgagccaattcaaacgacaataactttttactcggatgtctgattgaggcccgtcatatatcgagacgctcgaaattgaacgttgaagctttgagccaattcaaacgacaataactttttactcggatgtctgattgaaccccgccatatattgagacgctcgacattgaatgttgaagctctgagccaattca

SEQ ID NO: 4316 - DNA, 453 bp, Glycine max
agcttataaaaaaaggaaaggatcaaggaataactactcttagacacaagtttattcaaccaacaaagaaagtagtccaaataatagaaaccaacaaggatgaggttgtagtgaagatcaaggaataggacgaggtcatagacaaggacaaggccatgggaaaggctcaacaaatttcaaagaggagaaatctcaacaagaggtcatggccaaggcaactcaagatcaaggtatgacaagtcaaatgtgaaatttaacaattgtggtaaattttacaattgtggccaaggcaactcaagatcaagggatgaccctttattgacgacttgcatgattaatgaaagaagaaaagacaattaatggtacctagacactggtgcaagcaatcatatgtgtggaaaaaagatcatgttggtggagcttggtgaatcgatgaacggaaatgtggctttt

SEQ ID NO: 4317 - DNA, 470 bp, Glycine max
ggaagcaggttaaaagctcttttcaaagcaaaaatgttgtttttacttcaaaaccctttgaactacttcacattgatttatttggtccctctagaactatgagtttgggtggaaattactatggcttactaatagtggatgattactcaaggttcacatggactttgtttttgaaaacaaaaaatgaagcttttgatgcttttcgcaaacttgccaaggtgattcaaaatgaaaaaggtctcaacattgtttcacttagaagtgatcaaggaggtgaatttcaaaatgagtcttttgaaaacttttgtgaagaaaatggaattcaccacaatttatctatcccaagaacaccacaacataatggtattggggaaaggaaaatagatctattgaaaaagatgcaaaaacccttttaaatgaaacaatgttacttaaggacttctgagctgatgtgctacacactatttgtt

SEQ ID NO: 4318 - DNA, 394 bp, Glycine max
  unsure (1)..(394): unsure at all n locations
tttttaaggaaaaganggggtgtggggaggttgaaattattagaggaaagacgcatgcctatgttgatgtggaagaattattcatatttacctgggttaacgttattagagagaaatcagaaatctttgaagtatttaaagagttgagtttaatatttcaaagagagaaagattgtgttattaagagaataaggagtgactatggcagatagttagaaaacagtaggtttattgaattttgcaaatatgaaggcatcacttatgagttctgtgtagtcattacaccataacataatggaatatttgagaggaaaaacaggactttgtaagaggatgaaagggaaaatgatttatgcaaaaaaacttactttaatctatgggttgaaggcatgaa

SEQ ID NO: 4319 - DNA, 535 bp, Glycine max
ccgtcgaacttctccattccattctgcgtggaaatagacacctccggcgtaggaatgggtgcagttctatcccagaagaaccacacaatcgccttcttcagcaaacccttctgttctaagctccttcgtgcttccacttatgtcagggagcttgtcgccattaccaccgcctttaaaaagtggagacaatacttattaggcaatcctttcactattctcacagaccaccgtagcctcaaagaattaataggtcaggccattcaaacacctgaacagcaatgctacctggcacgattactaggctatgactatacaattcactatcgtgtcggaagatccaatgcagcagtcgatgccctctcacggtagccaaaagaagccccctttggccaattttttcttctaaccattccatacttcctttttttttgcaagaacttaaacaacaactcctcaacaatcccttcttcgtggactttcaccgctgcattcaagacaatccttctcaataccctgactactccatacgttatga

SEQ ID NO: 4320 - DNA, 556 bp, Glycine max
caagcttcaacatcagaccacttccagggtgctggtaactacttcacatggatttgatggggcctatgcaggttgaaagccttggaggaaagaggtatgcctatgttgttgtggatgatttctccagatttacctgggtcaactttatcagagagaaatcagaaacctttgaagtattcaaagagttgagtctaagacttcaaagagagaaagattgtgtcatcaagagaatcaggagtgaccatggcagagagtttgaaaacagcaggttcactgaattctgcacatctgaaggcatcactcatgagttctctgcagccattacaccacaacagaatggcatagttgagaggaaaaacaggactttgcaagaggctgctagggtcatgcttcatgccaaaaaacttccctataatctctgggctgaagccatgaacacagcatgctacatccacaacagagtcacacttagagaggcactccaaccacactgtatgaaattggaaagggaagaacccactgtcagcacttcacattttgggagtccatgttacat

SEQ ID NO: 4321 - DNA, 539 bp, Glycine max
gtgggatacccaatttgatcatagtttccaagcccttattgaaaagttgatgactgctcccgtgctagttttgcctaacctgagagaatcctttgatgtgtattgtgatgcatcagagatgggtttaggaggagtatagatgcaaaatggccaagtagtggcctatgcttctggacaactcaagactcatgagaggaattatcccacccatgatctatagttggctgctgtagtttttgcccataagatgtagaggcattacctgtttggctccaaatttgaggtgtttagtgatcataagagccttaagtacttgtttagttagaaagagttgaacatgcctcaaaggagatggttagagtttcttaaagattatgattttgagtttagctaccatctcggcaaagccaatgtagtggctgtcgccttgagtaggaaatccctacatatatatgcattgatggttaaagagctggatttcctaaacaatttagagaccttagccttgcgtgggaggttaccttttataatgtgagatt

SEQ ID NO: 4322 - DNA, 572 bp, Glycine max
tataatatcttattacgctcgaaattaaacatcagaagctctcgagaaattcaaatggtcataacttttcacctagatgtccgattatggcgaatcacatatcgagacgctcaaaattgaacatcggaagcccttgagaaattctaatggtcataacttttaactcggatgtccgattcaggcgcatcacatatcgagacgctcgaaaaggaacaacggaagctctcgagaaattcaaatggtcataactttccacactgaggtccgattaaggattataatatatcaagacgctcgaaattaaacatcgaaagctctcaagaaattcaattggtcatcacttttcacacggatgtccgattcgggcgcataatatattgatacgctcgaaattagacatcggaagctctcgaaaaattcaaatggtcataacttttcacacgaatgttcgattccggcgaatcacatatcgaggacgctcaaaattgaacaacggaaggtcttgagaaattcaaatggtcatacattttcacacggatgtccgactcatgcgacatacatatctagacgct

SEQ ID NO: 4323 - DNA, 389 bp, Glycine max
agctttcaagaaattcaaatggtcataacttttcagatgaaagtccgattcggccgcataatatatctagacgctcaaaattgaacgccggaagatgatgagaaatttaaatggtcataacttatcacgcggatgtctgattcaggccaataatatatcgagatgctcgaaattgaacaatggaggtctcgagaaattcaaatggtcataacttttcaattggatgtccgattcaggcacatcacatatcgagactctcgaaattgaacaacgaaagcttttgagaaattcaaatgggcataagttttcagacggaagtccgattcaggcgcattatatatctagacgctcgatattgatcaccggaagccctttggaaatttaaatgg

SEQ ID NO: 4324 - DNA, 290 bp, Glycine max
aagaacacaatcatcccgtgagttggaagagaacaaaggaatcatagaggaggctcaattatataactctggtctaatagtaataaaacatacgtagtaagcagtgacagtgccggcagagttgccaccaacgagcttgagttgcatatcgatcctcccaaataggtactctttcttggattggaagcccggaccagagactttgtccagagaaagagatagaagctgcccaccattgaatatcttagcacggtgatcaccccatggttgatcaaagtcttggttgaagt

SEQ ID NO: 4325 - DNA, 408 bp, Glycine max
acattgtcttgaaagttctattgttgaatcatggctatgggatcgaagatttggccaccttcaacacacatgccttgaagttgttacatgagaagaacatgatgagagatctttccagcctaaaggagaacaaccaatcgtgtgaaggatgtcttcttggtaagcaacaccgatttcttttttaacaagcagaacatggagagcgaaagatctattggagctgatacataccgacggttgtggacccatgaggacgccctcccatgagaacaacaggtacttcatactcttcattgatgacttctctacaatgacatggggatattttttaaaaaaaaacttaaaagtctttggagtatttcaaaagctcaaggccccttgctgaaaatcaaagtcgaaaaccggtta

SEQ ID NO: 4326 - DNA, 543 bp, Glycine max
agcttaacaaaaggcatgcgaagtgggtggaattccttgagcaattcccttatgttatcaaacataaaaagggaaaaggtaatattgtagccgatgctctttctcggcgtcatgcattactttctatgcttgaaacaaaattgattggtattgaatgtttgaaaagcatgtatgaaaatgatgaaacctttggagaaatatttaaaaattgtgaaattttttcagaaaatggtttctttagacatgaaggctttcttttcaaagaaaataaattgtgtgtgcctaaatgttctactagaaatttgcttgtttgtgaagcacatgaaggaggtttaatggggcattttggggtccaaaagactctataaacattacaagaacatttttattggccttatatgaaaaaggatgtgcaaaaattttgtgaacattgcattgtatgtaaaaaggcaaagtctaaagtaaagcctcatggattgtataactcattgcccattccggagtattcttggaatgaattatccatggaatttgttttggggc

SEQ ID NO: 4327 - DNA, 480 bp, Glycine max
atctttttcgtgaagaaaacggggtctatacttttaattttcacgtccagtgccaaatcttggatgttggacacctagtcattaacaggaatgacaaacttggttctccatacaggatttgcttttccaaaattaacaactttggtgcaatatttgctattatgatcaatccacccaacagcaaaccattgacgcttccaaagtgaggttgaaatctggagttcatgtgcagatttaaagcttaccttcacccatataatccccatagaaagtgcaggaaagaaaaaatgagatgttcaagggatgatgtctcctgtaagcttttttatataatggttgggcagcaaaacgaaatgaacgtttttacctttcgaatgatactttactttgaaatcacaatttttttatacccaaactcccgttttggtagggcccacatggctcatgcccagttgtctaatttttcccccccccccttgt

SEQ ID NO: 4328 - DNA, 575 bp, Glycine max
gcaagcttgttaaaaaattttacaagacgagagggaattggtttttacatgctattactagatttgccacttggttatctaaccttggaaaggctccacaaagagaaagccaatattagaaagatgtttacttctaatgaatggaccttaaacaagttatctaaggaacctaaggggaaagaagctgcaaaggtagtgctcatgccttctttttggaatagtgtgatttacactcttaaagtcatggtttcacttgtcaaagagcttcgtcttgtggatggggaaaggaaaccaatcatggactatttttatgaagcaatggacaaaggaaaagaaaccattatcaagtcttttaataacaatgaaagccagtacaaagatgtggttgcaatcattggtaaaagatggaattgtaagctttatagggcattgcatggcactggccactttctaaattcaaagttcttttatgacaacattgaattgggattttgagttttaggtcctcaatgggttggttgaatggcataaaaaattggtttcacaatttgatgtgctacaaaaaaattttaact

SEQ ID NO: 4329 - DNA, 294 bp, Glycine max
  unsure (1)..(294): unsure at all n locations
gttaacctggtaacctaagtggttatgatttaaaaatntgnacctgtttgcagactttgtggtttatgctcctctatcgaccaccacacaaaccttttgccttctgtgcaacaatctgaagcaattgaacaggctgaagcttatgctgcaaacatctacaacagacctcctcaacctcaccaggacaatccgccaccacagaataactatgaccttttcagcaacaagtacaatcctggatggaggagtcatcccaaccttagatggtgctaccctttacaacactcccaataa

SEQ ID NO: 4330 - DNA, 585 bp, Glycine max
  unsure (1)..(585): unsure at all n locations
tataaactttgttacctgacattttgctctgttctcatctaaacgagttaaagcatgaaaattttttgcaggaatgttaggagcattcttcaagcatattaatgcactgcatttaaatacacatgaacgtttgcataaacaggcacaacatgcaatttcaagtttactcataaaaagccaagcttactttgtattgcaagggtttcccactactataactttgacattgcgggatgcaacggcatttaaagctcttccctgttgtacaaaaggtataatgtcattataattaacttcactttagcagaaagcaataagtatggtttaaatttcattatcattttacctgcgctgcataaatctgcccatttatgtctaacaagtctgctcgttccattccaggtcctcgaggctttgcacctattagcaaagcccattctgcatcttggaacactttataaggatcgataccaatactgacctccctcaacaaaggaaacaaagagtnctccagttccattgcaacacctgcatgttgaaatataacatttagaatgaaaagcatcatgtgtggtatttatacct

SEQ ID NO: 4331 - DNA, 491 bp, Glycine max
atcttctagacagtggttttataaactctctacttcattaattgagaatggtttctctcaatcaaagaatgactattctctttttaccattggcaaaggtgcttctctggttgttctgttagtctatgtagatgacattttgcttgctggcccaagtgctacatgtgttcattctgttcaggccaagcttcaagccttgttcaaactgaagatccttggttccttacaatattttctgggcctggaagttgcaaagtccagcaagggcattgttttgactcaaagaaaatatgccctttctcttttagaggatactggttttcttggctgcaaaccatcctctcttccaatggatccaaatttaaagctcgacatgctcagtggtgatttgctgcccgatccctcaatgtacaggtgcttacttggtcgtctcatgtacctcacttatttaatgcccggaattacattttttgttaacaagctaagccaat

SEQ ID NO: 4332 - DNA, 478 bp, Glycine max
tcaaacttgcaacaaaggagttgagcaggtaaaaaagattcgtcttcaaactcttagaggtgactttgagcgtttgtttatggaggagtccgagtcaatttctgattatttttctcgagtattggccgtagtcaatcaacttaaaagaaatggtgaagatgttgatgaggtgaaagtcatggaaaaaatacttcgaactttaaatccaagttttgacttcattgttaccaacattgaagaaaacaaggatttaaagaccatgactattgagcaactaatgggttccttacaagcatacgaagaaaaacaaaagagaaaaattaaacaaaaggaggctacggagcaactactacaactcaacgtaaaggaagcaaactatgcaaattacaagagccaaagaggacgaggtcgcggccaagatcgtggacgtggaccacgacatggaggagaacgaacacgcggtttccccaaccactcc

SEQ ID NO: 4333 - DNA, 580 bp, Glycine max
agcttcaacaatcaatttcgagcgcctcgatattttactggactcaatcagacatccgagtaaaaagttattgtcgtttgaatttgctcagtgcttcaacattcaatttctagcttctgaatatattacgggactcaatcagacatccgagtaaaaagttatcgtcgtttgaatttggtcagagctttaacattcaatttagagcgactcgatatattacgggactgaatcaaacattcgagtaaaaagctattgtcatttgaatttgctttgagcttcaccattcaattacgagcgtgttgatgtattacgggacttaatcagacctccgagcaaaacgttattgtcgtttgaattagctcataggttcaaaatttcatttccatcgtctccatttatttcgggacttaatcatacattggagtaaaaaagtgtttgcccattgaattcttctagagcttgaaaattcagttttggaacctcttgattttttaccggacttaattaaaacatcccggcaaaaaggtttttgtcaatcggaattagctccaaactttaaaattccctttttaaggcgttt

SEQ ID NO: 4334 - DNA, 483 bp, Glycine max
ttttagtaaaattaaataaataaataaatatagagcaaataataagatgagtaccctaggtataaatagttatgttaagtcagctgcctcctttttggcctcattttcgtttattccttctcttctcaaaaccctttctttttttcgcaacccaccaaacctatcttagaaaaacgacgatctcgaacctgttcaccgttggatcgtcgtgaaatttgagtatcatgtttgcaacccaattttgaatattctcaccgttgggaatttcaaaatcatatctgagcttagaggaaaacccttcgcattgtagcattttaatttcccgcagaaacccaaaactgtctcggtaaaactaggatcccagtttcgttagccgttggattttcatgaaatttggatatgttgttcgaaattcaattcctcacacttccacccgtgggaattgcgagataatattcgcgaaaggagaaaaaggaatcgcat

SEQ ID NO: 4335 - DNA, 395 bp, Glycine max
agcttatacagatgttgactatgcaggatcaataactcataggagatccactttcagatattgtacctttctaggaagaaacttggtaacttggagaagtaaaaaacaaaatgttgtagcgcgatctagagctgaagctaaattgcgggctatggcacaaggtgtttgtgaattgctttggttaaaaatcatcttataagacttgaagattaaatgggatgaacctatgaagctctactgtgataataagtcagcaatcagcatagcccataatcctgtacagcatgatcaaacaaaacacattggagtggatagacattttatcgaggaaaagttggataggggtgtgatatgcgttccatatgtgcctactgaaggtaaaaacgcaggttttt

SEQ ID NO: 4336 - DNA, 711 bp, Glycine max
agctttaatgtgtagataaaaggattttgttgttaagaattgaattatgcgtgactgtaatcaaaagtgttggaaactataattataggcgataaaaaaattgcattaattatattggtactaatagtgtttataatatgtttattttaattcacatgtatttgctctaaaaatatataatcagagtagtcaaatactcaaatcctgatttttaaaaggtttatcttttttgtttttatacattaaattaggacttgttttgtgcaatagataaacaaagatagaatactataagattatagaataaagttgataaactcccaaggttcgttttacacattagtttgatcttgttgtggatgcttatataataatagaagcacattttacccgttattaaggcgaaacattatattttaatacctttaaacaacaaagccaatttatatctaatgaatgggagtaattcttaaattggccttttaatgatcataggtcccaaattaaaacattcatatatcgctatattatttttcccaaaaaatttggttaacattagtttttcaaaagtttgaaacttgtttatccccaaaaaattaaaacatccctgtaaaaaccaaatttcaaaaaataaaaatattttttcataaaaaaaataatcgttaatagttatatagaacttaattttgtgacagttaagtttaacaaatt

SEQ ID NO: 4337 - DNA, 489 bp, Glycine max
tgtttcaaaaaatccattcggttctgattggcttgtgagaggcgggtttaaggactaaatcgcatattcattccttttgaattgattcaattcattccttgctttgttcaagatccttattcggagattcatcttcaagtgtagtgtgcttattttgaaaaccaatatcttcatttatgtgaatctcaccaattttggcttcacaaacgtgacaacaattcttgttgaattcatttttgaagcctttgtcacatagttgacttatgctcaaaagattatgcttaagtccatcaacacacaacacattttgtttatttgagtcttgtattgatttccaatgtttccttcacccataattcttcccttattattgtcttcaaaagtgacatatccacctttccttaacacaaggtcagtaagtttagacttgtcaccggcaataagcctagagcaaccactatccaagtaccatagtgagtcttttacttt

SEQ ID NO: 4338 - DNA, 596 bp, Glycine max
agcttattcagcgtggtgggggccagaaattttttttatgcaaatttcatgcagtactgctacttataatttgacgtacagcaaaataatgtggttcaggatgcctggtgatatgatcatgcactcagtgttagttgtcatcttatctacactgtttcagagctatcaattccgataggacagctccatatgcccttgttttttccaaaagttgttttgacgtgtgtaacaccaccttatcaaacaatggccaacataaagcctccacttgtaaccaaatgagacgtgcctaaatgtatcctcacatttttagtgcattattcggtattccatacttttgcaggcatgctttggacatgttttcttcatgttatgctggagtacaactggaaggtattttctgactgatgaattataaggcaacacagatagatagcaagagatcatagaccattatatttctgaggtttgacattatacatctgttttatttcaagcggattcacaccaaaaaattagataggattatcttagctactataacatgcaacggtaatttttgataaagtccttcaaggcaacaccatatgcccctg

SEQ ID NO: 4339 - DNA, 401 bp, Glycine max
agaatcggacctcagtgtgaagagttatgaccataagaatatctcgggagctatcgttggacattttcgagcgtctgtatatgagatgcgcctgaatcggacatccgagtgaaaagttatgaccattagaatctctcgagagctttcgatggttaattttgagcgtctcgatataatataagcctgaatcggacatcagtgtgaaaacatatgagcatgctaacttctggagagcgttcgttgtacattttttagcgtctatatatgtgatgcgcatgaattggacatccgagttagaacctatgaccatttgaatgtctcaagagctatcgttgaacagtttcgagcgcctagatatatcataagcttgaatcagacctcagtgtgaaaacgtatgacca

SEQ ID NO: 4340 - DNA, 416 bp, Glycine max
  unsure (1)..(416): unsure at all n locations
cttgatgagnaaattggagaggttaatgaaacaacgagatgatgcgctccatgagaggttggatcaaatggagaatagatatcctaatggagaagaaaggaggagaagagggaatgatggtgttcctagacaaaagcgaattgatggtattaaactcaacattcctccctttaaaggaaagaatgatccggaggactacttggagtgggagatgaaaatagagcatgttttctcgtgcaacaactatgaggaggaccaaaaggtaaagcttgccgccacggagttttctgactatgctcttgtgtggtggaacaagctacaaaaggagagagcaagaaatgaagagccaatggttgatacatgggcagagatgaaaaggatcatgaggaagcggtatgtgccgtctagttactcaa

SEQ ID NO: 4341 - DNA, 333 bp, Glycine max
tatacgagacatcttgcccaacaaagtcccgttcacgataactcgcctgtgcattttcttccatgctatatgtagcaaagtgattgatccagtaatgtttgatgagttggaaaatgacgccgcaattatactgtgccagttggagatgtattttccccctgctttctttgacatcatgattcacttcgatgtgcatctggtcagagacatcacatgctgtggtcctgtttatctacggtggatgtacccggttgagcgatacatgaagatctttaaacggtatacaaagaatctatatcgttccgaagcatctattgttgagaggtacattgc

SEQ ID NO: 4342 - DNA, 429 bp, Glycine max
  unsure (1)..(429): unsure at all n locations
agctgttttctctgtacacctacattcctatacacgaaaaactttttctatatacacacgcgttgaaaaactctttctctttatatcgacatggtctatataaaacctttattccttttcaaagatttctttttcctttttcaacatacactcattgtttatacaaaaattttctttatatacactcattgctcacacacaagaatttcttttcacacattgtttatacacaaaaaaaacttttcatacattntttttatatacaaaaactcttttcttttctttatatacagatatggcattntgttcacaatgcctctttctttttctattctcggggtatcacgacgttggtcatttatttaggacgacgtcctaaatgaaactctacacggttccgaatttaacaacatatcgacataacaagta

SEQ ID NO: 4343 - DNA, 421 bp, Glycine max
  unsure (1)..(421): unsure at all n locations
gtgatctgggatngtgaaatctctaagagttcgaggtcacatggatgtaatttgaaattcatcaaagcctcttggagcttactgaaggaagatgtcaaaagatttcttacgaagtttcatgttaatggtgtgttccctagaggtcgcaatgcatcattcatcaccttgatacctaagattgaggatccacaaaatctgggggaatttacgtccatttcactggtaggatgtatgtataagatccttgctaaaatccttgcatgaagactaaaaggtgctttggtagtgtgattgacaaaacgcaaatcgccttcttggaagggagaaacttacttcttggagtcttggtggcaaatgaactagttgataaggcaagaagaacggaaaagaagtgcttagttnttaaagttgactatgagaa

SEQ ID NO: 4344 - DNA, 418 bp, Glycine max
  unsure (1)..(418): unsure at all n locations
atctatacaaaggaatttatatggtgcagcctccaagactccattaagattccttgggtgaggtgggacatagtctgcctacctaagagtaaaggtgggttatggatcaaagatttgattaaattcaatgacgctttgcttgctaaatgggggtaggagttggcaaataatcagaatcagtggtgggccaaaattctattgtctagatatggtggttggagggatttgatttctgataggaactgcagtttatactctccttggtggaaagacctcaaggttatcttcaagcagcagcaaagcaacacaattngcaaaaatagctgtatttacgccatacgtaacgacggtccatggaatacaaaccaagtactcattggcttgacaacaaaggagacactcattggaaatatatatg

SEQ ID NO: 4345 - DNA, 444 bp, Glycine max
  unsure (1)..(444): unsure at all n locations
acaatgtcatgtgataaatgatctaataaaaacatgagaacaaatcaattnttttctaaatttaggaaaaaaaaaattaaacccaaaaaataaaaatattaaaaaagtatttaatcttatgtttatatataattatttacaaaaaatgtataattgatggttaagataagcatgacaatgaagcaccacgagattgtatgttattntttatacttgtttcctagcatcgtctccatcccccgtcctttgttcccaatgaggataataaacaaatataagagagagagagtataaatactcataacaataatagttaccatagatacttacataacatgattataactgtgtagagcttatttaatgagaaccaagactaatatgattaagatatataatatattgtataaaataacactatctatttagctttgatatatctat

SEQ ID NO: 4346 - DNA, 432 bp, Glycine max
cttcattctccacttttattcggagccccatgaattcatagccaagcgctgttcatgcatcctccaccaacgagtcaggaggctcgcgaattgattgccaagcgctgttcgccagttctccattctccactttaattctgagccccatgaatttattgcctagcgcttttcatgtgtcctccaccttcgagtctggagccccgcgaattgattgcctggcgctgttcgccaattctccattctccacttttattctgagccccatgaatacattgcctaggactgttcatgcatcctccaccaacgagtctggaggcctcgcgaattgatgcctagcgctgttccccagttctccattctccacttttattcggagccccatgaatatattgcctagcgctgttcatgtgtcctccaccttcgagtctggag

SEQ ID NO: 4347 - DNA, 462 bp, Glycine max
  unsure (1)..(462): unsure at all n locations
agcttcaacttctctcacataactctccttagtcaaactcttcttttatttaatgtttaggggttggtttacaaccctcatgttccattatataacatacaccatatagaatcaataatggacataacaatatacataatagtttttcatagaggtcttagccttcacaatacaaacatagaatatgtcatacaacatccatattagaatcattgatttcatctcattatgacactaagatcatcagctaacatcatgatattcattggactcatacaccactccttagaatcatacaaataaagaaattatttctattccatcaaccacacatacaatatatcatattaccacacaaaagaatcataagaataattcatagctctactacacgtcatacgttatagagccatgtacttcaagtaataaataatcatggaccacttnacccataattatcat

SEQ ID NO: 4348 - DNA, 439 bp, Glycine max
  unsure (1)..(439): unsure at all n locations
ntgcanaaaatgccactctactcgaaatttttgaaagatatgttgttaatgaaaaacagatacatccaccaggagaatattgttgcggaaggcaactgcagtgctgtaatacagagaattcttccaccaaaacataaagaccctggaagtgttactattccttgttcaatcggtgaagtcactgtgggaaaggctctcattgatttgggagcaagtatcaacctaatgccgctctccatgtgcagaaggttgggagagttggaaatcatgcccacacgaatgactntactacttgctgaccgatccatcacaagacctcacggngtaattaaggatgttctgataagagtgaaactacggtctttccagctgattttgtggtcatggatgtggaggaagaccatgangttctagtcatttttggacatccctttatgtc

SEQ ID NO: 4349 - DNA, 395 bp, Glycine max
  unsure (1)..(395): unsure at all n locations
gacatgattagcaatcaagtataatgttacttccttcactaaagcggggatccatctccacacatattttatcaatagcaacataaaaaatctctgcacggtaatgatgaagattagtgatagtcctcccttctgctcttgaacgaccccgaactggtatttcgtcatccatatttggtaccagaatacttttagcaacacaaaatccttggacatcggcaaaaaaattattccagccactctctctcattgtgcccaaccgagctntgacaacatcaactaattccatgacattcacaatattaagatcttttctttgcaatatattngaaagctcatttgtttcctatgacctggatcacgcacaatctcatttgggtaaactcataaccaca

SEQ ID NO: 4350 - DNA, 447 bp, Glycine max
  unsure (1)..(447): unsure at all n locations
ctgaatgctctattcaatggagttgacaagaatatcttcatacttatcaacacatgcacagtggccaaggatgcatgggagatcctgaaaaccactcatgaaggaacctccaaagtgaagatgtccagattgcaactattggctacaaaattcgaaaatctgaagatgaaggaggaagagtgtattcatgacttccacatgaacattcttgaaattgccaatgcttgcactgccttgggagaaagaatgacagacgaaaagctggtgagaaagatcctcagatctttgcctaagagatttgacatgaaagtcactgcaatagaggaggcccaagacatttgcaatatgagagtggatgaactcattggttcccttcaaacctttgagctangactctncgatagggctgaaaagaagagcaagaatctggcgttcgtgtccaatgat

SEQ ID NO: 4351 - DNA, 456 bp, Glycine max
  unsure (1)..(456): unsure at all n locations
ctcaagcattgaatgctctattcagtggagttgacaagaatatcttgatactgatcaacacatgcacagcggccaaagatgcatgggagatcctgaaaaccactcatgaaggaacctccaaagtgaagatgtccacattgcaactattggctacaaaattcgaaaatctgaagatgaaagaggaagagtgtattcatgacttccacatgaacattcttgaaattgccaatgctcgcactgccttgggagaaagaatgacagatgaaaagctggtgagaaagatcctcagatccttgcctaagagatttgacatgaaagtcactgcagtagaggaggcccaagacatttgcaacatgagagtggatgaactcatnggttcccttcaaacctttgagctaggactctcggatagggctgaaaagaagagcaagaacttggcgttcgtgttcaatgatg

SEQ ID NO: 4352 - DNA, 427 bp, Glycine max
  unsure (1)..(427): unsure at all n locations
aactctttcttttgtttagtcaaaacttctaatgctcttaatctctcctcgtctaaatcaactaactcatctgacatcattttccaataatggtcgattggaatgtccatttgtttttgtactctggctgattgcaaatgtatttcgaccggaagtacagcatcgtgcccataagtcagtcgaaatggggtagtattagttgattccttaggagaatttctacatgcccatagaacttgatctaacgttttattccaatttcttggcttttgggcaatgtgttttttaatcaagttaattacaatcttattggctgcttcgacctgaccacttgcttgcgcgtaatatggtgttgaggttaataatcgaaagccagttttttgggcaaattctttcattnttcgtccagtaaaaactgaaccttgat

SEQ ID NO: 4353 - DNA, 394 bp, Glycine max
  unsure (1)..(394): unsure at all n locations
agcttgtagggttaaagtctcacgattgtcacgtgttgatgcaacaattgttagccatggctntgcgagacatcttgcccaacaaagtcaggttaaccataactcaactgtgctttttctttcatgccatatgtagcaaagtccttgatcctgtcaagtttgatgagctggaaaataatgccacaattatactgtgccagttggagatataatttcgccctgctttctttgacatcatgactcacttgattgtgcatctggtcaaagaaatcgaatgtcgtggtcttggttatttgcggtggatgtacccgcgtgagtgatacatgaagatcttaaaagggtatacaaagaatctatatcgtctagaagcatctattgttgagaggtacattgc

SEQ ID NO: 4354 - DNA, 360 bp, Glycine max
  unsure (1)..(360): unsure at all n locations
agctntaagcaaattcaaatgacaataacttttgactcggatgtccgattgagtcattttataatttgagacgctcaaaattgaatgcaggagctcttaccaaattcaaatgccaataactttttactcggatgtccgattgagtcccgtaatatatctagatgctcaaaattgaaaacagaagctctgagcaaattcaaacgacaatagcttttgactcggatatccgattgagtcatttaataattcgagacgctcaaaattgaatacagaatctctaagcaaattcaaatgacaataacttttgaatcgtatgtccgattgagtcattttaataattgagacgctcaaaattgaatg

SEQ ID NO: 4355 - DNA, 392 bp, Glycine max
agcttgaaggcaaactggatgcattggttaacttggtaacccagctggccttgaatcataaatctgtacctgtcgcaagggtttgtggtttgtgctactttgctgaccaccatacagacctttgccctttcatgcagcaacctggagcaattgagcagcctgaagcttatgctacaaatatttacaatagaccttctcaacctcagcagtgaaatcaaccacaacagaacaattatgacctttccagcaacagatacaaccctggatggaggaatcaccctaacctcagatggtccagccctcagcaacaacagcagtctgctcctttcttccaaaatgctgctggcccaagcagaccatacattccttcaccaatccaacaacagcaacaa

SEQ ID NO: 4356 - DNA, 424 bp, Glycine max
  unsure (1)..(424): unsure at all n locations
taaaacatacttagacacttcctgagcatgtacgagcagttatgcaagtgggatcagcaacttccattatcagagtaatcgagcacagcggaatctgtagtttagacaagttgcaagtcgtttccaggatgtcaagacatctcacatgacatctgctttctgcttctgctccccctgtctccatgcttactgcagcatcttctaacagctactagtcttctccaggatgtcaagacatctcctgtgacatcagctatctgctccccctgtctccatgctcttactgcagcatcttctagtagctatcatcagtcatcatcagcagcagcagtctccctctcanaatcgtatacacacaactcccncttcaaatcatgaatcatgcatacatcgtatcctactactatggcatacatagtatctt

SEQ ID NO: 4357 - DNA, 321 bp, Glycine max
aatccatataatgtgcacaccactggacatgcccaatagtaccatctccaccacaaggggatgctgtgttgaaaatggaatataacaagtaacataaataaatatacatacattgaaatcatgcatgtaatgtgggcgcaacaacttacaggtcttactacaataaatcctgagaacagattccaaattgcataaaatacagcatccacaatggaaacaacatggtggtttgggttcactcccacaaccatcatgctgtataaggtgaagtacaacaatgtgaagtacatgaaaaatagataccaaaagaatttctgtaca

SEQ ID NO: 4358 - DNA, 467 bp, Glycine max
  unsure (1)..(467): unsure at all n locations
taattgcttctgctctttaacagttatcccaagtaccatattcaggcattgtaacttgtatccgcaagtgaattggatgcagattgtgtattgtggttaagtctgtcaactagtcacaggtttttattcaatcaaatagagctggagtctcttgatgttcatgtaggccaatcctacttagttcttgtcacaacaaaccaaaatattgctgattactacatagtagcctctcctaaactgagtaatgccacaaataataacactcttgttggtgttgttgtgcttcattatgacaactctaccacaccggctattgggtctcttccaagtggtccagatccatttgatatgcaattctccatcaaccaagaaaaatccattangtaattgcatttcacaaaatggtgctctgtatgccaaagaagagtttttccaatattctttctttgcttgcttaatgtcaacat

SEQ ID NO: 4359 - DNA, 281 bp, Glycine max
tctattgtcagattgagaatgccgctacccgcacctgtgtccatgattgtcttcatgcctcttacgtgctgatgtccaaatctacgatgccgtattctgactttatcttatccttgaaattgacctgtggaggacgtgctggcttcttgatgtgaccataagatacagttgttcttcgatctggtgcccttcattaagactacactctgctcctttgtcacccaacatactcactctgggaagagtacagtgaatgcttgataagacaactgactgatgct

SEQ ID NO: 4360 - DNA, 410 bp, Glycine max
atgataccgagaaagaaagactaatttacttcatgaaaggtagaaatagaatgctagtgaaccggctgacaaacaaaccaaattttattgacaatgcgtaaccatgctctcttccaactaaatttgcaagagcaccagtgacaaagctctcaatgaatgatatagctattgctagaattaatgtctcatgtgagagatatgtgacttatgtaaggactaataaataaataattaacgattaagggctaaattgtaattgggcttaataggagaagcttctaggttaactgctacttgatgggagtagtggttataaaatgggcttaatacccactaacgtgaaataaggtcctcttcctgaccagaaagtgttctctctcactcatagccatcacgaacagagagagaca

SEQ ID NO: 4361 - DNA, 288 bp, Glycine max
tacatgatgcgcctaaacaggacatctcgtttattggttatgacaatttgaattgctctagagattccattgttcaatttcgagcgtctcgatatattatgaatttgaatctgaccgtccgagttcaaagttatgaccatgtgaatttcctgagagcttccgttgttcaatgtcgagcgtatggatatatgattcgccagagtctgcactccgagtgataagttatgaccatgtgaatctctccagagatttcgatgttcaatttcgagcgtctcgatatattatgcg

SEQ ID NO: 4362 - DNA, 341 bp, Glycine max
gaatagatccttgccctctgatcgctggcatgagagccgtggttctggccatgactctagaaaggagaataagaggtcatcaagatggcgtcctgaagataaagagaaggattctgcgtctgagataagacatgatgttgagaacgaagatggtcacactgaaaaaccttctcctggagttgggaatcgcatggtgcctgatcgtgacactgattctcgtgataaatggaggccgcgacatctattggaagctcaagctgctggtgtggccacataccgagctgcacctgtatttgggctgcagaaaggacgcaccgaatgctccaatgtgctgatttcac

SEQ ID NO: 4363 - DNA, 420 bp, Glycine max
catgcaagcttgtacatattgcccaatggataaaaaaataaaaaggaattttataaaatctcttacctttctatgggatacattcgttgatatgaacaagaactctaagctttaccttttccacgagatgaacaaccaaatgaaacatgacagtgaagaataaaggaggaaatatcatttccatgtggtataaagtgagaacaacttggatttgtaattagtctaaattcttaactttcaataatttaaccacatatttttttaaagaatgagcataactcaattaatactgttgaaacctcatctgacaatgtagatcacatggctaatggtagcacatgccataccaatatgtgacaattgtgactcttcaacgttccagtcaactttagattttctgagtcgatacaccaagaaatg

SEQ ID NO: 4364 - DNA, 448 bp, Glycine max
  unsure (1)..(448): unsure at all n locations
ngacattattcagttagtggtgtttaagcaaatataatgaataagtgaaggaagtataattatgtttgccatcatttcattatattttcgaattgtggttgtgtttgtataattatataataatatcatttgttgtatattttataaacacgtgccttttaagccgacgcctatggttggtttttttatggatatcatcatattaacttttcatttttaagtttgattagttgtacgatgtggcatactttttaattattaaaaaagttagttattttatgagattgatgtagagagcaaatattttaatcccagggttgttattgttgtgagtgagaagacatatatcatcttatatataaattaatatttttaatattattaactgtttacatcatggtttaattagcacaaataattaaaataaaaatttgaattataacaactc

SEQ ID NO: 4365 - DNA, 457 bp, Glycine max
ctcattgtcatttttgggtttctgtttattgctcgtctctctgtgttcttgtttgtgagttgccatatagggaattggaaaggaggattggtgccatcccttgaagaatttgagtcaagaagaaaggggaaaaccaccttaagagctattggactaagaagcactccaaattgagtgaatcgccaaagagagaacaacctccaaaattgagaaccttattgctatttcgtaattgacaatatacttactttcattgctttcaaattctgtaacaaacaggcctttcattggaagtaagataagagcctccaatagatgaccctacttgcatttgtgtgtgataatgttaggcaattttcccttaagattgtgagtgttttgctgggaacgttaaatgtggtcttccaaacactctgaagatgcacctagcttacattgtttgcttactttcatagtt

SEQ ID NO: 4366 - DNA, 379 bp, Glycine max
  unsure (1)..(379): unsure at all n locations
agctttagccaaactgtacaacttggcaataataccacaatggctgttgtgggaaaaggtataattcgtatgccagtgaatggatttattcacgcaatttctggtgtctattatgttcctgaacttaaaaataatctattgagcatagggcaacttcaagaaaaaagcttaactattttgattcaacatgggaagtgtagggtatatcattccgagaaaggattaattatgcagtcagatatgagtggaaatagaatgttttctgtgttggctaccatgataccaaaagcttcttcgtgtttccaaattgtatcagaaaatgaatctcatctttggcattgccggttnggtcacttangctataacggattgaggacac

SEQ ID NO: 4367 - DNA, 451 bp, Glycine max
  unsure (1)..(451): unsure at all n locations
catgcaacttgccgatccaatttgtgaactgacattttttatcaaaattacataattataatacttaacagatgataagtaaaattaatcatatttttttcatttgtaaaaaattaaactcacatattaaagatnacaattttcaatacagcgttcaattaataaagttaaacccgttaatgataattaagtgtagatagaatgatttcatatatttattctgtcaaaaagtttttatgaatataaaaatctataacataaggattatgtttcacacaacttttttctctcttaagatgttttcatacttttttactacttaaaaatgatattactttttctattcaaacaaaattaatgaactccagaccactttttaacaaacttactccgacaattttgttttaattataatctattataacaataatatctcattatacatataatt

SEQ ID NO: 4368 - DNA, 445 bp, Glycine max
cgtgtgttttagcgatactcaccacaattgtgtaacatattctccacatcaagttgatcatgtcctagaagatccagttgaacaacatcaaacacaaaatgttgagcaactttttgaacaacatcaaacacaagatgttgaacaacctgttgaacaacaaccaaaaggtgtggatgtaacattgagaagatcaactagaataaagaaacctgtaattcctagtgattatcatgtgtattcacaagagtctcaatatgactttggagttgaaaatgatcctgagtcatttttgcaagcaattaacagttgcgattctaagctatggtatgatgctatgaaagatgaattggaatctatggtaaataataaagtatgggatcttgtagagtttcctaatgggataaagcctattggatgtaaatgggttttcaaaaccaagaacgat

SEQ ID NO: 4369 - DNA, 349 bp, Glycine max
  unsure (1)..(349): unsure at all n locations
agacttgatctaccaccaccgtcgccatcatcatcttagttntctattattcttaatattactagtactttgttttctagccgagtatttggctatattatgacatttgaacaatttagtgatgcaatcctccctaggaagggaccaatcactagaaccatgagcaagaggcttcaagaagattgggctaaagctgctgaagaacgccctacggttctcatgaaccttacgataaatntctgagcccatgggccaatgttgggtccaattatctttgtacatattagactacgatgtcattatatttggtccttgtatttagggctccatatcgtacgtagggtaccct

SEQ ID NO: 4370 - DNA, 441 bp, Glycine max
  unsure (1)..(441): unsure at all n locations
gacctataaatctcagctttattggcaggaatgaagaaagacgttcgcaagtacattcgggtttgccacatttgtcagcaaaataaaaccactaccaagcgtccggcggggttattacagccattaccagtgccggcgggggtatgggaagatatctccatggatttcgttactcatttaccttcatccaatggctataccgttatcatggatgtagttgaccgttactccaaggaggtgcacttcggcgccttacccacggtgttttccgccttcaaggttgccacgctctttatcgacgttgtttgcaagcaccatggatttcccaagagcatcatctccgacagggatccagttttcttgagtgctttctggagagaattatttcgactcagtggcacgcacctncgcctctgcacaacgtaccatccacaaacggac

SEQ ID NO: 4371 - DNA, 445 bp, Glycine max
  unsure (1)..(445): unsure at all n locations
tagactgagttcagcctactatcttcagactgatggccaaactgatcgaaccattcagtcattggaggaccttttaagagcatgtatcttagagcagaagggaagctgggagagttttcttccattgatagagttcacttataacaatagttttcattctaccgtcggcatggctccctatgaagctttgtatggtagaaggtgtaggacacccctatgttggttagagcccggagaaggcctcaccttatgaccgaaagtggtacaacaaaccaccgagaaagttatgttaatccaggaaaggatgaggactgctaagagtangcagaaaagttatcatgataagaggaggaaagatctggaattcgaggttggtgatcatgtattcttgagagtcactccatggactggggttggtcgagcatttgaaatccgaanactcaca

SEQ ID NO: 4372 - DNA, 468 bp, Glycine max
  unsure (1)..(468): unsure at all n locations
ctatcttacccctacagaagcatctaagagctgcttagattgtgttctcaactcgtaaacgaaaatattctgctgtatgggctcagagaatccatgagtaggagttttccacagcaagctacagaatctttctagtgcttcactcaaagattcatctgggaattggtgaaaggaagagatggcagcctttcaactgggaaatatttcttcagaaacttttccacaacttcatcccaagtcctcaagctattacctttgaatgaatgcagccacctcttggcttctccagatagtgagaatgaaaataagctgagcctaacaacatcttctggcactccagcaattcttactgtgttacaaatttcaatgtaagttgctagatgtgcataaggatcttcattggngcagccatgaaattgatttcctctgatatgctgaatcaaagaatgtggatatgtgatattctga

SEQ ID NO: 4373 - DNA, 305 bp, Glycine max
catgaaaactactcacctcggtcacagacttacgcgtacgccattcttgaatagacctaaccttctcctcatcaacttgcactccttttgaactcacaacaaaaccaagaaacacaacatggttagtacaaaagatgcatttttcaagattggcatacaattgttcttctctaagcacagtcaagacagattttaaatgatcaatatgcaaatcaagtgcagtgctatagataagaatatcatcaaagtacaccacaacaaactgtcctatgaactctctcaagatatggatcattagtctcatg

SEQ ID NO: 4374 - DNA, 472 bp, Glycine max
  unsure (1)..(472): unsure at all n locations
tgtaatcgattacgcaaggcttataatcgattaccagaagttttttaaactttntataacatcctttagaaatttgaatttaaattttaaagcttgcaatcaattacaacttgtgtgtaatcgattaccagacatgaaaattcaaatttcaaatctgaagagtcacaactcttcagaaactaactgtgtaatcgattacaacaattatgtaatcaattaccagtaaggaattttcgaaaataactcccaagagtcacaactgttcaagaagtttttgaatggctatcaaaggtctataaataggtgacttgngacatgaaattttgaaaaagagaattttcctgaacaaatngtcttatcctctcaataccaaattgtcttataactctcaaaaagaattccttggtcaaaacacttgcaaatntaataaggaatctngagtgatcttcaattngtatatttttcttcttaa

SEQ ID NO: 4375 - DNA, 448 bp, Glycine max
  unsure (1)..(448): unsure at all n locations
agcttggtgatccaggatcttacagacgactcgttggaaggctttggtacttaactatatctacgtcagatatatgttattgtgtgcacaaattaagtcagtttgtcttcaacccctatacgaaccacatgcatgctactaacatgttacttcggtaccttaagcacactgttattcaaggtattctttttaaggccaacttagacacaaaattacatgcatatgtggatgcaaattaaggatcatgtnctgaaagtanaagatcaaccactggcttctgtatcttcttaggaaattccttggtttctagaaagccaaaagacaaaagacagtaagtatgtcctcagcagaagcataatacacgtccttggcttttgtttctangtgaaatactcggattcgaaattacttactaatttcaatattagaattccttttgtactatcta

SEQ ID NO: 4376 - DNA, 446 bp, Glycine max
  unsure (1)..(446): unsure at all n locations
tatgacaatctgaaattctcgagagcttccgaatacgtgtgaaaagttatgaccatttgaatattttgagagattccgttgttcaattttgagcgtctcgatatattatgcgcctgaatttgacttgcctgtgaaaggttatgaccatttgaatttctcaagagcttccgttattcaatttcgaacttctctatatgtgatgcgcctaaatcagacatccggggtaaaagttatgacaatttgaatatctcanaagcttcggtagttcaatttcgagcatctcgatatattatgcgcctgaatctgacatccgtgtaaaaagttatgaccattttagtttatcgggagcttccgtttttcaattntgagcgtctctatatgtgatgcgcctgaatcggacatccgagttaaatgctattaccatttgaatttctcgagtgcttccg

SEQ ID NO: 4377 - DNA, 423 bp, Glycine max
tcttatccaggcaattcttggtggtgaaactccttctttcttggcttattccctagtggatggtgcctcccctctcctcttctcctttgccttccgctgcatctccatggtgaaaaatcaaatttgaaggaccttattgaagctcaaagatccagcctccatagaagccccacaagcaagcttccatcagaaaccaagaagaacacacaaaaataaaagaaaatgcggcgacatcctaaattgccccagattctaagcatagtatcgcttgacagcatcagagttcacgggtaaaggtagttcctcgccatccatgttggtaagtaccaaggctcctccggtaaaagccttttttacaacgaaaggccctttgtagttcggggcccacttccctcgattgtccttgacagcatgggacatctt

SEQ ID NO: 4378 - DNA, 387 bp, Glycine max
tgatgtttgtgttgaatgccttaaaggtaaacaggccaaaagcaagaaattaggtgcatatagagctacagacgtcttggaattgatacatacagacatctgtgggccatttcatacaccttcatggaatggtcaacagtattttatatcatttatagacgattactctagatatgcatacttgtttcttatacatgaaaagtcacaatctctagatatgttcaaaacatttaaagttgaagttgaaaaccaactcaacaaaagaataaagtgtgtttgaccatggtggtgaatactatggcagatacgacggttcaggtgaacaacgtctggtggcctttgccaagtacctagaggaatgtggaatcgtcccacaatacaccatgc

SEQ ID NO: 4379 - DNA, 468 bp, Glycine max
tcattaagaggcttcctccagaagcttcctcgtggcttctttgagaagctttctcaagaggcttctttgagaagctagatccttatctatccacacccctctattaactaaattaacttccttaaaaataattacggatgaaaataacgcaacaaatattcaaacatcaaacataattactaatagtatatagatatatatatatcagggtgttacaactctcccacccttttagaaatttcgtcctcgaaatttaccttactcaaacaaggatgggtgagcttctcacatctgactttctaattcccatgtggcatcttctcctgatgcacctccccagatcaccttgaccaacagaatctctttccctcttaggtgttttgtttgcctatcctcgatcctcaaatgcaatgtttcatatgtcaaattctccttcacttgtacataatccaattcaatcacatggga

SEQ ID NO: 4380 - DNA, 417 bp, Glycine max
  unsure (1)..(417): unsure at all n locations
ttggattcatgaactgcanaaccaagcaaagtgtgttacatattaaatgtgtccttatcggaactatatgcatcaattaaggtacttttggcctatattaccatgtcaatgccagcagaaactcctgcttcaattgaataagtgaagtttgcgtgaggtggtaaagtgatcctatcaataccctcaaaatctgaaataacaaagccctggtgtaatcaacgaagaggtaaggggttatttaaaatagtgttcataggatgataaacagattcaatgctatattcgacaaagtattttaccttgaaatggagagtattcttgaggtagccagtaataaggtcattgatagcatgcatttttactccattccaactggagtaagagaccataatggatgccacacccttgctgattgag

SEQ ID NO: 4381 - DNA, 445 bp, Glycine max
agctttgttggctttaccagaattatattatataaattaaatttatagttttattgacaattaatcatatcttaatttttattctatttcttataactcttttattagcttctactatatatagagagagaggtaattatactagaatgagagttgaataatatgttactcacattattaaatcttttccaatgacagatttttattaaataaacaagtttatttaacaacttttgtctagtgactaagataagttttcttaagtacaggtgaattggtgtccaatgatatataaaatttattcttcaatgaacatcttgtgtttagaatgtattaataataaactttgaaataatttaataagctaaagagaaatggtaaaaatacctcattttatactggatcaggcaatctgagttacgttcaattctgcgccaccaactag

SEQ ID NO: 4382 - DNA, 529 bp, Glycine max
agcttgacagctgggaacttatgaggaaatacttatttgggattcaatcccctaatgaaacatctagtaatttatttatttaacaaaaattccgatatctatcccaaatagatcattttaatcgggtgaagaacattcataaaatgatgaacttaaattttcatcattacagtttttactacacctaaaatttggacttaaaatcttatttaaagaaactaatcacccctttcgtgttgtaatattatttaaacaaatctagcatcatatataactcgaacaagccttatattatttataacacatcatatatcacatagtttaaataaaggccaataattattttcgtccctaaatgtttaaagcattaataaaatttattcttgaaagataaaaattcaaattttagttctcaaaagtgaaaaagtgtaaccaattcatatattcgctaaccttcaatgaaagaaccctgtatgacatatccagaaaccaacttgttccccattatacggccagacaaaatgactat

SEQ ID NO: 4383 - DNA, 620 bp, Glycine max
tcttagtttcagatgatgcagatgggtttgtagctacctcatgcactcctctaatgactatggcatcatttctggcgctaaactgctgggagttggaggccatcttctcaattaaatttttggcttcagcaagagtcatgtctccaagggctccaccactggcagcatctatcatacttctctccatattactgagtccttcataaaaatattggagaagaagctgttctgaaatttgatggtgggggcaactagcacatagtttcttaaatctctcccagtactcatacaggctctctccactgagttgtctaatacctgagatatccttcctgatggctgtggtcctggaagcaaggaattttttttctaagaatactctcttaaggtcatcccaactcgtgatggaccttggagcaaggtaatacagccagtcctttgccactccctctaatgaatgaggaaaagccttcataaatatgtgatcctcttggacatctgggggtttcatggtggagcagacaatgtgaaattcttttaaatgtttgtgcgggtcttcacctgcaaggccatgaactttggaagcaaatgaatcagtcccattttaagaacatatggga

SEQ ID NO: 4384 - DNA, 542 bp, Glycine max
tgccgcattacaccaagttgctgaagggccggttgttgtctaagttgctgagccacataacggagacggggtattccctcttgctccccaaggcttctttgtgtcacttgaatgtggccactgatggcatcacgcaaacaccgaaagtggggagaaattgttcttaaagcaagtgtaggatatggttctgctgctccacacccggcaaccatgtcaaaagatgacaccacaatctgcatctgatggcagtactggctggatcttttatctacctataaccagtggaaacaaggaatcttttatggagtccgccattggccgacactatcatgaattcataactaactgctttttcaatagttaaacacaccgttcaaactatgggagcaacaaatgaattctacaaacattatagatataactgtagagcaatattatgccctcttaattaatcgtcattcaaatagaattaagaacgtctaaactgtgtgaacatccactatataattaatggctttatggtggtgcaccagttcaatctg

SEQ ID NO: 4385 - DNA, 564 bp, Glycine max
agcttgtaatcgattacacatatactgtaatcgattaccacagaagattttcagaaaaatattctcaacagtcacatgtttttacttggttcttgaatggccatcaaaagcttatatatatgtgacttgagacacgaatttgctaagagattttcagaacaaaaaggtcttatcctcttaaaaagcaaaatcgttttatcctcttacaaattccttggctaaaacacttgtgattcagtaaggaattatttgagtgctcaaattgttcaatctatctctttcaagagagatttcttcttttcttcttcttcattctgaaaagggattaagagaccgagggtctcttgttgtgaaagaattctaaacacaaaggaagggttgtccttgtgtgtttagaacttgtaaaaggaatttacaagatagtggaactcttaagccgattgcttggggactggacatacgcacaacggtgtggcccaaccagtataaatctgagtttgcattttctcttcccttacacccccttaattattattgctttatattcatattcaaattgttcta

SEQ ID NO: 4386 - DNA, 521 bp, Glycine max
ttgtagcagatgccactctactctaaattcttgaaagatatgttagcaaggaagcataaatatattcatcaggaaaacatcatagtggaaggaaactgcagtgctgtgatccaaaagatccttccacccaagcataaagatcctgggagtgtaactattccttgttcaattagagaagtcaatgtgggaaaagctcttattgacctgggaactagtatcaatttgatgccactatccatgtgcagaagattgggagagttggaaataatgcccactcgaatgacttttcaattagttgcccgctccattaccaggccgtatggagtaattgaagatgtgttggtcagaataaaacattttatcttcctggcagactttgtggtaatgggatatctctgaagatactgacatacctgtaatattgggaaggccattcatgttgaccgcaagctacataattgatatggggaaaaagaagctggagctaagttttgaagatcagaaaattgaatttgatttgt

SEQ ID NO: 4387 - DNA, 451 bp, Glycine max
agcttctgtccctgagaaactggttcccagattacaacagggagtgaagattgctgaaaaccctagccttgcaacaagtcctagggaagtagacacggagatggacaagaaaatccgcagtattgtgagtagcattttaaaagacgcctctgttcctgaagctgatgaagatgttccaacatcttccaccccgaatgtttctgtgcctgatgttgagaaagatgttccaacatcttccggcccaaatgctgaagccctcccttcacccagtgaagaggaatcaacagaagaagaggatcaagcctcagaggagacccctgcaccaagggcaccagaatctgctccaggtaacctcattgacttggaagaagtcgaatctgatgaagaacccattgccaacaggttggcacctggcattgcggaaagacttcaaaacagaaagggaaaaacc

SEQ ID NO: 4388 - DNA, 430 bp, Glycine max
tgaagtgacctattatgatgtgtgtgggccttttaaagtgatatccctaggaggtaacagttactttgtgtcattcattgatgaatttactagaaaaatgtggatctatctcattatgcaaaaaagtgaagtgtttaacatttttaagaagtttaagttattgagtgaaaaacaaagtgataaggtaatcaaagggcttagaacaaatggaggtggtgagtataactcacatgaatttcaagtattttatgatgaagatgggataattcatgaagtgacatcttcctatacacctcagcataatggtgttgctgagagaagaaacataaccattctgaacatagccaggagcatgatgaaagggaagggaatacctcattacttttggggagaagcaacttctactgctatgtatattctgaacaagtgt

SEQ ID NO: 4389 - DNA, 470 bp, Glycine max
tgtaacctttggttccttgaagatgtcttaacactttctttgcaactttctggggctccaaaacttgcccaaatatgctcaccaattctacttgaagttattgatgaactcctcttgtatacatataatggcttgtttgtaagtatgtagcaaagttgagaggagcaccacaagatacgccactgtttgaaatctcatcgtttacatgatcgtaatcaacatcaatgttaccattgtatgtatcttggtcatcttcaacaatcatgttatgcaatataatgcatgccaatataatatttttcattgtatcgatgtgtcaattatgcgaaggaccacatgtaattgcaaatcaaaattttaacacattaaatgctctctccacatcctttctcgccgaatcttgatattttgcaaaaaactttcctttattttctctccctggggcatggggatggtttttacaaagcgac

SEQ ID NO: 4390 - DNA, 429 bp, Glycine max
ttgaccaaaccccagcagcaatcgtatccttagagacttgcctcagcaccttgtctccgagactgagaataattgcactgtgtgccttctgcaatagtgttttcttattcccatcagccatcatcttttcgagtttgacttctccatcaagtgcttccaccaggccctgttgaacaagaagagctctcatcttcaatcgccatagcccgaaatcattatgtcctgtgaatttttcaacctcatacttggccgagctcatttcttgaatcaaactcaaaaatcgctccacgttcaccgcaccaatttgttgtgccaagatcatattttacttcacaaaagaatgagtttcttgtatgaacaagaacaagcaaaatgcatgttaaatacaagttttgaaatttacttgaaattttgaaatcaaagcaattc

SEQ ID NO: 4391 - DNA, 322 bp, Glycine max
tgttgtatctttcaagttccaattacaatctacaatttgttgcatttattacatgaaaaacaagggattaattaactggaagtgagtcaacacttgacactcattctgagagagcttattagatcttttgaatgttatgacgattatcaatgttgcccttgctgcaaagtatacagaagcgtgaagattgaagaatccaaattcatatattggatggaatatgcacatagtatgtggggaacggcactaggagggatgtttgctttgccatattcatacctccttcataaggggtatattaccttgagattgggactgatac

SEQ ID NO: 4392 - DNA, 448 bp, Glycine max
ttcacacggatgtccgattcggggagataatatatcgagacgtctcgaaattgaacaacggaagctctcgagaaaatcgaatggtcataacttttcacacagatgtccgattcggggacataactcatctagacgctcgaaattgcacaacggaagctctgcagaaattcgaatgctcataacatttcactaggatgtgcgattcggggacataatatatcgagacgcttgaaattgaacaacggaagctcttgacagatcggaatggtcattacttttcacacgaatgttcgattctgggacataactcatccagacgctcgaaaatgaacaacggaaactctcgagaaattcgaatgggcctaacatttcactccgatgttcgattcggggacataatatatcgagacgctcgaaattgaacaacgggagctctcgagaaaatcga

SEQ ID NO: 4393 - DNA, 551 bp, Glycine max
agcttcttagtttcagatgatgtagatgagtttgtggctacctcatgcactcctctaatggctatagcatcatttttggcgctaaactattgggagttggaagccatcttctcaattaaattcctggcttcagcaggggtcatgtctccaaaggctccaccactggcagcatctatcatacttctctccatgttactgagtccttcataaaaatattggagaagaagctgctcacaaatctggtggtgagggcaactggcgcatagttttttaaatctctcccaatattcatataggctctctccactgagttgcctaatgcctgaaatatcctttctgatggtcgtggtcctgcaagcagggaaaattttttctaagaatactctcttgaggtcattccagctcgtgatggaccttggagcaaggtaatataacctgtcctttgccacttcctctaaaaaagacgaaaggccttcaaaaagatgtgatcttctttgacatttggagggttcatggtggagtagacaatatggaattctttcacaagttta

SEQ ID NO: 4394 - DNA, 190 bp, Glycine max
attttttaccattttgattgaataaagaaagcttcctgaaatggcttgttttgcaaggcctagcatgaccaagttagtgccagcttcccaatctcccatgggatctcacccttgaaattcttgtttccacctgcttagaagacttggagctttcttaaagagctaatgctttttggaatttcaccactga

SEQ ID NO: 4395 - DNA, 515 bp, Glycine max
tatatatcaaagatctgataatttagaagttgtcggctactcaaactcggattttgctggttgcgttgactctcgcatgtcaacatctggatacatcttcatgatggctatcaaagcaatatcttggagaagtgcaaaacaatcattagttgctacttaccatggaggctgagtttatttcattatttgaagcgacatcacaaggtatttggttaaaaagtttcatggtcgatctacaagtgattgattatgttcctagaccattaaagatatattgtgataattcagctgctgtttttttgactaaaaaaaataaaagtggaagttgaagcaaacacgtcgacattaagtatttagtcttgaaggaacatgtcaaagcaaattaaatcatcattgaaaacatcagtattgaactaatgattgcacatccattgacaaaaggcatgcaaacaaagtcatttaatgatcatgttaagaatatgggacttgattttgtcatattaagttcccttttt

SEQ ID NO: 4396 - DNA, 413 bp, Glycine max
tcttggggttggcaggctattatagaaagttcattgagggattttctaaattggcattgcccctaactaagttgactcgtaagaatgagaagtttgtctggaatgagaagtgtgatcaaagtttccaagagttgaagaggcggttgacgacagctccagtgttaattttgcccgaccctaagagaacatttgaagtgtattgcgatgcaagcgggcaaggcttggggtgtgtgttgatgcaagagggaagagtaatggcgtatgcttaacgtcaattacgttctcatgaagataactatccgactcatgacttggaactaccagcggtggtctttgccttaaaaatttggaagcattatttgtaccgcacttgttttgaaactttccgtgatcacaagagtcttaaatacttg

SEQ ID NO: 4397 - DNA, 503 bp, Glycine max
agcttggacataccattgaagtttgctacaagaaacatgggtacccgccgggatacaaagcttttattggaagatcaagcgtaaataatgtgatagcgggagaggggaaggtcacagatgatcaagaacaacgtcatgaatcccaagagattattagtttttctccagagcagtgcaaagccttactcgctttaatccaacaaccatctgcaggaagcacagcttctaaccacccacaaaccaaacaggttgcctccatatcttctactgatacagtgactaacccaggtataccttcttcccttagaactcaaaaatctacctcctgggtattagactcacgagccacagatcacgtaacatgtttcttaagtaaccttcatttttttaatcgaatcgaacctaatatgttgaaactcccaaacggccagcatgtttacgccacccaatccaggggggggcatcttttgtcattcataactttactagaagttctctatata

SEQ ID NO: 4398 - DNA, 600 bp, Glycine max
tatgctgcaaacatcaacaatagacctcctcaacctcagcagcaaaatcagccacaataaaacaattatgacctctccagcaacaggtacaatcccgggtggaggaatcatcccaaccttagatagtcaaatccttcacaacagcagtagcaacaacaacaaccttattttcagaatgctactggtccaagtagaccatacgttgctccaccaatccagcatcaacaacaacaacaacaacagccctagaaatagcaaacagttgaggctcctctacaaccttcccttgaagaacttgtgagacaaatgactatgcaaaacatgcagtttcaacaagagaccagagcctccattcatagcttaactaatcagatgggacaattggctacacagttaaatcaacaacagtcccagaattctgacagattaccttctcaatctgtccagaatcccaaaatgtgagtgccattacattgagatcgggaaagcagtgtcaaggacctcaacctgcaacatgttcctcatccacaaatgaacctacccaacctcactctactccaaaaaaagatgatgacaaaaatttaaagagtaagttaccta

SEQ ID NO: 4399 - DNA, 299 bp, Glycine max
agcttctcagatccggtcatggaaagacttggcaactgccttcattaggcagtaccaatacaacacggatatggctcctgatcggagccaacttcagagcatgaccaagtgggaacatgagtccattaaagaatatgctcaaaggtggagagacctagcagtccaagtcgtccccggtatgactgaaagggaaatgatcacgattatggtagatacgttgcctacgttctactacgagaagctgataggatatatgccggctaactttgcaggcctcgtcttcgccggaaaaagaatcc

SEQ ID NO: 4400 - DNA, 410 bp, Glycine max
agcttatctacccacacccctctattaactaaattaatctccttgaaaataattacggataaaaataacacagcaaatataatcaaacatcaaacataattactaataatatatagatatatatcaaggtgttacaactctcccactcttttaaaaatttcatcctcgaaatttacgttactcaaacaaggatggataagcttctcgcatttgactttctaattcccacatgacatcatcttctgatgcacctccccagatcaccttgaccaacagaatctctttccctcttaggtgttttgtttgtcggcataccctaatttcgtctagggaccattctttgatggcatacaacctttggttgaccgcttagaggtacttggaacccattgttgcacaatacgtgaagt

SEQ ID NO: 4401 - DNA, 574 bp, Glycine max
tttacgagagagattgacaagaaaatattactagcaactctaggatgagcaaatagacacctgcagtactaagaaggtaatttataaattaatcctcaccggaatgactgaatagaaaccatttggtattggttctgaaagcactccagtgcgctagagattttgtgatgctttttgagaagacaaaacatctttgtcaaaatgttgaggagactccttattacttaaagtctcatcctaagaacccaaataaacaaatccaaattttttcaacacaatctgaaggccaccacgacacattaaatggcccttgctctgctggccctgcatcttctcgtgtctgcttcatgttcttatatatttggaatgaaaaaccatgtcgtcaccattattaacccataagagacatatctaggctaaaggattttcttaaaatacaaaacctttgaatatatatttcagtaacgcccactggttcagctggaaataattgtacctgcctgaacccaaaaacaaagattttggatttttaaaaaaaataaaacacccctttaaaaagggatgaaaattttca

SEQ ID NO: 4402 - DNA, 450 bp, Glycine max
agctttgaatgctctattcaatggagttgacattaatatcttcagactaatcaacacttgcacagtggccaaagatgcatgggagatcctgaaaaccactcatgaaggaacctccaaagttaagatgttcagattgcaactcttggctacaaaattcgaaaatctgaagatgaaggaggaagagtgtatttatgacttccacatgaacattcttgaaattgccaatgcttgcactgccttgggagagaggataacagatgaaaagctggtgagaaagatcctcagatccttgcctaacagatttgacatgaaagtcactgcaatagaggaggcccaagacatttgcaacatgagagtggatgaactcattggttcccttcaacctttgaactaggactctcggatagggctgaaaagaagacaagaatctggcgctcgtgtccaatgatg

SEQ ID NO: 4403 - DNA, 486 bp, Glycine max
agcttgttgaaaagacacatttcttcaaacaattttgaaaaggtacaatggatctagatatatgtgtctgacttcgaaaaacaaaagagagatgttctaagaaaacttaattgtcaaatgttctctcaacaactattggacaaacatttacaaatctattgagaattcttctgagatcttcaatttgtatcatctactctaaagaaatatttttgttaatcttagaaactcagttgtaatcaagagactagttgtctcttggagaatcttgaacacaagggtgaggaatcccaaggtgtgttcaaagtttgtaaaagatttacagaaatagtggaaaatctcaagtgggttgcttgaggactgaacgtaagcacgggcagtggccgaaccaatataaatcaagcttacaattccctctctccttatcttatttattttattgccatcaattttgtcttacatggttaaaagaacattattaatttg

SEQ ID NO: 4404 - DNA, 445 bp, Glycine max
  unsure (1)..(445): unsure at all n locations
tctggtgggacatcttgacttgctttccaatctgacattcaccacagattctgccttcttctattttcagattgggaatgcctctaacagcacctttgtcaatgattttcttcatgcctcttaagtgcagatgtccaaatctttgatgccatattttgacttcatcttctttggaggatagacatgtggaggagtaactggtttcttgaggtgtccataggtaacagttgtcctttgatctgctgcccttcattanaacttcactcttctcatttgtcaccaagcattctgactttgtgaagtttacattgaatccttcatcacacaactgactgatgctgatcaagtttgcagtcagtcccttcaccagcagtactttgttcagattacgaagtccatcatggactagctttcccattctagtgatctttcctttagagccatc

SEQ ID NO: 4405 - DNA, 350 bp, Glycine max
catctaccggagggacatcttgacttgctttccaatctgacattcaccacagaatctgccttgctcaattttcagattgggaatgcctctaacagcacctttgtcaatgattggattcatgcctcttaagagcaaaggtccaaatccttgatgccatattttgacttcatattctttggatgataaacatgtgaaggaataactgtgtatttgacgtgtacctacgaaacagctgccctttgatctgctgaccttcattagaactttactcttctcatttgtcaccaagcattctgactctgtgaaattaacattgaattcttcatcacacaactgactgatgctgatca

SEQ ID NO: 4406 - DNA, 481 bp, Glycine max
agctttgatgttgtcgagaaaaaatcacatgtttttcatcatcaaaaaggcggagaatgtgaatgtatgtatacatgattttgatgatgtcaaaagaagaatccaacacggctcattttgtttcaagattaatacaagattgtttcaacaaacaaagccttgattgaagatttcttcacgatcaagccttgcctcaccatgaaaggtttcaagccattcaaggcacatgtaatcgattaccactggtttgaaagtgtgtaatcgattacacatcatatgtaatcgattaccacagactctgaacgttgggaattcaaattttaaatgaaaggccaccactattcaagagaaacaaccgtgtaatcgattaccctaatcctgcaatctattaccaaagaggattttcaaggaatatcggccacagtcccatcttatcatttggattttgaatggcccccacacgcctatatatatgtgtgac

SEQ ID NO: 4407 - DNA, 428 bp, Glycine max
tctcaaggtgtatggagactcagctctggtgatacgccagttgaaaggagaatgggaaaatagggattcgaagttgataccctatcaaactcacatcttgaggttagccaagtactttgatgatatttccttccaccacatacctcgggaagagaatcaaatggctgatgcattagccaccctgacatccatgtttcaacttgccccacacggggatctgccgtacatcgaattcaaatctcaaggcaggccggcatattgttatgcaatagaggaagagcgggatgggaaaccgtggtatttcgacatcaagcagtatatcgagaataaagaatacccaccagggatttcggacaatgacaaaaggacgttgaagagattgggctactgttttctttgtaagtggtactatcctttacaaacgaaac

SEQ ID NO: 4408 - DNA, 315 bp, Glycine max
  unsure (1)..(315): unsure at all n locations
cagctattagncgaattttccccatttatctagccgaccccgccattggaagaaaatatctgatggtgcgcttcaattaatttatcacaggtacgtcatcttgtccaaactgtgccgcttttcttgtgaaacacgagtgctcatccacattgcacaggttcacctggaagattcattcccaaaggcttatgactttggcgggagtttatagaccctggaaatacgtttccaaattaaagaggcgtgagcctcgacgatatcttgagatgctctatatcctcaaggtccgcgatttgttgagtcacatgacatttg

SEQ ID NO: 4409 - DNA, 486 bp, Glycine max
agcttgtgctttaacctgcctcagtaatataatatggcatgtgttaaggcacctgctacaataaactagctgtgcgtgtgtgcaagtctgaaggtgaatgttctatgtttcaactcttttctccttattgttattgtcttaatacggctagaatagaaaaagtttttggaagtaaattaaggattagctcacctttgctgatttgaatagttcatcaagaacctcggacaaagttggatgtgcatgaacggcaaattttatgtcctgcattgtaccacaaaacggtgaaatttaccaaacaggcaggataaataacagtgaaagactttgagaccattattaataactaaatgccaggtgcacacataaatgtggtagaaaaacttacctgaatatgtgtccctaatgctattgcattggatgcttcatggatgagatctgctgcatgcaaaccaaaaatatgaactcctagtatctctccattgt

SEQ ID NO: 4410 - DNA, 508 bp, Glycine max
tcgatatcttgacttgagcgccaatatatttcttggagaaggcatgtcaattccttctttcctcgggacaatgacttccttgactcacctcgacctctctggtactggattcatggggaagattccatctcagatttggaatctctccaatttggtgtatcttcgcctgacgtatgccgccaatggaacaattccatctcagatttggaatctctccaatttggtgtatcttggccttggaggtgattctgttgtcgaacctctgtttgctgaaaatgtagaatggctatcaagtatgtggaagcttgaatatcttcatttgagttatgcaaacctatccaaagcatttcattggctacacactctccaatctcttccttctttgacccacctatctttgtcagaatgcacactccctcactataatgaaccatacttgctcgacttctcatctctgcaaactctccatcttttcgtactagctattccccttgccttttttttgtcc

SEQ ID NO: 4411 - DNA, 483 bp, Glycine max
agcttgtaagatttgcaagatcatcttccttgacaacttcgcgaaaaagattgccgtcaatatgaagagataacaatttagagagtgatccaagactttcaaatggatttccactgaatttattcatagagagatcgagatatcttaatgatgaaagttttccaaatgatctaggaagagcatcaccaattgagttgttggaaaaaagtaacgtgtcaatatttttaaatgccccaatatgatctgtcagattgcctgaaagtcgtgaactctgaactgcaagtgttgtgagtccatgggaaatacaaggagcacgaatttctaaaagttcattaacctgttggttgaatttgagatatgataaatctatcacccttaagttgcagagattacccacagaagttggaatgtttcctttcagttgactatatgaacaatgaagtccacaagagaagtcaaatacccaaagaagttggaatgttt

SEQ ID NO: 4412 - DNA, 467 bp, Glycine max
agcttaacaacctgcctacatattgaagcagttttcctttcactgtcacggcccttggcaataatcctgtcaaaaagttcaccaccagcacacagctccataaccacatgaactgattggttatcctaaaaagcacctaaaattaaggctgcttcatgaagcttattaaacttttgaacatacttcaacggtaagtgcggctgtgagtatacatggcaatgaggtatggcatgaacgggtattgtctccccaatccccgactccgacttcccaacatcttcccatacccgtacccgatacctgacgggttaaaatttattatcccattccccgacttgttgggtattacgtattcctccacccctgtgccggactaaattcaaattagaaaaatattttttggtcaagaaaatattaaaaatttgattttacaaaaaataaaccgaatgttaaacatttatttttaa

SEQ ID NO: 4413 - DNA, 528 bp, Glycine max
ttagcaactctttctttttgtttagtcaagacttctaatgctcttaatctctcctcgcctaaatcaactaactcatctgacatcattttccaataatggtcgatcggaatgtccatttgtttttgtactctagctgattgcaaatgtatttcgaccggaagtatagcatcgggcccataagtcagtcgaaatggggtagtattagtcgattccttaggagaatttctacatgcccatagaacttgatctaacgttttattccaatttcttggcttttgggcaatgtgttttttaatcaagttaattacaatcttattggctgcttcgacctgaccatttgcttgcgcgtaatatggtgttgaggttaataatcgaaagccagttttttgggcaaattctttcatttttcgtccagtaaaaactgaaccttgatcagtggtaattggttcgtggttaccaaacctataaataatataattttgaatgaaactaattactgctttctgatcaaccattgggaaagggact

SEQ ID NO: 4414 - DNA, 512 bp, Glycine max
  unsure (1)..(512): unsure at all n locations
agcttatacggatgctgactatgtangatcaataactgataggagatccacttccgaatattgtacctttctaggaagaaacttggtaacttggagaagtaaaaaacaagatgttgtagcgtgatctagtgttgaagctgaatttcgggctacgacacaaggtatttttgaattgctttggctaaatatcatcttatatgacttgaagattaaataagaggcacatatgaagctttattgtgataataagtcagcaatcagcatagcctataatcttgtacaacatgatcgaacaaaacacattgaagtggatagacattttatcaaggaaaagttggatagtggtttgatttgtacaccttccgaaggtcaacttgcggatattctcactaaaggattgcacactccaaattttgatagaacaatatgaaagcaaggactggataacatctatcctccaccttgagggggagcgttggatagatgagcatttattgatgattttcttttca

SEQ ID NO: 4415 - DNA, 287 bp, Glycine max
tcgctttatctgttacgacgtcgttgttatattgggcccacccctttgcaagtggagcgtccgaagttgatacgggccccactatacattgcctgaaatgcgctgcttttacattattaaaaatctatggaaaagctgtcatgctggatcatttgtattatggaccagaaaagaataattgaaaagttttcttattatggagcaaaaaaatctctaataatgattttttaaataaaatcataattatttcacttaatgttgtcttatctaatgttcactatgtaaga

SEQ ID NO: 4416 - DNA, 444 bp, Glycine max
tatagttattggagggagaataaaataatccaaaatcaattgtacccttcaagtaacgaagaattctttttgcggcttttagatgaggagaggtaggagcctccgtaaagctacacacaactcccaccgcatatagaatatcgggccttgtattgattagataccttaaactccccacaagaatcttgaagatcgtggagtctaccttctctccttcatcaaactttgataacttcaagccaccttccataggtgtgttcacgggattgcaatcaagcatattaaatttcttcaacacttcttttgtgtagcttccttgtgagacaaagataccatttctccgtttgcttcacttccattcccaagtaatatgacatgagtcccatatctgtcatatcaaattcatgagatatggactcctcgaagtctttaaacaaatttggg

SEQ ID NO: 4417 - DNA, 345 bp, Glycine max
  unsure (1)..(345): unsure at all n locations
tcacatatagagacgctcgaaattgaacaacggaagctctcgagaaattcaaatggtcataacttgtcacttcgaggtccgattcaggcgcataatatatcgagacgctcgtaattgaacaacagaagctgtcgagaaattcaaatggacatcagctttcactcggaagtccgattcaggcgcatcacatatagagacactcgaaattgaacagcggaagctctcgagatattcaaatggtcataacttttaactcngaggtccgagtcaggcacacaatatatcgagacgcccgaaattgaacaacggaagctcttgagaaatcaaactgtcattacttttact

SEQ ID NO: 4418 - DNA, 440 bp, Glycine max
  unsure (1)..(440): unsure at all n locations
agcttaaaggagaagttggttttctgaactctaaactggaaaacatgacaaaatcaataaagatgctgaataaaagctcagatatgcttgatgaggtgctacagcttgngaagaatgttggaaaccagagaggacttgggtttaatcataaacctgctggcagaataaccatgacagaatttgttcctgccaaaaacagcactggagccacgatgtcacaacatcggtctcgacatcatggaacgcagcagaaaaagagtaaaagaaagaagtggaggtgtcactactgtggcaagtatggtcacataaagcccttttgctatcatctacatggccatccacatcatggaactcanagtagcagcagcagaaggaagatgatgtgggttccaaaacacaagattgtcagtcttgttgttcatacttcacttagagcatca

SEQ ID NO: 4419 - DNA, 447 bp, Glycine max
  unsure (1)..(447): unsure at all n locations
agcttgctcgtcttgctgatatttatcatgtagacctttctgatgatgaccgaggaacaattagggatcaacttgaaacttatgtgcttcaagtgagaagaaatgcttctttttccacttgtgaagatgttcaaagtttggctatgaagatggttcaaactgagaaacatttggtatttccattggtttataaacttattgagctagctttgatattgccggtgtcgacagcatccgttgaaagagctttttcagcaatgaagattatcaagtctaaattgcgcaataagatcaacgatgtgtggttcaatgacgtgatggtatgttgcaccgagcgggagatattcaagtcactccgcanagaagtctcggaaaggacacttgcctcgtaattntatttaacccgctattgtaagattatgtttatctcttttattntaaactata

SEQ ID NO: 4420 - DNA, 389 bp, Glycine max
tgaagcttggagggaatatttgttctatcttacataacaacacatgtatgttattgtccataattcttagatgctcaacatttaaaggtgtcgaagttagctctctacaaaattggctaagttcaacaagtggcttccaaatagatcttggtaatgagtcaaatgcaattggaagcaaccggtgcatgaaaacatgacaatcatgacttttcattccatgaatttttcccttgttaagatccacacatcgacctaaattggaggcatagccatctggtaactttagttctttgacctatttaagaacagcgagtctttgggatctggtcattgcataagctgcctttggtttacagaactcttcacgaacaacatctaccagctcaagc

SEQ ID NO: 4421 - DNA, 432 bp, Glycine max
agcttgaagagcttcttgagtcttattctgttatgaagaatatgactgaagctatagaaatgtcgaagaactgtatacaggtgttggagctttgtgtcaagtgtaacgatcacatttctgaaggccagttttattctgcattgaaaactttggatttagttgaggaaagttgcacacagaatattcctgcaaaggctatcaaaatggtcatagagagtagaattcctgctataaaattgcacgttgagaagaaagtatgcactgaagttaatgaatggatggttgagataatgagttctgctaaaaatattgggcacacggcaattggccgtgctgtgacagttcgtccaagggacaaggaaatgctagaacagcagaggaatgccgaggagcatagtatttcaggactatgcgatctagcttatactttgg

SEQ ID NO: 4422 - DNA, 309 bp, Glycine max
ctggatgcgttggtcaacttggtaacccagctggccttgaatcagaaatctgtacctgtcgcaagggtttgtggtttgtgctcctctgctgaccaccatacagacctttgcccttccatgcagcaacctagagcaattgagcagcctgaagcttatgcagcaaatatatacaatagacctcctcaacctcagcagcaaaatcaaccacagcagagcaattatgacctttccagcaacagatacaaccctggatggaggaattaccctaacctcagatggtccagccctcagcaacaacaacaacagcct

SEQ ID NO: 4423 - DNA, 425 bp, Glycine max
  unsure (1)..(425): unsure at all n locations
agcttctagtctcaattttagcgtctcgatatattacccaattcaatcggacatccgagtaaaaagttattgtcgtttgaatttcctacgagcttctgttttcaatttggagcgtctcgatatattaaaggactcaaccggacatccatgtataaagctattgccaatttaattttcttagagcttcggatcaaaattttgagcgtctcgatatattacgggactcaatcagacatccgagcaaaaagttattgtcgcttgaatttgatacgagcttctattttcaatttggagaatcttctcataaattacaacactctgtccggcatncgagtaaaaagctattgtcgcttgaattctctaagagtttccgcctcaatctggagcgctccatatattacgggactacaccgacatccgtgtat

SEQ ID NO: 4424 - DNA, 416 bp, Glycine max
  unsure (1)..(416): unsure at all n locations
agctntcttttggtcatggataatcctgatgaggtcaacttgtggtggctggttggttgaagttctcaatctcataaagtagggaaacatagtctcttacaatgcatctttgcacttggggcaatgatgcagctagtgaggttctaaccgaaaagcgtctattgttggttgaaaactatttccaaaccccgtcttacgtctaggttcaccctatgcctttgagaatttctggaagggcttcctcaagggcaaagccttacgagccttacaaactatttccaaaccccctcttaattaagtttgcaagacttactcctatggtaagtgaatatcctatatatctatgtcatcctaaactatctattagctcttaagaaggagattacggtaaaaaaaagactttcattctggttacc

SEQ ID NO: 4425 - DNA, 357 bp, Glycine max
  unsure (1)..(357): unsure at all n locations
ctcagctataatatatcgatacgctcgaattaaacattgganactctcgagaagatcagatgatcatgacttttcacacggatgtccgattcgggcgcataatatgtcgagaggctcgaaattgaagaacggaagctcttgagatattcaaatggtcataacttttcacacgaatgtacgattcgatcccataatatgccgagaggctcgaatttgaacaacagaatctcttgagaaatccaaatggtcataacatttaactcgaatgtccaatttaggcgcatcacatatagtgatattcgaaagtgaacaacggaagctctcgtcaaattcacatggtcataacttttcacactg

SEQ ID NO: 4426 - DNA, 378 bp, Glycine max
  unsure (1)..(378): unsure at all n locations
agcttgaatcggacatccgtgtganaagttatgtccatttgtatttctcaagagcttccgtagttcaatctcgagcttctcgacatattatgcgcgcgaataagacatccgtgtgaagagttatgaccatttgaatatctcgagtgcttccgatgtttaatttcgagtgtatcgatatattttaaacctgaatcggacctcagtgtgaaaagttatgactatttgcatttcgcgagagtttccgatgttttatttcgagcgtatcgatatattataagcctgaattggacatccgtgtgaaaagctatgaccatttgaatttctcaggagcttctgttgctcaatcttgagcgtctggatatgtgatttgtctgaatc

SEQ ID NO: 4427 - DNA, 309 bp, Glycine max
atgcataatgctcattttgcttactgcagctgggttatttcaattcccatatcgcatcatatttgctgttgccactttgaaatcattggacatttatgacactgagagcacctctccgatagctgtattagctggccttcactatgcccgaataacagatattaccgtggaaattatagatgctagcaattccttttctggtttgagaattaagatgaatatttacggaaagggttaactctaactgttacttgctcataaggtcatgtgatgctcattatttggcattagcctcacaagatggtatct

SEQ ID NO: 4428 - DNA, 342 bp, Glycine max
  unsure (1)..(342): unsure at all n locations
tggcattgcccctaactaagttgactcgtaagaatgagaagtttgtttggaatgagaagtgtgatcaaagcttccaagaattgaagaggcggctgacaacagctccagtgttaattttgcccgaccctaagagaccatttgaagtgtattgcgatgcaagcgggcaatgcttggggtgtgtgttgatgaaagagggaagagtantggcttatgcttcacgtcaattacgtcctcgtgaagttaactatccgacccatgacttggaactatcagcagtggtctctgctctatagaattggagacattacttatacggtactcgttttgaagtttcagtgatca

SEQ ID NO: 4429 - DNA, 405 bp, Glycine max
  unsure (1)..(405): unsure at all n locations
acatctagatctaagtggagattctcttcgtggagatatcccttctgaagtagggaagcttacaagcttacgacacttagagatctaatcttcacttcttttcgtggagaaatccattctaacgtanggatgcttacaagcttgcaacatctagatctgagtggaaattctcttcttggagaaatcccttctgaagtagggaagcttacagccttacgatatctagatctaagttataatgtggctattcatggagagatcccttatcactttaacaacctctcacaactgcaatatctatgtcttggagaacataatctntccggaccaataccttgtccggttggcgaatcttctatctgtcatactcttagacttgaaggcaatcttgatcttaaaattaac

SEQ ID NO: 4430 - DNA, 420 bp, Glycine max
  unsure (1)..(420): unsure at all n locations
aagctattatgtactcttgtcatagcaacaattctactttcaaccaagtgcttatgacatgaactctgatngggattagtttttttattgaatgagtgtctaattaagttacttacccagattgcattctgaatgaaacatggattaatgcttcttcattttcatgatttggtttctaaatagttaacaatggttcaaattcctctgttttggcaggtgctgtctgcatgctttaccgtatgcacccttggttatgcagcagcaggtgttttgggctacttaatgtttggacaggaggttgaatcacaagtgactttgaacctcccaacaggcaagttcagttcacatgtggcaatattcactaccttggtcaatcctataaccaaatatgcattgatgcttactccagtcataaatgct

SEQ ID NO: 4431 - DNA, 441 bp, Glycine max
agcttttgcgcaagaatcagttcgtccaatggaacgacgactgctaagtggcgttcggaaggatcaaacgatgccttatgaatcctcttgtgcttgtgccaccagtgcctagaagatccctcattctatacatgactgtgttggatgagccgatgggatgtatgctggggcagtatgacgagtctgggaagaaggagcgggtcgtctattacataagcaagaagttcacagcatgtgaaatgaactactctttgcttgaaagaacatgttgcaccttggtatgggcagcccaccgcctaagccaatacatgttgtggtacaccacttggctggcatccaagatggacccagtcaagtatatttttgaaaagccctctttcatcggacggattgctcggtggtaggttctactgtcagagttcgacattgtttatgtcactc

SEQ ID NO: 4432 - DNA, 322 bp, Glycine max
tagcacctagaacccacacgctccatcgactagcctgtcgatgctgggcaaagggcatttggggcacgccctgttcaaatcagtatagttggtgcacattcaccatttgtccgtggccttttttactgtgatgatgctggccagccaggtggagtatctgacttctctgatgatgttggcatggagaagtttgtccacttcttctttgacaactatgtgtcggtcttctcccatcttccttttcttttgtgatattgatttagcctggggacacatggcaagcttgtggcatataatgttggggtggattcccgacatgtca

SEQ ID NO: 4433 - DNA, 141 bp, Glycine max
  unsure (1)..(141): unsure at all n locations
ctctgactttgtatgtggaaagcatatactggcttgggccttagaggaaatgaaaatngcattttgattggttttggatgatcaatgcattttcttttatttagttactctgaacacacttttaacactgngctgtatata

SEQ ID NO: 4434 - DNA, 235 bp, Glycine max
ccaaacttttctcctaattaaaaatgtatcttactttttactcaaggtatgaattcccttaatgacaaacttcttgaacattaattccaatgaagcaacttgaattatgaatgttaagcactattcaataaacgagagttatggaagagataatgcaaactcagttgtatactggttcggccacacccttgtgcctacgtacagtcctcaagcgaaccgcttgagagatccacta

SEQ ID NO: 4435 - DNA, 455 bp, Glycine max
agcttcatcaccttctcgttacccttcaggatcttttgtccaatgaaacccttctggttcaccattttctttcgttgttccaattcaggcatagttctgagcttttccaccaccctttggactccccaatgggatggccaaacctctggctcaggatcattgtggccataaactatagcacacgcttcaatgccacagagggtgctgagttcctcaaccttcttcagcatccccttcttccttttcttgtatgttgccctccttgcagcatcattccctatgaatgcgagtttcaccttttttctagtcatgacggtgaccagaaaaaatggagagaaactaaaagaaaattgaaaagagtgataattgtggtggttttctattgccaccaacaatctctttatatggaacaatttgatatgcgtttgactttcctgtaagcctttggtgatagt

SEQ ID NO: 4436 - DNA, 443 bp, Glycine max
  unsure (1)..(443): unsure at all n locations
agcttcccagatccgatcatgtaaggacttggcaactgccttcattaggcagtaccagtacaatacggacatggctcccaatcggaaccaacttcagggtatgactaaacgagagcatgagtccattaaggaatatgcccagagatggagagatctcgcagcccaagtcgtaccgcccatgacggaaagggagatgatcacaattatggtagatacgttacccacgttctactgtgaaaagctgataggctacatgccagctaactttgcagatctcgtcttcgccggagaaaggattgaatccgggctacgaaaaggcaagtttgaatatgcttccaatatggcccccaacaacaacagaagagccttatcagtgggcgcgaggaanaaggaaggagacgcccacgcggtcaccaccgccccaacatggatgaaagcaccct

SEQ ID NO: 4437 - DNA, 422 bp, Glycine max
  unsure (1)..(422): unsure at all n locations
agcttctatagaaggttcgttcctaatttctctacaattgcatcaactctcaatgagctagtgaagaagaatgtggcatttacctgnggtgaaaaacaagagcaagcctttgctttgctcaaagaaaagcttactaaggcacatgttctagctcttcctgacttttctaaaacttttgagctagaatgtgatgcctctggagtgggagttggagctgttttgttgcaaggtgggcaccctattgcttattttagtgaaaaacttcatggtgccacccttaactaccccacctatgataaagagctttatgccttaataagagcactccgaacttgggaacattatcttgtttccaaggaatttgtcattcatagtgatcatcaatcacttaagttcattagagggcaaagcaagttaaacaa

SEQ ID NO: 4438 - DNA, 438 bp, Glycine max
caagcttgtaacccatggaagcttctatatctccacactttttggggtgggccattcttggatggccttgattttctcagggtccacttggaccccatttctaccaactacaaaacctaagaaaactatattatctacacaaaaggtacacttctctatatttgcatagagggtgtttttcctaaggactgaaacaacttgtgtgagatgtcctaagtgatcatctagcctcctactatacactaaaatatcatcaaaataaacaactacaaatctacctatgaaatcccttaagacatgatgcataagcctcatagaggtgcttggtgcattactgagaccaaaaggcatcactagccattcatacaaaccagacttggtcttgaaagcacgtttccactcatcacccttcttcatcctgatttggtgataaccact

SEQ ID NO: 4439 - DNA, 276 bp, Glycine max
actcggatgtcttgattgagtccgtaatatatcgagacgctctaaattgaatggtgaagctctgaccaaattcaaacgacgataaatttttactcggatgtctgattgagtcccgtaatatatcgagactctcgaaattgaatgttgaagctctcagccaaatcaaacgacaataactctttactcggatgtctgattgagtcccgtaatacatcgagacgctcgaaattgaatgttgaagctctcagcatattcaaacgaccataacattttact

SEQ ID NO: 4440 - DNA, 272 bp, Glycine max
  unsure (1)..(272): unsure at all n locations
agcttcaacattcaatntcgagggtctcgatatattacgggactcaatctgacatccgagaaaaaagttattgtcatttgtatttgctcacagcatcaacattcaatttcgagcgtgtccatatattacgggactcaatcggacatcccagtaaaacagtattgtcgcttgaatttgctcagagcttccgtattcatattccagcgtctcgatatattacaggacttaatcagacatccgagtaaaaaggtattgtcgcttgaattcgctca

SEQ ID NO: 4441 - DNA, 430 bp, Glycine max
  unsure (1)..(430): unsure at all n locations
agcttcaagaagccgtggattntgtgatcatatcccgtctctatgaaaggatggctggtctcattgctgtgtccaacgctggggaagtggcttatggtttcaattgcaatggcatgtttaagggctgtgccactgaaaatggcttcatggaggtcggaatctgggaatagctccattattttccttcatggctgtttcgatgcaacttttggatttctgtaccatgttccactgtagtgtacggtctttctgctggtgcccgatttagataaaaaatggtaaccttgtttctaagaattacaaaaaaatgcgaaacaataatatggtaactttggtgctttctcaaaataaagacttgtggtagacctatcaaacccgtgtcctttttactatacttacttaacttcttctcttntcttcaatttatata

SEQ ID NO: 4442 - DNA, 442 bp, Glycine max
  unsure (1)..(442): unsure at all n locations
agcttaacaaaatttcaccactgctaggtaattattttcaacagacgtttgacacgtgaccgtcaacggctgagtttaatggtcaatgtctaattgaggcttcagggatcaacattgcagaattttacaaaatataaggattcaatttgtaaattaaattagcggaggatcaaatgcgaaattggacctaaagtgggggaccaaaagttcaattttgcctaaaaaataattgtgtatgacttaaaaaaattaatttaaaaatcaacaaactcttattataatntgtaatttgatgttattacatatactaatatacattcatattttattatgaaatatttattaaaaacaattaaataaatagtatttgattaaacagacataataataattctcttatccgtttagagtaaaatttctttttctttctttccctgtgatg

SEQ ID NO: 4443 - DNA, 235 bp, Glycine max
cgcataatatatcgagacgctcgtaaatgaacaacggaagctatcgagaaattcaaatggacaatacttctaactcggagggcctattaaggcgcataatatatctagacgctcaacatcttacaacggaagctctttggctatacaaatggtcataacttctcactcgaaggtccgattaaggcgcataatatatcgagacgctcggaactgaacaatggaagctcttgagcaa

SEQ ID NO: 4444 - DNA, 414 bp, Glycine max
agcttgtacggctaaagtctcacgattgtcacgtgctcatgcaacaattgtgagccagggctatacgagacatcatgccacacaaagtcaggttcatgataactcgcctgtgctttttcttccatgctatatgtagcaaagagattgatccactaatgcttgatgagtcggaaaatgaggccgcaattatactgtgccagctggagatgtattttccccctgctttctttgacatcatgattcacttgattgtgcatatggtcagagaaatcaaatgatgtggtcctgtttatatacggtggatgtccccggctgatcgatacatgaagatcttataagggtatacaaagaatctatatcatccggaagcatctattggtgagaggtacattgcacaagaagccattgaatttt

SEQ ID NO: 4445 - DNA, 451 bp, Glycine max
agcttgtaacaagctcaaaagttgctcaacgatcatagcctacaggtcttttgtttcttcgatgatggcgacaatatatttaaattttagatctaacgatctaagaattttctccataatgtttacatcatcaagcttttcaccacttctcttaagatgattggtgattgctaagactctagagaaatagtcggagatgactttaccttctctcatatgcaaggtttgaaacttaactcttacactatgaagacgtaccttcttgatcggatctgctcccttatacgaggtttgaagcttctgccatgcttctttcaccgactttgcttctgaaaccttcttgaaagcatcatcatctactcctagatagattagatagagagccttcttgtctctctctcttgagtctctaaactatctctttgagtctgagaaagactaccctcattct

SEQ ID NO: 4446 - DNA, 400 bp, Glycine max
agcttgtgcatccaataccctgatgaggatgtcccatatgttcttaaaactggactgattcatttgcttccaaagtttcatggccttgcaggtgaagacccgcacaaacatttgaaagaatttcacattgtctactccaccatgaaacccccagatgtccaagaggatcacatatttctgaaggcttttcctcattcattagagggagtggcaaaggactggctgtattaccttgctccaaggtccatcacgagctgggatgaccttaagagagtattcttagaaaattttttccctgctttcaggaccacagccatcaggaaggatatctcaggtattagacaactcagtggagagagcctgtatgagtactgagagagatctaagatactatgtgcca

SEQ ID NO: 4447 - DNA, 225 bp, Glycine max
tgtgtggatgatttcttcagatttacctgggtcaactctattatagagaaatcacacacctttgcagtattcaaggagttgagtctgagactctcaagagaataagactgtgtcatcaagagaatcacgagtgaccatggcagagagtttgaatatagcaagtgtactgaattctgcacatctgaaggcatcactcatgagttctctgcagccattacaccacaa

SEQ ID NO: 4448 - DNA, 426 bp, Glycine max
agcttctagaaaacgttgatgtcaaatgcattctatttttcttccatgtttcagttgcacgtagcttgtgtcttcttaacaaatagggcatgcgcgatggcccttaacacaatatccacccaaatttttgtatgctggaaagtcattaatggtacaaaataacattacacacaacttgaatgtctcatttcaatacccatcaaacacaataacccccttgttctacaactttgtcaagtcttcaatcaagggactgagataaacatcaatgccatttcttggctgtcctgtgttcgatatcatcatagacaacatcatgcattttcgctccatgcacaatcaaagaggcaagttgtaaattactagcaaaacagaccacgcactatgtcgagtgcttaaattgccataaagatgcattccatcctt

SEQ ID NO: 4449 - DNA, 330 bp, Glycine max
  unsure (1)..(330): unsure at all n locations
tgtganagagaagggcatttcacagctatggattgagactgattctacttcagcagtggattatattttaaataaacgcgtgcagaaaggtgatccttctgctcctcttgttgagtccatactcgagttgatgataggaaattggacgtttcgagtatcccattgttatcgtgaagcaaacacagttgctgactggttgtctaaatatgcgcatactactgcttttggtcttcatgtgctcgatgttcctcctcatggttgtataacatacttaactgatgactctactggagtttatagacttcgtactgtacgtgttattgactcatg

SEQ ID NO: 4450 - DNA, 418 bp, Glycine max
agcttgtagatgtcacttaagaacatacgtgcaacggaagcaacggagaacttggctggtcatgttttgaagtgagtatactctgtcaaacaatctacaatcacctaggtaattgacttcccctgtgacactggtaagtgtgtaataaaatccatacagaagtctttccagacctaattgggaataggtcaaggctataaaaggccatgctatttgtgattgggagacttatgctcttgacaaatctcacaggtttgcacatactccttgacatcccgacacatgtgtggccatgaaaaggaagctgccaaacatataagcatgcctttaacacttgagtgtcctcctgcaagggtggcatggcaatcttgaagcaactgaaagcaaagcgcagactctagtggaacacataagcact

SEQ ID NO: 4451 - DNA, 455 bp, Glycine max
  unsure (1)..(455): unsure at all n locations
agcttgtgcatccaataccctgatgaggatgtcccatatgttcttaaaattggactaattcatttgcttccaaagtttcatggccttgaaggtgaagacccgcacacacatttgaaggaatttcatattgtctgctccaccatgaaacccccagatgtccaggaggatcacatatttctgaaggcttttcctcattctttggagggagtggcaaaagactgactgtattaccttgctccaaggtccatcacgagctgggatgaccttaagagagtattcttagaaaaaaatttccctgcttccaggaccacagccatcaggaaagatatctcacgtattagacaactcagtggagagagtctgtatgagtactacgagcgacttaaaaaattatgtgccagctgccctcaccatcagatttcggagcagcttcttctncaatatctttatgaatg

SEQ ID NO: 4452 - DNA, 199 bp, Glycine max
  unsure (1)..(199): unsure at all n locations
gacagtcattcaaaatgaaaagaatgacctaacccccacaatgattggcactggctggagaatgtgcatcgattatcgcaagctcaatgaagccatatggaaagatcattttcctttaccattcatggaccaaatgttggagaggcttgcgggacangcttattactgcttcttagatgaatactctgggtacaatcag

SEQ ID NO: 4453 - DNA, 232 bp, Glycine max
actagacattctcttaaagatttatgccataatatggcatttgtgtctatgattgaacctacaaatataaatgaagccataatggatgatcattggatagttgctatgtaagaagaactaaatcagtttgagagaaataatgtgtgggaactagttgagaaacctgaaaactaccccatcataggaacaaaatgggtatctaggaataagttagatgaacatggaataatca

SEQ ID NO: 4454 - DNA, 393 bp, Glycine max
  unsure (1)..(393): unsure at all n locations
agcttcttagtanattgtggggagtttgaagccatcttctcaattaaatttctggcttcatcaggagtcatgtctccaagggttccaccactggcagcatctatcatacttctctccatgttactgagtccttcataaaaatattggagaacaagctcctcacaaatctggtggtgagggcaactggcacatagatctttaaatctctcccagtattcatataggctctctccactgagttgcctaatgccttaaatatcctgtctgatggccgaggtcctggaagtacggaaaatcttttctaagaatactctcttgaggtccatccatcttgtgatggaccttggagcaaggtaatatactcagtccttcgccgctcccctctaaaaacga

SEQ ID NO: 4455 - DNA, 229 bp, Glycine max
tcttaattgccaccattgtttcttcccttcactgaaaatccatggttggtccatattaacatcctcctctaaatctccattctaaaaggcagttttcacattcatctgatgtagcttccaagtcataatgggctactaatggccatgataattctgaaagaatccttttgtgagactggagaaaatgttctcatataatcaatgccatctttctgagtatatcccttag

SEQ ID NO: 4456 - DNA, 456 bp, Glycine max
agcttgtaaggctttgggtgggacatgatagagagactcaacttggataccaaccttgtgctacaacaattgcagcaagacccactatccataatgagagaataatttttgtttaaaaccttgcatcttgtatgaaagatgttttctttttgggtttgggttaggtcacaagattgactcccaatgagccatctctccattagaagatcaccttcttcgtaggggcaaacctcttcaatatgctcatcacccttggcttcaccctcacttccacctgaggaaggagaagaagtagccttctcttgactactgtagatgtcttgatcccacatgatcatggttttctttgtagtggcattgagaaagaatgtggcctttcccaatacattttaagcacttaatgttactagttctatcttgtgaactaccctttggagtgatttcttctatgttttt

SEQ ID NO: 4457 - DNA, 464 bp, Glycine max
tcttcacatagtccgcctttgcttgaccttctttatgcttataaacagaaacattatgcataggcaaaagattaagtggagttagtgggttaaaaccacaaacaacttcaaaaggagaacaattagtggtgctatgaacagatctattgtaagaaaattcaacatggggtaaacaagcttcccaagtttttaagttcttcctcaaaactgtcctaagcaaggttcccaaagtcctattaacagcttccgtttgcccatcggtttgtgggtgacaagtggttgaaaataacaatttagtgcccaacttgctccacaaagtcctccaaaaatggcttaagaacttagagtccctatcactaacaatgctccttggcaaaccatggagtctcacaatctccttgaaaaacaaatcaaccacatgggaagcatcataaacttttttacatggaataaaatgagccatt

SEQ ID NO: 4458 - DNA, 435 bp, Glycine max
tgccaaatgttattacagtccttttaaagtcacaaaatgcatcgacaaagtttcccacaaactgcagttatcgaaaggttctcgcattcatccagtcttccactattccattctaaaattgttcctccaatcctcatcgaatgaccctcacccagtcgcactacctgtcgcggacaaggataaccaacctgtcatcactcctttggccatactcagtactcgctgggattactcctacactggacatcgtttaatggtgcttgtgcaatggtcgagtcttcactctaatgatgcatcatgggaagagtgagtctccttgaaagatatttatcaacttgaggacaaggtgcttttcgatggtcttgggaatgataggtagagaaagataataacccaacaagcccacagtgaaaggcccaagaggaaaatcaactc

SEQ ID NO: 4459 - DNA, 367 bp, Glycine max
tgctcactcctatggctctagccttgtctgagtcatagagtgcctccattgctctccatgtattgggaatgtctggttgctcaaaatattctttattgagtccaaatgttccacttttcattcggactggccagtggatctacagcacaaacccatttagtttgttttaagacagaataattgatgaaaatgaaatcaacccctgataactaaactctgcattacatgaatgcgtataaccgatgcactttgctcaaagcgttatttttatttaaagcacttaggggcaaagaaaacgtttttatttctcccattttcagtttaaaatactttcaagttaccatgtttttacgtctatcaactttgt

SEQ ID NO: 4460 - DNA, 413 bp, Glycine max
agccttttggtcgcgattcagattcttcagctgcattaactagatcactcaagcagtatctgacagaagaacaaattttcaagttttttaactaaaactgataatcttcaattcaactttaagattgtaaagtacattttataaaatgggaaatattatacaggattgaccactatcttgggaaagagcttgtggaaaatctttctgttctccgattctcaaatctcatctttgaaccattatggtcaaggcaatatataagaaatgtacaggtgatattctcagaagattttggcactgaagggcgtggcgggtaacctttattccttaacagctttcacactttctgttcttataatggggattcttatacattttcatatctgtaccatgtgtaggtacttttgaccatt

SEQ ID NO: 4461 - DNA, 424 bp, Glycine max
agcttaaaggtcaatcaaagaatgagttcaagatgtttatgatagaatcaagaacacttcaagattcaagaggaaagttgatttcaagaatcaagatcaagatccaagactcaagattcaagaatcaagagaaggcttaatccagataagtatgaagaggttttttcaaaaattgagtagcacatggattttgctcaaaacatgtttacgaaagagtttttactctctggtaatccattaccacattattgtaatcgattaccagtcgcagaatggatttgaaaatgttttcaaatgaatatacaacgttccaattgatttcaaaaagctgtaatcgattaccatgttttggtaatcgattattagtgcctttgaacgttgaaatgtaaattcgaatgtgaagagtcacatcctttcacataaa

SEQ ID NO: 4462 - DNA, 305 bp, Glycine max
ttgagcaacttcaaacaacaataactttgtactcggatgtctgattgatacccgtaatatatccagacgctcgaaattgaataccgaagctctgagcaaattcaaacgccaataagtttttactcggaaggtcgattgagtcccgtgatatatagaaacgctcgaaaatgaaaaccgaatctctgagcaaattctaacgacaataactttgtactcggatgttcgattgagtcccgtaatatatctcaacgctctaaatagaatgttgaagctttgtgctaattcgaacgaccataacttgtttc

SEQ ID NO: 4463 - DNA, 525 bp, Glycine max
ttaaaagattggctaaaattttgttaaaacataagcacttatacaatgaaggaaagctggagttgctgcacatgctgtctaacattatgtcaaggaatcagatcgggctgcacaatgcacaaggcaagataaaatgtcaaatgaagaattgaagctgcaggatccacgatgtcggatacaatgtccaggacatcctgcccgaaaatactggacacataaacctgttatatctttaacagattaatgtgcagttagcaacagatttaggcgatctatctttaggaacgaattaaaagataattaaagttcgaattacaaacttgaatagttcgttcagggattaaagattaaagataaaaactaaaagatcaaactttatcttttagatctttaaatgcaaattttcaggagaatgatagatcttatccagcgcaagttgttgcagcccaaatacgcacactgctatataaacatgaaggctgcacgggttttgtaccaagtccgagaatgaagagttattttgtg

SEQ ID NO: 4464 - DNA, 298 bp, Glycine max
agcttgaaatgcctcatttttatgaggggagaacaatgtcccagtttatcttggataatcatcaactatgacgagtgcataataactttcaccaaaactcatgactcttgatggaccaaacaaatctatatgttgtaattataaacgttgagttgttgaaacaacgtttttggatttaaacgatgccctaatttggtttcccttttgacctgcctcacataatttatctttttcaaattttagccttggcaagccaacaaccaaatcttttgaaaataatttgtttaaatggtccata

SEQ ID NO: 4465 - DNA, 474 bp, Glycine max
ttgaagagctatgtcagaatttacgaacacattgaacactaaagtgttgagtgacttgctcataatatcacaaaagtgtgcccggatgaaataagagaaatttggatccacattgaagacccaagtaatgttgaaatttggatcatttacattagcatcccccattgcttcagcagtggcatagacccaatttggggcagtctcaggtgtaacagccaccggatacttaatgcttgaaggattcaccgacacatttaggaccgagctgttgacatgaaggtatttcctatcattcacccaagtcctacccaaggtgtcattttgggcagtaatcaaaggaccccccatgttcaagcgataaacagtttcaaaggcaagttcagaaagtccactgaatgttgctggcgggttaacagccaatgcatgatcaaaaaacaactcattcggcattgacacgacttcaattgcattgac

SEQ ID NO: 4466 - DNA, 473 bp, Glycine max
tctaaactttatacaagaatgaagctttgataccacttgtttgacaagtggcctcagatatcttaagaagggggattgaatttatatattacaaactatttccccaattaaaattctatttcactttctattcaagttacaaattcccttaacaatgaacttcttaaatattgattcaaatagaacaatctgaatataaatataaaacaataataaataaaagagtttaaaggaagagaaagtgcaaactcggatttatactggttcggccacacccttgtgcctacgtccagtccccaagcaacccgcttgagagttccactatcttgtaaaatccttttacaagttctgaacacataaggacaatccttcctttgtgttcaaaattcttttacaacaagagacccttcgtctcttaatcccttaacaattatgaagaacggaggaatgaatctctcttgaagagaaagatt

SEQ ID NO: 4467 - DNA, 159 bp, Glycine max
tgaaattgaacaacggaagctctcgagaaattcaaatggttattacttatcacacgtcagtccgattccggcggataatatatcgagaagcctctaattgaacaacgaatgctttcctgaaattctaatggtcataacttatcacacggaagcccgatt

SEQ ID NO: 4468 - DNA, 341 bp, Glycine max
agcttgaatggcttactgaggatggagatgtgctttgtaacgaagcaagtggagttgaatatttgcattggaaagtacaatgataaggtgctttgtgatgttgttcctatggaggccaaccacttactcttggggagaccatggcaatttgataagagagcttatcatgatggtttcaccaacaagatctcttttacgtattaaggcaaaaagatagtgctccaaccattgaatcctcaataaatgtgtgaggatcaaagaaaaatgagagagaaaattctttctgaaaagagagaaaaagaaaaagagagcttaccactttaaagttcaaaaagtgagga

SEQ ID NO: 4469 - DNA, 423 bp, Glycine max
ttgatttcctttgttccggaaacctttcttttctcatgtgcacccaaacccaatctccgggttcgaagacaaccttctttctccctttgttggcttgtttaacatagcttttatttttcctctcaatttgatctttgactctctcatgaaacttcttcacatagtccgcctttgcttgaccttcttaatgcttaaaaacagaaacattatgcataagcaaaagatcaagaggagttagtgggttaaaaccataaacaacttcaaaaggagaacaattagtggtgctatgaacagctctattgtaagaaaattcaacatggggtaaacaagcttcccaagtttttaagttcttccttaaaactgttctaaacaaagttcccaaagtcctattaacaacttccggttgcccattcggtttgtggg

SEQ ID NO: 4470 - DNA, 468 bp, Glycine max
agctctgcaactttttatccctagcacaattgttttgattcaaactattcctgcactagacgagtccaaccaatcccaaacaaggtcatattccatcgaattttttggtcatttaacgcatgtattgatgcgttttcattttataaacccattgtgcaaatctatggaacatggctatatggaagatacaaagggatgttgttaattgcaattgcacaagatggtgctaacaacatatttccattgtcatttgtcattgtcgagggtgagacaacagatgggtggcacatttttttgaaaaacttgagaacacatgtgacacccccacatggtatatgcttaatctctgaccgacatgagtcaatccaaaatgcctacagatgacctgacagggggtggacagcagacacctcgtcacatgtgttgtgtattcggcacctatgcccaaactacaaaaaaaaaaccatt

SEQ ID NO: 4471 - DNA, 303 bp, Glycine max
agctttctcttttgtgtaactatctcatcctctttttcaagtgtacaatgaagcttggcagattcaggtgcaggtgctgctactggtggaggcacttgaatttggttgccagacctcaaggtgaaggcactcacatttttcggatcctgcacagtttgtgaagacaatttgtcagaattttgggactgagcttggttcatctgagtagccatctgccccatttgatttgttagactctgaatggaagctcttgtctcttgttgcaattgcatattctggatggtcatttgcctcactaactct

SEQ ID NO: 4472 - DNA, 398 bp, Glycine max
agctttaagcaaattcaaatgacaataacttttgactcggatgtccgattgagtcatttaataattcttgacgctcgaaattgaatacagaagctctcacccaatttaaatgacaataactttttactcagaagtctgattgtgtcccgtaatatatctagatgctcaaaattgaaaacagaagctctgagccaattccaacgacaataacttttgactccgatatccgattgagtcatttaataatttgagacgctcaaaattgaatacacaagctctaagcagattcgaatgacaataacttttgactcgaatgtcccattgagtcattttataatttgagacgctcaaaattgaatgcggagctctcaccccatttaaatggacataacttttta

SEQ ID NO: 4473 - DNA, 374 bp, Glycine max
gcttttagcctcagatgatgcagctgattttgtatctacctcatgcactcctctaatgactatggcatcatttctggcgctaaactgctgagagttggaagccatcttttcaattaaatttctagcttcaacacgagtcatgtctccaagggctccaccactggcagcatctatgatacttctctgcatattactgagtccttcataaaaatattggaaaaaaagctgctctgaaatctgatggcgagggcaactggcgcataattttttaaatcgctcccaatactcatacaggctcttttcactgagttgtctaatacctgagatatcctttctgatggctgtggtccctggaagcaaggaaaaatttttct

SEQ ID NO: 4474 - DNA, 413 bp, Glycine max
tcctagcggtttctaattatatggacctataaatctatcatatgctgacaatagacgagaagttcgtggatctcctcgggggggagtaggtgtccgccatcgctttggccttggctagctcttcatcaatggattcctttgcatcttggaagatgaatggcaatgtaatggagaaaggaagagagagaggagacgccacttcaaggagaagatgagtctagaagaagctcaccaccataggaggccatggataagagcttggaggaagaaagagatgaatgaagggagaaggagaaaacagcccgaaattttgtgctctaaatgagctctgcaatctgagagttaatactcacaagatccaagtttaaaacaatgcccacctttgacctctaattatacccctactggccccc

SEQ ID NO: 4475 - DNA, 323 bp, Glycine max
agcttgtggataatcatatccaaatgtttcctgatatcatcatgatgattcaccagccatggatgacctatgcataaaatcaggctatcttcaacatacttcatgaaaattaaagtaagaatattgataccatatacaccaccatgggaaatgggaagacatacttaatgcctgagctgccggaaatcttttactgtaattcttattcaacaacctctgtacaaaatctttatcatcaactgataaagaatgccgacgagcctcattaaaactaagatctgtcttgagtacatcccgaaatataccatattctggccgggccc

SEQ ID NO: 4476 - DNA, 542 bp, Glycine max
tagacattagagtcatccaagagggctagtgtcttcaggggctgaaaattatataaaataaaataaaaatagaacgttagatatcaaaatgtgtaaatgaaaataaataaaattcttatacctataaaaacaaatttctagaaattgaagtaaccagaataataacatcaagttaatgatagattaaaatcacaatagtttataagaaaaatatttatggtaataatgaagatctttaatatcttaagattaagtattcaacatcgataattatgagtttaatgatcatgcagcggcaatgaaatttttatggttaattaatcttaatattacttttgtaaaactccatgaatttatcatatacattggaaattattagatgtcagtataaaataattttagacatttagtgcatagcttattttctctaattatatctctatcttattttattatgatgaagacttttcatccaaattttcaaaacgttccatagaacatagttttattaaaacaaaatatggatgttaacaccaaatacc

SEQ ID NO: 4477 - DNA, 465 bp, Glycine max
aagcttctcgaaagattccaaaactagcatacccgtgcatgatttgcattgtcaaacgcacagaaggcagatgccagattcctacgcacaaaccgctgttgaacataaccaatgtaatctcattcttctccaaactttcaatactccccccttaatatccaaccaccaccgccggaccatatagcccgccacccaacgccaactgaaccaacaccacgcatgctctcctcatctccccaaacaacaacaaagcctggctgctctttccatttcccagcacacccggcaaccatggtggtccaagacacaacattcctgcacggcattacctcaaaaaccctcctagccccatcgaaatcggcacacctgacatacccagcaagcatagaattccagctaacaacacttctctggggcataccatcaaacacatggggcccccgctcaacgccaccgcgcccagca

SEQ ID NO: 4478 - DNA, 395 bp, Glycine max
ctatgctcttttgtggtggaacaagctacaaaaggagagagcaagaaatgaagagcccatggttgatacatggacggcgatgaaaaagatcatgaagaagcggtatgttccggctaattactcaagggacttgaaatttaagcttcaaaaactaacccaaggcaacaagggggttgaggagtatttcaaggaaatggatgtgctcatgattcaagcaaatattgaagaagatgaggaggtaactatggctcgatttcttaatggtttgactaatgatatccgtgatattgttgagctgcaggagtttgttgaaatggatgatttgcttacaaagcaatccaagtggaacaacaattaaaaaggaaaggagtggctaacaggagttttaccaactt

SEQ ID NO: 4479 - DNA, 464 bp, Glycine max
ttgttgtaaataccataacttttatgttaatctttgatgggttttaaatctttctttaaattgcggccataggacttataattctgaacatagaaaagtaaatcatggttgatttggtggcagggaagcacagccaatgaaatgggccatgaagttgagggtggctttctacttacctcaagctctacaatattgcactactaaaggaaagggtttgtatcatgatctcaatgcctacagaatcttgtttgatcaggtataactggtgtttaataaatgctctccagttctaactaaaccctgtttcttcctatttgaaacttggattggcttgggatgtatcaacaggatgctcatcccaggttgtcctgcttttggactcatggaaaagagcacagatggcaacagttacagcacaaacctggcttttaccccttctgaatacttaaagactggcaaaattt

SEQ ID NO: 4480 - DNA, 336 bp, Glycine max
agcttcagtaatgtgagttttgaaaagtaagttttaaatgtatttactctgagtcatcaatatacagttattagggagatatttaatctctacacccaagaaataatccacatgacctacctgtttgacagagaatgcagtgtgaaacttggctgtgagctgctgaattaaaaaagttgaacctacccgtgatgactatatcatccacatagaccccaagaataacaatatgaacctgttgcgtgtagatgaccagagaaatggcacatttgcttcccttcaatcccaactgaaatagagtagatttccgcttatcaaaccactgccttggaactt

SEQ ID NO: 4481 - DNA, 396 bp, Glycine max
agcttgatttttttgtatggctatccctgttatcttaattatcagcaaattgtttcacgcccaactcttgatgttgattggcgaaacaatgtttcatttgctacatgctcctctaataaaatgatacatgtttgcaaaattggagggaatagaccaatcaaaactttctcagggcatcaggtatctcttcctagtcaaccagttcactgatggttttttttattaatatactaacttttaattggaaaggagacaacgactttccatcacaaaatagaataatatgctcacttataattcaactatgaggatattcagttacagttttaatcatttctcaaacattctgaaatacttttgtttcacgatgaagttaatgccattaaatgggaacca

SEQ ID NO: 4482 - DNA, 389 bp, Glycine max
tgaatttaatgaatctaatagtactacaataaagtgaacattttataacggatgctctatcatatatttgactgaacatttaagttggaaatattctgaaagcccctttattcctgaatattacccaagcctcaggttttgtgataatggatcccccgcaaacctaaaagcaccatgaactaaatctttttactgttgtgggggtcttctaagaaagagtttgatatttattttataggtttttgttcgagattttgtgcccagtgctctagcctttttgatgaatggtgaacccgagatagtcaggaacttcttgttgaagacacctgcatcttcagggttgggaaaaaaaagtacatcgggttaagcttggtgaaggtgtgatgcca

SEQ ID NO: 4483 - DNA, 544 bp, Glycine max
ttggagtttccaagtgccaattcgtcctcttctttagtccagtcttcttctggcttcaattcatcagtgggctttccttctgtgtccagcatcttgggatgttcccagcctttgatgacagctttccaagttctgctatccagtgatttgaggaaggccaccattcttgctttccagtattcatagttgcttccatcaagaattggtggtctgttcactggtcctccttctttctccatgttcatcagaatttatctccccagatctcactctgtgatttcgagtgttggctctgataccaattgaaattctgatacccagggacagatgtcgtacaggatgtcacgacatcacgcttaaaaacatgcaaattgtatggtgtcctatgaacagattaaacacgtaataacaccagagaattgttacccagttcggtgccccttacctacatctgggggctaccaagccaggggaggaaatccactctcaatagtgttagttcaaggtctaacaaccccctgtttacaacctttctacctaacca

SEQ ID NO: 4484 - DNA, 390 bp, Glycine max
tctacattcaatttcgagcttttcgatatattactggactctttcggacatccgagtaaaaaggtattgtagtttgaatttgctcagggcttccgtattccatttcgagcgtttcgatatattaccggactcaatccgacattccagtaaaaagttattggtggttgaatttgctcaaagcttcggtatttcatttcgagcgtttcgatatattaccggactcaatcagacatccgagtaaaaagatattgtcgtttgaatttgctcaaggctttcgcatttcatttcgagcgtctcgatgtattacgggactcaatcagacatcccagtaaaaagttattggcgtttgaatttgcttaaaagcttccacattcaatttccagcttttca

SEQ ID NO: 4485 - DNA, 385 bp, Glycine max
tatcatatatcgatacgctcgaaattaaacattggaaactctcgggaaattcaaatagtcataacttttcacacggatgtccgattcgggtgcataatatgtcgagaggctcgaaattgaacaacgcaagctcttgagaaattagactggtataactttttacacggaagctctcgtgaaattcatatggtcataacttttcacactgaggtccgattcaggcttataatatatcgatgcactcgaaattaaacatcggaaactctctaaaaattcaaatggtcataacgtttcacacggatgtccgattcaggcgcataatatgtccagaggctctaaatttgaaaaacgaagctcttgagaaatttcaatgggcataactttt

SEQ ID NO: 4486 - DNA, 413 bp, Glycine max
agcttgaatcggacatccgtgtgaaaagttattattttttgaatttctcaagagcttccgttgtgtaatttcgagcctctcgacatattatgcgcccgaatcggacatctgtgtgaaaagtcatgatcatttgaatttctcgagagtttccgatgtttaatttcgagcgtatcgatatattataaccctgaatcggacctcagtgtgaaaagttatgaccatttgaatttgacaagagcttccgttgctcaatttcgaatatcactatatgtgatgcgcctaaattggacattcgcgttaaatgtcatgaccatttgaatttctccagagcttccgttgttcaattctgagcgtctccatatgtcagtcgcctgaatcggacatcccggtgaaagcttttacccttttaattt

SEQ ID NO: 4487 - DNA, 474 bp, Glycine max
tgtagacttttgactctgtgttgtagccaatgaaaatacacttttctcctttatcggccaatttcttcctaagttgatctagaacatgtgcatatgctatgcacccaaaaactttaagatgtctaattgatggtcactgtccattctaggctttttctggcgtcttgtcacaaacacttttagtcaggcacctattcaaaaatgtaaataattgtagcaactgcttctgcccataactccttaggcatttccatggccttcgacatgcacctcaccatatccatgattgttctattctttctttcagctactccattctgctgaagcatgtatcttgttgccaattgatggtgaatcccatgctggtcaaggaaagttatgcaagtgagatattcttgtccttttgtcagtcgaagtactttgattctacacccattttgcttctctaccaacacatttgaaagcatcacaagc

SEQ ID NO: 4488 - DNA, 466 bp, Glycine max
tggatttccttttagtagggaatctttccttcctaagatgcatccaaacccagtccccctcattaagaactagctcctttcttcctctattgcccttaattgaatacacctttgtttggttctctatttgggtcttaaccctctcatgcaacttctttacaaactctgacctagattccccttctttatgtatgaaagaagtgtcaagtgggaggggaatgaggtctaagggtgttaagggattgaacccatagacaacctcaaaaggggattgcttggtggttctatgaacccccctattgtaggcaaattctacatgaggaagatactcatcccaagacttatggttgccttttagaagagcccttaaaagagtggataaagaactattcactacctttggttgcccatcaatttgtggatgacaagggggagaaaaaaaaaacttaatttctaacttaaccca

SEQ ID NO: 4489 - DNA, 364 bp, Glycine max
aatacttattctcgagaatggagaattgcactaagcaatcactacgcctatcttctaactcgaagcggaggacacattaacgaaaactcaattcatggggcttcgaaaaaagggtttataatggataattacactaagcaatcactacgcatagcttcaaactcaaatgtggaggacacatgaacgataacccacttcatggggctccgaaaagattgagaatggagaattgcactacgccatcactacgcatagctccaaacgcgaaggtggaggactcatgaatgaaaacgcaattcatggggctcccaatagattgataatggagaattgctctaatcaattactacccctatgtccaaac

SEQ ID NO: 4490 - DNA, 328 bp, Glycine max
ggttgatacacctatgcgtctgttttataccatggttaacctgttttgagctaaggtattgcaaaattcttttctaacagagggctgaggcagcaattgctattgggttttgatgatttcattgcagatgccttgcaaggtactggattctatcaaaaaggaacattggaaaataagagagctgatggtatatcattgctgaagaggttattgagaaaaaaaaggaaaaaagccaaatgtaatatatctgtcattcctttcacaactgatggaaagtagccattggagttctatttcaaaaaaagattatgtgctccttcataaattt

SEQ ID NO: 4491 - DNA, 479 bp, Glycine max
agcttgccgccacggagttttccgactatgctcttgtgtggtggaacaagctacaaaaggagagagcaagaaatgaagagccaatggttgatacatggacggagatgaaaaagatcatgaggaaacggtatgtgccggctagttactcaagggacttgaaattcaagctccaaaaactaacccaaggcaacaagggggttgaggagtatttcaaggaaatggatgtgctcatgattcaagcaaatattgaagaagatgaggaggtaactatggctcgatttcttaatggtttgactaatgaaatccgtgatattgttgaactgcacgaatttgttgaaatggatgatttgcttcacaaagcaatccaaggtgggccaccatttaaaaggaaaggaagggctaaaaagagttttacccacttttggtcttctatttggaaaaacaaagggatgaaagatggggctggtacttttagaatt

SEQ ID NO: 4492 - DNA, 288 bp, Glycine max
cctttgtcaatgagtatcttcatgcctcttaagtgcagaagtccaaatctttgatgccatatggggacttcatcttctttggaggatagacacatcgaggagtaactggattgttgaagtgtccataagtaacacgagccctttgatttgctgcccttcatcagaacttcactcctataatttgtcaccaagcatactgactttgtgaaggttacattggatccttcatcaaccaactgactgaagctgatcaagtttgcagtcactccctttaccagcagaactttg

SEQ ID NO: 4493 - DNA, 598 bp, Glycine max
  unsure (1)..(598): unsure at all n locations
ttgcacaaaggtntgaaagtccttttaactccnnnnantnnnnntnnnnnnnnnnnttnntnnnnnnannnnnnnccccccnnngcaccaccacttccggcacatctacaaaatcatttggataaagttcaaccatcctcaacaaatttttcacatcaaaagctttaaatgatgatgagggactcaaacatgaaacacattgtaaaagttcagtattctcttcatcaaacctagcattgagctcatgcaactgcaaatctaaaacactaaataaaaaatcatgcttataatgatgaaaattagaaacactataagtggtagcatgtcatctaggtttcttcccttgcacatacggtgcatccaaatcaagcacattaatatcatgcttattgcaaatttccataaccttagatataagttctttccattcatcatttcctatttcttggaaattcttctttggtggctttgacaagtgataaagcatttcaaaagatcttgatcacgcctttggagcgcttcacttaaatcatttgtaaaatctcaaatctcaaccctcatgtataacatggaaattaaaatcaaggactgaagccca

SEQ ID NO: 4494 - DNA, 340 bp, Glycine max
ttttgggatgtttccagcctttgatgacagctttccaggttctgctatccagtgatttgaggaaagccaccattcttgctttccagtattcatagttggttccatcaagaattggtggtctgttcactggtccttcttctttctccatgttcatcagaatttatctccctagatctcactctgtgatttcgagtgttggctctgataccaattgaaattctgataccaggggacagatgttgtaccggatgtcacgacatcacgcttcagaacatgcagattatatgtgtccgtatgaacagattaaacaagttaataacacaagagaattgtttaccca

SEQ ID NO: 4495 - DNA, 503 bp, Glycine max
  unsure (1)..(503): unsure at all n locations
ttcaatgctcttaagcaaaagttaaccaatgcccccatacttgttttgnnaaannnnnnaaaatntttngaaattgaaggggaagnnnnaaaaatgggattggggctgtattgttacaagaagttcatccaattgcttattttagtgaaaaattaagtggtcctacccttaactattctacttatgataaggagttgtatgccttactgagagcgttgaaaacatggcaacactatctttatcccaaggagtttgtgatccatagtgaccatgagtccctaaaatacttaaaaggacaaggtaagctaaataaaaggcatgccaaatgggtggaatttcttgagcaatttccttatgttattaaacataaaaaaggaaaaggaaatattgttgcagatgccttgtcaaggagacaccttttgctttctatgcttganacaaaaatgattgggattgattacttgaaaaaaatgtatgaaggaaatgacacctttggtgaaatc

SEQ ID NO: 4496 - DNA, 528 bp, Glycine max
agcttgcttgagcttgcagctaataacgatgttgaaggtttttagcgaatgattgagagggatccttcctgtgtagatgaggtaggactatggtacagtcgtcaaaagggatctaggcggatggtcaatgagctcagaaccccattgatggttgctgctacttatggtagcattgatattctggatctgattctctcactttctggctgtgatattaataaaccttgtggccttgacaagagcactgcccttcattgtgctgcttcgggtgggtctgaaaatgttgttgatgttgttatattgcttctagcagcgggggctgatccaaattctgtggatggcaatggtcatcgtccagatgatgtcattgttgttccttccaagcatgagtctgttagaaacaatcttgaagcacttctttaaactgatgacttcattgcagtgtgtaatttcagggtggacaccgcttcatcaaatgcatattcttcacctttgtcaacattatcagagaatgggtctccttttgca

SEQ ID NO: 4497 - DNA, 591 bp, Glycine max
agcttgaaggcaaattggatgcattggttaacttggtaacctagctggccttgaaccagaaatatgtacctgttgcaagggtctgtggtttgtgctcctctgctgaccaccatacagaccttttcccttccatgcagcaacctggagcaattaagcagcccgaagcttatgctgctaatatttacaatagacctcctcaacctcagcagcaaaatcaaccacagcagaacaattataacctctccagcaacagatacaaccctggatggaggaatcaccctaatctcagatggtctagccctcagcaacaacaacaacagcctgttccttccttccaaaatgctgctagcccaagcagaccatacattcctccaccaatccaacaacaacaacagcgccagaaacagccaacagttgagacccctccacaacctttcctcaaagaacttgtgaggcaaatgactatgcagaacatgcagtttcaacaagagaccagagcctccatttagagcttaaccaatcaaatgggacaattggctacacaattgaatcaacaacagtcccaaaattttgacagctggctttttaaac

SEQ ID NO: 4498 - DNA, 691 bp, Glycine max
agcttcaatcttttacttgtgtttcattcagatgtatttactactttcaaaactcaatacctttatgtatttatgtactttttacacatatttctataggttaaagttatttcattactctcttttttgtctaaaagtggtatatggttatatctaaaaatgacattttgcactcataaagtatttcgaaagatgcatttatttttaccgaacaatttatcttttgtcatgactagtatgtaataaataaataaaaaagaaattttttactcatgttttcttaaaggaaaaagctttcttcactggattgatgaacatgattatctaaaataaatttaaattaaaggaaaaaggcgtgatttttcataatagattttaggatgtcacacgataagcttaaatattttggatttctttttgtctcacactatattgttagaaaaactcctgaattttttcttttgcaaaaatattataagctattggactaattatatctttggtttccaaacttttcttgaaattttacttgtagtccttaaacaaaaatttaataataatatttggtcccctataatattttttctattcaatagtcttaagttctttgttaccaagtaaaaatggttaatttgaataccttaatcaattcaatcattgtattaggccccataactcatttttttttttt

SEQ ID NO: 4499 - DNA, 370 bp, Glycine max
agcttgctgccacggagttttccgactatgcttttgtgtggtttaacaagctacaaaaggagagagcaagaaatgaagagccaatggttgatacatggacggagatgaaaaagatcatgaggaagcggtatgtgccggctaattactcaagggacttgaaattcaagctccaaaaactaacccaaggcaacaagggggttgaggagtatttcaaggaaatggatgtgctcatgattcaagcaaatattgaagaagatgaggaagtaactatggctcgattttttaatggtttgactaatgatatccgtgatatttgtgaactgcatgaatttgttgaaaaggatgatttgcttcacaaagcaattcaagt

SEQ ID NO: 4500 - DNA, 504 bp, Glycine max
  unsure (1)..(504): unsure at all n locations
taggaacccaaacttgtagcttcaatgcaaggaaacgtgcttatggcttnnganccccaaaattnggnnnnanaattanaaannnannnnnnnnnnnatttgtttgtaagaatttgggctgccccatgattggtactttgcacctaaataacatgggaaatgattttcaatgctgtgtagatatatgtgtaaatatgaagggcatgaaattctttgcaaaggatgaaggaatattgaggtcacttcctaaatgaatgtatgatagcatgggattcccttttgaatgcaagtatgtgcataatgttaaatatcttgccaataggcataagtgtgagtgaaacaatgaaagtttgtatggtatatatatcttgagtgtgtgtagttagtttgtgatagcaaatgtttaggatataattaagtgtaaattttgacgcaatgccttaaacgtgagaatgtgtgtttcttttaaaatgcatatatatgtatgacaattggaatgtgttg

SEQ ID NO: 4501 - DNA, 244 bp, Glycine max
tggtcataacttttcacatggaggttggcttatgcgcataatatatctagacgctcgaaattgaacaatggaagctcttgagcaattcaaatggtcataacttgtcactccgaagtgggattcaggcgcataatatatctagaatctcgaaaatgaacaatggaagctcttgagcaatttaaatggggattactttttactcggaagggcgattcacgcgcctaatatatcgagacgctcgaaa

SEQ ID NO: 4502 - DNA, 509 bp, Glycine max
agctttgatgtaacatttggagaggttaatgatacaacgagatgatgcgctccatgagaggttggatcaaatggagaatagagaccatatgaattgctcaagagcttccattgttcaatttcgagcgtctagatatataatgcgcctcaatcggacctccgagttaaaagttatgaccatttgaaatgctcaagagcttccattgttcaatttcgagcgtcacgatatattatgcacctgaatcggacctgcgagtgacaacttatgaccatttgaattgctcaagagcttccattgttcaattttgagcgtcacgatatattatgcacctgaatcggacctgcgagtgacaacttatgaccatttgaattgctcaagagcttccattgttcaatttcgagcgtctcgatatataatgcgcctcaatcggaccttcgagttaaaagttatgaccatttgaattgctcaagagcttccatttttcaatttcgagcgtcacaatatattat

SEQ ID NO: 4503 - DNA, 491 bp, Glycine max
  unsure (1)..(491): unsure at all n locations
ttgatgcaacagttggagaggttaatggaagaaggtatatctncnctnnatnanangnnnnatnaaatgganaatanagannttccctnnaaaagaaaggaggagaagagggaatgatgatgttcctagacaaaaccgaattgatggtattaaactcaacattcctctctttaaaggaaagaatgatccacaggcctacttggaatgggagatgaaaatagagcatgttttctcatgcaaaaactatgaggaggaccaaaaggtcacgcttgccgccacggagttttccgactatgctcttgtgtggtggaacaagctacaaaaggagagaacaagaaatgaagagtcaatggttgatacatgggcggagatgaaaaggatcatgaggaagcggtatgtgccggctagttactcaagggacttgaaattcaagcctccaaaactaacccaaggccacaagggggttgaggagtatttcaaggaaatggatg

SEQ ID NO: 4504 - DNA, 458 bp, Glycine max
agcttctgtccctgagaaactggtttccagaatacaacagggagtgaagattgctgaaaaccctagccttgcaacaagtcctagggaagtagatacggagatggacaagaaaatctgcagtattgtgagtagcattttgaaagacgcctctgtgcctgaagctgatgaagatgtcccaacatcgtccaccccaaatgtttctgtgcctgatgtcaataaagatgttccaacatcttccggcccaaatgctgaagtactctcttcccccagcaaagagagatcaacagaggaagatgatcaagccgcagaggagactcctacaccacgggcaccagaacctgctccaggtgacctcattgacttagaagaagtcgaatccgatgaagaacccattgcaaacaggttggcacctggcattgcggaaagaatttaaaacagaaagggaaaaacccctctta

SEQ ID NO: 4505 - DNA, 484 bp, Glycine max
agcttgtacacctctgtttctctacctttcattacaaacttttgtggttgagtgacaaaaacttcttcttctagtgagccattaagaaatgcagattttacattcatttggtatacttcccagcaattgtagctagccattgctattacaagtctcactgtttccaacctagcaacaggggcaaatacttcatcataatccagaccttgcttctgtagaaatccctttgcaacaagtctggctatgaactttgttacttctcctttaggattcaacttagttttgtagacccattttactggtatggctttctttcctgttggtagctttgtgagactccatgccttgttttttctaatagacctcagctcttcttccattgcttcaacccaatgggagtgcttcaaagcttctttcacgcccaataggttccatctcagcaagtaaggccatatggacaaaatcaccatcaactgtaatcgag

SEQ ID NO: 4506 - DNA, 384 bp, Glycine max
  unsure (1)..(384): unsure at all n locations
taaacattcaatttcgagcgtntngttatattactggcccctttngnnnnnnnnnnnnnnnnattgnnnnngaannnnncnnnnnttaaacattcaactttgagcgtctcgatatattacgggactcaatcagacatccgagtaaaaagttattgccgattgaattggctcagaggttcaaaattcaatttcgagcgtctcgatatatttctggactcaatcaaacatcccactaaaaagttattgccgcttgaattggctcataggttcaacattcaatttcgagcgtctcgatatatttcgggactcaatcagacatccgagtaaaaagttattgtcgcttgtaatggctcagaagttcaacattcaatttccagcgtcccg

SEQ ID NO: 4507 - DNA, 504 bp, Glycine max
  unsure (1)..(504): unsure at all n locations
agctttaagccaattcatacgacaataactttttactcggatgtatgattgagtcccgtaatataacgaaacgctcgaaattgaatgtttaagctttgagccaattctaacgataataactttttactcggatgtccgattgagtctcgtaatatatcgacacgctcgaaattgaatgttgaagctctaagcctattcaaacaacaataacgttttacttggatgtccgattcagtgacgtaatatatcgggacgctcgaaattgaaagttgaacctctgagccaactcaaacgacaataactttttactcggatgtccgattgagtcccgtaatatatcaggacgctcgaaattgaatgttgaacctatgagcctattcaaacgacaataactttttacttggatgcctgaatgagtcccattatatatcgagacgctcgaaattgaaagtttaaactttgagccaattcaaacgacaataactttttactcngatgattgat

SEQ ID NO: 4508 - DNA, 509 bp, Glycine max
  unsure (1)..(509): unsure at all n locations
tgaaatgcatnattnttatgagtaataaatagngtnaagnatannnannnaannanaananngncnngnnnnnanannnnncaccaaaactcataattctagaaggaccaaacaaattcatatgtaacaattgtaatgattgagtagttgaaacaatctttttggatttgaatgaaactctagtttgttttcccttttgacatgcatcacataatctatctttttaaaatttcaatttaggcaaaccaacaactaaatcttttgaaattaatttatttaagtgttccatgtttatgtgagcaattcgtttatgacatagccatggatcatcatctttgctaagaaaacattgattattatatagtttatggcttaaagttatcatataaacattggtgactctataccctatatgctntatattagtaacatgcttatgctctatgagacaatttttagaatcaaattatactagatagcctttatcacataagtgactaacactaagc

SEQ ID NO: 4509 - DNA, 202 bp, Glycine max
agcttattctgattgtagggtcgtaggagagtataacaagcacccccaaacactcaggaacttataatctgggtgtctgttgaacaatttctgataaggcacctcttgattaatagaggatgatggaaggcgattgataaggtacatgctagaagtaacagcatggtccccgtccacaagagtcatagagacttgcgataac

SEQ ID NO: 4510 - DNA, 402 bp, Glycine max
agcttgtaatcgattacatcatttgtgtaattaccaaacacaaaaaattcatttttcaagtctaaagagtcacaactcttcaaaaacaaactgtgtaatcgattaccacattcatgtaatcgactaccagtaaggaattttcgaaaataactcccaatagtcacaactgtttaagaagtttttgaatggccatcaaaggcatataaataggtgacttgggatatgaaattccttagagtttttctgaacaacattgtcttatcctctcaaaaccaaattgtcttatgactctcaaaatattccttggccaaaacacttgccaattcaataaggaatcttgatcaatctttaattgtaatatccttctcttaaagaaagaaaatccttcttcttcttattcaa

SEQ ID NO: 4511 - DNA, 372 bp, Glycine max
agcttctattctgaatttcaagcatctcgatatactacgggacacaatcgaacatccgagcaaaaagttattatcgtttgattttgctcacagcttctattatgaatttcaagcatctcgatatactacaggacacaatcggacaaccgagtaaaaagttattgtggattgattttgctcaaagcttctgttctgaatttcaagcgtctctatatactacgggacacaatcagacatccgagtaaaaagttattgtcgtttaattttggcagaacatctgttttgaatgttcaaacgttttggtatactacgggacacaaatggacattcgggtaaaaaggtattggcccttgaattttgctcagaactttt

SEQ ID NO: 4512 - DNA, 553 bp, Glycine max
  unsure (1)..(553): unsure at all n locations
atagaatagctaagcttcttacaggattaacttgatctgtaagtnttaaaaatcaactttatcnntaaaaaaanaannnannanannaataatnnnancatttnnnnccggagatgggtgcaccagcaatgatactaggtgtacctaacaacactctcaactaattcaactaattcatactttatgctttattggactctcattacaattttctaattcattgataatgtccaaaactaaattaaattaataaaataatactgaatgaacgatgaaactaaaagtgtttgataaattattttatatgaatcttgtataaatcattttcaataaaaaaaattattgaatttttatctatttctaattaagtattgtttattttagatggtgaacctaacactctttttaagtaaataatactatccctctattttgttaacgttatacagttaaagggtgacagtgtaaagtgtaaggataaaaaagagaggaaagtttgtataaatcttacgaaattttaaaagtatcaatataatttacttacttttttaat

SEQ ID NO: 4513 - DNA, 477 bp, Glycine max
gcatgcaagcttgtgccaaagttaccctgccagtcgtggataggatcttagctttccatttagtaatttttcgccagatatttctaatatggggtttaaacagctactcatttctcttatgatcctatactaggaaacccaaataggaatcaagattattagtaatagtcacctgaagctgttgactaagctccctcaccttagcttatgagacattagttgagaagagaacctttgatttgctcatgttgatcttctggctagatgcattagcaaaagggtttaatatctggttgacttccccagctgctacactgaagcttcagccaccaaaatcagatcatccgcacagaataagtgtgagacattaacccaccgagaatggatgccaggtaccattctgaactgaatcttggatgagatgtgcccatctctgaatacacaacacaaatattttagggagagaacgggtccccc

SEQ ID NO: 4514 - DNA, 353 bp, Glycine max
agcttgaggacacatgaacgaaaacgcaattcatggggctttgaaaaaggataagtatggagaattgcactaaccaatcactacgcatggctccaaactcaaaggtggaggactcatgaacgaaaactcaattcatgggctcccaaaaagggttgagaatggagaattgcactaagcaatcactacccatagctccaaactctaaggtggaggacacatgaacgaaaacgcaatttattgggtctccgaaaaaggttgagaatggagaattgcacttagcgatcactacgcatagctccaaactctaaggtggaggacacctgattgaaaacgaaattcatggggcttccaaa

SEQ ID NO: 4515 - DNA, 550 bp, Glycine max
  unsure (1)..(550): unsure at all n locations
tgtaatcgattacacaagtnttgtaatcgattacctgaggggattnttanaaaataatttnnaaaagtnaaatttattcnnnngccccatgaatggccatcaaaagtgacttggaaacacgaatttaaagagagttttcattgcccaaacagttttatgctctcaaaagattaagagtttttctgaactgaaatgtcttatcctctcaaaaagattccttggtcaaccacttgcatattcaataaggaattttgattgatcttcattgtacaatctatctcttttaagagagatttcttcttctcttcttcttatttctgaaaaaagatttaagagaccgtgggtctcttgttgtagagaattcttgaacacaagggaagggttgcccctgtgtggttcagactttgtagaaggagttttacaaagaagagtgaaaatctcaagtgtttgcttgaggactagacgtangcacgagaagtggccgaaccaatatanatcaaagttgcatttctctcttctctaaacttctttttttattggtatttatctt

SEQ ID NO: 4516 - DNA, 563 bp, Glycine max
agctttaatgaatttaattttttttatattaaattttcatttttaattcaaatattaactacctatattttgaaattaattctttttgatttattaaagaatttctcttttccactaaagctaaactacccattccattgctagtcttgtgttttacttgaaatgtttgaatattttttcttgtatcttttgcatgtaatgattttttgttgttattagcttgttaattatacctttgattgagaatgatggtgtgtttagaattagattagattataacttttgcatagtattcattaattctggattataatttttatttttgtgcatcttatctttaatttctatatagtataaattataaatttttgaatctataatctctggtatagtggttatcctgctacacatggtatagtgtttttggggccagccatgccttatcatgatcccagatttatgatattaccctttcatttatttctaagttggatgacttggatctaaactatcatcatcttttgagctgcagttaaacatgtggatttaatattgataaataa

SEQ ID NO: 4517 - DNA, 535 bp, Glycine max
agcttcaggctgctcaattgctccaggttgctgcatggaagggcaaaggtctgtatggtggtcagcagaggagcacaagccacaaacccttacaacaggtacatatttctgatttaaggccagctgggttaccaagttaaccaatgcatccagtttgccttcaggcttcttagtctcagatgatgcagctgagtttgtagctacctcatgcactcctctaatgactatggcatcatttctggcgctaaactgctgagagttggaagccatcttctcaattaaatttctggcttcagcatgagtcatgtctccaaaggctccaccactggcagcatctatcatacttctctccatattactgagtccttcataaaaatattggagaagaagctgctccgaaatctgatggtgaaggcaactggcacataattttttaaatcgctcccagtactcatacgggctctctccactgagttgtctaatacctgagatatctttcttgatggctgtggtcctggaaacacggaaaaatttt

SEQ ID NO: 4518 - DNA, 577 bp, Glycine max
agcttagaatgcagaagaagcagcattcaatttaataatgttctttaaacatgccagacaaaattgattgcaataaaataaatgagataagagaagagagaatgcaaacatagttttatactggttcggcaaagtccgtgcttacttccaatactcaagcaacccgcttgagattttcctttctctttgtaaattcctttacaacttctgaaccacacagggacaactcatcccttgtgttaaggaattcttacaacttaagagaccctcagtcccttaatcaatctctttgaatgagaagaaagaaagaagaattctctcttgaagaaaaggatattacaattgaagtccatggagaaactcttaatggatttgcaagtgtttgcctaagagtttcttttgagagagcatttggcaatgaagttagatgtgccatcattttcttctatttcttaaaccctttttgcaccattttaattattgattagtcttaattgcaaattaattaggcagttttattatttgggctcatttaactaatttgatgtttttatctaattttagaaataatgaaaca

SEQ ID NO: 4519 - DNA, 541 bp, Glycine max
  unsure (1)..(541): unsure at all n locations
tctcgatatattatgtgcctgaatcggacttnngttnnaaaaannnnnnnnannnnaatnnntnnaaannnnnnnnccccnnnttcgagtgtctcgatatattatgcgcctgaatcggacttttgtgtgacaagttatgaacatttgaatttctcgagacctttcggttttcaattaagatcgtctcgatatgtgatgcgccagaatcggacttccgtgtgacaagttatgaccattggaatttatcgagaccttccgatcttcaatttcgaaggtctcgatatattatgtgcctgaatcggactttcgtgtgacaagttatgaacattggaatttctcgagaccatacgttgttcaatttcaagcgtctcgatatattatgcgcctgaatcggacttccgttagacaaggtatgaccttttgaatttctcgagagcttccggtttttaatttagagcgtctcgatatgtcatgcgcccgaatcagacttctcgggtgacaagttatgaccattggaatttttcgagagctttcgatgttc

SEQ ID NO: 4520 - DNA, 389 bp, Glycine max
agcttctcgatatattatgcgcctgaatcagacttccgttacaaaagttatgaccatatgaatttctcgagagccttcgttgttcaatttcgagcgtcttgatatagtatgcgcctgaatcggacttccgtgtgataagttatgaccatttgaatttgtcgagagcttccgattttcaatttagagcttctcgatatattatgaacctgaatcggacttccgtgtgacaagttatgaccatttgaatacctagatagcattcgttgttcaatttcgagcgtctcgatatattatgcgcctgaatcggacttccgggtgacaagttatgaccctttgaatttcttgagagcatccgttgttagatttcgagcgtctcgatatattatgcg

SEQ ID NO: 4521 - DNA, 394 bp, Glycine max
atgatattgcagaattttagaacaaatgcacattcatggacaagattctacaggaaaaagagaaggaagcaatgaagatccaccagtagaagtcaaagcaaataatgattttccaagagagtgaaaaacttcaagagatcatccccttgacaacatcattggtgacatctcaaaaggggtaactactagacactctctcagagatttatgcaataacatggcttttgtatctatgatagaacctaaaaatttaaatgaagccataatagatgaaaattggataatagctatgcaggaagaactaaaccaatttgaaaagaatgatgttgggagttagttgaaaaacctgaaaactatccaatcattggaacaaaatgggttttttaaaataaat

SEQ ID NO: 4522 - DNA, 464 bp, Glycine max
  unsure (1)..(464): unsure at all n locations
tccgttattcaattttgagcgtntngatatatcatgnggccccttntcannnnnnnnnnnnnaaannnatggnngnnngaannngcccaaaaattcagtggtcaatttcaaaggtgtcgatatatgatacacgtgaatcagacatccgagagaaaagttatagccatttgaatttctcgagagcgtctgttggtcaattttgagcgtctcgatatatcatgggcatcgatcatacattcgagtcaaacgttatggccgtctgaatttgccgagagctttcgtggtcaatttcaagggtctcgatatatgatgcacgtgaatcggacatccgagtgaaaaaatatagccttttgaatttctcgagaggttccgttgttcaattttgagcatctcgatatatcatgggcgtcgatcatacattccagtcaaaagttatggccgtttgaatttgccaaagcttccgt

SEQ ID NO: 4523 - DNA, 348 bp, Glycine max
  unsure (1)..(348): unsure at all n locations
ttgagcagaatnaaangacaataaatttttactccnanggnnnannngnnnnnngnnngnatnnagaagttcgnnccccnnanaaaagctctgagcagtatcaaacgacaataactttttactcggatgtccgaaagaatcccgtaatatatcgagacgctcgaaattcaaaattgaagctttgagccaaatctaacgacaataactttttactcggatgtccgattgtgtcccgtaatatatctagacgcacgaaattcaaaacagaagctttgagcaaaaatcaatgacaataactttttactctgatttgcgattgtgttccgtagtatattgagacgctcgaaa

SEQ ID NO: 4524 - DNA, 622 bp, Glycine max
agctttgatttcctttgttccggaaacctttcttttctcatgtgcacccaaacccaatctccgggttcaaagacaaccttctttctccctttgttggcttgtttaacatagcttttatttttcctctcaatttgatctttcactctctcatgaagcttcttcacatagtccgcctttgcttgaccttctttatgcttaaaaacagaaacattaggcataggcaaaagatcaagaggagttagtgggttaaaaccataaacaacttcaaaaggagaacaattagtggtgctatgaacagctctattgtaagcaaattcaacatggggtaaacaagtttcccaagtttttaagttcttcctcaaaattgtcctaagcaaagttcccaaagtcctattaacaacttccgtttgcccatcggtttgtgggtgacaagtggttgaaaataacaatttagtgcccaacttgctccacaaagtcctccaaaaatgacttaggaacttagagtccctatcactaacaatgctctttggcaaaccatggagtctcacaatctccttgaaaaacaaatcagccacataggaagcatcatcaactttttacatggaataaaatgagccatttt

SEQ ID NO: 4525 - DNA, 415 bp, Glycine max
  unsure (1)..(415): unsure at all n locations
atgtttcatttgagttcaatgctatggcacagagatgggacaccatcaaagtggacgacctcaagatacaaaggaatgaatttgtggctgtgaactgcatgtttcagtttgagcatctgctagacgagactgtggtgttgaataatcccagggatgctgttttgagattgattaagaatgcaaatcctgacatatttgtgcatggcattgtcaacggatcctatgatgtaccattctttgtgtcatggttccgggaggctctctttcattacactgcattgnttgacatgcttgacaccaacgttgctcgcaagaatccatgaggttgatgtttgagaaggaattgtttggacgggagatagtgaacattatagcttgtgaaagttttgagaggggtgaaagagcacaaacatac

SEQ ID NO: 4526 - DNA, 408 bp, Glycine max
  unsure (1)..(408): unsure at all n locations
tatgctgcaaanatttataatagaccttcttcgcannnnannnnnnannnannaannnntnnnnnntttnaannnntccccnnaattcatgttggaggaatcatccaaatctgagatggacaagtccttcacaacaacaacagtctgtccctcattttcagaatgatgctgatccaagcaagccatatgttcctcttccaatacaacaacatcagtcacaacaaagacaacaagcaactgaggctccttctcaaccttccttagaagagttagtgaggcaaatgaccatccagaatatgcaatttcagcaagagacaagagcctccattcagagtctgacaaatcagatggggcagatggctactcagttaaaccaagctcagtcccaaaattttgacaaatgccttt

SEQ ID NO: 4527 - DNA, 445 bp, Glycine max
  unsure (1)..(445): unsure at all n locations
catcagaccacttccagggtgctggaactacttcacatggactngatggggcctatgcaagttgaaagccttggaggaaagaggtatgcctatgttgttgtggatgatttctccagatttacctgngtcaactttatcagagagaaatcagaaacctttgaagtattcaaagagttgagtctaagacttcaaagagaaaaagactgtgtcatcaagagaatcaggagtgaccatggcagagaatttgaaaacagcaggttcactgaattctgcacatctgaaggcatcactcatgagttctctgcagccattacaccacaacagaatggcatagttgaaaggaaaaacaggactttgcaagaggctgctagggtcatgcttcatgccaaagaacttccctataatctctgggctaaagccatgaacacagcatgctacatccaca

SEQ ID NO: 4528 - DNA, 453 bp, Glycine max
  unsure (1)..(453): unsure at all n locations
tgtagggttaaagtttcacgaatgtcacgtgctcatgcaacaattgttagtcgtggctatacgagacatcttgccaaacaaagtcaggttcacgataactcgcttgtgctttttcttccatgctatatgtagcaaagtgattgatccagtaatgtttgatgagttggaaaatgaggccgcaattatactctgccagttggagatgtattttccccctgctttctttgacatcatgattcacttgattgtgcatctggttagagaaatcaaatgctatggtcctgtttatctacggtggatgtacccggttgagcgatacatgaagatcttanaagggtatacaaagaatctatatcgtncggaagcatctattnttgagaggtacattgcagaagaagccattgaantttgttcagaatacttagagaaggctaaagctgttgggctttctga

SEQ ID NO: 4529 - DNA, 452 bp, Glycine max
  unsure (1)..(452): unsure at all n locations
cccggatctctaagcaccgcggctgcagctgatcaattgaggagagatgttcggaagtattcaactaccacaggaaagaaagttgttggagcaaaatgggtctttcacaacaaactatatgataatggtaaagttatgagaaacaaagcatggttagttgctaaagaatactcacaagaagaaagtatagactacaaagaaacttatccacctgtagcatgtctagaggcaatacatatcttactttcatttgcagcttataaaaatatgaagctatatcaaaaggacgtaaaaaatgcatttctaaatggcttaattcaagagtaagtttatgttgaacaatctccatgctttggaagtgaaacctttcctcaacatgttttcacactcaacanagccctatatggacttaagcaagctcctagagcttggtacgaaaaactaagttcatt

SEQ ID NO: 4530 - DNA, 387 bp, Glycine max
  unsure (1)..(387): unsure at all n locations
agctngaagctcaagaaaaagcttgaagatgttttagaagaagttntggcttttagatgttattagcagcttcaactaccccattcatcttgggcctgtatggcgtggaattatggtgttggatcctgaaatcctcacacatttccttcatcattttgttgttcagattggtggcattatttgtgataatcttcttgggcaacccataccggcagattatctctttcttaatgaacttgaccaccacactccttgtcacactggcatatgaagcagcttcaacccatttggtgaagtagtcgatcgcaaccaaaatgaagcgacgtctattcgaagccttggcctcaatagccccaatcacatctattccccacatagagaatgcct

SEQ ID NO: 4531 - DNA, 429 bp, Glycine max
agcttgttgtatagaaatcctcgttgaatgtgctttttacaccgaacaacatttcatttgtttcaaactgatcccatcccctagaaaaataaaaaaataattgtcaacgtaaaacaaaaacagaggagctattaagaactgcaataagaaacaaatgacaaaaacctggatataaataatggtagtagcaatgtcatatattccattaagcctcatcttaataagtaaagacctagcacaaaatcccctatttcagttttggaatgtcagaataattcataaccagattttatgccaatattctttcaataattccgagggcgagccctggtgcagcggtaaagttgtgccttggtgacttgttggtcatgggttcgaatccggaaacagcctctttgcatatgcaagggtaaggctgcgtacaacatc

SEQ ID NO: 4532 - DNA, 395 bp, Glycine max
  unsure (1)..(395): unsure at all n locations
tgtatttcttgtttgactacatataaggatatctccacaatctgttagtcttcaactaatttgctgttctctctgccagaaaataaaacatcaatacagagatagggctgctgatagaagaatattgcatggtggcttccgcatgggtccaggacagaagaatctgtcggacatttataatacaccatcttcacctcgtgatgattgtccacaagaagctaccgccaacgccttggagatgtcatttggagctggtagttatgctagacaacttctacnaagcatgggttggaaggaggtatcttcttactttcttatcatcanattactcccttttattttattgaagattctaagaactgctaatataatttcaactcctatcacaactttct

SEQ ID NO: 4533 - DNA, 413 bp, Glycine max
  unsure (1)..(413): unsure at all n locations
gcaagcttataatatatcgaanatgaacaacggatgctctcgtgatattcanatggacataacttttcacactgaggtccgattcaggtttataatgtctcgatactctcggggtaagcatcgcaccctctctagaaattcaaatggccattacttttcacacggatgtccgattcgggcgcataatatgttgagaggctcgacattgaacaacggacgctcttgaaactttgattggagcttaactggacacacggaagtacgattctggctactctcatgtcgagacgctctgtctgaaaacccttgatgccttagagaaaaagagatgcgcttttcttttacactatttaagcaatgccacatgtctccatttgagtggagcaaaaagggcccactttccctctttgaat

SEQ ID NO: 4534 - DNA, 326 bp, Glycine max
  unsure (1)..(326): unsure at all n locations
ctaagcttaatcggacattcgtgtganaagttatgaccatttgaatntctcaagagctttcgtgttcaattctgagcctctctacatattatgcgcccgaatcggacatccgtgtgaaaagttatgaccatctgaatttctcaagagctttcgatgtgtaatttcgagcgtatcgatatattataagcccggatcggaactcagtgtgaaaagtcatgaccatctgaatttcacgagagcttccgttgtgcattttcgagcgtctctatatgtgatccgcctgactcgcacatccgcgtgaaaagctatgaccatctgaatgtctc

SEQ ID NO: 4535 - DNA, 424 bp, Glycine max
  unsure (1)..(424): unsure at all n locations
agcatacctgcatgcatgcangcttcaactagtaaagcactttaccaactcgtgatagaatttgaaattgcccaaaataacgggaagatgatttgggattaattcatcgagccataattagctatctataagggcacaacttaacaaacacccaatccccctcagtaaagaatgtggccccatgatgcttatcaacaaccttattcatggattgttgggcacaaagcaaatgagcttttaattgatgcatagccttgtccctgtcaaacaatactgacgtgatagaacccactaatgtctctctggccaaaagcatagcacaaaaggaggtgatcaaccatagacgacctcgaagggagtcttctcgatggctgaatgcaaacaagtattttgtaccaatactctacccacggaagtcataaat

SEQ ID NO: 4536 - DNA, 364 bp, Glycine max
  unsure (1)..(364): unsure at all n locations
acggaagctctcgaganattcaaatgctcataacatttcacacggatgtccgattcagatgcataacgtatctagatgctcaaaattgaaaaacagaagctctcgagaaattcaaatggtcataacttttaacatggatgtctgattccgaagcataacatatcgtgacgctcacaattgaataagagaagctctcgagaaattcaaattgtcataaattttcacacggatgttcgattcggggataaaatatgttgagatgcttgaaattgagagataaaagctctcgtgaaattccaatggtcataacttttcactcggagttccgattcaagacacttgaaattgaccaacggaagctttt

SEQ ID NO: 4537 - DNA, 435 bp, Glycine max
  unsure (1)..(435): unsure at all n locations
agctntgatggtgtcgagaagaaatcacatgtttgtcatcatcaaaaagggggagaatgtgaatgtatgtatacatgattntgatgatgtcaaagaagaatctaacaaggctgcttcaaatgataagcatttgcttcaagaataattcaagattgcttcaacaaacaaagccttgtttcaagattcactaaagaccaagccttgccttaaaacaaagtgctttcaagacatgcaaggctctggtaatcgattaccaggaagtgtaatcgattaccagaagacagggttgagaaatagctgttgaaaaatgttttgaatttgaattttcaacatgtaatcgattaccatatgtctgtaatcgattaccagcaacgaaactttggaaattcaaattcanaagtcatatacccttcaaatataactgtgtaatcgata

SEQ ID NO: 4538 - DNA, 451 bp, Glycine max
  unsure (1)..(451): unsure at all n locations
gacctcagtgtganaagttatgaccactttaattttccgagagcttccgttgttcattttcgagggtctttatatgtgatgcgccttaatctaacatccgtgtgaaaagttatgaccatttgaatttctcaagagcttctgttgttcaatttcgagcctctcgacatattatgcgcccgaatcggatatccgtgtgaaaatttatggccatttgaatttctcgagagtttctgatgctttattatgagcgtatcgatatattataagcctgaatcggacatccgtgtgaaaagttatgaccatttgaatttctcaagagcttccgttgttcaatttcgagcgtctcgacatattatgcgcccgactcggaatccgtgtgaaacgtatgaccatctaaatttcgcgagagtcttcgacgtttaatttcgagcgtatcatatattataagcct

SEQ ID NO: 4539 - DNA, 417 bp, Glycine max
  unsure (1)..(417): unsure at all n locations
agcttatatatatcgatactctcganattattcatcggaagctgtcgagatattcaagtggccatgactcttcacacggatgtccgattcaggcgcatagtatgttgagacgctcgagattgaactacgtaagctcttgagatattcacatgggcataacttttcacactgatgtccgattcaggcttatactatatcgatacgctcgaaattgaacatcggaaactctcgagaaattgaaatggtcataacttttcacacggatgtcctattcggacgcataacatgtcgcgaggctcgaaattgagcaatggaagctctcgagaaattcaaatgcgcataacttttcacacggatgtccgactcaggcatataatatattgatacgctcgaaattgaacatcggatactctcgag

SEQ ID NO: 4540 - DNA, 445 bp, Glycine max
  unsure (1)..(445): unsure at all n locations
tctatagaacgttcattcctaatntctctgcaatngcatcacctctcaatgagatagtgaagaagaatgtggcatttacctgcggtgaaaaacaagagcaagcctttgctttgctcacagaaaagcttactaaggcacctattctagctcttcctgacttttctaaaacttttgagctagaatgtgatgcctctggagtgggagttagagctgttttgttacaaggtgggcaccctattgcttatgttagtgaaaaacttcatggtgccacccttaactaccccacctatgataaagagctttatgccttaataagagcacttcgaacttgggaacattaccttgtttccaaggaatttgtcattcataatgatcatcaatcacttaagttcattagagggaaaagcaagttaaacaaaaggcatgcaaaatgggtagagtacct

SEQ ID NO: 4541 - DNA, 433 bp, Glycine max
agctagctgccacggagttttccgactatgctcttgtgtggtggaacaagctacaaaaggagagagcaagaaatgaagagccaatggttgatacatggacggagatgaaaaagatcatgaggaagcggtatgtgccggctagttactcaagggacttgaaattcaagctccaaaaactaacccaaggcaacaagggggttgaggagtatttcaaggaaatggatgtgctcatgattcaagcaaatattgaagaagatgaggaggtaactatggctcgatttcttaatggtttgactaatgatatccgagatattgttgagctgcaggagtttgttgaaatggatgatttgcttcacaaagcaatccaagtagagcaacaattaaaaaggaaaggagtggctaagaggagttttaccaactttggttcctctag

SEQ ID NO: 4542 - DNA, 447 bp, Glycine max
  unsure (1)..(447): unsure at all n locations
nntgggactctgagcttgaggagggtagcaatggtcaacaaccaatgccaacaaggaggtgcagccattgcttggctcagaggaccccgcagtggagggcaggaccattaggtccaaagacactatgcaatgcatgtggagtgaggtacaagtctggtaggttgctaccagagtataggccagccaagagtcctacttttgttagctacttgcactccaattcccacaagaaagtcatggagatgaggatggctgttttctccaccatttctagtgagcagtagtagtggttgttacttattagaggtatatttctatgtaaaaaaaaaaaatcaaacttcaaattttatgaacaaaaaactatttggcaaacagagagatactgttaaggggagagtgcttaatgctatgatngattataggcacatttattatatgacttattat

SEQ ID NO: 4543 - DNA, 426 bp, Glycine max
  unsure (1)..(426): unsure at all n locations
ggcagggttaaagtctcacgattgtcacgtgctcatgcaacaattgttagttgtggctatacgagacatcttgccaaacaaagtcaggttagccataactcgcttgtgctttntcttccatgctatatgtagcaaagtcattgatcctatgaagtttgatgagctggaaaatgaggccgcaattatactgtgccagttagagatgtattttccccctactttctttgacatcatgattcacttgattgtgcatctggtcagagaaatcaaatgttgtggtcttgtttatctacggtggatgtacccgattgagcgatacatgaagatcttaaaagggtatacaaagaatctatatcttctagaagcatctattgttgagaggtacattacagaagaagccattgaattntgttcagaatacattga

SEQ ID NO: 4544 - DNA, 427 bp, Glycine max
  unsure (1)..(427): unsure at all n locations
agcttgaggatagagacttcccaagctatttatctctacttggatctattaggaatgaaggctcctacccttatttatactactccacctccacaatgaatggtggagattacatgtatcctagggtggagattaattctctagaatgctccacacattctaggagtctctacactcttctactctttttcatatccttccataaggttccagaaggttccacacatctctagaatattccagaggtttccacattctttcacaagcttctagagagttttacactactctagagttctccaggacgttctagaaaattctacacttttccagaaagctccaaaattttctagaacctctcgaattaaggagggatcccaacactttccagcaaatggtattcgaanaggctctgtgcaaaaaatgc

SEQ ID NO: 4545 - DNA, 439 bp, Glycine max
  unsure (1)..(439): unsure at all n locations
agcttgaaattcanaataagaagctcctagcatatccaaacgacaataactatttactcggatgtccacttgagtcccgtaatatatcgagacgctccaaattcaaaacggaagctcgtagcaaatgcaaaccgcaataacttttaactaagaagtccgattgagtcccgtaatatatcgagacgctcgaaattgaaaacagaagctccgagcaaattcaaacgagaataactatttactcaggtgtccgactgagtcctggaatatatcgagacactccaaattgaaaacggaagctcttatcaaattcaaacgacaataacctttntctcagatgttcgattgagtcccgtaatatatcgagactctccaatttgagaacggaagcccttatcaaattcaaaagacaataactttntactcggatgtccgattgagt

SEQ ID NO: 4546 - DNA, 338 bp, Glycine max
  unsure (1)..(338): unsure at all n locations
nttatccatggcttcatatggtggtgagcttcttcttgactcatcttctccttgaagtggcgtctccaatcatctttcttccttctccattccactgccatgatcttcaagaagcaaaggactccattgatgaagaagattcaaggcctacacaccccttgatggaagcttgcttgtgaagcttctatggaggctggatctttgagctgcaatgaggtccctcaatggtgattttacacgatggagatgcactggtagataaaggagatgacgtgagaggaagcaccttccactagggagtatgccatggaacaaagagcatgaccgccatgaaagtg

SEQ ID NO: 4547 - DNA, 448 bp, Glycine max
tatccatatcacacacagtcgaggtagatttacaattggcatcctcatcacttgtgtcacattcttcattgcattgcacatccggttcttccttcaaacttcaccaccaccatcatcatgggaaagttctatcttcaacaccactcacaatgagctcaattccacggtccataagcttggttcctcggtcacgtttcttccactcaaggatctccgttatgcacgtgcacctcttgaaggccacacatggttcatgagttccatgtatgacacacatgaagttggtgaggtccaataccagcaattcccatcagaaccatcacatggtaagcttctatgtctcaaaggatgcgacacgcatgtcgggtcatggaactcctatgctttggcatggcctgaggcattgccttataacaccaccttcatgaaggttaacttttgtgtcata

SEQ ID NO: 4548 - DNA, 440 bp, Glycine max
  unsure (1)..(440): unsure at all n locations
agctngaagactttgtttcaggactttngctttctctcttttttgccattagtgggcttaaaactaacctagggctcatccatggctcatacacctgggtaattcttattatagtcatttttttggcctgccttggtaaagttgttggaaccattttggttgcattgttttatgaaatgccaatacatgaaggagctgcccttggtttactcatgaacacaaaaggcctcgttgaaatggtcgtgcttaatgttgggaaggaccagaaggtgctaatactataatcaataatgttatattatatccttctattatcttcaatacataaagcattcaatactttgtttaacaaatatgaagaaaattatatgaggagaattatgctagtagctcaatcaattcctctctagatgagtggtttatacatgtngatcatttac

SEQ ID NO: 4549 - DNA, 458 bp, Glycine max
  unsure (1)..(458): unsure at all n locations
gggcatgtcanaaatatgcatgagggccaaactaggagaaattattgtatggtctggtatcactatggtcctggccaattttctcgtgatatataaccaagttttattaacattttcttgtaattggaaaaactcggttacacatcatgtggagattgattaggattcaggactaaagatatgaggtggagtcacatcatacaataatttctccgaaaatagagaaatggaagaaacatattgaggaaaaaataagttatatttataaaaaaatattctttaaattgtaaaatggaaacctttatttggtggctgactgatttgtaggtcacactttggagcagccttctcaggcatggcatatggctntttaactagtccaatacttcagttgaatgattcatcatcaggaactggtcaagaaggacttaaacttgttagaaaatatggtgattctt

SEQ ID NO: 4550 - DNA, 409 bp, Glycine max
  unsure (1)..(409): unsure at all n locations
ctactcttgttgactgttttcaagaaaaggtcttcttggttgcaaacactaaacacaagggaccaatgttccttgggttcattgcaagaagcaggatttacttcttggttgatcactggacacaaaagaccaacatcttttgggttcattgcaagaagtgggtacaacttcttggttgttatcactggacacaagggaccaacgttccttgtggttcattgcaagaagtgagaataacttcttggttgtaatcattgaacacaaaggaggggattcctttgtggttcattgcttgtcaaggattttacaaggatagtggaaatctcaagcacgttgccttgggattggacgtacgcacgggttgtgtccgaaccaatataaatccgngtttgcattctctcttccctta

SEQ ID NO: 4551 - DNA, 442 bp, Glycine max
  unsure (1)..(442): unsure at all n locations
agctnggtgatggtcataaggtgataacaaatgtagtgtgtataggggtcaatatgaagatggngggggattgaagtgattgtggatgcgttggtgttggagctagggggaatggatatggagttaggagttgcctggttaagcactcttgggaaggtgattatggattggaaggccatgactatgcaattttcttatgaaaatgagttggtgaaattgcaaggtcaaggcagtaaggtggtcagacaatgttatttgaactcctatcttgaggatactcatagcagaactgagctgggttggtggtgggttcatctacagtcaatggaagcaaccaagtcagtggttcccaaaggcttaaaacctatactagaagaattccaggaagtgtttggaaacaacattcagctacctcctgagaggagtcaggtgcatcggatta

SEQ ID NO: 4552 - DNA, 452 bp, Glycine max
acctttcatcatggcatgttgacataagctcaatagttgagggtaaaatttgtcaaaaaagaaataaaattcgacaaaaatataagagtttgagataaaatttgtcaaataaataatattatgatcttattaaaatgtttaatggtgcttaattttaaaaattttctaagttttctaccataggagctctttttttcaccccatccatgttgtcacatgtgggtgaaaagaggaaagagagggatgggatttctcttgctttaggcataacgggccaaagtgggaggcccacacgaagggttattagctcagtagtaaagtgtgtccttgataattgtgtcggcttggagtggagtgagacatgtcattgaatagcaaggagatagccacttcgttatgaaattagaaaagttaagagcccttcattcatttggataatttcgaatgaagat

SEQ ID NO: 4553 - DNA, 397 bp, Glycine max
agcttcaagaaaaagatggcctcagcaaactctttatttccagaagggaattctatcaatagacctccaatctttaatggagagggttaccattactggaaaacccgaatgcaaatttttattgaggcaatagatctaaatatttgggaagccatagaaatagggccttatatacccaccacagtggaaagagtttcaatagatggtagttcatcaagtgaaagaataactatagaaaaacctagagatagatggtctgaagaggatagaaaacgagtacaatacaacttaaaagccaaaaatataataacatctgccctgggaatggatgaatatttcagggtttcaaattgtaagagtgctaaggaaatgtggaacactcttcgattaacacatg

SEQ ID NO: 4554 - DNA, 437 bp, Glycine max
  unsure (1)..(437): unsure at all n locations
agctgggtccncaaggctntatgaagactcttctcaaaatctagaggtaaatctgggatctctatcagaaactatgctagaaggaacaccgtgtagtctaactatctcactgacgtacaagctagtcaacctctctaaagaatatctgatgtttattgggatgaagtgagcagatttggtcaacctgtctacaataacccaaatggaatctaaacctttgggggtcctaggtaaccccactacgaaatccatggagatgctatcccacttccactcaggtatctctaaaggttgcaacttccctgaaggcttctggtgttctatcttagctttctgacacactaggcatgcaaggacaaactcattaacttctttcttcagacccggccaccaaaacatctgcctaaggtcctggtacatcttagtcgctcccgggt

SEQ ID NO: 4555 - DNA, 446 bp, Glycine max
  unsure (1)..(446): unsure at all n locations
tgtatggtagaggaatagaagaatgggaatctactttggatcatgtatgaaaaaaatcctcctagagacatacacatggcacttaaaatatcctttgatgctctgggttacctcgagaaggaggtttttctagacattgcatgtttcttcaatggatttgaattagcagagatcgagcatatacttggtgcacatcacggttgttgtttgaaatttcatattggagcattggtggaaaaatctcttataatgattgacgagcatggccgtgttcagatgcacgatttgatacaacaaatgggtagagaaattgttcgacaggaatcaccggagcaccctggcaaacgcagtaggttatggtctactgaggatatagttcatgttttagaagataacacggtgagtaagactgagatcaatggtttgatcttcattnttagcattga

SEQ ID NO: 4556 - DNA, 221 bp, Glycine max
agctaggaccattctaaacctttgagtttctgccgccaataccgagcgtgtagatgagtcatgtccccgaatcggacacctgtgtgaaaagctatgaccattcgattttctcgagagcttccgttgatcaatttcgagcgtctcgagttattatgaccccgaatcggacatccgtgcgaaaacgtacgaccatgcgactttctcgagagctgccgctaggc

SEQ ID NO: 4557 - DNA, 427 bp, Glycine max
  unsure (1)..(427): unsure at all n locations
agcttctaaactttgtacaagaatgaagctctgataccacttgttagacaagtggcctcagatatcttaagaagggggggttgaattaagatattccaaactgtttcccctaattaaaaatctatttctctttttactcaagttatgaattcccttaaagacaatcttcttaaatattaattcaaacgaagcaacttgaatgtgaatataaagcaataataaataaaagagattaagggaagagaaaatgcaaactcagttttatactggttcggccacacccttgtgcctacgtccagtcctcaagcaacccgcttgagagttccactaacttgtaaattccttntacaagttctaaacacacaangacaatccttcctttgtgtttagagatcctttacaacaagagactcacagtctcttaatc

SEQ ID NO: 4558 - DNA, 431 bp, Glycine max
  unsure (1)..(431): unsure at all n locations
gctttgaatgcactattcaatggagttgacaagaacatcttcagactgatcaacacttgcacagtggccaaagatgcatgggagatcctgaaaatcactcatgaaggaacctncaaagtgaagatttccagattgcaactcttggctacaaaattcgaaaatctgaagatgaaggaggaagagtgtattcatgacttccacatgaacattcttgaaattgccaatgcctgcactgccttgggagagaggataacagatgaaaagctggtgagaaagatcctcagatccttgcctaagagatttgacatgaaagtcactgcaatagaggaggcccaagacatttgcaacatgagagtagatgaactcattggttctcttcaaacctttgagctangactctcggatagggctgaaaagaagagcaagaatct

SEQ ID NO: 4559 - DNA, 420 bp, Glycine max
ggatccttacactgcgctcagctaactcattcagctctatttacgactaacagcatcagaaaattatgcgttgattgctaagatcacattcatttcgagcgtctcgatatattacgggactcaatcagacatccgagtaaaaagttattgtcggttgaattggctccgagcttcaacattccatttcgagcgtctcgatatgttacgagactcaatcagacatccgagtaaaaagctattgtcgtttgaatttgctcagagattcaacattgaatttcgagggtctcgatatcttacgggactcaatcagacatcccagtgaatagttattgtcgtttgaattggctcagagcatcaacattcaatttcgagggtctcgatatattacgggactcaatcagacatccgagtaaaaattta

SEQ ID NO: 4560 - DNA, 438 bp, Glycine max
tcaacctagaggagacgaaccattccaagtgttggagaagatcaacgacaatgcctacaagattgacttgcctagtgagtataatgtaagtgccactttcaatgtgtctgatctatctctttttgatgcagatggaggagccttggatttgaggacaaatccttttcaaggagggagtgatgaggacataaccaagggcaaggaccatgaagcacttgaaggtcccatgaccagaggcagacttaaacaagcccaacacatcatagagacaaggctggtcatttgtatagctgtcattgatgatgattgaaggcccaagtggagaaagatgaaggcccagaggcagaggcactaccaagactactaattgttgctgaaggcccaaactaacttgaaggcccaagttaaataagttcttagttataatttaattttatt

SEQ ID NO: 4561 - DNA, 314 bp, Glycine max
  unsure (1)..(314): unsure at all n locations
caagctcgatcctgaaacaactttatgattatagacttgntgcttatgagtacatggctaatggttcattggataaatggatattcaacaagaacaaagaggaatttcagttggattgggatacaaggtataacatagcacttggaatagcaaaaggacttgcttatctacatgaagattgtgactcanacattattcattgtgacattaaaccagaaaacgtgctcctagatgataatttcagggttaaggtttctaattttggtttggctaagctcatgaaacgtgaacaaagacatgttttcacaacactt

SEQ ID NO: 4562 - DNA, 447 bp, Glycine max
  unsure (1)..(447): unsure at all n locations
agctntacatcttatctgttttattgtttcacggtttttaagtcttggatattcaacacctttcttgtcacttggatcatcttacatgtacccttccctggctgctgctaacgctgctgtgatttctgctggtgaagaaattgcgacgcagggattgccattggggatttgtcccctggtttgtttatttactggttcacgaaatggtatggtgttaggaaatgatactctatttttataaatgctatcctttcttaagcggacatgaaattaaactaatccattcatgaaccaatgtttctgatatcccatttatttttgcctaataaatgtttaaaagtgtcacttgtgctgacttttgaatccttcatctcctgtagtttgctctggtgcacaggagatatttaagcttcttcctcataccntctgtgatccatctaaactacg

SEQ ID NO: 4563 - DNA, 403 bp, Glycine max
  unsure (1)..(403): unsure at all n locations
agcttgaagganaactggatgcattggttaacttggtaacccagctgaccttgaataaaaaatctgtacctatcgcaagggtttgcggcttgtgctcctctgctgaccaccatacagacctttgccctttcatgcagcaacctggagcaattgagcagcctgaagcttatgctgcaaatatttacaatagacctcctcaacctcagcagcaaaatcaaccacagcagagcaattatgacctttccagcaacagatacaaccctggatggaggaatcaccctacccttagatggtccagccctcagcaacaacaacagcagcctgctccttccttccaaaatgctgctggctaagcagaccatacattccttcacaatccaacaacagcaacaaccccagaaac

SEQ ID NO: 4564 - DNA, 461 bp, Glycine max
  unsure (1)..(461): unsure at all n locations
cagcttgtcaagctacagcttatatccaatcttgagcaatctatgcaactcagtagggacctcaccaaccataagcacagacacatagttgatgtcctacacaggaacacggacctgtttgcttgatagccttctgacatgtagggaatccaccccaacattatctgccacaagctcatcatctgtccccaggccaaactggtatcacaatataagaggaagatgggagaagaatgatacaaatcggttagagaagaggtggacaagctcctcaatgccaacttcatcagagaagccagatattctacctagctcgccaatgtcgtcatggtcaaaaaggctaatgaaaaatggcaaatgtgaatcaattatactggtctgaatagggcgtgccncacagatgcataccttctgcccaacatcgatagactagtcaatggagtgtccgagttccaagtact

SEQ ID NO: 4565 - DNA, 403 bp, Glycine max
  unsure (1)..(403): unsure at all n locations
tgcactcaatgtagatgtgacccagatgaatctccgaaggacttttataatgtcacaagggatatacataaccaaaaattgactacaaattataaaggaggtctattntgttgtcaggacaacttacaatgcaagcaaatagagggttttcaaggttcaaggagaatggtttccttaagatacaaaattagttgggttgattggaacatataccaaataccagttaaggtttacatacttgattccaccgacaaagtgaggtcaaatggttccaaaatacttcatgattgtctggtagataagttnttcaagacagtactctatgataaaacaatatacttctcaatcttattagagtgagtgaacaaaagtaaatcttaattccttgcaggcagagtatacc

SEQ ID NO: 4566 - DNA, 415 bp, Glycine max
  unsure (1)..(415): unsure at all n locations
agcttgtaatcgattacacatatactgtaatctattaccagagaaaattntcagaanaatattctcaacagtcacatgtttttacttggttcttgaatggccatcaaaggcttatatatatgtgacttgagacacgaatttgctaagagtttttcagaacaaaagggtcttatcctcttaaaaagcaaaatcgttttatcctcttacaaattccttggccaaaacacttgtgattcaataaggatctatttgagtgctcaaattgttcaatctatctctttcaagggagattacttcttgtcttcttctttattctgaaaaaaggattaagagaccgacggtctcttattgtaaagaaatctgaacacaaaggaagggttgtccttgtgtggtcacatcttgtatacgctttaca

SEQ ID NO: 4567 - DNA, 445 bp, Glycine max
  unsure (1)..(445): unsure at all n locations
agcttggctcacacctatgtctctntaacatttactccaatgcatttagattagctaaaagactgaactcatgagtcatgaattactttaagatggataatgcaacctttctattgaacactcgatgctcggcgcatcggaagacgcaacatgtggttctgtcattgccaatccagacctaattgtcccatcaagcctaggaattagccattcttgtagttgttctttatctccatagcgcagtaatacctaaacgtaacgaactgctacgaaattagacaaaaatgcaccatagatagagcgcatgctaaatatgatcaacccacaagagaatccaattaagttcagtcagttattgatcaaccaagcaaatccatgagtttcatcttacctccatattacctggtgcacgtgcaccacaactaaacactcgtggagcccaaag

SEQ ID NO: 4568 - DNA, 442 bp, Glycine max
  unsure (1)..(442): unsure at all n locations
agctntgagagggagtttgggacttaccgagtactatagaagattcatttgcaactatggacaaatagctcgacccctagctgatttattgaagaaggaaaatttcaagtggactactaaaagtattgaggactttacccagttgcagcaggctgtcaccacagctcctgtactatcaatgccaaatttctcaaaaaaaatttccatataatgtgatgcatccggaaagggagtaggggctgtgttaactcaagaaaaaaggcctattgcttatttcagcaaggctctggcagattcaacactcactaaatcaatntatgaaaaggaattgatgaccctagttctagcaattcaacactggaggccttatctcttacgtcagacatttactgtngttactgatcagaagagtctaaggtacctcttggagcaaaaaataaca

SEQ ID NO: 4569 - DNA, 435 bp, Glycine max
  unsure (1)..(435): unsure at all n locations
agcttgaatcatgcagccactctgctcttcaatccactgcttaaatctccaaatatacacttgcgacctctgacttagacttgagaaaacaaatccagcccattctggtgaaatcatctataaagatgatgtaatatttactctctttaagcgaagcagtcctttgacgttcgaccaaatctgtgtgaatcaaatgtagcttctctgttgctcttcacgttgattgtttgaagggtaatcttgcttgcttaccatattgacatgcttcacaacttgttaatttataatctaagtgagggaagccatgaaccaactgctttcgttgcatgttcagcacaattgcatgatgaaaatgacctaaccttttgtgtcaagcctctgtactgtttacagtanctggataggctgcttgctcctcctttagtgggtcaaatg

SEQ ID NO: 4570 - DNA, 215 bp, Glycine max
  unsure (1)..(215): unsure at all n locations
cgagcgtcttcatatattacaggactcaatcagacatccgagtaaaacgttattggtgtttgaatgtgctcaaagcttcaaaattcactttcgagcgtctngatatattacgggactcaattagacatccgagtaaaaagttattggtcgtggaattggctcagagcttcaatattcaattacgagtgtctcgatatattacgggactcaatcag

SEQ ID NO: 4571 - DNA, 431 bp, Glycine max
  unsure (1)..(431): unsure at all n locations
agctntaggcaaattcaaacgacaataactttttactcggatgtctgattgagtcccgtaatatatcaagacgctcgaaattgaatgttgaacctatgagccaattcaaacgacaataactatttaatcggatgtctgattgagtcccgtaatatatcgagacgctcgaaattgaatgttgaagctttaggcaaattcaaacgacaataactttctactcggatgtctaattgagtcccgtaatatatcgagacgctcgaaattgaatgttgaacctatgagccaattcaaacgacaataactttctactcggatgtctgattgagtcccataatatatcgagacgctcgaaattgaatgttgaacctctgagccaattcaaacgacaataactctttactcggatgtccgattcagtggtgtaatatatc

SEQ ID NO: 4572 - DNA, 435 bp, Glycine max
agcttcaacattcaatttcgagcgtctcgatatattacggtacacaatcaaacatccgagaaaaaagttattgtcgtttgaatatgctcagaggttcaacattcaatttcgagcgtcttgatatattacgggactcaatcagacatccgagtaaaaagttattgtcgtttgaaatggctcagaggttcaacaatcaatttcgagcgtctcgttatattacgggactcaatcagacatccgagtaaaaagtcattgtcgtttgaattggctctgagattcaacattcaatttcgagcgtatcgatatattacgggactcaatcagacatccgagtaaaaagttattgtcgtttgaactagctcagagcttcaacattcaatttcgagcgtctcgatatattacgggactcaatcagacatccgagtaaaagttatt

SEQ ID NO: 4573 - DNA, 441 bp, Glycine max
agcttcttagtctcacctgatgaagatgaattcgtggctacttcatgcactcctctaatgacaataacatcatttctggcactaaattgctgggagttggaagccatcttctcaattaaatttctagctacagcaggggtcatgtcttcaaaggctccaccactggcagcatctatcatacttctttccatgttattgagtccttcataaaaatattggaggagaagctgctcagaaatctggtggtaaggacaactggcacatagtttattgaatctctcccagtattcatataagctctctccactgagttgcctaattcctgaaatatcttttctgatggtcgtggtcctagaagcagggaaatgtttttctaagaatactctcttgaagtcatcccagctcgtgatggaccttggagcaaggtaatataaccagtcc

SEQ ID NO: 4574 - DNA, 398 bp, Glycine max
agcttaataaagccacaagaaaagatcactactcatttcccttcatggatcaaatgcttgagagacttgcagggcaatctttctactattttttggatggctactcaggttacaatcagattgcagtagatcctcgagaccaagaaaagacagctttcacatgtccctttggtgtttttgcttatcgccgcatgccattcgggttatgtaatgcacctgctattttccaaagatgtatgatggctatttttgctgacatggtagaaaaatgtattgaagtcttcatggatgattttttgatttttggtgcatcttttgagaactgtttagcacatctagagaaagtgttacaacgctgtgaagaatccaatctggtgcttaactgggaaaaatgtcac

SEQ ID NO: 4575 - DNA, 413 bp, Glycine max
agctactgggtcacttggattatttcttgaggctaaaaattaaatatcttcctaacagatctatcaatgactcacaacaagtatgtgcgtgatttgctatcataaaacataaatggctgaggcacattctatctgcactcctatggttaccaactgcaaattatctaaacatggggctgatctatctcatgatccaacactctatatatcagtgggtgccttgcagtatgctatccttactagaccagaaatcagctttgctgttaataacgattgtcagaatatggttaatctcttggattctcactacgctgtggataaaacaatgttgagatatctcaagggtacacttggtcatggtctacttattcaacacgctcatgtttcaaaacctatcgcactttatgctttct

SEQ ID NO: 4576 - DNA, 292 bp, Glycine max
agcattgggccgcatcagcaacagtatattggtgtctgaatgctatgaaatgagcagccttgctcagcctatcaacaacaacaaagattacttgtttgcccaaagaattgggaagaccctctatgaagtccatgggaatgtgcttccaaatcaggatcatggactacaagtgggtgtagcaacccacgggaagcagaattatcatacttacattgctggcaggtagtacattgatggacaaaccttttaacgaccttagataaccctttctagtacaccaatgtcttgactc

SEQ ID NO: 4577 - DNA, 240 bp, Glycine max
cctatgttgttgtggatgatttctccagattcacctgggtcaactttatcagagagaaatcagatacctttgaagtattcaaagagttgagtctaagacttcaaagagaaaaagactgtgtcatcaagagaatcaggagtgaccatggcagagagtttgaaaacagcaagtttactgaattctgcacatctgaaggcatcactcatgagttctctgcagccattacaccacaacaaaatg

SEQ ID NO: 4578 - DNA, 437 bp, Glycine max
  unsure (1)..(437): unsure at all n locations
agctntctncactaagttgcctgatgcctgaaatgtcttttctgatggcagtggtcctagatgcagggaagaatttctccaagaacaccctcttaaggtcatcccagctgaaaatggacctgcgagcaaggtaagatagccaatcttttgccactccctccagagaatgaggaaaagcctttagaaagatatgatcttcttggacattatggggcttcatggtggaacaaacaatatggaaatccttaagattcttatgaggatcttcacctgtaagaccatgaaacttgcgcagcaaatgtattagtccagtcttgagatcatatggaacaccctcatcaggatattgaatgtacaagctttcataagtgaaatcaggtgcagccatctccctaagagtcctctcgcgaggtggaggttgagtcatgttctcagta

SEQ ID NO: 4579 - DNA, 315 bp, Glycine max
agcttaaggagcttgttttataccatacaagcctttgtttagtttgaaaacatgataagcgtagatagaactctcaaactcaacggttgttccacatatacctcttgcttgattagtctatctaggaacacactttctacgtccatttaatgcagcatcataccgtgatgggcaacaaaggacaataaaatgtgtatttcctctatacaaccaataggagccaaagttttagtataatagataccatcttgttgcgagtaaccttcggctacaagcttagccttgttcctcccaaccttacatgtttcatcaaac

SEQ ID NO: 4580 - DNA, 335 bp, Glycine max
  unsure (1)..(335): unsure at all n locations
caccgatcgtgtgatattggatgcaattgctctcatatgcccaatttaaccaagtcttgacgacacttcaaaccattctttgtcttgcctttaatggtaagaatggtcccaattgaactatcacagacatttttctgcacatgcatcacatcaatacaatgtctaacatcaagattggactagtaaggaagatcaaagaatagttaccttttcttccatatgtttggctcagacgatgctntctttngggtctgtccaaagacagctgtgatgtcattcacccgatcataaacttattttccttgcaatggatttggcacagtctcattttcctg

SEQ ID NO: 4581 - DNA, 288 bp, Glycine max
agacacactgctggcttctactgttagctataacagataccgagatctattctaaagatacacataattatgactcatcattataacactccccctcaagctggagcatataaatcatatgctccaagcttggaacatataacctgaatcctatgcccccttaagggtttagtcaaaatatctgctggctgatcactggagttaatgaactcagtgacaatatctttagacagtgatttctcccgaatgaagtgacaatcaatctcaatgggtttcgttctctcatgg

SEQ ID NO: 4582 - DNA, 395 bp, Glycine max
  unsure (1)..(395): unsure at all n locations
agcttctctgttcttggttaattattatattttgtttttaatccttgtatttggctatggttttatgacatttgaatacttagtatttcttttaatacttgcttactatgactgaacatgatgattttattgacttgctcttggttgcttatgattatgtgttttaaacttaattactttaataatatatgacttgtggtatgtacttacatttgatattgagctctatgttttttatttatttattcatatatgcttttttcgaatattatgaatgactttctggattatatgacattctatgaagtattatctttctaagattgatgaataggtaagccatcttgttcgattggtcctattctcgcgatttggnttatattatgacatatgaa

SEQ ID NO: 4583 - DNA, 429 bp, Glycine max
agctttcgagaaattcaaatggtcataagttttcacacgaatgttcgattcggtgacataactcatctagacgcctgaaattgaacaacggaagctctcgagaaattcgaatgctcataagttttcacaccgatgtccgattcggggacataatatatcgagacgctcgaaattgaacaacggaagctctcgagaaattcgaatggtcaccacatttcactcggatgcccgattcgggaacataatatatcgagacgctcgaaattgaacaacggaagctctcgagaaattcgaatggtcataagctttcactcggatgttcgattcggggacataacttatctagacgctcgaaattgaacaacggaagctctcgagaaattcgaatggccatacgttttcacacagatgtccgattctgggacataa

SEQ ID NO: 4584 - DNA, 274 bp, Glycine max
  unsure (1)..(274): unsure at all n locations
atgaattatccacattggcatgctgagaggctttgtccttcccaatatgtcctggaaacatggcaataccgtgccctttgtcctgngaaagagttgcagacctgcaaggaacattaccatgcaattctgtggagggtgcaacattaagattgctgggcttggctccatatagtgatgcagaacctgctgcagctggccaaaatggattcatcctcgcgattncgtggtgatacaaaatattgcgagcaatgtagcagtgggtggcacacctttt

SEQ ID NO: 4585 - DNA, 418 bp, Glycine max
  unsure (1)..(418): unsure at all n locations
agcttcctatacgcttactccagatataaccagatcaggatgcatgctctagacgaggagaaaacaacatttatcattgaagatgccaacttttgctacagggtcatgcctttcagtctaaaaaatacaggtgctacataccaatgactaatggaccgagtctttaaatagcagatcgggcgaaacgtcaacgtatgtggcggacctggaagaagtctttggggaactctgcanatatgacatgcgcctcaaccttgaaaaatatacttttagggtaggcgaaggcaagttcctcggcttcatgatcactcactgggggattgaagccaaccccgacaaatgcactaccatactggagatgtgtagcccaaccaacgtccaagaagtncagaagttgaatggtagggctagcatcctg

SEQ ID NO: 4586 - DNA, 354 bp, Glycine max
  unsure (1)..(354): unsure at all n locations
ttatgttaccttgatatgctaaaattgtnagaaggggaaacacgttccatgtcggccaagacttgggggagcaattggtcctcgatcttgtgatcatgttcctcacgtttaattctgtcttatgttgtgttttgcatgatacatgatatgccttacttttttcattttttattttgggatgtctcttacgagataaaggaattttgtagcctggtgaagaacctttgccaattgatccctggctcgtggttcctgacaagagcagatatgtcgatcaacaaaccttgaagatgcaagaaaatccagaggagtactaatacaagattgatcttaaaaacacttttaagtcacttg

SEQ ID NO: 4587 - DNA, 303 bp, Glycine max
agcttcgacatcgccacctagtcatcttgatgggtttctgtgatgaacattcacagatggttcttgtgtatgagcacatggctaatggcccctttcgttctcacctctatggctccaaccttcctcttttgtcatgggaaaagaggcttgaaatatgcattggtgctgctcgtggcttgcactatctccacactgatgcaactcaaaatattacacaccctgatgtgaaaacaacaaacgtcctgttacatgagaactatgttgccaacgcttctgacttcggtttgtcaaaagctgtcccac

SEQ ID NO: 4588 - DNA, 450 bp, Glycine max
agcttagaaacttgctattattaattgtctaattaatatctaacatcctcccttaattggacaattcttctgcacaccaagtcttgctcgcaatcttcaaaaatcttcaaatttgagagacttggtgaaaatatctgcaacttgatcttgagtcttcacatgagtcaattctactactttcttggcaatgcactctctaatgaaatgataccttgtatctatatgcttacttcgttcatggaacaccagattcttggcaagctcttgtgcagatctattatcaacatagatctttgtgctttccttctgcaacaagtgaagttccttcaacaatcttcttagccaaatggcatgacatgtgcaagaagttgcagctatatactcggcttcacaagtagaaagtgtcacaatgacttgcttcttagaactccatgtaaaaacacaatcacc

SEQ ID NO: 4589 - DNA, 450 bp, Glycine max
  unsure (1)..(450): unsure at all n locations
tgcaagctntgatagtgtcgagaagagatcacaagtttgtcatcatataaaagggggagaatgtaaatgtatgtatacatgattctgatgatgtcaaaagaagaaccaaacaaggctcatttgcttcaagattaatacaagattgcttcaacaagcaaagccttgcttcaagatttacttaagatcaagccttgccttaaaacaaagtgcttttaagccattcaaggctctggtaatcgattaccaggtagtataatcgattaccataagacagggttgagaaatagctgttgaaaaggattttgaatttgaattttcaacatgtaatcgattaccatatgtctgtaatcgattaccaacaacgaaacttttgaaattcaaattcaaaagtcatgacccttcaaattataactgtgtaatcgattacancaaacattgtaatcgattacc

SEQ ID NO: 4590 - DNA, 417 bp, Glycine max
  unsure (1)..(417): unsure at all n locations
tgcaagcttatccctagaggggatggaccttttaggttntggagaggatcaataacaatgcctataggttggacctcccagaagagtatggagtcagcaccacttttaacatttctgatttaactccttttgcaggtggagctgatattcatgaggaggaactaacagatttgaggtcaaatcctcttcaaggggaaggggatgatgcaatcctccctatgaagggaccaatcactagaaccatgagcaagaggctccaagaagattgggctatagctgctgaagaaggccctacggttctcatgaaccttagggtagatntttgagcccatgggccaaggttgggtccaattatctttgtacatattagactangatgtcattatatttggtcctcgtatatagggctccatattg

SEQ ID NO: 4591 - DNA, 457 bp, Glycine max
  unsure (1)..(457): unsure at all n locations
agctntgatggtgtcaagaagaaatcacatgtntgtcatcatcaaaaagggggagaatgtgaatgtatgtatacatgantttgatgatgtcaaagaagaatctaacaaggctgcttcaaatgataagcatttgcttcaagaataattcaagaatgcttcaacaaacaaagacttgtttcaagattcactaaagaccaagccttgccttaaaacaaagtgctttcaagacatgcaaggctctggtaatcgattatcaggaagtgtaatcgattaccagaaaacagggttgagaaatagctgttgaaaaaggttttgaatctgaattttcaacatgtaatcgattaccatatgtttgtaatcgattaccagcaacgaaactttggaaattcaaattcacaagtcataacccttcaaattataactgtgtaatcgattacacaaacattgtaatcgatta

SEQ ID NO: 4592 - DNA, 439 bp, Glycine max
  unsure (1)..(439): unsure at all n locations
gcttgcttctacaagggtctcgtctattccaaagtatcccatgagcccaccctcatgggtctctctcacaagtaatttcctaatggatccttgaggtatgcaaagctntccctctttgaacaaatactccatctccaaatagaatccatcttaggcctttttcccacaactctcgtaatgggagagaaatgttcatctaaagcatacaagtccctaatattatcaaatcctaaaatttgagctcctacggagcaaaacaatgtgtatctcctaaatagggcatcagctaccacatttgatcttccctttctgtatttgataacatatggaaatttctctaggtactctacccatattgcataccacttgtttaacttgctttgcccttcaatgtacttaactgattgatgatcactacaaatgacaaattccttggaaa

SEQ ID NO: 4593 - DNA, 446 bp, Glycine max
agcttagccagatagaatgtcaaagatggacgatactttaacacaatttatgcaagtatccagcacagaccagaagaagactgatgcatctattaaaaatctagaagttcaagtaggacaactggcaaaataactatccgaacaaggaagtggatctttctcagcaaccacacaggtcaacttaaaggaacattgtaatttaattacaacaaggttggggactatggttggtttgaaggataatgatgaaaaaagaataaaaaaagagttgaaaaagacaacgagaaaaatgatgaagtgatgactagtgaaaaagtggaagacaaagtggtaagtgaagaagagaagaagaaatcaaatgaacaaaccagtaataaaggtaaagctatagtaaaccatccaccaattgagcatcttccttatccgcaagctctgtcaaagaaaga

SEQ ID NO: 4594 - DNA, 464 bp, Glycine max
  unsure (1)..(464): unsure at all n locations
agcttattggtacagatggcacaatatcttgagtagatgaagtatgacttgaacaagcttaaaataaggaaacttgaacccattaaagacaacatctttagatatatatatctttcctataggtgaaagacacttaaatcctttgtgagaagtagaatatccaagtaagacacgctcatgagaccgaaattctagtttctgactattgtagggtcttaagaaaggatagcatgaacatccaaatgattttaagaaattataatcaagggtatgtttaaacatagtagtaaaaggaacttcaaaatttaaggatgaagtggcaacctattaatgagaaaaacaattgttgtaaattcaaattccctaaatntgagtggaagggaggcctgtttgagaagagtaagtcccaattctggaatgtgtctatgttagaattctattacaccactttaatggtgagtatg

SEQ ID NO: 4595 - DNA, 455 bp, Glycine max
agcttattggtacagatggcacaatatcttgagtagatgaagaatgacttgaaaaagcttaaaataaggaaacttgaacccattaaagacaacatctttagatatatatatctttcctataggtgaaagacacttaaatcctttgtgagaagtagaatatccaagtaagacacgctcatgagaccgaaattctagtttttgactattgtagggtcttaagaaaggatagcatgaacatccaaatgattttaagaaattataatcaagggtatgtttaaacatagtagtaaaaggaacttcaaaatttaaggatgaagtggcaacctattaatgagaaaaacaattgttgtaaattcaaattccctaaatttgagtggaagggaggcctgtttgagaagagtaagtcccaattctgtaatgtgtctatgttagaattctattacaccactttaatg

SEQ ID NO: 4596 - DNA, 468 bp, Glycine max
  unsure (1)..(468): unsure at all n locations
gggatccttacgtcacctgcggcatgcaagctgaaatgaacacggaagctctcagatatctagtggcataaattncacacagatgtccgattcggggaaataatatatcgagacgcacgaaattgaacaacggaagctctcgagaaatntgaatggtcataacatctcactcggatgttcgatccggggacataatttatcgagacgctcgaaattgaacaaccgaagctctcgacaaattagaatggtcgtaacttttcacgcgaatgttcgattcggggacataactcatctagacgctcgaaatcgaacaacggaagctctcgagaaatctgaatggtcataagttctcacacggatgtccgattcgggaacataatatatcaagacactcgaaattgacaacggaagctctcgagaaaatcgaatggtcataacgtttcacacagatgtccgattctgggacat

SEQ ID NO: 4597 - DNA, 450 bp, Glycine max
  unsure (1)..(450): unsure at all n locations
agcttccaaacaaaaantttcatgtaggtggaccttcttttagtaattctgacttaccgcagcctcctatccctattccattcccacctagagcaatgccaaacaaaaaaatggaagaagtggaaaaggagatcttggagaccttcagaanagtagaggtgaacatagctctgctagatgccatcaagcagattccaagatatgtgaagtttctaaaggagttgtgtacccacaaaaggaagttcaagggcaatgaaaggattagcatgggtagaaatgtgtcagcattgataggtaaatatgttcctcacattcctgagaaatgtaaggacccaggtactttctntataccttgcattattgggaacaataaatttgagaatccatgctagatctangagcatcagttagtgtcaatccttttgtcaatttcaattctttatctcttgg

SEQ ID NO: 4598 - DNA, 399 bp, Glycine max
agcttcataagagagtcaaaaaatctaattgagatgagaaataaaagctatgctaaacaagccaacaaagggagaaagaaggtcgtctttgaacccagagattgggtttgggtgcacatgagaaaagaaagatttccggaacaaaggaaatcaaagcttcaaccaaggggagatggaccatttcaagtgcttgaaagaatcaatgacgatgcttacaaagttgagctgcccggtgagtataatgttagttccaccttcaatgtctctgacttatctctttttgatgcagatggagaatctgattagaggacaaatccttctcaagagggagagaatgatgaggacatgacctagagcaagggcaaggatccacttgaaggacttggaggacctatgaca

SEQ ID NO: 4599 - DNA, 386 bp, Glycine max
agcttcgtcctttgtacgaagtaagtagagatacatatatcgtgaataatcatctataaaggtgataaagtattttggactacttgcatccatatctggacaacaaatatctgtatgtatgatttctaataggtttgagctcctctttgcatcgtttttagacttgttagtttgcttacccttaatgcaattcacacaagtgtcgaaatcagcaaaatccaaagtactaagtactccttcatttaccaatctcttaattctctcgatagagatgtgtcctaatctatggtgccacaacatagaggattcctcattcacaacacattgtttaaccctggcagtaaaatgcatagaattataagaagcatcattttgcaattcaatat

SEQ ID NO: 4600 - DNA, 406 bp, Glycine max
  unsure (1)..(406): unsure at all n locations
agcttataagccacaagtcctatcttttgcacatattgaaaagggacgtaaaatcttttagccaatttggaatattgacttccagtggccgttgactggtgttgaggtcgtagcttgaccaagacctgagttcctacttcaaattggacattgcgtctttgcttatccgcgctctccttcattcattgctgggccttgattattttctttgtcaaactggatagcaaggcatcatgctcagtcaaccatttgttggatcaagtggcctcggaataattaagaagggtgggttgaattaattatgaacgtgtcttgactaattaaaaatttattcttcttaatgttactagattcaattaggctctactaccaagntatacgatagtagagaacagaaataataact

SEQ ID NO: 4601 - DNA, 371 bp, Glycine max
  unsure (1)..(371): unsure at all n locations
agcttgtgcctctttatgtctgggatatgaatgtagcatatanatccaaagacccttatgtgctatgctgatggcttcttcccattccaagcttcaattggagtcttgtcttttacagacttagttggacatctgttgagtatgtaaacaacagcgtacactgcttcagcccagaatgtgttcggtagtcctttttccttgagcatcaatctagcaatctccataactgtgtgattctttctctcggacactccattttgttgaggagaatatgcgactgcaagtagtcgctcaatgccttcatcctcacaaaatctttcaaactcgcgagaggtgtactctttgtcgcgatcacttcttaatacttttat

SEQ ID NO: 4602 - DNA, 413 bp, Glycine max
agcttgtaggttaaagtctcacgattgtcacgtgttcatgcgacaattgctagacgtggctatacgagacatcttgccaaacaaagtcaagttaacgataactcgcatgtgctttttcttccattctatatgtagcaaagtcattgatccagacatgtttgatgagttggaaaatgaggccgcaattatactgtgccagatggagatgtatattccccctgctttctttgacatcatgattcacttgattgtgcatctggtcaaagaaatcaaatgttgccggcctgtttatctacagaggatgtactctggtgagcgacacatgaagatctcataaggcttcagagaatctattcgtcagaacatctattgtgagaggtcatttacaagaaccattgattttgtcaaatact

SEQ ID NO: 4603 - DNA, 376 bp, Glycine max
  unsure (1)..(376): unsure at all n locations
agcttgctaacccatggaagctcctaatatctcccacactttntggggtgggccattcttggatggccttgattttctcagggtccacttggaccccatttctaccaactacaaaacctaagaaaactatattatctacacaaaagttacacttctctatatttgcatagagggtgtttttcctaacgactgaaagaacttgtctgagatgtcctaagtgatcatctaggctcctactatacactaaaatatcatcaaaataaacaactacaaatctacctatgaaatcccttaagacatgatgcataagcctcataaaggtgcttggtgcattagtgagcccaaaaggcatcactagccattcatacaaaccaaa

SEQ ID NO: 4604 - DNA, 418 bp, Glycine max
agcttctgcactatcctttccccacttgaaaccctctttctttaacagattagtaagtggtcttgttatcctgccatagccttcaataaaccttctataatacccagccaaaccaagaaatcccttgactaatttcactgttttaggcacaagccatttcaacacaacatccactttcttcctatccatggtcacgcctgctccagaaatgatatggcccaagtattccaccttttttctaccaaagctgcaccttttgaaattggcaaagaactcattcagaatctgtagtgttaggactaatctaaggtgtccaaatgcgcctcccaactagcactatacaccaatatatcatgaacgaaaactaacacattttctgagaaatgcgtgtaaagtggaattcatagcacattgaaat

SEQ ID NO: 4605 - DNA, 455 bp, Glycine max
  unsure (1)..(455): unsure at all n locations
atagtctcatactgtttgtggtttttataagttttcacatagcagataatgactgttcaatactgaaggaataaagaanaataagtgactgtatgcataattacataccagaacaagtccaataatatttgtaggctgctcataatagacaggaactctgctatgccctttctccaatattggattcatcaaatccctgcttaataataagcattcagttggatgacaaaatgctgtataagatagaaaagctagtttgaacttgtaattnttttgagtcacaaatagagtccatacctatcaagctttacattaatatcaatagaaaatatatcagttatgggagtcatggcatcactagctatcttttcatagagtccttacctgtaggctgtaaggaatagaatagaagaanaaccaataccctcaaataatagatgagaaactcacctaat

SEQ ID NO: 4606 - DNA, 441 bp, Glycine max
agcttatatatcaaagatctgacaatgtagaagttgttggctactcagactcggattttgctagttgcgttgactctcacaggtcggcatctggatacatcttcatgatggctaacggagcaatatctttgagaagtgccgaacaatcattagtttctacttctaccatggaggctgagcttatttcattatgtgaagtggcatcacagggtatttgggtaaaaagtttcatagtcggactacaagtgatggattctattcatagaccattaaagatatatagtgataattcagctgctgtttctctagctaataacaataaaagtggaagtcgaagcaagcacatcgacattaagtatttagccatgaaggaatgtgtcatagcaaatgacatcatcttcgacaacatcattattgaactaatgattgcagatccattga

SEQ ID NO: 4607 - DNA, 452 bp, Glycine max
  unsure (1)..(452): unsure at all n locations
gctaacaataaagatcttctctatgatagtctataaaagattcagacataaaaatgcacaccatatactcacctcaacattatccccatacagattaagtatatggttttcattattaaaaacttgggcagggtacttgtttctagcattacatgccatgtcatctgctagcatgagtataatcctctcatccggtatttctagccgtttaactgtcctgaatgagaaagaagttaaagaccaataatacatcattgtcaagcataattcaaacaatttaaaaaagaaaaaaaggctaaagttgtatacgtacctatacaatgacagggtattggccatatgccgataattaaacctgaacaagggaagcagcacatttagtatactatgcatgccatacaacaagaaacctacatgtaaaatataattcanaatacctctgtaagacacat

SEQ ID NO: 4608 - DNA, 444 bp, Glycine max
tcattaggctatctatggcctcaaacaagctccaagggcttgatttgatagactcaaagagactcctactgaagtttgagttcatatccagcaagtgtgatcccactttgtgtactccaagggatcatctactatctacatgctagtatatattgggaaacatccaagtcccaaatcgactagagataaggccaatatagaatatataagtggggggcaaccctcatcctttaagctaacttttagggttgagttagacttgaacccacattctaagatgatattagaacttatcttagatctattaaaagggagtcacccaccatattatccatgctcgaagcacaaacgtgttgggcgtgaggggatgtattgtggaaaacccaagtcccacattggttagagataacgcccagatagactgtataagtgagggatcaccct

SEQ ID NO: 4609 - DNA, 395 bp, Glycine max
  unsure (1)..(395): unsure at all n locations
ntacattactcctcatgcttctcaccatgtctaataaggttctatttcttcgttctgccacaccattctgatccagagaaccaggcatagtgtattgngcaacaatcccatgttcttgaagaaatttcgcaaatgaacctggtgcttgtccatcctctgtgtatctaccatagtactccccaactctatctaatctcacgatcttaatttgttttccacattgtttctcaacttcagccttaaaaactttaaaggcatctaaagcttcattcttagaatgaagtaagtagagatacatatatcgtgaataatcatctataaaggttatgaagtatttcggactatttgcatccatgtctggacaacatatgtctgtatgtatgatttctaataaa

SEQ ID NO: 4610 - DNA, 235 bp, Glycine max
  unsure (1)..(235): unsure at all n locations
cttgattgcctaggtgtggaccctcaagtgcaatcctccattctncactcttntcggagccccatgaatgtcattgcctagcgctattcatgtgtcctccatcttcgagtctggagccccgcggatgtcattgcctaacactgttcgctaattctccattctccacttttattcggagctccatgaatgtcattgcctaccgctgttcatgtgtcctccaccttcaagtctggag

SEQ ID NO: 4611 - DNA, 432 bp, Glycine max
agcttgaggttaatcgtaaaactgcaaagacatgaccttgtgagaggtttaccaagaatgtcatacaaagttgatttactttgtgaagcatgtcaggagaggaaacaaattaaaacctctttctcaagcaaaaactctatttccacctaaagaccacttgaattattacatatcaatttgtttggtccaactagaacaacctctgtcagtcgaaagagatatagtctggtagtagtggatgactactcaagatggacatgggttatgttccttgctcacaagaataattccttagagatcttctttaaattctataaaaggattcaaaatgaaaagggagtatgccttacttcaataagaagtgatcatggtggagagtttgaaaatgagaactttcatctattttgtgaagaaaatggaattctttataac

SEQ ID NO: 4612 - DNA, 454 bp, Glycine max
  unsure (1)..(454): unsure at all n locations
taagcatgataaagatattgagcatatatgtttcaaagatattaatgtttacatgattgatatgaaacaacaattatctgattatgggattgtattataccatattcccataaaatgtgacaacacaagcgccataaatatatctaagaacccaatctttcactctataaccaagcacatagaaattacgcatcattttcttagagatcatgtcctacaaggtgactgtgttctacaatttgtagataccaaaaatcaactcgcagatatcttcacaaaaccactacccaaagattccttctacaccattagaagagaattaagacttntagatgccaatgacttagacaaatgatctattctatgttatgatgactcatcacttgtttaatacacatgctcttattatgttttgtgaataatgtctgacatctatgtcgtcatttattttctg

SEQ ID NO: 4613 - DNA, 291 bp, Glycine max
  unsure (1)..(291): unsure at all n locations
agcttgtcaaatagggaagcgagttaaaaaattctttctaagcaaaaacgttgtttctacttcaaaatcccttgaactacttcacattgatttatttagtccctcaagaacaatgagtttaggtggaaattactatggcttagtaataggggatgactactcaaggttcacttggaccttgtttttgaaaacaaaaaatgaagctcttaatgctnttcgcacacttgccaaggtgattcaaaatgaaaaaggtctcaacattgtttcaaaataagtcttttgaaatatttt

SEQ ID NO: 4614 - DNA, 403 bp, Glycine max
  unsure (1)..(403): unsure at all n locations
ntgatgcaatcttctcatccttaatggtgttcctcatgttgtatgcatagttctccaaagcattctttgcgtcgaccttcttcttgtgctcctcatcctcggccttgtacttctccgcctcttggaccatcttctcaatctcatccttcgatagtctacccttgtcgttggtgatggtgatcttgttcttctgccctgtggtcttgtcctcggcagagacattcaagataccattggcatcgatatcaaagcagacagtaatctgaggaacacccctgcgtgctgggggaatgccagaaagctcaaatttacccaacaagttgttggccctggttctagctctctctccctcatacacctgaatcaagacaccaggttggttgtctgagtaagtagagaacac

SEQ ID NO: 4615 - DNA, 458 bp, Glycine max
  unsure (1)..(458): unsure at all n locations
ctataaaactaagcttcgacatgataatggagacacatgaacagcgctaggcaatgacattcatggtgctccgaacaaaggcggagtatggaggattggcttgagggtccacacttangcaattatgaaactcagctccaaactcgaaagtggaggacacacgaacaaccctaagcaagaacattcatgtggctccgaaaaaggacgagaatggaggattgccttgagggtcctctcttatgcaatcatgaaacacagctccaaactcaaaagtggaggacacacgaacagccctaagcaagaacattcatgtggctccgaaaaaggacgagaatggaggattgccttgagggtcctctcttatgcaatcatggaacacagctccagactcgaaaatggaggacacatgaatgacaacgcaattcattcatgtggctccggaaaatgatgagaatgga

SEQ ID NO: 4616 - DNA, 415 bp, Glycine max
  unsure (1)..(415): unsure at all n locations
tgtgcatccaataccctgatgaggatgtcctatatgttcttatacaggactgatccatgtgcttccaaagtttcatggccttgaaggtgaagacccacacaaacatctganagaattccatattgtttgctccaccatgaaacccccagatgtccaagaggatcacatatttctaaagacctttcctcattctttagaaggaatggctaacgactggctatattaccttgctccaaggtccatcacgagctaggatgacctcaagagagtattcttagaaaaatttttccctgcttccaggaccacgtccatcagaaaggatatttcacgtattagacaactcaatggagagagcctatatgaatactgtgagaggtttaaaaaattatgtgcccgttgccctcaccaccagatt

SEQ ID NO: 4617 - DNA, 462 bp, Glycine max
  unsure (1)..(462): unsure at all n locations
tagccctagaggggatggacccaatcctccctaggaagggaccaatcactagaaccatgagcaagaggctccaagaagattgngctagagctgctgaagaaggccctagggttctcatgcaacttanggtagatttctgagcccatgggccaaggttgggtccaattatctttgtacatattagactaggatgtcattatatttggtccttgtatttagggctccatattgtaggtagggtaccctagaaatataggatttttcaacccttgtatttttgggcacctagactagtttttgtattaggggtagttttgtaatttcacatgcactaagtggatatttgatgtgtgtggttggaaataaatttaattgaattggtagaagcccaatccaattaaattntagagggggaggtgagcatttgcttactacaccccattgccacatcatatagtcaca

SEQ ID NO: 4618 - DNA, 424 bp, Glycine max
agcttcccgccatggtattgaggttaatgattccattgcttcttttagatttaaggaaaatactgttgatcgatgtatatatctgaaggtcagtaagagtaaggttattttctaattttgtatgttgatgacattctgcttgcaactaatgatcttggtcttcttcatgaaattgagaagtttctctctggtaactttgaaatgaaagatatgggtgaggtaagatattgtgatatggatagaaatattccataatatatcacaaggattgttagacttatctcagaaagcatatatcaataaagtattagagagatttacgatgacaaggtatttttagcatcacctattccaatttagaaaaggggaaaatttagttttgcacaatgtcctagatatgatatggaatgaaaacatatgaaag

SEQ ID NO: 4619 - DNA, 451 bp, Glycine max
  unsure (1)..(451): unsure at all n locations
tanacattcaatttcgagcgtctccatatattacgcgactcaatcagacatctgagtaaaaagctattgtcgtttgaattggctcagaggttcaacattncaatttgagcatatcgatatattacgggactcaatcagacatccgagtaaaaagttattgtcgtttgaattggctcagagctttaacattcaatttcgagcgtctcgatatattacgggactcaatcagacatccgagtaaaaagatattgtcgttctaattggctcagaggttcaacatataatttggagcgtctcgatatattatgggactaaatcagacatccaagtaaaaagttattgtcgtttgaattggctcataggttgaacattcaatattgaccgtctcgatatattatgggactcaatcagacatccgagtaaaaagttactgtcgcttgaataggctcat

SEQ ID NO: 4620 - DNA, 377 bp, Glycine max
  unsure (1)..(377): unsure at all n locations
agctntaagccaattcatatttctataactntttactcggatgtctgaatgagtcccgtaatataacgaaacgctcgaatatgaatgtttaagctttgagccaattctaacgataataactttttactcggatgtccgatagagtctcgtaatatatcgacacgctcgaaattgaatgttgaagctctaagcctattcaaacaacaataacgttttactcggatgtccgattcagtgacgtaatatatcgcgacgctcgaaattgaatgttgaacctctgagccaactcaaacgacaataactctttactcggatgtctgattgatgtccgtattatatcgagacgctcgaaattgattgttgacctctgagccaat

SEQ ID NO: 4621 - DNA, 442 bp, Glycine max
  unsure (1)..(442): unsure at all n locations
tgaaggcctccatgtaattngaatggcacttgctgcatgacttttaattgatccgannaaatgtatggactagtangaactnttgacatacaaattntgtgtcacagtaactntntttttagaatatttacagcatttccttttcattacaaaccagtttattcagatttacaaaatttgaattaattaaaattatttggaagaaatgttcctgataaaatcgcgtcaataattntaaaatatcatactacaatatggaaaatgatttggaagaaattatttggagtatatgattggtgacatatcttcatggttatataagtgctttttacgaaatctctttaattgcgtggtaagaaaatgagttaaattcaattattttttttataaactntcctagatgattgatggaatttcaaataagcgcgttacaataattcac

SEQ ID NO: 4622 - DNA, 397 bp, Glycine max
  unsure (1)..(397): unsure at all n locations
agcttctatagaaggttcgttcctaatttctctattattgcatcacctctcaatgagctggtgaagaagaatgtggcatttacctggggtgaaaaacaagagcaagcctttgctttgctcaaagaaaagcttactaaggcacctgttctagctcttcttgacttttctaaaacttttgagctagaatgtgatgcctctggagtgggagttggagctgtattgttacaaggtaagcaccctattgcttattttagtgaaaaacttcatagtgccaccctcaactaccccacctatgataaagagctntatgccttaatatgagccctccaaacttgggaacattacctttgttccaaggaatttttcattcatagtaatcatcaatcacttaagtaca

SEQ ID NO: 4623 - DNA, 427 bp, Glycine max
agcttgaattataatataaacataagcatgatattaaataataaaaaaactataaagcttcacaaaaataaagaggataatacctctttaataataaatctcagaacgttagaaaattctccaactgttggcactccctctggctactcaaatgccacaaaggtctgtccacgtgaatcataaggaagagacctgagaggcttggagaacacctctgagaattcatctgcatctgaagcatccacagtcacaataacctgtaatagagaaaaataattacaaagaccttggagttggattattttatgaaaaattcgaagcatctataatattcattacatcttccaacaattgctctggtatcgtgtttgtgcacttgtactgaaacacaacatgcctatcataaatgtgtttaatgacattaact

SEQ ID NO: 4624 - DNA, 356 bp, Glycine max
  unsure (1)..(356): unsure at all n locations
cgtanagcaggaagtatgggtnaaggaaatgtaagaagagatacagacgatcgagacaaacaacacgtgggagttagtaaaccgtccccatggaaaatatatcattggggttaagtgggtctataagacaaagctcaaccctgatggcaccatacagaaacacaaggcaaggctagtagctaagggttactcacagcaacccagaattgactacaatgagacatttgcaccagtagctcgtcttgataccataagagctctaatagctcttgcgtcacataaaggatggagtatccatcaactagatatcaaattcgccttccttaacgacgtacttgaagaagatatctatgtgg

SEQ ID NO: 4625 - DNA, 447 bp, Glycine max
  unsure (1)..(447): unsure at all n locations
tatgctgcanatatatacaatagacctnctcaacctcagcatcanaatcaaccacagcataacaattatgacctctccagcaacagatacaaccctagatggaggaatcaccctaaattcagatggtccagccctcagcaacaacaacaacagcctgctccttccttccaaaatgctgctggcccaagcagaccatacattcctccaccaatccaacaacagcaacaaccccagaaacagccaacagttgaggcccctccacaaccttccctcgaagaacttgtgaggcaaatgactatgcagaacatgcagtttcaacaagagactagagcctccattcagagcttaaccaatcagatgggacaattagctacccaattaaatcaacaacagttccagaattctgacaagttgccttctcaagcctgtcaaaatcccaaaaatgca

SEQ ID NO: 4626 - DNA, 426 bp, Glycine max
  unsure (1)..(426): unsure at all n locations
agctntatctctgccattattaagatctgcccatccaccatatttggatgttaaaattctaacccataactgattttgattagaggataaagcccatatccatcttcccatcaaagctgcattaaatctggtaatatccttaatcccaagtcccccatcctccttggggaggcaaatgacctcccacttcacccacacaattttcttgaggtcttgagaacccccccacagaaaatttctttgtagagatatcaatttcagaactactctttgtggaattttaaaaaaagataggagatatatgggtagagcagttaatactgaatttatcaaagtaaccttccctgccattgataggattttctggttccacttagaataatttgcttcatattttntaatcagcggtttccacatcaagtagct

SEQ ID NO: 4627 - DNA, 445 bp, Glycine max
  unsure (1)..(445): unsure at all n locations
ccacccacacccctctaatattctaccgcttagactcactntatatgtaacaaaaataatctctttaaaattaattaaaaatcatgagttctggtaaatttatttctcatttaatataaatcaagagactcaatcatttgagaagcaaaacctaaaaaaaattataattttcaataaatcttaaccaattataaagagaatataattaaataacaatctataattaaataatcttataaaagtcaacaatttatgattaatttatataacggtgacacatcataataatattatactctttttattaaaattagctgttctatatctaatttcatgttatgcggatagcttaccatattatacgctccatcaacacttattaatttctttgttatccttctctttttatcacattntataacctattatacttacactgcattat

SEQ ID NO: 4628 - DNA, 440 bp, Glycine max
  unsure (1)..(440): unsure at all n locations
agcttgccaactccctcactcagtggccgagatatcttattatcctgcaggtatagttcattcaaattctgtagcagaaagatgctctctggaaggcttcctgacaaattatttttattaatagacagatgctgcagagaggaacaatcacccaaatttcgtggaatctcaccagaaaagtagttacttgacagtttaaatactcggagctgagtaaaagaggaacacatagttgtatctatagagccttcaaattgattattgctaaagtccatgatctccaagtttggaagatgaaacaagctgtgtggaagagagccagtgaagagatttttggaaagcttcaagactctaagttgatccaaacatgctaatgattcacagatcttccctgtaagttgtgtgcttncaagttccaagcgaaccaccctcgtgccaac

SEQ ID NO: 4629 - DNA, 434 bp, Glycine max
  unsure (1)..(434): unsure at all n locations
agctntcgagaaatacaaatggtcataacttttcacactgagctcttattcaggtttacaatatattgagtcgctcgaaattaaacatcggaagctctcgagaaattcaaatggtcataacttttcacacggatgtccgattcgagcgcataatatatcgagatgctcgacattgaacatcgaaagctctcgagaaattcaaatgggcataacttttcacactgaggtccgattctggcttacaatatattgagacgctcgaaattaaacatcggaagctctcgagaaattcaaatggtcataacttttcacacgaaggtcagattcgggcacataatatgtcgagatactcggaattgaaccacggaagctctcgagaaactcaaatggtcataacttttcacacggatgtccgattcgagcgcataatatat

SEQ ID NO: 4630 - DNA, 349 bp, Glycine max
  unsure (1)..(349): unsure at all n locations
agctggattggacctcagtgtgaaaagntatgtttatttngaattctcgagagctttcgttggtcaatgtcgagcatctcgacatattatgcgctcgaatcggacatccgtgtgaaaagttatgaccatttgagtttctcgagagcttccgtggttcaattccgagtatctagacctattatgtgcccgaatctgaccttcgtgtgaaaagttatgaccatttgaatttctcgagagcttccgtggttcagtttcgagcctctcgacatattatgcgcccgaatcggacatccgtgtgaaaagttatgaccatntgaatttctcgagagctttcgatgtttaatttcga

SEQ ID NO: 4631 - DNA, 420 bp, Glycine max
  unsure (1)..(420): unsure at all n locations
ctttacactacgtatntaaattggtttgacattaattntntattacaattaacattttatattttttaacctattaaaaaataatttttaaaatcaaattcttgagatgaatattctttattaaatcaactacgaaaatttacacttaacttatgagaaagaacaattgacctaaaactacaataacaattaaattattagagagaaattactctgttttatttaaggttatggtacttttaatataaatagaactttttttttttgcttaatgacatgagacttaactaatttattaaatatgttatttcatctagttaatatgagatcgatcaatattttcttatgagttgaagcaggaaaacttataaaagcataggttttacgcatgaattattgtaaaaatttacattatcttac

SEQ ID NO: 4632 - DNA, 444 bp, Glycine max
  unsure (1)..(444): unsure at all n locations
tganagtgtgtaaccaaccattntctcattgtagaacaccggtaacgtgtatactatcattgtgatcatctttttctctgtcattgaaggtgccacttgagctgtcaagtccctccacctctgggcgtattccttgaatgactcatgctcttttttacacatgttttgtagttgcgttctatccggagccgtatcataattgtactgatattgcctaacgaaggcaaccattangtccttccaagaatagactcgggaaggttccaagttagtgtcataccctaatttcgtccggggattattacttgacgacatgcaacctttgattggccgtttcaagatacttggcaccctttgttgcacaatatgtaagtcttgagacgcaccggaagtcaaaaggaagcagggttatgcgatccgtgaaattccgtaatgtggcggaaa

SEQ ID NO: 4633 - DNA, 439 bp, Glycine max
agcttgtgcttacaaaatatcattaaacaaattagattggcttaatactttaatgttatcatatgcagccacaacaaaagaaaatgcatgccaaattcacaagtcctgtgttgcaactgcttcgagcataattattggtttgcaatgatcacctacagtaaattgaccttttcaaggtgcatgataattttttcattcctagtgcatacaatcaactgaatccaacatacccggaatgccacatgtatcctccatttgtagtacgtggcggaaacattataacaaatataggattttgagaatttttggtagaagaaggtacacaattatgtatataattgtatgtggagttgtctgggggcggcggaaacatagggaaaaatggatggaaacatttgtcgagcacatgttggcccacatacaattgtgaatcttgatt

SEQ ID NO: 4634 - DNA, 443 bp, Glycine max
  unsure (1)..(443): unsure at all n locations
ngatacttggtactctattcacttcttcaactcttgtatttatatttcccacatcaactctcacagtgcctgaattccgcaacagtaataccattaacacgtctctctttcgattcacgctttgtttgattgattgccccaatggccgcgtgtggctatatatctgctgccaacttcaatcatcttgttggcgccagaaacttatccaaattcagttcttcggatgccacaatttcgttatcatttggcgggagcgattcaatgggtcttagtttgcgacccgctccaattcgtgctcctaagaggaaccatttctctcccttgcgtgtcgtttgcgtcgattatcctcgaccggagctcgaaaacactgttaatttcgtcgaagctgcttacttgtcttccaccttccgtgcttcttcgcgtccactaaaacccttgaacat

SEQ ID NO: 4635 - DNA, 455 bp, Glycine max
  unsure (1)..(455): unsure at all n locations
taacgcattntacctctaagggtcttgtaattgcataatggtggtcagtctctcgatgttcccaccatggtatagcttcaatctctgaccatttactatccatgttctgtgcggagtttctgactgagggtcaagtaattccacaactccatatggcttgacttccttcatggtgaatggtccagactatttagactttaatttgcttggaaacaactttaatcttgagttgaacagcagcacttgttgtcctggcctaaagtccttctttagcagcttcttgtcatgataagcctttactttttctttgtacagtctgaaagactcataagcattcaatctcatctcttccagctccaagagttgcaacttcctctnttcccctaatagagcctcatcaaaattcaggaatttcaaagcccagtatgccttatgttccatttctaccagaaagt

SEQ ID NO: 4636 - DNA, 380 bp, Glycine max
  unsure (1)..(380): unsure at all n locations
agctnttaatggaagtcaagagcatgatattttcccgataccgttgactagtgagcaggtatatcagcgggttcaacacctgaatactgtatttgggaagacctaaaagaaggataaaagtcagagttgcatatggaagaagaggtccattttttttatcttccgtactggtgtgatcttgacgttagacattgtattgatgttatgcatgtgaagaaaaatgtttgtgacagtgtgattaggacactccttaacattcaaggcaagaggaatgatggcttgaatacccgtcaagatctagctgatatgggtatatgatcacagttgcatccaaggtctgatgggaagaaaatttacttgcccccagcctgccatacttt

SEQ ID NO: 4637 - DNA, 423 bp, Glycine max
  unsure (1)..(423): unsure at all n locations
agcttaacaaaaacaaaaagttggtgaanaaactagcctataaatatcatgtccttttagcctctgaagcagtcatcaagcagattcctcgtctcttgggacctggtctcaacaaggcaggcatgttttattgttttggattttgaatctcttttggacattttagagagaacttggtgatttgcttgttttaataacttacatcggtcattgctgtgttatttttttgttaatcgttggtcacattctgctattacatgctctgtttttaagtacgaacattataaaatctttcaagtggctttctgtatcatatcgaatatggtatattagtcctttcttttccatctagtaagatgctctgttttaaagatttgatatcttctgggttttaaatttcaatgtcgctttagcttgatctat

SEQ ID NO: 4638 - DNA, 402 bp, Glycine max
agcttatgctgcaaatatttacaataaacctccttaacctcggcagcaaaatcatccacagaagaacaattatgacctctccagcaacagatacaaccctggatggaggaatcaccctaacctcagatggtccagccctcagcaacaacaacagcagcctgctccttgcttccaaaatgctgctggcccaagcagaccatacattcctccaccaatccaacaacagcaactaccccagatacagccaacagttgaggcccctgcacaaccttccctcgaagaacttgtgaagcaaatgactatgcagaacatgcagtttcaacatgagaccagagcctccattcagagcttaaccaatcagatgggacaactggctacccaattgaatcaacgacagtccca

SEQ ID NO: 4639 - DNA, 466 bp, Glycine max
  unsure (1)..(466): unsure at all n locations
gcttaacatcagaccacttccagggtgctggaactacttcacttggacttgatggggcctatgcaagttgaaagccttggaggaaagaggtatgcctatgttgttgtggatgatttctccagatttacctgggtcaactttatcagagagaaatcagacacctttgaagtattcaaagagttgagtctaagacttcaaagagaaaaagactgtgtcatcaagagaattatgagtgaccatggcagagagtttgaaaacagcaagtttactgaattctgcacatctgaaggcatcactcatgagttctctgcagccattacaccacaacaaaatggcatagttgaaaggaaaaacaggactntgcaagaagctgctagggtcatgcttcatgccaaagaacttccctataatctctgggctgaagccatgaacacagcatgctatatncacaacagagtcacactta

SEQ ID NO: 4640 - DNA, 442 bp, Glycine max
  unsure (1)..(442): unsure at all n locations
agctntgaagaactcatgctgccattttataagcacaactttnttttgtcattcataaattagcagaagagtttaattactgagtttgttcttagaacggattccagttcatgatgaacttataaatgacaacatagtcataacttgaatcttataatattcccaaattaataattctgaattatcttcggtgttattttaaataaataagcaatttgatattttcctatatataaagtttagaacaaattgccctgacattccttgtgattttttaaaattgcacacaatacttctatctaacgtttacactaatcttcttataggaatacatgtgtaatatttttcttagagaagaaatgtcaatataatctatttcaaacattnttttatataacaatctatttcaaacaattaaagatagggatttaaaggacaaaaa

SEQ ID NO: 4641 - DNA, 471 bp, Glycine max
  unsure (1)..(471): unsure at all n locations
tctaacaagttatcttagattaatggttntggttcaataattgagttgcgtaatttgactgtaagatgtcatttgctttcagcttgggattgttctgcctgggtacgtacttatgcattatatttggaagaaagactcgaatgtttccaggttctgaactatgatattgaagctgagcgtctagctaagcctgttgctggggaggacaaggtaattttctctctcttggataaaataagagatttattacaatgaagtgagtgggaaggtaatttcattaagctatgattatacttttgtgtgatattcaatcaagtgaaaagcatctatgacagtttttgcatggaaaaatgaatacagaaactaccttatctcctttacatgtaagatatataagtatttaattcttaggcattntattggttgttctttaggttctcagacctacatgactgtcataaatattaatag

SEQ ID NO: 4642 - DNA, 458 bp, Glycine max
  unsure (1)..(458): unsure at all n locations
ntgatggtgtcgagaagaaatcacatgtttgtcatcatcaaaaagggggagaatgtgaatgtatgtatacatgattntgatgatgtcaaagaagaatctaacaaggctgcttcaaatgataagcatttgcttcaagaataattcaagattgcttcaacaaacaaagccttgtttcaagattcactaaagaccaagccttgccttaaaacaaagtgctttcaagacatgcaaggctctggtaatcgattaccaggaagtgtaatcgattacccgaagacagggttgagaaatagctgttgaaaaatgttttgaatttgaattttcaacatgtaatcgattaccatatgtctgtaatcgattaccagcaacgaaactttggaaattcaaattcaaaagtcataacccttcacattataactgtgtaatcgattacacaaacattgtaatcgattaccagt

SEQ ID NO: 4643 - DNA, 461 bp, Glycine max
tcatgcttaactatgtatggcaaaacttcattactgttgttcaagacatacaagtgagcttgtaacaaatcttctacacttggagtgatcacctgcagtcctcttgaacccttaccacccactctgtcatcatgccgagactcaggaagcccaacaggtttagccttctctaagtattctgaacaaaatccaatggcttcttctacaatgtacctctcaacaatagatgcttctggacgatatagattatttgtatacccttttaagatcttcatgtatcgctcaaccgggtacatccaacgtagataaacaagaccacaacatttgatttctctgaccagatgcacaatcaagtgaatcatgatgtcaaagaaagcagggggaaaatacatctccaactggcacagtataattgcgggctcattgtccaactcatcaaacatgactggatcaatgacttt

SEQ ID NO: 4644 - DNA, 405 bp, Glycine max
cctttcttttctcatgtgcactcaaacccaagctgctggttcgaagacaaccatttttctaccttagatggcttgtgtagcatagctattacttttcctctcaatttgatctttgactctataatgaagcttcttcacatagtccgcctttgcttgaccttctttatgcttaaaaacagaaacattaggcataggcaaaagatcaagaggagttagtggattaaaaccataaacaacttcaagggttaagaaagaagaatcatcggatgacgccgatcgaacatttgctaatagacatcatccacatattattcagggattgaatagaagatacaatagccgacatcggccgttgtaaatcagcgactgatatttttcatccgacggtgcgcaatttcttttaca

SEQ ID NO: 4645 - DNA, 443 bp, Glycine max
  unsure (1)..(443): unsure at all n locations
taactaatcagatgggacaattggctacacagttaaatcaacaacagtcctagaattctgacagattaccttctcaatctgtccagaatcctaaaaatgtgagtgccattgcattgaggtcaggaaagcaatgtcaaggacctcaaccagtagcatcttccccattagtaaatgaacctgcccaacttcactctactccaaaaaaagaggatgacaaaaatttaaagagtaagttgcctaacaatttctatgcaggtgaatcttccactggtaattctgacttacagaagtagcatatccctcttccattccctccaagagcaatttccaacgaaaaaatggaagaggtagagaaggagatcttggaaacatttataagagtagaggtaaacatacctctgctagatgcaatanagcaaattccaagatatgctaaattcttg

SEQ ID NO: 4646 - DNA, 402 bp, Glycine max
tgtaggccttggatcttcttcatcaatggagtcttttgcttcttgaagatcaatggcagcaaaatggagaaagaagaaagatgattggagacgccacttcaaggagaagatgagtcaagaacaagcttaccaccataagaagcaatggataaaaacttgaaagtaggagaagaatagtggagggggaagaagaaaaagagcacagaattttatgcctcaaatgaagtctaaactttgaagtgtaattctcaaatgatcaaagttgaaaaaatgcatacacaaggcctctatttatagcctaagtgtaatacaaaattagaagaaaatttgaatttctattcaaatttcactcgaatttgaatttgtggagcccaattttgaggtcaaatttcactaattatg

SEQ ID NO: 4647 - DNA, 429 bp, Glycine max
  unsure (1)..(429): unsure at all n locations
tgtggaataaagcctaaacaagtatttatctttgctacctgttttgcagtcccttctcctgcagagaatgggatgttcaaagtcttaacatagtgttattgcaagcataatgatgccagctttttttgcctttcttgatgaaaatattgacttaaaaaattatcctgctttangtggaagtgactgatgctgctattcttgccctaatagaaaactactgccgagaagcaggggtcaggaatcttcaaaagcacatagaaaaaatttaccgaaaggtctgttaatttgtttttttaggtcaatacagtcaacttttagttactgacagtgaaaaggctatgttgtatatggttgaaaagacaaccactcatgatttgatggtttcaataattttggctgcttatttcatcactatatctgaatttgaat

SEQ ID NO: 4648 - DNA, 507 bp, Glycine max
tgatgtgtcattattttctcctatttcttaaccctttttgtcaccattttaattactgattagccttaattgtcaaattaattatgcagttttatcatttgggcctacttgactaattttgtgttttttatttaatttcaggagaattataagcaattggacttgaatccagaattgagcttggacttgaagagagcatacaattttatttcatcaaatcttatcttatccaaattttatttcatctagattttatttcgtccagattttatttcatccaatcttatcttatcttgtccagattttattttatttcgtttatgggcttggactcaaaacagatttgtaagctttggggttgaggacctatataacagcaccagggttttagtttagagagagtttttggagaggagaataattttagggttttgcaattccagtttttactggtcatgcccactggtcatgtagcaataaaatttgttttctgcaaattccgttttc

SEQ ID NO: 4649 - DNA, 449 bp, Glycine max
ttggggttgaggaccaatataacagcaccagggttttagtttgaggagtttttggaagaggaaaatgttggatcgagaggcctcaaaataattaaaaaagggggttgaattaattattcctaaacccttactaattaaaaattactcttttaaggcttttactaaattgttaaaagaacgaggagtagaagagaaacttaacaaaaagtaaaagcggaaattaaatgcacagcggaaagttaaagagtatagaagaaggaaacaaacacacaaggatttttatactggtttagcacaaacctgtgcctacctccagtccccaagcaacctgcggtccttgggatttctttcaaccttgtaaaaaaccttttacaagcaaagatccacaagggatgtacactcccttgttctctttgaatctagtggatgtaccctccactagaactgat

SEQ ID NO: 4650 - DNA, 423 bp, Glycine max
  unsure (1)..(423): unsure at all n locations
agcttctcaccccttggcccagggtaganaccctttaataggaaccaagttagggtgccttatccttccaagaaattgaatcatctcatccaattcctcaccccttgcagtgcacactggcctcagaaacctaagcagcctcaccttgttgctcctttgcaacaaagccttgtacagtgttccatagttggattttccaatcacttcaccaggagcatccaaaatgtcacatattgtaaggtcctctccaccttgaaagatcatcaaatcctccttctgtgccacatcctcctccttgtgttctgaactctcaatgtctttactctcatcatactttgacacccttctcttgcaatagaacacataaactgcaacaaaaactaaaaaagtagctgaagctagtccaagcactagtatcaacat

SEQ ID NO: 4651 - DNA, 524 bp, Glycine max
cagcttatgctgcaaaacatctacaacagacctcctcaatttcaacagcaaaatcacccacaacagaacaattatgacctctccaacaacaggtacaatcccgggtggaggaatcattccaaccttatatggtcgaatccttcacaacagtagcaacaacaataatagccttattttcaaaatgtcgttggcataagcagaccataagttcctccaccaatccagtagcaacaacagcaacaaccctataaatagcaaacagttgaggctcctccgcaaccttcccttgaagaacttgtgaggcaaatgacgatgcaaaacatgcagttttaacaagagaccagagcctccattcagagcttaactaatcagatgggacaattggctacacagctaaatcaacaacagttctagaattctgatagattaccttctcaatttgcccaaaatcccaaaaatgtgagcgtcattgcaattgacgtcgcgaaaacagcgtcaagaacctcaaccaccaacatttttcc

SEQ ID NO: 4652 - DNA, 413 bp, Glycine max
tagcttcaacaacagcccggaactgatccttacattatcccacagcagcttaaaacccaaccaataatgctgcaaggtcgacacaaattcccctcttcagtgaaccagtttttttgcccaatccttcctgcagcagcgacaattagcacaccaaaacacgcaataaccaaccattgacgaataaacatttcactgcttcaaatttctatctaacaaattcaaaagcccgagctgcaatttctatactctaaacaaaactgtaacctcaatttaaaatcaaatgcactctcaacccgaaatgcaacaatcagcaaacctaaacgccaaatcaccaacgaacaaacatttcaccgttttaaatttcaatctgccacaacaaatagcaattgccgccccaaacctacaatttcaaa

SEQ ID NO: 4653 - DNA, 389 bp, Glycine max
tggggtcccttgtttcccattcccctctcagctggtgaatcaccagtgctgagtccccgtatactttgagcagtttgacattagagtcaattgccgcctggacgaccaaggcacacgcttcatactcagccatattgttggtgcagtcaaaccccagcctggccatgaaaggtacacattgattgtttggagagaccaatactgctccaatgccatggcctagaacgtttgacactccgtcaaacaacacggtccacttgtcccgatcctcgtctagctttttctcaaataaggccataatgtcctcatcgggaatttgggatgcatgggctgatagtcgttgagaggctgctgacccaataatctgccaggcgcttctttatcgcctt

SEQ ID NO: 4654 - DNA, 529 bp, Glycine max
tgaacacctattagtatttatattttttaaaaaaaatatgtatgacatcaactcgccattggctcccaggttagtggattaagctaaatagaccaatacaaactcacgggttaagtcacctaacccattgatccaaagtttacattgtcacctctacattagtgactttttgttgcctttgtttcctttaagctttttgtgtataaaaatatattttttcttgtgtgaaatatttgtttgtaattcagttttaactatataataaaattgatggctaagtttaatatatatttaaacagacttgatcatttgattatgaggacttggataaaatttatattcttcaaagttttgttaatataactcgttaaacataattctatttttataaactatgaaaaaatacaaaatttatatgaattcaagctcaacacattaaaacaagtaccaaccaatactatcatacctttgacattttaaaaactaatggcaacaaaataatcaatgggatcataatagtctaaagatg

SEQ ID NO: 4655 - DNA, 479 bp, Glycine max
ttgttagcacatcctttgatgcatgatgacattattctcagtgttcaacaatccaacttggttttgaaaatgaagggtttagcttttgtattttgtgaaatgtgatacatatatattatccctttaaaatgtaagaaattactaattttaaaatgttagaaataaaaccaattttatctaaattttaaagaaccatttttttgtttgttgaataacaagagctaccagccccaactagaacataatacactcaatattttaactatagattaatactaataagatcttcttaaacaaattaagtctcaagtttaaaaaaaaactcttaattaatattatggggggtttattatataggctattggaaatctgaaagtttaattctattggaaggtcctttatattcaattaatggaagcaattaatttatatctcttgcatgccggaatattactttaatatcaatagtggcctttttt

SEQ ID NO: 4656 - DNA, 231 bp, Glycine max
tcataacatacttcttgacgatggagcttgtggtgactaataacttgtgtacaaacccatattttcgtcatgaagcatcttcggtacgctctattattgtcgtttttcggcgcaatcttcctattattattagccacagatttgtatggcccgctttctattgtctaacagcttggtattctgacgcatcaaacctatgtgaatctgacttgcttcttgtgaagagagcat

SEQ ID NO: 4657 - DNA, 350 bp, Glycine max
tcttagtctcggctaatgaagatgaattcatggctactttatgcactcctctaatgacaatagcatcacttctgacactaaattgttgggagttggaagccatcttctcaattaaatttctggcttcatcaggggtcatgtctccaagggctccaccactggtagcatctatcatacttctttccatgttactgagtccttcataaaaatattggagaagaagctgctcacaaatctagtggtgaggacaactggcacatagtttcttaaatctctcccagtattcatataaactctctccattgagttgcataattcctgaaatatcttttctgatggttgtggtcttg

SEQ ID NO: 4658 - DNA, 410 bp, Glycine max
agcttcaagtgatacagacagtgaaatcatttttgatgagcttgccacatcctatagagaactatgcatcaaaagcgagaagattcttcagcaagaagcacaactgaagaaggtcattgcaaatctggaggctgagaaggaggcacatgaagaggaaatctctgaacttaaaggagaaattggctttctgaattctaaaccggaaaatatgacaaagtcaataaagatgctgaataaaggctcagatgtgctcgatgaggtgctacagcttgggaagaatgttggaaaccagagaggacttggatttaatcataagtctggtggcagaacaaccatgacagaatttgttcctgccaaaaacagcactggagccacgatgtcacaacattggtctcgacatcatggaacgc

SEQ ID NO: 4659 - DNA, 387 bp, Glycine max
  unsure (1)..(387): unsure at all n locations
agcttntagattggtgtaccatgccacagctgttccgggtaagccgtcttgaaagaagtgcattaacagctttttcgtccgtagaatatgcccccatccttcggcaatacatgcgaagatgaccttttggacacgtcgtccctttgaatttatcaaaatctggtactttaaacttggggggaataatgatgtcaggtaccacacatagatccggtaaatacaagaacggatagttgccgaggccttctaccgctctcagcctctctttaagtagatcaatctttcccttgtcccttgcaaagggaagaagttccttaacgggtgcggatggagaccggacgtggcggactatgtctggttggggcaactcatggggggctgagtcct

SEQ ID NO: 4660 - DNA, 370 bp, Glycine max
agcttgatgataaaagtgagaagtacgtgtttgtgggttaccactcaagatccaaggggtacaagctctatactcccaatagtagaaagatcgtcataagtcgcgacgtggagttcgacgaagaagattgttgggattggagtgttcaacaagataagtatgattctcttccttattttgaagaagatgatgaaattgaacccacccatcatagaggaacatattacaccacctgcctcaccgacaccaaggctggatgaaacaagttcaagtgaaaggacaccgcgactaaggagcattgaagagatttatgagctaacccaaaacctaaatgacattaacctcttttttctttttggggactgtgagc

SEQ ID NO: 4661 - DNA, 429 bp, Glycine max
tcattccttttttcactcatgtgtccaagtctttgatggcatagggttgaattgttgacagcctcagtaactgctaccatatcctcatctgcaatcatgtaaagagatcctcgcttcttttcacgagccacaatgagattgccttttgttaccttccaagctctatatccaaaagtggtgtaatgcccctcattatccaactaccctatagatgttagatttccctttaaggcaagaatatgtcaaacattgtacagtgtccatagggatccactagaggtcttgatgtcaatatcacctcttccgacaatgtcaagagattttccatctgcaaggtaaactttctcaaatcttccaaaaatatagttagaaaataaatctttaaagggagtggtgtggaatgacgcacctgattcataatctatgaat

SEQ ID NO: 4662 - DNA, 414 bp, Glycine max
  unsure (1)..(414): unsure at all n locations
gcaagcttttacaaaaggtctgccccatatttttctatacttgtagcaccacttgttgagttggtgaggaactatgttctctcatgggaagatggncagcaaaggggtttttagtccttaccctactctaacatacccaacataactaatacatatgtttttattctttttacaggtgttgaggaaagaatccctgagtttcaagaacctctggatttgaggtcaaatccttttcaagggagagggaatgatgcaatcctaccccacaaggtcattggatagaagactccaagaagattgggccagagatggccctagggttctcatgagccttagggtagatttcgagcccatggactaaatatgagcccacttatctttgtacatattaaattaaggtttcattattttttg

SEQ ID NO: 4663 - DNA, 446 bp, Glycine max
agcttatgctgcaaatatttacaatagacctccttaacctcagcagcaaaatcaaccacagcagaacaattatgacctttccagcaacagataccaccctggatggaggaatcaccctaacctcagatggtccagccctcagcaacaatagcagcctgcttcttccttccaaaatgctgctggcccaagcagaccatacattcctccaccaatccaacaacagcaacaaccccagaaacagccaacaattgaggcccctccacaaccttccctcgaagaacttgtgaggcaaatgactatgcagaacatgcagtttcaccaagagaccagagcctccattcagagcttaaccaatcagatgggacaattagctaccccaattgaatcaacaacagtcccagaattctgacaagctggccttctaaactgtcccaaatcccaaaaat

SEQ ID NO: 4664 - DNA, 436 bp, Glycine max
tgacactaaacatctaggtaaacttccagtctaaagatttgatgataaatccactacatcaagctcataattgcacgaaagattctcgaaaagcatcccgggtaatttgttcccagaaatatttcagataagtaatagaaggaagtgacaacaatcctggttgaaaaggccccacaaatgaattcgatgaaatatccaatcgctcaagctgatagtatgaactcaatttagcccgaataccacacctgaagctattttttcttacaactagtataaccaacctgttaccgagctgacgaaactgcggtccaaaagcattatcattcaattcaagcacttgaatattcgtcaaacggcttaaatcacgcaccggccccataaagggaatattataaagtgaaaagggtctcaaattctccacattaccaagcgaatt

SEQ ID NO: 4665 - DNA, 529 bp, Glycine max
tgcattacctcttagtaggtggtgtaagctctattggagcttgtatgcctatgatcttcttcattaatggatttctttgcttcttggaagatgaatggccgcggaatggagaaggaagagagagaggagatgccacttaaaggagaagatgagtctagaagaagctcaccaccataggaggccatggataagagcttggaggaagaatgaggataatgaaaggagaggaagcgaagagcatgaaattttgtgctctaaaagagctctgaaatctgaagtttaattttcaaatcatcaaagttgaaaaaaatgcacacacatgacctctatttatagcctaagtgtcacacaaaattggaggaaaatttgaatttcacttgaatatgtggagccaaactttggagccaaaatttcactaattatgataagcgaattttaagtatggtgttgcccacctatcccagatcaattccaagattctccactaagtgtgcttaggtgtcatgaagcatgtaaagcatgaacgaca

SEQ ID NO: 4666 - DNA, 531 bp, Glycine max
tttcttaaaaatccaaaaagctagagcttatttacatacctctctaatagctaagctcatccccatgacaaaatacatgaaaatacaaaataaaaatccctattataaagactactcagaatgcctcgaaatacaaggctaaaaccctatactactagaatggacaaaatacaaggcccaaacaaaggaaaaccctattctaatatttacaaagataaccggcctcatacttagcccatgggcttgaaatctattctaaggctcatgagaaccctaagacctttccttggatctctggcctaatatacttggagtcttctatccaatgcccttgcggggtaggattgcatcaacttccttggcttcttgtacaaccattctttttagctctgagggaaaaccccaattcctaattttcccatccttaacttgtgttaccagggggataaaaggaacggctagctcctcggtttcattaccttcacaagactcattatccgatctatacccttttatcgcaacaaaaaaaaa

SEQ ID NO: 4667 - DNA, 456 bp, Glycine max
tcacacagtttatttttctcatacttgagttttggaagaccaatttctaagactttcctaactagaagaataagatgatgcatattaatgtgtgcatccctacgatgccacaaccaagaatcatctattttacttaccaagtaactcaactcatgaaatgatgcatgcttaacattcagcatatagatattacctattctcttgccaatgtggacaactttatcggacatggcttcacttgtaagacaacaatttttgttgaattcaattttgaagcctttgtcccaaagttgactaatgcttaaaaggttgtgttttagtccatccacatataacatgttctttatttgagttttgtgttgatttccaatatttccttctcctattatttttcctttgctattgcctccaaatgtgacatgtcctccatcttttgacacaaagtcagagagttta

SEQ ID NO: 4668 - DNA, 515 bp, Glycine max
agcttatgctgcaaacatttataatagacctccttagcaacaaaaccagccacaacagaatcattatgacctttcaagcaatagatacaatccaggttgaagaaatcatcccaatctgaaatggacaagtcctccacaacaacaacaacatattcctccttttcagaatgttgctggtccaagcaagccatatgttcctcctccaatgcagcaacagcagcagcaatcacaacaaagacaacaagcaactgaggcctcttctcaaccttccttagaagagttagtgaggcaaatgaccatccagaatatgcaatttcagcaagagacaaaagcctccattcagagtctgacaaataagatggggcagatggctacttagatgaaccaagctcagtcccaaaattctgacaaattggcttcacaaactgtacaaaatccaaaaaatgtgagtgccattaccttgaggtctggcaaccaaattcaagtggcctcaccagtagcagcacctgcacctg

SEQ ID NO: 4669 - DNA, 544 bp, Glycine max
ttgatggtgtcgagaagaaatcacatgtttgtcatcatcaaaaagggggagaatgtgaatgtatgtatacatgattttgatgatgtcaaagaagaatctaacaaggctacttcaaatgataagcatttgcttcaagaataattcaagattgcttcaacaaacaaagccttgtttcaagattcactaaagaccaagccttgccttaaaacaaagtgctttcaagacatgcaaggctctggtaatcgattaccaggaagtgtaatcgattacccgaagcacggttgagaaatagctgttgaaaaaggttttgaatttgaattttcaacatgtaatcgattaccatatgtctgtaatcgattaccagcaacgaaactttggaacatcaaattcaaaagtcataaccccttcaattataactgtgtaatcgattacacaaacattgtaatcgactaccagtggaaagtttttagaatatctgccaccgccacatcttttcattagatttgtgaatggtcatcaaaagcctaataataggtgacttggg

SEQ ID NO: 4670 - DNA, 273 bp, Glycine max
tacttaagctttatcctttggatctttaagtgtcgagtttggggaatttgatttatctcatccagcgccagtgttgcaacccacatactcacactgctttataaacatgaaggctgtcccagttttctaccaagttccggattgaagagttaattttgtgtagtttttgggactctgaactgtttttgtgagccaccttgatgtcaccctaacatcaagtgttggacctcactgtgtaaagttgatctctttgttagaaaagcacctctggtg

SEQ ID NO: 4671 - DNA, 248 bp, Glycine max
  unsure (1)..(248): unsure at all n locations
agcttggtcacntnctttttcaccacatccagaatgattatgttgagtcgcccgctgtggctgcctcactggcttatcttcatcctctaaaagcatcccatgcatgccggtagatgggctaatactaggaatgtttgctaaagtccatctaatggctttcttgtgcttcttgagaactatcaacaacctctcgtcttgcttaccagcaagggaggcacagatgatcactggacaatttttcttgtcct

SEQ ID NO: 4672 - DNA, 461 bp, Glycine max
agctttgatccgcctctatattttccacaatttcattttctctccagataatgagcttctggggaagggtagatgggacagccccaactccatgaatccacttccttcctaatagcaagttaaaattagccttagactgtatcaccacgaaaagagttggtcgaactatactgcctacagcaacatctacttgaatggctcccaaagaatagtcagctttaccctcataattccaaagcacaatgttgtgggcagatagatcagtgtcatgtttcccgatcttgtagagcatagatcgaggcattaagttgacagccgctccttcatcaatgagcactttgttgattccaacattctcaactcttgctctgatgaaaagaggtttgagatgactttttatctgaaaatctggcttttcgaaaaaagctaatttgctcttcccccacacccattattcataa

SEQ ID NO: 4673 - DNA, 355 bp, Glycine max
tcaattctgaatttcgagcgtctcgatatactatgggacactttcggacgtctgagtaagaagttattgtcgttttgaatttgcatagagcttttgttttcaatttcgagcgtctcgatatattacgagagtcaatcggacctccgagtaaaaagttgttgttgttagaatttgctcaaaacttcttttctgaatttcgagcgtctcaatatactacgggacacaatcgcaaatcagagtaaaaagttattgtcatttgattttgctcagagcttctgttctgaatttcgtgcatctcgatatactacgggacacaatcggacattcgagtaaaaagttattgtcgttagatttt

SEQ ID NO: 4674 - DNA, 387 bp, Glycine max
  unsure (1)..(387): unsure at all n locations
ttggagcttctctgatggactatgatatcttgacaatgtcacttgcaccaagtgatgaacatcaatctcaagtacagtttgccctagaaaggggactcccagcattgcttggtgtactaagcattcacaggctaacattcccttcaagatcatttgatatggtccattgctctagatgccttgtcccatggactgattatggtattactttaatcttttcacttaaacattaaatgtatgcattagaaaaaatatatttttttaatttcctacttccattctgagtgttggaaagttctaggtcccctgcgtcagttattgggatgctttatatatctaatgggcatttttatttagtgttaattggntttgacacggaatctaaca

SEQ ID NO: 4675 - DNA, 380 bp, Glycine max
tggagaggtttcttccattggtagagttcacttataataacagttttcactctaccattggcatgactccctatgaagctttgtatggtataaggtgtaggacacccctatgttggttagagcacggaaaaggcctcaccttacgaccagaagtggtacagtaaaccacttagaaagctaagctaatttaggaaaggatgagaactggtcagagtacgcagaaaagttatcatgataagaggaagaaagatctggaattcgacggtggtgatcatgtattcttgatagtcactccatggactggggttgggcgagcattgaaattccgaaaacttacacctcgcttaattggtcctttcctaaatcttaataaagttggc

SEQ ID NO: 4676 - DNA, 406 bp, Glycine max
agcttctgccactcactgttctaaattgagcctctacaacatgtcatgcgcagtgccaaaatcctttgtaaatatctcctatctagtcacactacatgttataagttagggcttgaatggttcttttccaaaagatatcttgcaaatatcaacgttgaagatgcttgacttctcagacaaacaagatcttgggggttctttgccaaacttcccacaacatggttctcttcatgacctgaatcttagctatacaaatttctcaggagagcttgcaagtgcaatttccaatttgaagcaggtatttgcaattgatctatcttactgccaaattaatggtacaccttctaattcattctcagaactcatccaacttgcttatctagacttgtcttacaataactttaca

SEQ ID NO: 4677 - DNA, 301 bp, Glycine max
agcttctcgatatattatgcgcctgaatcggatttacatttgaaaagttatgaccatttgaagttctcgagagcttccgttgttacatttcgagcatatccatatattatgcgcatgaatcggactttcaggcgataagccttgaccctatgaatttctcaagagctttcgatgataaattttgagagtctcgatatattatgagcctgaatagctgtaccgcgtgaaaagttatgacagtgtgagaccctcgagagatctcgttgtataattgagagagactaagtatattaagcgccgg

SEQ ID NO: 4678 - DNA, 444 bp, Glycine max
agcttatgcggcaaacatctacaatagacctcctcaacctcagcagcagaatcagccacaacagaacaattatgacctctccaacaacaggtacaatctcgggtggaggaatcatgccaaacagcatcaacaacaatcttattttcaaaatgctattgccccaagcagaccatacattcctccaccaatccagcaacaacaacagcaacagccccagaaacagcagacagttgacgctccttcgcaaccttcccttgaagaacttgtgaggcaaatgactatgcaaaacatgcagtttcaacaagagaccagagcctccattcagagcttaactaatcagatgggacaattggctacacagttaaatcaacaacagtcccagaattctaatagattaccttctcaatctgtccagaatcccgataatgtgagtgccatacattg

SEQ ID NO: 4679 - DNA, 443 bp, Glycine max
  unsure (1)..(443): unsure at all n locations
agctngtagggttaaagtctcacaattgtcacgtgctcatgncaaaaatgttagtcgtggctatacgagacatcttgccaaacaaagtcaggttagccataactcgcctgtgctttttcttccatgctatatgtagcaaagtcattgatcctgtcaagtttgatgagctggaaaatgaggccgcaattatactatgccagttggagatgtattttccccctgctttctttgacatcatgattctcttgattgtgcatctggtcagagaaatcaaatgttgtggtcctgtttatctacggtggatgtacccagttgagcgattcatgaagatcttaaaaggatatacaaagaatctatatcatccagaagcatctattgttgagaggtacattgcagaaaaagccattgtaatttgttcagaatacattcagaaggctaaacat

SEQ ID NO: 4680 - DNA, 443 bp, Glycine max
ttacacatatactgtaatcgattaccagagtagattcttataatatattctcaacagtcacatctttttatgtggttcttgaatgactatcaaaggcctatatatatgtgacttgagacacgaatttgcgaagagtttttcagaacaaaaaggtcttatcctcttataaagaaaaatcggtttatcctcttacaaattccttggccaaattacttatgattcaataaggaattatttgagtgctcaaattgttcaatctatctctttcaagagagatttcttcttttcttcttcttcattctgaaaagggattaagagaccgagggtctcttgttgtgaaagaattctaaacacaaaggaagggttgtccttgtgtgtttagaacttgttaaaggaacttacaagatagtggaactctcaagcgggtctgcttgtgactgaac

SEQ ID NO: 4681 - DNA, 433 bp, Glycine max
gcttagatgatgcagctgagtttgtagctacctcatgcactcctctaatgactatagcatcatttctggcgctaaactgctgggagttggaagccatcttctcaattaaatttctggcttcagcaggagtcatgtctccaagggctccacaccactggcagcatttatcatacttctctccatattactgagtccttcataaaaatattggagaagcagctgctccgaaatttgatggtgagggcaactggcacatagttttttaaatctctcccagtattcatacaggctctctccactgagttgtctaataccttagatatccttcctgatggttgtggtcctggaagcagggaaaaaaatttctaagaatactctcttaaggtcatcccagctcatgatggaccttggagcaaggtaatacagtcagtcc

SEQ ID NO: 4682 - DNA, 451 bp, Glycine max
  unsure (1)..(451): unsure at all n locations
ctaagctnggtacaattctctcatcctatcctccaactcccatgtagaatcaccctcatcggttccccactgcaccttcaccaacgcgatctcctttcctttcaacgacttcattcttcggtcagtgatcttctgaggttgtgctttataggtgaggttatccttcacctgtacctcgtccactgcaagaatatgtgatggatccgggttgtaccgtctcagttgagagacatggaacacagggtgcaaattcgataaactcggaggtaaggcgatatgataagctacaggcccaatcttcttcaaaatctgatatggacctagatacttgggtgtcaacttcctagccttgagagctcttccaactncggttatgggagaaaccttcaaaaacacatgttcttcttcctgaaaatctagtgggttccaccttctatcataatagctcttc

SEQ ID NO: 4683 - DNA, 355 bp, Glycine max
aagagcagtttccaacaaaaaaatggaagaggcagagaaagagatcttggaaacgtttagaaaagtagaggtaaacatacctctgttggatgcaataaagcaaattccaagatatgccaaattcttgaaggagctgtgcactaataagcggaagcttaaaggaagtgaacgaattagcatgggcagaaatgtcttcgcattgattggtcaatctgttcctcaaattcctgaaaaatgcaaagatccaggtacattcagcataccttgtattatagggaatagtaagtttgacaatgccatgctagatttatgagcctctgttagtgttatgcctctgtcgatttttaattctcta

SEQ ID NO: 4684 - DNA, 431 bp, Glycine max
gctttatctcagtagtagtataatgtgcttgatcatcatctcacgtcctataagcataatatatcaccctgcgcaatttatcaattttttgagcaaggacagcccccaatgcataatttgatgcatcacacataagctcaaaaggggctgtccaatcacgtgcctggatgatgggggtggtagtaaacgctcttttgaggcaatcaaaagcctctttgcatctgtcattaaagtcaaactccacctccttttgcaacaagttggacagtggaagggctactttgctaaaattccttacaaagcgcctgtagaatcctgcatgaccaagaaaagatcgcacctctcgcacacaatagggtgtaggcaattgcgaaataacacaactctttgcaggatctacttcaatacccttattggaaataatgtggcct

SEQ ID NO: 4685 - DNA, 432 bp, Glycine max
agcttaccagtgccatattcactgcaacttgctggtatataagatacaaagaaaatcacatgcatttgcaaataaacgtgatgatattctaactggacaatgttctgtcatgcattccaatattccatgatctttgctattatttttagtgatatatttatatatatgagatatgtgagtttgcgtttatgttttgaagataaggagtatggaccaagaactgtaaaagatttgaagttaattagtgccggataaatattggagaacaacagaacagtgggagaatgtcagagtcccctgtgtgatctacctggtggagttataacaatgcatgtggttgtgcaaccaccttctgtgtgagaagggttagtattactatatactcgtttatttataggcatgccacacagtctgtttactcgtatatacagc

SEQ ID NO: 4686 - DNA, 424 bp, Glycine max
  unsure (1)..(424): unsure at all n locations
tagaaactaagctggattcctanatgtacaactgancatggtgtttatataaatgtcatcaatactactaacttgactgtagtgtgcctgtatgtagatgacttgcttgtgacatgttataatgagactaaaattgccaacttttaaggagagatgatgagagaattcgatatgactgatttggaccttatttcttattttcttggaattgaattctagagagctgatgaaggagtgatcatgcatcaatggaagtatgcaagagatgtactgaagaagctcatcatggttgactcgaattctgcagacacatccactgccactggtgtgaacttggtgaaagatcctaatgaagaagacatagatgtactctgtatatacacatggtgtgctcactgaggtatctttagtgtactagacctga

SEQ ID NO: 4687 - DNA, 450 bp, Glycine max
  unsure (1)..(450): unsure at all n locations
ctaagctttagccactacagatatttcctcaaagatcccaacggttaaatcatggtaaattgtcttgtgaagttgaaaaccaaatttagagaagatccaacggttaacgaaggctggacagtgtttctaccgaggcagcttcatgtagttttctctagaagcttcattaagaggcttcctccagaagcttcattaagaggcttctagcacactacagacatcttctaaacgatcccaacggtcagatcatggaaaagttttttgtgaagttgcagaccaaatttcgagaagatccaacggttaatgaaggctgggcagcgtttttaccgaggcagcttcatgtagctttctctagaagcttcattaagaggctttctctagaagcttgctcgtggcttctatgagaagctctctgaagaggattctttgagaagctacatncttatctat

SEQ ID NO: 4688 - DNA, 424 bp, Glycine max
  unsure (1)..(424): unsure at all n locations
agcttgtaggattttgtgatagtggatttgccggagatgttgatgatagaaaagtactaccggatttgtattttttatgggtgattgtgtttttacatggagttctaagaagcaagacattgtgacactttttacttgtgaagccgagtatgtagctgcaacttcttgcacatgtcatgccatttggcttagaagattgttggaggaacttcagttgttgcaaaaggaaagcacaaagatctatattgataatagatctgcacaagagcttgccaagaatccggtgttccatgaacgaagtaagtatatagatacaaggtagcatttcattagagagtgcattaccaaanaagaagtagaattgactcatgtgaaaactcaagatcaagttgcggatattntcaccaagcctcttcaaattgaa

SEQ ID NO: 4689 - DNA, 444 bp, Glycine max
  unsure (1)..(444): unsure at all n locations
agcttcacaaggagttacatcaatgaacatcacaaaataaaccccaatttgatactctaaggatccctacacatgttcattttaacccaaattgcaataaactcatcccttatctctaagcgggctcacgggtgcagctggcagggatatcaacgtctctagtggttccctaagatttctgaaatttttcctctgtttgctttgttagggtttccaagtgttagagagaaggagaagaaattggagcctccaattcactgtatatgttcaatgagaatttctccctccatagacattactttacaaatcccaacactagacatgtgtagaaattagttccaaaggtggtgtccaaatttcactaggatccaacagttaacaagtccgggatcgtagttntcttgggatgggtttggatgtatatgggaatgagatcctaatctc

SEQ ID NO: 4690 - DNA, 423 bp, Glycine max
atacaagaatgaagctctgataccacctgttgtacaagtggcctcaaatatcttaagaagggggggttgaattaagatattacaaattatttcccccaattacaaattctactttgattccaatacaagttccaagttcccttaaagatggatttctaaacaatgattcaaattaaacaatctgaatataaatgtaaagcaataataacataaaagagtttaatggaagagaaagtgccaactcatatttatactggttcggccacacccttgtgcctacgttcagtccacaagcaacctgcttgagagttccactatctttgtaaatccctttacaagttctgaaccacacaatgacaacccttactttgtgttctgatttgtttacatcaagagaccctccgtctcttaactcctttttga

SEQ ID NO: 4691 - DNA, 441 bp, Glycine max
  unsure (1)..(441): unsure at all n locations
agcttgtaaactagccatggtctagctacttgcataccctgagggatgaccatgtagacttcttcatttaaattaccatgtaagaaaacattgttcacatctagttgtttgagatgccacttattaatagcagctaaagccaataaaaatctcactatggttagtttaactactggagagaaagtgtccaggtagtcttgttcttccacctgagtatacccttttgccactaatggctttatacctctctatggaaccatcagatttgtgattgatcttatacacccatttacaatcaattatagtcttgtgatgaggaagatcagtgagaacctangtatcattaagctctagtgctttgatctcaacattcatggcttcaatccaattaggatccttagatgctccactgtataactgaggttcaacactctgtgtgat

SEQ ID NO: 4692 - DNA, 454 bp, Glycine max
agcttcagtaaaatgggacagctggcctagatgatgcaatcctacccccccccccaagggcattggatagaagactccaagaagattgggccagagatgcaagagaaggccgtaaggttctcatgagccttagggtagattttgggcccatgggctaagtatgagcccacttatctttgtacatattagattaggatttcattatttttgggtcttgtatgtagggcttcataatgtaggtagggtaccctagaaatgtaggatttttcagcccttgtattttagggcacctagactagtttttgtattacgggtagttttgtaatttcacatgcattaagtgaatatttgatgtgtgtgttgagaaatcaatttaattgaattgggagaagcccaatccaattataatttagagggggaggtgagcatttgcttgctgcacctcattgccaca

SEQ ID NO: 4693 - DNA, 430 bp, Glycine max
agcttcggtcttcaatttcgagcgtctcgacatatttcgggactcaatcagacatccgagtaaaaagttattgtcatttgaatttgctcagagctaaggcattcaagtccgagggtctcgatatattacaggactcaatcagacatccgagtaaaaaagttattgtcgtttgaatttgctcagagcttcggcattcaagtccgagcgtgtcgatatactacgggactcaatcagacatccgagtaaaaagttattgtcgtttgaattttctcagagcttcagtcttcaatttcgagcgtttcgatatattacgggactcaatcaaacatacgagtaaaaacttattgtcgcttgaatttgctcagagctttggtattcaatttccagcttctggatatattacgggtctcaatcagacatccgagtaaaa

SEQ ID NO: 4694 - DNA, 450 bp, Glycine max
  unsure (1)..(450): unsure at all n locations
agcttctntgagaaaacttccttgagaagctagagcttagctacacacacccctctcataactaagctcacctccttgagaagcatccttaagaagattcgtaaagaagctagagcttagctacacatacctctctaatagctaagctcacctccttgagatgagaagctagagcttagctacacaccccctataatagctaagctcacccccatgacaaanaacatgaaaataaaaaaaagtccttattacaaagacaactcaaaatgccccgaaatacaaggctaaaaccctatactactagaatggccaaaataaaaggccttgacgaaggaaaaacctattcgaatgggtcataattttcacacggatgtccgattcggtacataactcatctagacgctcgaaattgaacaacgggagctcttgacaattcgaatggtctaacat

SEQ ID NO: 4695 - DNA, 431 bp, Glycine max
agctttaagcaaattcaaatgacaataatctttgactcggatgtccgattgagtcattttataatttgagacgctcaaaattgaatgcaggagctcttaccaaattcaaatgccaataactttttactcggatgtccgattgagtcccgtaatatatctagatgctcaaaattgaaaacagtaactctaagcaaattcaaacgacaataacttctaactcggatgttcgattgagtcatttaataattcttgacgctagaaattgaatacagaagctctcaccaaatttaaatgacaataactttttactcagaagtctgattgagtcctgtaatttatctagacgctcagaatcgaaaacatatgctcttaggaaattcaaacgaatgtaacttttgactcagatgttcgattgagtcatttaataattc

SEQ ID NO: 4696 - DNA, 457 bp, Glycine max
  unsure (1)..(457): unsure at all n locations
agctnntgcatagtttggataaatatacacatgcgatcatgacaatgacaaaacagatcgatttatgttgtgtgaatttttcaattttgttacggaatgtatgtttttaatttgcgatataattcaaacactgaaaagattcttttttacatttttatttaatcatgaaatttaaatgattgagtttttgtaataatcacttanaaaattatatttaaaataatttctaattagttgatagtataattttttttttttacaataacaacatgttaaaagtaaaatgttaaattgattgaattttaattnttatggttacctcctttacgtggactaaactgtaatattttttaaacaattaagaaatttagtgtaatgtataaggagtgttgttataatatttntaaaataattaagaaatgttagtataggaatagaaaaaacatggagagattga

SEQ ID NO: 4697 - DNA, 448 bp, Glycine max
  unsure (1)..(448): unsure at all n locations
agctttnttcagtcgtctgtaaggatgattgggtgttagaaaacggcgatgcctactgtagactgtttttcttccatgttttagttgtatgtagcttgtgttttcttcacagatggggcatgcatgatgacccttaacactgtaaccgctgagatttccatatggtggaaagtcattaatggtacaaaaaagcattgcacgcatttcaaacgtttccttgcaaaacgcatcaaacactacaaccccctggtccaacaacttttccaggtcttcaaccaacggacttagataaacatcaatgtcatttcctggctgtcttaggcctgatatcatcatagacaacatcatgtattttcgcttcatgcacaaccaaggaggcaaattgtaaattactagcagaactagccatgaactgtgttgagtgcttaaggtgccatatggattcatt

SEQ ID NO: 4698 - DNA, 338 bp, Glycine max
tgaagctgacaggatcaacaatggttggttgaattatctccttagctgggaagacaccccatgtgacagcattaacatcagtttgacccacattagatttccagctcccgtctttattcacagtcatataagttcaagatgtttgatccttgcattcatcaacaagtgcatccagcttttccttagagcagaagaactctacatatgccttctggtaaacatacccgcctggtccaccccagactatgccaaatttcaaacacaaacgatttactgtatctcatatccaccaaccaatatggaccagatatgaataccctcatcacaaactgcaccct

SEQ ID NO: 4699 - DNA, 396 bp, Glycine max
  unsure (1)..(396): unsure at all n locations
acaaaattcttgaccgnttccnnnttgggaccntggacttcatgtcccggagggtctcctggagatgctcccctcactaccgttggaggaggcaaggaaggagacggacacggtgctcttcggggccgtcgacgagctcttggagaaaaccggtgttgaagccaaagacattgggattcttgtggtgaattgttgctcgttcaattccacaccatctttctctgactcaattgtcaaccggtacaagcttagagggaacattttggctataattctagtgggatggggtgcagtgctggggtcttgctgttgacttggcacacagttcctcagggtctctcttacatcatggctataaataatattcatgcattttgattgtttactgcatacata

SEQ ID NO: 4700 - DNA, 417 bp, Glycine max
agcttgaaggaaaactggatgcattggttaacttggtaacccagctggctttgaaccagaaatctgtacctgttgcaagggtttgtggtttgtgctcctctgctgaccaccatacagacctttgcccttccatgcagcaacctggagcaattgagcagcccgaagcttatgctgcaaatatttacaatagagctcctcaacctcagcagcaaaatcaaccacagcagaacaattatgacctctccagcaacagatacaaccctggatggaggaatcaccctaatctcagatggtctagccctcagcaacaacaacagcagcagcctgcttcttccttccaaaatgatgctggcccaagcagactatacattcctccaccaatccaacaatagcaaaagcaccagaaacaaccaacag

SEQ ID NO: 4701 - DNA, 409 bp, Glycine max
agaatcattacgcataggcaaaagatcaagaggagttagtggattaaaaccataaacaacttcaaaaggagaacaattagtggtgctatgaacagctctattgtaagcaaattcaacatggggtaaacaagcttcccaagtttttaagttctttctcaaaactgtcctaagcaaagttcccaaagtactattaacaacttccgtttgcccatcggattgtgggtgacaagtggttgaaaataacaattttatgccccacttgctccacaaagtgcttccaaaatgacttatgaacttagagtccctatcactaacaatgattcctggcaaaccatggagtatcacaatctcccttgaaaacaaattagccacatgggaagcgtcatcaaactttttacatggaataaat

SEQ ID NO: 4702 - DNA, 436 bp, Glycine max
atatgtatataaaatgacataacaaagctactaaaaatctaaaacatagattaacactaatagaaatcagagactagaaagagcagtaaaaaggtaaatcacctttggaggtttaattccaactcgaaggaagagctcaggattcattataggcagttcaattgactccctcaattccctgatctgatcagataagccaccaacagctgagtagctgatattaccaggatcttcatgcaacatattgtaaactactggatcaacctggcaactccaacgacaaagaattagagacaatagtgaccaccagggatccaataaatcagatcttagcacaacaggaaaagaacatgttcataaaatgaaaatattaaaataataaactacgacttacttctcgaggaagagctcgcattatggtgagtgttgtcatatc

SEQ ID NO: 4703 - DNA, 477 bp, Glycine max
  unsure (1)..(477): unsure at all n locations
atctctaagcacctgcggcatgcaagcttctgcaattaattntcattacaatgctaacatttcctttcttcaattttaactgatagttgaagtaggaataatccatttatcatactctaaatatgcttagcattaatgtgacgaagaaatgtctccttgcagaaggttggtgtcctgtttttgcaacaagtcaggttcgtccttgaactatgaatttaatttctgatacattgtgcataaaccttcatgtaatgcagtttttactggctggtatagctaattaatttgattcaatacttgacagattcacaaagtattgcagcgggcaactatggactgcagttctcaagttgtggcgatattccaggttttagagacaacggaatcaccacctacctattgttgcacaaacaaattcacttcttctcaagaaattggtgatgcctatgggtaatttacgtagacctcagcatgtgc

SEQ ID NO: 4704 - DNA, 404 bp, Glycine max
  unsure (1)..(404): unsure at all n locations
ccttgtatatgcataacatcaaaatcgatangtataggacaatcatcaaagatgaccatctcgaatttacccatgaattctctcaaaacatggttcattaatctcataaaattgcttggtgcataagtcaaaccgaaaggcataaccaaccattcatataatccatgtttagttttgaaagcggatttccattcatctccttctttaatccttatttgatagtaaccacttttcaaatcaattttggaaaagaacaagcaccatgcaattcatcacgcaaatcattaagtctacgtattggatacctatatttaatggcaatattgtgtgaagctctacacatcggagcacattctccagaaccatgtctctttgaacccaattccccgacagcacatggacta

SEQ ID NO: 4705 - DNA, 454 bp, Glycine max
  unsure (1)..(454): unsure at all n locations
agctntgatnggtttgagaagaaatcacatgtttgtcatcatcaagaagggggagaatgtgaatgtatgtatacatgattttgatgatgtcaaaagaagaatcaaacaaggctcattttgcttcaagattaatacaagattgtttcaacaaacagagccttgattcgagatttcttcaagatcaagccttgcttcacaatgagaggtttcaagtcattcaaggcacatgtaatcgattaccaatacatgtaatcgattaccaatggtttgaaagtgtgtaatcgattacacatcatatgtaatcgattaccagagactctgaacgttgagaattgaaattttaaatgaagggtcacatctgttcaagcataataattgtgtaatcgattacactaattttgtaatcgattaccagagcggattttcaaggaatatcgccaacagtcacatcttt

SEQ ID NO: 4706 - DNA, 358 bp, Glycine max
cagctattcttggtgggttgatgtactctatctcgcagaatggcatgatcactggcagacatagtcataatcaattcacttgcctctttagggattctcaactttatcttccctcctgctgaagcatctaacaactgcttgggttgcggtctcagcccatctataaacatgttcaatagaattggctcagagaatccatgtgtaggagtctttcttaacaaacctcgaaacctctccaatgcttcactcaaagactcatcatggaatgggtgaaatgatgaaataacaactttcccttctgcagtctttgactcggagaagtatttcttcagaaattactcaacaacttcctcccacg

SEQ ID NO: 4707 - DNA, 348 bp, Glycine max
  unsure (1)..(348): unsure at all n locations
tttcatcgtcattctgggcatgtacaagagccgtggttatgcgatcataaccttttttaatgtgcttgaataaatattcgacggacattgattgattgcaccattctatgttgaggtgagcctgatatttcaacaataagattggattgtatggtaccacgtatctatcgtctanggttattccatttttatctatattcttactatcattatgccttntataaataggatattcctcttgctcaacaacagtttcaggtngctttttctttgaaaacatctacaacatgtttcatgcatggcgactctctatttgcactgacacatgaatcatgcatatacgattct

SEQ ID NO: 4708 - DNA, 411 bp, Glycine max
  unsure (1)..(411): unsure at all n locations
agctnttgcccaatgaacttttcttgacaaagcatatgttgaacaaaaactcttagaaagatgttaagaataattttcttgaaattcgtgtcatggtcacgtattatagccatttgatggctcttgaagaaaccatgttaaaagttgtgactcttggcaatttcttcaaaatcagtcactgataatcgattaccataatggtgtaattgattacacagtttattttatcaaaggttgtgactcttcatgttgaggtttgaaatctaacgttcagaatcactggtaatcgattacaaatattgtgtaatcgattacattattttgaaaatacttttgaacgttacaagacaatggtaatcgattgcatgcccatgctaatcgattactacttggttaatcaattataaaact

SEQ ID NO: 4709 - DNA, 363 bp, Glycine max
  unsure (1)..(363): unsure at all n locations
naagctatgctgcanacatttacaatagacctcctcaaccttagcagcaaaatcaaccacagcagaacaattatgacctctncagtaacagatacaaccttggatggaggaatcaccctaatcttagatggtctagcccttaacaacaacaacagcagcctgctctttcttccaaatgttgctgcccaagcagacatatattcctcaccaatcaacaacaacacagccccagaaacagaaacagtgacgctctcgaaccttcctcgagaacttggagcaatgactatgcaaaatgcatttaacagagacagacctcatcagagttactaatagatgacaatgctacacataatcatacagtcc

SEQ ID NO: 4710 - DNA, 311 bp, Glycine max
agcttggaaggtagtcttacctcacaaatatatatatgtatgtttaggtttcttgataccttggatatgcatgtatgtggcaaaaaatacctcacaatatatatatgtatgtttaggtaacacgataccttggatatgcatgtatgtggcaaagaatacctcacaatatatatatgtatgtttaaggagcaagataccttggatatgcatgtatgtggcaaaaaatacctcacaatatatatatgtatgtttaggtagcaagataccttggatatgcatatatatagcaaaaatacctcacaaaaatatac

SEQ ID NO: 4711 - DNA, 132 bp, Glycine max
  unsure (1)..(132): unsure at all n locations
gctctcgagaaattcaaatggtcatttacttatcacacctaagttttattcangcgcataatataccgagacgctcgaaattgaacaacggaagctctcgagaattctaatgggccttacttatcacaccaa

SEQ ID NO: 4712 - DNA, 322 bp, Glycine max
actagctatgtgacatttggagatggctctaaaggaaagatcattggaatgggaaagctagtccatgatggaccttctaatctgaacaaagtactgctggtgaagggactgactgcaaacctgatcagcatcagtcagttgtgtgatgaaggattcaatgtaaacttcacaaagtcagaatgcttggtgacaaatgagaagagtgaagtcctaatgaagggcaggagatcaaaggacaactgttacctatggacacctcaagataccagctactcctccacatgtctatttctccaagaagatgaagtcagaatatggcatc

SEQ ID NO: 4713 - DNA, 304 bp, Glycine max
  unsure (1)..(304): unsure at all n locations
gagcgtctcgatatattacgggactctatcatacatccgagtaaaaagttatggccgntttgaatggctcagaggttcaaaattcaatttcgagcgtctcgatatatttcgggactcaatcagacatccgagtaaaaagttattgccgtttgaattggctcagaggttcaaaattcaatttcgagcgtctcgatatattacgggactcaatcagacatccgagtaaaaagatattgtcgtttgaattggctcagaggttcaacattcaatttcgagcgtgtcgatatattactggactgaatca

SEQ ID NO: 4714 - DNA, 348 bp, Glycine max
  unsure (1)..(348): unsure at all n locations
ctgcagctttgagccattctacgatataactttttatctcgatggccgattgagtctcgtaatatatcgacacgctcgaaattgaatgttgaagctctaggcctattcaaacaacaataacgttttactcggaagtncgattcagtgacgtaatatatcgggacgctcgaaattgaatggtgaacctctgagccaactcaaacgacaataactttttactcggatgtctgattgagttccgtattatatcgagacgcttgaaattgaatgttgaacctctgagccaattcaaacgacaatatactnttactcggattgttgatggagtcccataatatatcgagacgc

SEQ ID NO: 4715 - DNA, 288 bp, Glycine max
  unsure (1)..(288): unsure at all n locations
gctctcgagaaagttttatggttattactnttcaaacgcaagtctgattaaggtgcataataaatcgagaagcttgaaattgaacaacggaagctctcgagaaattcaaatgggcattacatatcacacggaagtccgattcaggcgcctaatatattgagacgctcgaaattgaacaacgaatgctctcgagaaattaaaatggtcataacttgtcacacggaagtctgattcaggcgcataatatatcaagacgctcgaaattgaataacggaagctctcgagaaa

SEQ ID NO: 4716 - DNA, 389 bp, Glycine max
  unsure (1)..(389): unsure at all n locations
agctntntcaaaatccactttaaacaccaagcacaatttctttagcctnctatcctnctcaacaaccttattagcaatcaagactccatgcaacaactgtctacccttaacaaatgctgactgtctttcatcaacaaagtgattcaataccttactaagcctattagataggactttagcaataattntgtagacacaacctatgagggatatgggtctgaaatcacttatatgtcgaggatccttgagcttaaggataagagcaatgaatgatgaattgaggcccttaggaaaagcagcattcacatgaaattctgccaaaaaccttaagaaactcaagttcagctcattccataaatgcttaataaatatgaaattaaacccatctg

SEQ ID NO: 4717 - DNA, 214 bp, Glycine max
  unsure (1)..(214): unsure at all n locations
agtgctngaaagaatcaatgacantgctttactaagtgagctgcccggtgagtataatgctagttccaccttcaatgtctctgatttatctctttttgatgcagatggagaatccgatttgatgacaaatccttctctagagggagagaatgatgacgacatgttcaaaagcaagggcaacgatccacttgaaggacttggacgacctatgaca

SEQ ID NO: 4718 - DNA, 208 bp, Glycine max
tcagatatcttaagaagggggggtgaattaagatattaccaactatttccccgattaaaattctatttcactttctattcaaggtacaaattcccttaataatgaacttcttaaatattgattcaaatagaaaaatttggatattaatattaaaccaatattaattaaagagttttagggaagagaaagtgccaacttagatttatat

SEQ ID NO: 4719 - DNA, 293 bp, Glycine max
ctcagctggattcctttagtagggaatctattcttcctaagatggttccaaacccagtcaccctcattaagaactagctcttttcttcctctattgcctttagttgaatacacctttggttgattctctatttggttcttaaccctctcatgcatcttctttacaaattctgacctagattccccttctttatgtataaaagaagtgtccagtgggaggggaatgaggtctaacggtgttaggggattgaacccatagacaacctcaaaaggggactgcttggtggttctatg

SEQ ID NO: 4720 - DNA, 328 bp, Glycine max
tcttaagaagggggggttgaattaagatattccaaacttgctcccctaattaaaaatctatttcactttttactcaaattatgaatttccttaatgaccatcttccttaatatttattcagatgaagcaacttgaatatgaatataagccataataaatcaaggagattaacggaagagaaaatgcaaacttcagtttatactggttcggccacacccttgtgcctacgtccagtccccaagcaacccgcttgaaagtgcactatcttgtaaattctttgacagttctaacacacaggacaatcttctttgtgttagaatccttacac

SEQ ID NO: 4721 - DNA, 465 bp, Glycine max
  unsure (1)..(465): unsure at all n locations
tcctcgtggtttctttgagaagctntctcaagaagcttcttttagaagctagatccttatctatccacacccctctattaactaaattaacttccttaaaaataattatggatgaaaataacgcaacaaataatcaaacatcaaatataattactatatatatatatatatatatatatatatatatatatatatatatatatatcagggtgttacaactctcccacccttttagaaatttcgtcctcgaaatttaccttactcaaacaaggatgggtgagcttctcgcatctgactttctaattcctacgtggcatcttctcctgatgcacctccccagatcaccttgaccaacggaatctcttttcctcttaagtgtttggtcgcctatcctcgatcctcaaaagcaatggttcatatgtcaaattctccttcacttgtacatcatccaattcaatcacatgg

SEQ ID NO: 4722 - DNA, 305 bp, Glycine max
  unsure (1)..(305): unsure at all n locations
agaaaacatgtgggccatcatcgaccaatacaaggaaaagttaagcctagcggtcactcacaaacaaaggctataggacgactgcgtgaaagtataagtcctgcaagtggaaagggaagcaagggaaagggtgatcgattcattacacagagaagcaatgatgtggatggataggttctcctttactgaaattctgatactggggacagatgtcctacaggatgtcacgacatcgcgcttcataacatgcagcttgtatatgaccgtatgaacagattaaacaagtntataacacaagagaattg

SEQ ID NO: 4723 - DNA, 427 bp, Glycine max
tctggtgggacatcttgactcgcgtttctatctgacattcaccacagaatctagcttcttctattttcagattgggaatgcctctaacagcacctctgtcaatgattatcttcatgcctcttaagtgcagatgtccgaatctttgatgccatattctgacttcatcttctttggaggatagacatgtggaggagtagctggtttcttgaggtgtccataggtagcagttgtcctttgatctgctgcccttcattagaacttcactcttctcatttgtcaccaagcattctgactctgtgaggtttacattgaatccttcatcacacagctgactgatgctgatcaagtttgcagtcagtcccttcaccagcagtactttgtccagactaggaagtccatcatgaactagctttcccatttcatgatc

SEQ ID NO: 4724 - DNA, 425 bp, Glycine max
  unsure (1)..(425): unsure at all n locations
tctggtgggacatcttgacttgctttccaatctgacattcaccacagattctgccttcttctattntcagattgggaatgcctctaacagcacctttgtcaatgattttcttcatgcctcttaagtgcagatgtccaaatctttgatgccacattctgacttcatcttctttggagaatagacatgtggatgagtaactggtttcttgaggtgtccataggtaacagttgtcctttgatctgctgcccttcattagaacttcactcttctcatttgtcaccaagcattctgactttgtgaagtttacattgaatccttcatcacacaactgactgatagctgatcaagttgcagtcagtcccttcaccagcagtactttgtccagactaggaaagtcatcatggactagctttcccattcagtga

SEQ ID NO: 4725 - DNA, 359 bp, Glycine max
  unsure (1)..(359): unsure at all n locations
agcttgtgcctcttcatgtctggaatatgaatacatcatatagatccaaagacccttangtgctttgctgatggcttcttctcgttccaagcttcaattggagtcttgtttttactgacttagttggacatctcgttagtatgtaaacagcagtgtagactgcttcagcccagaatgtgttatgtagtcccttttccttgagcatcgatctagccatctccataattgtgcgattctttctctcggacanctccatttgttgaggagaatatgcgactgntaagtgtcgctcaatgccttcatccttacaaaatctttcacactcacgagaggtgtactctttgtcgcgatcacttctt

SEQ ID NO: 4726 - DNA, 299 bp, Glycine max
  unsure (1)..(299): unsure at all n locations
agcttggntatctccttctttactacatcaagaatcaccgggttgagtcttctctgtgggtgtcttactggtttagctccatcctctaaatttattcgatgcatacatgtggatgggctaataccaggaatgtccgccagggtccagcctataaccttcttatgcttcttgagaactgacaacaacttcttctcttgctcatcagcaagggaggcagatataatcactggaaaactcttgctatcatccaagtaagcgtattttaaatttgatggcagaagcttcaattctggtgtggt

SEQ ID NO: 4727 - DNA, 438 bp, Glycine max
  unsure (1)..(438): unsure at all n locations
agcttctaaactntatacaagaatgaagctctgataccacttgttatacaagcggcctcagatatcttaagaagggggggttgaattaaaatattccaaactacttccccaattaaaaatctatttcactttttattcaagttatgaattccctcaatgacaatcttcttaaatattgattcaaataaaacaatttgaatatgaatataaagcaataataaataaaggagattaagggaagagaaagtgcaaactcagatttatactggttcggccacacccttgtgcctacgtncagtccccaagcaacccgcttgagagttccactatcttgtaaattccttttacaagttctaaacacacaaggacaatccttcctttgtgtttagaattcctttacaacaagagactcacggtctcttaatcccttagagaatg

SEQ ID NO: 4728 - DNA, 444 bp, Glycine max
  unsure (1)..(444): unsure at all n locations
gcttataatatatcgatacgctcgaaatttaacatcagaaactctctagatattcaaatggtcataacttttcacacggatgtgcgattcgggcgcataatatcgcgaggggcttgaaattgaacaacggaagctcttgagaaattcaaatggtcatagcttctcacacggatgtccgattcgagcaaatcacatatcgagacgctcagaattgaacaacggaaggtcttgagaaatacaaatgatcttaacatttaactcgaatgtccaattcaggcgcatcacatatagtgacactcngaattgaacaacggaagctctcgagaaattcaaatggtcataactnttcacactgatgtccgattcacgcctataatatattgatacgctcgaaattaacatcgaagctcttgagatatcaaatggcataactttcacatgatg

SEQ ID NO: 4729 - DNA, 389 bp, Glycine max
  unsure (1)..(389): unsure at all n locations
agcttctcgacatatgatgctctcgaatcggacatccgngtgaaaaggtatgaccatttaaatttcgcgagagctttcgatgtttaatttcgagcgtatcgatatattataagcctgagtcgtacatccgtgtgaaatgttatgaccatttgaatttctcaagagcttctcgtgttcaatttcgagcctctcgacatattatgcgcccgaatcggacatccgtgtgaaaagttatggccatttgaatttctcgagagcttccgatgtttaatttcgagcgtatcgatatattataagcctgaatcggacatccgtgtgaaaagttatgaccatttgaatttcacgagagcattcgttgttcaatttcgagcgtcactatatgtgatgcg

SEQ ID NO: 4730 - DNA, 337 bp, Glycine max
  unsure (1)..(337): unsure at all n locations
cttgagccaactcanacgataataactttntactcggatgtctgattgagtcccgtaacatatcgagacgctcgaaattgaatgttgaacctctgagccaattcaaacgacaataacttttttcacggatgtctgattgagtcccgtaacatatcgagacgctcgaaattgaatgttgaacctctgagccaattcaaacgacaataactntttactcggatgtctgattgagtcccgtaacatatcgagacgctcgaaatngaatgttgaagctctgagccaatacaaacgaccatatacttttactcggatgtctgattgagtccccgaacatatc

SEQ ID NO: 4731 - DNA, 422 bp, Glycine max
  unsure (1)..(422): unsure at all n locations
tcaacaaaggggagatggaccatttcaagtgnttgaaagaatcaatgacaatgcttacaaagttgagcttcccggtgagtataatgttagttccaccttcaatgtctctgatttatctctttttgatgcagatggagaatccgatttgaggacaaatccttctcaagagggagagaatgatgaggacatgaccaagagcaagggcaaggatccacttgaaggacttggagggcctatgacaagggctagagcaaggaaagccaaggaagctcttcaacaagtgctgtccatactatttgaatacaagcccaagtttcaaggagaaaagtccaaggttgtgagttgtatcatggcccanatggaggaggactaaatggcaccactttgtctcaattttagagtggttagtttttctaaataat

SEQ ID NO: 4732 - DNA, 393 bp, Glycine max
  unsure (1)..(393): unsure at all n locations
tcaagaaaaagatggcctcaacaaattccttatttccagaatggaattctatcaatagacctccaatctttaatggagagggttaccactactggaaaacccgaatgcaaatttttatcgaggcaatagatctaaatatctgggaagccatagaaatagggccttatatacccaccacagtagaaagagtttcaatagatggtagttcatcaagtgaaagcataaccatagaaaaacctaaagatagatggtctgaagaggatagaaaacgagtacaatacaacttaaaagccaaaaacataataacatctgccctaggaatggatgaatatntcacggtttcaaaatgtaagagtgctaacgaaatgtngaacactcttcgattaacacatg

SEQ ID NO: 4733 - DNA, 428 bp, Glycine max
  unsure (1)..(428): unsure at all n locations
agcttgcgcaacanatatttaattgttgcgtgatcagtgtaaatcactatcattgatcccactagataagatcgaaatttctcaagtgcaaacataattgccaacaattctttctcaatggtggcatagttaatctaagcatcattcaaaactttgctagcataatatatggtatgaaacattctgctcttccgctgccccaacacagcacctactgcataatcacttgcatcacacatcaattcaaactcttgtccccagtctggtgctgtaatcataggagcagaaaccaatttggctntgagagtgttaaaggcttctaaacattcttcattaaacacaaacacaacctccttgttcaacagatngcttangggtttaagcaatttggagaagtctttaatgaatcgccgataaaatccaacatg

SEQ ID NO: 4734 - DNA, 454 bp, Glycine max
acttaactcttcttaccttaacgaattgagttgtggttaaagactctctactgtgggtaactactatccagcatgccctgaacctgaattaactatgggcgctgccaagcacacagatggtaacttcatgactttacttctacaagaccaaattggtggtcttcaagttcttcatcagaatcaatgggtcaatcttcctccagtacatggagctcttgttgtaaacgtaggagaccttctacaggtaaatattccaagttattattctcaatcgttagattatgcattttagagcttacttttaagtttaaatgtgttttaggttcctaatgaatcttagagcttactttctatgacaagtgattgatttttcttctagatatctaatcaagtgtgtcgtacaatctattcattatatatggaaagtttcgtttgagtcgatgttgcacttaaa

SEQ ID NO: 4735 - DNA, 470 bp, Glycine max
  unsure (1)..(470): unsure at all n locations
taagaaatctatgtatggtttaaaataagcctcccgtcagtggtaccttaagtttcatgggataatttcctcatttggttttgatgaaaaccccatggatcaatgcatataccacaagattagtaggagtaaaatatgttttcttgttttatatgtagatgatattttacttacagccaatgatccgggtttgctacatgaggtgaaataatttctctctaagaattttgacttcaagaatatgggtgatacatcttatgtcattgacattaagattcatatagatagacctcgaggtattttaggtctatcacaggaaacctatattaacaaaattntagagagatttcggatgaaagattgttcactaagtgttgctcccattgtgaagggtgataggtttaatttgaaccaatacccacagaatgactntgagagagaacatatgagaaacattccttatgcttcac

SEQ ID NO: 4736 - DNA, 334 bp, Glycine max
agcttctaaactctgtacaagaatgaagctctgataccactggttatacaagtggcctcagatatcttaaggagggggggttgaattaagatattccaaactgtctcccctaataaaaaatctatttcactttctacttaccttatgaattcccgtagtgacaatcttcttaaatattaattcaaacaaagcagcttgaatatgaatatgatgcaataatgcatgaaggagattaatggaatagaaactgcatactcagctatatactggttccgtcacactcttgagcctacatccaggccccaagcaacccgcttgagagaacactatcctg

SEQ ID NO: 4737 - DNA, 416 bp, Glycine max
  unsure (1)..(416): unsure at all n locations
catgcaagcttcgtgatcttggacaagagggttntatgttagcacatgcaccttattatgaaaaattagaaactgagttcaagaagccattgtatctcggatgcgcaaacttcacacgattatcgaaggtgttagctntggtgaatttgaaggcaagatttgggtggagtgacaaaagcttcaatgaattacttttgttattgaagaatatgcttcctatggataacacgttacccaagaatcattatgaggccaagaagaatttatgttcagtgggtatggaataccaaaaaatacatgcttgccctaatgattggtatttgtatagaaatcagtttacacaaatggcgcactgccctacatgtggngtgtcatgctacaaagtgaagtgatgatgcaaccacatacaaggatcg

SEQ ID NO: 4738 - DNA, 384 bp, Glycine max
ctaagcttctaagaacagccttgataccctttattctccatagaggcttctccaaagaagatggtatcatccgcaaactgaagaatattcactgggaccttgttcttccctaccataaagctgtgaaataagattctggacattgcttccctcatcaatcctagtagcccttcagcagccaagacaaataaaagaggggccaagggatccccttgtctcaatcctctttgaggcttaaattcttcagttggacttccatttacaagaatggatattgaagctgatgagaggcaacctttaacccaactaatccatttttcgtggaaccccattcttctcatcatataaaagatgaattgacaggccacagaatcataagctttt

SEQ ID NO: 4739 - DNA, 358 bp, Glycine max
  unsure (1)..(358): unsure at all n locations
taataagtccatctatggattgaaacaagcctcctgctagtggtatttaaaatttcatgaggttatttcttcattcagctttgaagagaatgtcatggatcactgtatatactagaaggtcagtgggagtaagatttgtttccttgtattatacatagatgatattctacttgcgactaatgataagggtatgctatatgaggtgaaacaatttctctcaaagaactttgatatgaaggatatgggagaggcatcttatgtcataggcataaagatccatagagaaagatctcgaggcattntaagcttgtctcaagaaacctatatcaacaaagttttagagagatttaacatgaaa

SEQ ID NO: 4740 - DNA, 312 bp, Glycine max
taaacaatgatcaaacttactctgtggaactggctttgtgtacatatcagctggattgtgcagagtgctgatcttatgaactctgattcttctatctgaccgaatgaagtgatatctaacatctatatgcttggttctatcatgatgaacctgatccttggccaagcatatagcactaaggctatcacagtagatgttagcatattcttgattaattctgagatcatttatcagacctcttagccaaattcctttctttgcagcttcagtgagagccatatattcagcctcagtagttgagagggcaacaaa

SEQ ID NO: 4741 - DNA, 473 bp, Glycine max
  unsure (1)..(473): unsure at all n locations
tgtgcatccaataccctgatgaggatgtcccatatgttcttttaactggactaatccatttgcttccagagtttcatggccttgcaggtgaagacccacacaaacatctgaaagaattccatattgtttgctccaccatgaaacccccagatgtccaggaggatcacatatttttgaaggcctttcctcattctttagagggagtggcaaaggactggctatattaccttactccatggtccatcacgagctgggatgacctcaagagagtattcttagaaaaaaatttccctgcttccaggaccacgaccatcagaaaggatatttcaggtattagacaattcaatggagagagcctatatgaatactgngagagatttaaaaagttatgtgtcatttgcccgcaccaccaaatttcagagcagcttcttctccaatatttttatgaaggactcagtaacatggagagaagt

SEQ ID NO: 4742 - DNA, 470 bp, Glycine max
  unsure (1)..(470): unsure at all n locations
ngtgcctcttcacgtctggaatatgaatgtagcatatagatctcaaagacccttaggttctttgctgatggcttcttcccgttccaagcttcaattggagtcttgtcttttacagacttagttggacatctgttgagtacgtaaacagtagtgtagactgcttcagcccagaatgtgttaggtagtcccttctctttgagcatcgatctagccatttccataattgtgcgattctttctctcggacactccattttgttgaggagaatatgcgactgtaagttgtcgctcaatgccttcatcctcacaaaatctttcaaactcgcgagaggtgtactctctgccgcgatcacttcttagtacttttatccgttttccactttgattttcagcaagggccttgaacttttngaatactccaaagactactgattttcttttagaaaatatacacatgtcattctagagaag

SEQ ID NO: 4743 - DNA, 366 bp, Glycine max
  unsure (1)..(366): unsure at all n locations
agcttgaccaggaattatntggatgggttggatgttgaattcatgttgttcctggtgcggagatgatggtactgcgggtgaaccaaaagctgcagtttcttttggtgaggtagccatggaagagcagagcgtttggaatgatttcgtaaatctcagaaagctattgggaaatgctggagaaaacacgaatgccaagcagatataaatttgaatgaagaatgtagaggggcgtgtgaagcaacggtcgaatttgctttgtagtgaacgtgctattaatgttaagtgattcgtttgggcacgttcagattgcagtagctgctataattcctctagcagacaaatgcccagcttgcccctcagtttttc

SEQ ID NO: 4744 - DNA, 444 bp, Glycine max
  unsure (1)..(444): unsure at all n locations
ggtcatcaatgaagcccttgtgcactggtccgaaacctccttcgccgagaaaattactcgaagagaaactctgcgtgatgatcttgagctccgagagcgaaaacacatgcaggttagaccccactagagaaacggagagatcctccgaaagcgttgagccagggaaactcaagtccgttatagagaccctgttggaagaagaaccaccctttgtagccaccactttggttggcttcggagaaggtgacacagactcaccctcataacaactagagaagctcgatcccatgtgaattatctttaatctattaagtcctatgctgcacaagtatctatgtttctataggaagagagatatgttngatgaacgtttataagtagatgggaaatgattggagatgatgtggttgaagattttaaaggggtagcatatatataaaatct

SEQ ID NO: 4745 - DNA, 387 bp, Glycine max
  unsure (1)..(387): unsure at all n locations
agcttcttagtttcagatgatgcagatgagtttgtggctacctcatgcactcctctaatgactatagcctcatttatggcgctaaactgttgggagtcggaagccatcttctcaattaaattcctggcttcaacaggggtcatgtcttcaagggctccaccactggcagcatctatcatacttctctccatgttactgagtccttgataaaaatattggagaagaagctgctcagaaatctggtggtgagggcaactggcacatagttntttaaatctctcccagtattcatataggctctctccactgagttgcctgatgcctaaaatatcctttctaatggtcgtggtcctggaagcacggaaaaagtttctaanaatactctct

SEQ ID NO: 4746 - DNA, 369 bp, Glycine max
taagctccttcaactgcacaaggctcttaatatttgaagagtatccttgtggaaccttcacccgacgaagacactgacaaaaacttatcttctcattcttggacaaagtatggcaagctgggggcaagtaaattttcttcccatcagaccttggatgcaactgtgatcgtatacccatatcagctagatcttgacgggtattcaagccatccttcatcttgccttgaatgttaaggagcgtcccaatcacactgtcacaaacatttttctccacatgcataacatcaatacaatgtctaacgtcaagatcataccagtacggaagatcaaagaaaatggacctcttcttccatatgcaactctaacttt

SEQ ID NO: 4747 - DNA, 454 bp, Glycine max
  unsure (1)..(454): unsure at all n locations
cttgatggtgtcgagaagaaatcacatgtntgtcatcatcattaaaggggagaatgtgaatgtatgtatacatgattttgatgatgccaaagaagaatctaacaaggctgcttcaaatgataagcatttgcttcaagaataattcaagattgcttcaacaaacaaagcccttgtttcaagattcactaaagaccaagccttgccttaaaacaatgtgctttcaagacatgcaaggctctggtaatcgattaccaggaagtgtaatcgattaccagaagacagggttgagaaatagctgttgaaaaaggttttgaatttgaattttcaacatgtaatcgattaccatatgtctgtaatcgattaccagcaacgaaactttggaaattcaaattcaaaagtcataacccttcaaattataattgtgtaatcgattacacaaacattgtaatcgatt

SEQ ID NO: 4748 - DNA, 459 bp, Glycine max
  unsure (1)..(459): unsure at all n locations
tcaatatcttacgtccattatagaatatactagtggtttccgtatattaaaagtaaacttagtaatttttctttaaacttactaatattttaaaaccatcagagtaaacaatgaaaatgataaaacttggggcgaaactatatatgaacgaatgtgaaatatgaacaacatgtttcataaagcaagttaaatattatcatgctaaaagtggcgatgtcttgtcccaactaataattaattttctgaaatgttttatttactgtaacttttgtttcaattggcatctttntttattttgagagagaatatttttaaaatagtagtgaataaaaaataagtgcaaataaagataaaaacacacacaattntgcatacattattaattatntaatgttcaaataattttcatgacacttgatggatgatacaaacatatacatacattgaaacaaaaacatg

SEQ ID NO: 4749 - DNA, 428 bp, Glycine max
  unsure (1)..(428): unsure at all n locations
catgcaagcttgtaacttatataatatatacattntattgtaattatattttaacacatcagaatggtgcgcctataacccacaggtcccaggatcgaaacctggttctgataaagagtggcttccgatctatcacatatatatatattntatgcgtaaaacatatatcattacgcaatgacatttgagtataataaaaaatagttctgcagggcctaacatttcagtgcttatattaatttagttaccatttaaattttattattgagtcaactttntaacgtatattcatattttctctttgttaattctaatttaatttgtttaagtaaacatatcttttatggataataatggcttccagtttcttagtgaaccacatctganaaattatactcgaacaagaagatgtgtttcactatgttcat

SEQ ID NO: 4750 - DNA, 418 bp, Glycine max
  unsure (1)..(418): unsure at all n locations
catgcaagcttgttntcattntccttgtctacaaaggcttaaagatggtttcattcatttaaaggtaacagtcttaagacttgtgatgacgtggttgaaaaattcttgaagaaatacttcccagagtccaagaatactaaaggaaaagctgccatctcatcctttcatcaatttccagacgagtccttgagtgaggctttgaaaagatttcatgggttactaagaaagacacctactcatggattttcagaaccaatccaactcaatattttcattgacgggttaatgccacaatcgaggtagcttttagatgcttctgcaaggggaaaaataaaattgaagacccctaaagaagccatggaattaattgagaatatggctgctagtgaccatgcaatcttgcgtgatagagcacaca

SEQ ID NO: 4751 - DNA, 434 bp, Glycine max
  unsure (1)..(434): unsure at all n locations
tgtttctcatatcaaggaatcaactataattcctgttcttgttcatgctggtaatgttcttccatataaatntcatattctgtagttagtatataggctntattttttgaatttgttcgtttcattatgcagatggaatttgtcatgtatatgttgacaagtctgctaatattgatatggcaaagcagattgttagggatgcaaagaccgattatcctgcagcttgcaatgcgatggtaattagcatttacacatcctttgcaatgcactaaataaaacatgttaatctgtatcctcctctcctnnttgggtttactgaattggtaggtgtgatgttattggaattatggactatgctcatcaaaatatnnttgtttggtattctagganactcttctcgtcacaaggatctgtcaataatggtggactcatga

SEQ ID NO: 4752 - DNA, 394 bp, Glycine max
  unsure (1)..(394): unsure at all n locations
agctntacttcaatattntccatatcatcaagtaatttgttgaaatcagccaattgttcagtggttgttcttgactctgtcatcttgaaggtgtacagttagtgcttcaagcatagccgatntgcaagggactttgtcatatacaatgactccagtttcagccacattgaggctgttgtcttttctcttgcaacttctcttaaagctttatctccaaggcataaaatgattgcacttctggatttagcaatcatctctgatttctcctttgagcttagagaatcagacatcttttcttctcctttaagagcttctgcacagccatgttgaatcaaaaatgctncatcttgattctcataacccgagtcattttccccttgaaactctctatatc

SEQ ID NO: 4753 - DNA, 455 bp, Glycine max
  unsure (1)..(455): unsure at all n locations
tganatngaacaacagaagctctcgagatattcaaatggtcataacttatcacatggaagaccgattcaaacgcataatatatcgggaagctcgaaattgaacaacggaagctctcgagaaattcaaattgtcataacttatcacacggaggtccgattctggcggatagtatatcgagaagctcataattgaacaacgaaagctctcaagaatttcaaatcgtcataacttttcaaacggaagtccgattcaggtgcataatatatcgagaagcttgaatttgaacaacggaagctctcgagaaattcaaatggtcataacttttcacacggaagtccgattctggcgcataatatatcgagacgctcgaaattgaacaacagaagctctcgagaaattcaaatggtcataacttttcacacggaagtccgattcaagcgcataatatatcgag

SEQ ID NO: 4754 - DNA, 158 bp, Glycine max
agcttctcgatacattatccacctgaatcagacttccgtgtgataagttatgaccatttaaatttcttaagagcttccgttgatcaatttcgagcgtctcggtatactatgcgcccgaatcggactttcgtgtgataagttatgaccatatgaattct

SEQ ID NO: 4755 - DNA, 339 bp, Glycine max
  unsure (1)..(339): unsure at all n locations
ccaagctntgtgccaaccagaattatggtgacaccaggatcataatgcttcaactccggaatccactgaaaatgaaaccacacatgcaatttatcatcgactttttttataaatgaattattttcttaacatataacatgatccatacatccttcattacaggccatacagaaaccttataattatcaaaataaataagaagaaatacacccaaaacactatgaccacaataaattgccacgaagtacctttttagagacattttcataactggccttgcttatgagagagagagccagtatgaaaacatcggcaccacgggaactcaaaggtcttaat

SEQ ID NO: 4756 - DNA, 449 bp, Glycine max
  unsure (1)..(449): unsure at all n locations
tcttattcacataacaccaatagtattccatttataagcagtgattgacgattcanattacatatttataagagaccaaccaaacacaaagcaaccacagcttaaaacacccgtaacaaatcctagaacatttgaatttgcaaaggcgggccatgaccactttattctaaaacttcaaacacaacacatacttattatttattgatacatgtattacagctatctctgcttgaaggttatgcatgttgatctcacttgcagctgcatgggtcgcaagtgcagtttgatccacagttgcagccaccgttctcagctgcaacacccatttcagcaccctcgaattgggccttcaccggcccaacacccaaaactagagtctcaattgtgatcttctcaacgtagtcaaaagagtacttgttgcacttgcatacatgaaaaataacatacat

SEQ ID NO: 4757 - DNA, 421 bp, Glycine max
  unsure (1)..(421): unsure at all n locations
tccttacagtcacctcgcggcatgcaagcttataaatatacaccctntaagaaagttaattaatatagttagtagcattaaattgttaactatntgtattatttttgtcaaaattattcttaaaattatcggaactcataattnttctcttttcacttaattactttcccacctaattaattaatgggtgctagtcttcctatctaatccttataagataggtaatgcatntatctttttagtatataacatttattgtaaaataattatgggtatttgggtcaaaaaataattaatacaaaagataacttgagaagactcttataagaagggaacaaataaaattgaaaaaagattattatatctatggatagagtgagtatgtccgagcactaagccccttgtgaaactaatggcatgc

SEQ ID NO: 4758 - DNA, 469 bp, Glycine max
  unsure (1)..(469): unsure at all n locations
gtcacgaacgatgctgggacgattgtgaatgaacttgaagttcagcatcctgctgccaaggtgttggttntggctgggaaggctcaacaagaggagattgnggatggagctaatttaactatttcatttgctggggagctcctgcagggtgccgaggaacttatcangatgggtttgcatccgagcgagatcatcagtggatacactaaagcaatcaacaaggttttttcagtttttgatgaaagccttagtgatctgtctttaaatgtcatattgctgctctctctccctctaatttcttgttttgtttcagactgttcaaatattggatgaactagttgaggatggttctgacaatatggatgttcgtgataaggaacaagttatttcaagaatgaaagcagccgttgccagcaagcaatctggtcaagaagatatcatatgttcgcttgttgctgatgtgagtata

SEQ ID NO: 4759 - DNA, 465 bp, Glycine max
  unsure (1)..(465): unsure at all n locations
tcttacgtcacctgccgcatgcatgcttaaatacactcaatgaacactagcatataccgaataattataaattttcatactaatcttcttatatactatttttgaaatttccaagatattaaacatattctttntttgtgtttatattttcaataaaatattcgatcagagaatttgtagaagaatataattaagattactcttaatccaccttatatatgtgcgaattcatttggatcattaaaatatgttacaacaaaaatgaaatatttcaaggaaatttatataaaattttgcaaagagttttatganaatggtgcatataattttttctataaatatagatataataaaccacagttctttttgtacataaaatttgtgttgctttaatttcgtgtgtgtntgtggtgtatatataatatcttgaaatgtttccttaaaaaaatatcttgaaatgttttt

SEQ ID NO: 4760 - DNA, 409 bp, Glycine max
  unsure (1)..(409): unsure at all n locations
ngatgttcgtcttcgtgcctttatatgtgccactcatactcttggaggggtttacatctatagtaatcaccaaggctgtgatggcagtcgcctttactatggtaaaaaaatacttttctcttaatagaatgctattttgtacttttcacatttgtcccattgcatatcatcaaaattagtataagggcattntaatttccgcttagcttgtttatatttcatttacataagatttttccatatttctataattttatcttgcctttgcaacagatggctgtgctagtgctgtggtaaatggagatagtgtcgctcagggttcacaatttttctttaaaagatgttgacgttgtggttgctcaaataaatctagacgtggtatgtattgcatggtattccatatatcaat

SEQ ID NO: 4761 - DNA, 393 bp, Glycine max
  unsure (1)..(393): unsure at all n locations
tccatcaataactnttcactcggatgtccgatcaggcgaattatatatcgagacacccgaaattgactaaaggaagttgtcgagaaattcaaatggtcacaacttttcactcggatttccgattcaggcgcataatatatcgacacgctcgaaattgaacaacggaagctctcaagaaatctaaatggtgataactttttactcggatgtccaattccggcatataatatttctagacgctcgaaattgaataactgaagctctcgggaaattcaaatggtcataacatttccgacagatgtctgattcaggcgcataatatatcgagacgctcgaaatntaacaacggaagctcacgagaaattcaatgtgtcataactttcacacggatgt

SEQ ID NO: 4762 - DNA, 420 bp, Glycine max
agcttgtgcttcaacaattgcaacaagacccactatccataatgagagaacaatttttttttaaaaccttgcatctcgtatgaaatatgttctctctttaggtttgggttaggtcagcggatttactcccaaggagccttctcaccattagaagatcaccttcttcatagggtaaacctcttcaatatgctcatcacccatggcttcaccttcatttccacttgaggaaggagaagaagtagcctcctcttggctactatagatgtcttgacccctcataatcatggttttctttgtgggggtattgagaagcaatgtggcctttcccaatacatttaaagcacttaatgttactagttctatcttatgaactagcctttggagtgatttcctctatgcatttacccttatcatcctttg

SEQ ID NO: 4763 - DNA, 276 bp, Glycine max
agcttgtatggttaaagactcacgattgtcacgtgctcatgcaacaattgttagcccgggctatacgagacatctttccaaacaaagtcaagttaaccataactcgcctgtgctttctcttccatgctatatgtagctaagtcattgatcctgtgaaggttgatgagctggaaaatgacgccgcaattatactgtgccaggtggagatgtattgttcccctgctttctctgacatcatgattcacttgattgtgcatctagacagagaaatcaaat

SEQ ID NO: 4764 - DNA, 307 bp, Glycine max
taagctccttcaactgcacaaggctcttaatatttgaagagtatccttgtggaaccttcacccgatgaagacactgacaaaaacttatcttctccttcttggacaaagtatggcaggctgggggcaagtaaattttcttcccatcagaccttggatgcaactgtgatcttatacccatatcaactagatcttgacgggtattcaagccatgcttcgtcttgccttgaatgttaaggagcgtcccaatcacactgtcacaaacatttttctccacatgcataacatcaatacaatgtctaacgtcaag

SEQ ID NO: 4765 - DNA, 306 bp, Glycine max
taataaatctatatatggtttaaaacaagcttcccgtcagtggttctcttatttttcatgggataatttcttcatttggttttgaggaaaaccccatggatcaatgcatataccacaaggtcagtgggagtaaaatatatttccttgttttatatgtagatgatattttacttgcagccaatgatcggggtttgctacatgaggtgaaacaatttctctctaacaattttgacatgaaggatataggtgatgcatcttatgtcatcgacattaagattcatagagatagatcttgaagtattttgg

SEQ ID NO: 4766 - DNA, 318 bp, Glycine max
ttgagaaaattcaaacgacaataactttttactcggatgtctgattgagtttcctaaatatatcgagacgctcgaaattgaataccgaagcgctaagcaaattcaaacgacaaaaactttttactcggatgtctgattgagtcccgtaatatatcgaaaagctcgaatgtgaatgtagaagctctgagcaaattcaaacaacaataactttttactcggatgtctgattgagtcccgtaatatatcgagatgctcgaaatggaataccgaagctcggagcaaattcaaacaataataactttttactcggatgtccga

SEQ ID NO: 4767 - DNA, 357 bp, Glycine max
agcttgtcttttctcttcagtttcaaaaatcatatttacgagaattatgaatttgaattctgcgaaggacatttgggactacctcaaattagagtatcaaggtagtgatcgaaccaaaggtatgaaggtacttaacttggctagagaatttgagatgcagagcatgaaggagacagaaactatcaaaagttatgctgacaaactgttgagtattgcaaacaaggtacgtctccttggtaaggattttcctgacgaaaggatagtgcaaaaaatacttgttattgtacctgaaaaatatgaatctaaaatattagcattagaggagtcaaaagacttgtcaaatatcacccttggaga

SEQ ID NO: 4768 - DNA, 356 bp, Glycine max
agctttagatttctactttattattaatactcatgtcatccttgagtaatcattgatgatggagaggaagtaactttcccctcctagtaatggaactcttgaaggcccctagtagtcagaatggacgtagtcctatatggcctttgtagtgtgcatgaacttttggaattttgttcgatgctacttcccatagacacagtgctcacaaaattaaagaggttccaccttatgatttctaggtaagcctggcttgctaagtgtacttagcaaaatctagagttgactaacgccagggtggatgtagcttggaagggctccatgatttcacacgtcggactagaggtgccctcttttaa

SEQ ID NO: 4769 - DNA, 350 bp, Glycine max
agctttgcttctacaatattatattattacgatcgaaattgaacaacagaagctctcgagaaattcgaatggtcatgacttttcacacgaatgttcaattcggggacataactcatgtagacgctccaaattgaacagcggaagcattcgagaaatttgaatggtcataacttttcacacgaaagtccgattgggggacataactcatgtagacgctcgaaattgaaaaacgtaagctctcgaaaaattcgaatggtcataacttttcactcggatgtccgattcgtggacataactcatctagacgcttgaaattgaacaatagaagctctcgagaaattcgaatgctc

SEQ ID NO: 4770 - DNA, 357 bp, Glycine max
agcttagtccataaggttttccatatgtggctaaggaacttagcatctctatctaacacaatggtcctaggcaaaccatgcggtctcacaacttccctgaaaaagagttttgagatgtgggaagcatcatccaccttgtggcatggtctaaagtgtgccatcttgataaacctatccaccaccacaaagatagagtctacacctctttgggatctaggaagcccaaggacaaagtccatactaatgtctacccaaggtgcagaagggatgggtaagggtgtgtatagcccatgaggcatcaccctagacttggcttgtaaacaagccacacacctagtgcaatgcttatggacatct

SEQ ID NO: 4771 - DNA, 317 bp, Glycine max
  unsure (1)..(317): unsure at all n locations
ttaagcaaattcaaatgacaataacttttgactcggatgtccgatttagttattttataatttgagacgctcaaaattgaatgcaggagctcttaccaaattcaaatgccaataactttttactcggatgtccgattgagtcccgtaatatatctagatgctcaaaattgaaaacagtaactctaagcaaattcaaacgacaataacttctaactcggatgttcgattgagtcatttaataattcttgacgctagaaattgaatacagaagctctcaccannattaaatgacaataactctttactcagaagtctga

SEQ ID NO: 4772 - DNA, 358 bp, Glycine max
agcttgtaggccttggatcttctttatcaatggagtcctttgcttcttgaagatgaatggcagtggaatggagatggaagaaagatgattggagacgacacttcaaggagaagatgagtcaagaagaagctcaccatcataggaagccatggataagagcctgaaggcaggagaagatgagtggacagagagggagagaaggagcacgaaattttatgcctcaaatgaggtataaactttgaagtgtaattcttaaatgatcaaagttgaaaaaatgcacacacatggcctctatttatagcctaagtgtcacacaaaattggagggaaatttgaatttctattcaaatttcacttga

SEQ ID NO: 4773 - DNA, 347 bp, Glycine max
agctcgtaaggcttttgtctctctattgtcacatgctcatgcaacaattattagccgtggctataccagacatcttgccaaacaaagtcaggttagccataactcgcctgtgctttttcttccatgctatatgtagcaaagtcattgattctgtcaagtttgatgagctagaaaatgaggccgcaattatactgtgccagttggagatgtattttccccttgctttctttgacatcatgattcacttgattgtgcatctggtcagagaaatcaaatgttatggtcctgtttatctacggtggatgtacccagttgagcgatacatgaagatcttaaaagggtataca

SEQ ID NO: 4774 - DNA, 248 bp, Glycine max
gaatggcaaaccaatggagatggaagaaagacgatcgcagaccacacttcaaggaaaacacgacccaagaagaaccccaccatcataggaagccacggataagagcctgaaggcaggagaagaagagtggacagagagggagagaaggaccacgaaatcatacgcctcaaatgaggcataaactccgaagcgcaatcctcaaatgaccaaagtcgaaaaaacgcccacacatggcctccatccatagc

SEQ ID NO: 4775 - DNA, 324 bp, Glycine max
tgcttaagattgtatattgatttctttaatttgcacaccatgtgtttctgtccttttactgagaaccccattgactaatccatataaacattctcatctaaatatccattaagaaagagagttttcacatccatctgatgtagctccaagtcataataggctactaatgtcatgataatcctgaaagaatcctttcgtgaaaccagggaaaatgtctctttataatcaatgttatctttctaagtaaacctcttaacaacaagtctagccttgtaacgttcgaagttggcatgagagtcacatttagtcttgaagacccactta

SEQ ID NO: 4776 - DNA, 320 bp, Glycine max
tgtcactccacccatatctggccttcacattaaccacacttaacactcttttttttcaatgttagtgtttagctctactgagctttaaaagattggctaagattttgttaaaacataagcacttagacaatgaaggaaagctggagttgctgcacatgatgtccaacgttatgtcaaggaataagatcgggctgcacaatgtacaaggcaagataaaatggcaaatgaagaattgaagttgcaggatccacgatgtcggatacaatgtcctgacatcctgcccgagaatactggagttgctgtacaatgcaagataaaag

SEQ ID NO: 4777 - DNA, 355 bp, Glycine max
agcttgtagttgctggaaatccttctggattattagtggacagcactgatgggtggaacacagcttctgttgtgggaacattctcagggcctaagcatcgcttggccacagcagcaactgtgaaggacgggaaggtgtatctgaaccatatggttggaattggatacccaaaaaagaagcatgcaattgttgaggcagttttttaacgcatactttctagaaatctaaacattggggaactgggaatgtggggatcatacatttacaggacgtttagttgaaatttggtgtacctttgcttatttatgtttggttttgttgcattacttggcctcagacctcaatgcttttccct

SEQ ID NO: 4778 - DNA, 348 bp, Glycine max
agctttccctctttgaacaaatactcctcagccaaatagaatccatcttgggcctttttcccacaactctcataaatgggagagagaaatgttcatctaaagcatacaagtccctaatattatcaaatcctaaaatttgagctcctagggagaaaaacaatgtgtgtctcctagagagggcatcagctaccacatttgtttttccctttttgtatttgataacatatggaaattgctctaggtactctacccattttgcatgcctcttgtttaacttgctttgccctctaatgtacttaagtgattgatgatcactatgaatgacaaattccttggaaacaaggtaat

SEQ ID NO: 4779 - DNA, 315 bp, Glycine max
tgggtacactaggcacacacaccctatcctgaaacctcaatactccattttttcccaatctaaaactactctttctccctgcgactatggactctaactgagctgacaagaatgggtcagacttctgaccctcacggatctcgcttaagagttcgctggtgactctcaacatacccaacttaatgctactagaggtgatctcacatgccaaactcatgtctctaaactgctctaagagatccaactctctaaccatcaaagcagacatttgaagggactttctacttaaggcatcagctactacattggctttac

SEQ ID NO: 4780 - DNA, 340 bp, Glycine max
  unsure (1)..(340): unsure at all n locations
agcttangggacgttttgattattcttatatngcagaaaaagactatgaaacttttgcacacaaatggttcgaaaaaagacattcctggttgcttgaaatgtaataacggtgttgcatacgccgaaaggcattacctaatacttataatgaccatcatgaatgtgaaaactcatctttgtaatgtcatgggtcagattcgatattgatggaagctcacggttagatcaagcttgtaaaaaatggtggccactcccacaataagcaaaggaatcttgtccttaactgtgagtgcattaatcacttgatagtccaagcacaagcactataaactgtgcttat

SEQ ID NO: 4781 - DNA, 337 bp, Glycine max
  unsure (1)..(337): unsure at all n locations
gctttgcatcagctctgataaatctgccatatactcatccgatattaggcctcatgagctttctcatatttagcagcttattggaattagcttgagtggcttcccttttagatacttgggtgttccccttttatcatctagattaaatgtatgccattatactcccttgctttccaagattactggcctgattcagtgatggagcangaagtctttatcttatgcaggtaagctagagttgatcagagtagttattcaagggaatgtgaatttctggatggggattattcctttgcctcaatctgttctggatcggatcaacacttcatgtcgtaat

SEQ ID NO: 4782 - DNA, 411 bp, Glycine max
  unsure (1)..(411): unsure at all n locations
agcttgccttttgcaattccaagacactagtgagcttccaagtatatgacatgtaccacttgtaattntcctatctaatttgcatcttccagaatcagagtctgaaaaaccttttaagtttagggaacttcttttgaataccacanacctacattggttgtgcccttaagatacttaatgatcctcttaacagtagttaagtgagattcctttggattggactgatatatngcacataatcaaacacttagcatgatatccggtctacttgcagttaggtagagaagtgatccaatcatacctatgtatcttgattcatccactgatttacctttctcatctaagtaagggagggtaatgttgtaacgcctttaaatttcaataactgaaaatagatgtttgatgtatttc

SEQ ID NO: 4783 - DNA, 345 bp, Glycine max
aatatgtatgtatgtaaatatgttgaataaaatgccttgcaaaatgttgaataaaatgccttgcaaaatatgaatatatatagcaggaaaatgcctggcataatatgattatatatagcatgaagtgccttacaaaatgcttagatgggtagcgtaaaagtgtttttcaaaatatgtgtatttgtgaataggtagcataagaagccttccaaaaaatgtgtatatatataggatgtagcatgaaaaggttgtcacacaatatgtcatggatatgtgtcgaaatgcttctcacaaattttatgtgtgatatgcgttgtgtcataaatacatggcccatatgatatt

SEQ ID NO: 4784 - DNA, 452 bp, Glycine max
acttcgatggtgtgtttgctaaattgcaatctttcatctgaaacctatccaagaattctccctcatatttcttttgacaaataaagattccattagttggttgattcacttctttatctccacttttaacatagagtgtgtgctcataatgacattttgtgaacatagcttaagaaaaatatgcttcaatgcgactataccatgctcgtggggctttgttcaacccgtacaagaacctttttaatcttgtaactttatgctcacttccaatcttgacataacccggtggttgttcaataaatacttgctccttcaagtatccatgtaagaatgttgatttaacatctagttggcaaatgggccatgatatttatgccactaaagcaatcatcaatctgatcgtgtcatgtcttgcaacttgagaaaaacttctgtatagtcaatcccatatt

SEQ ID NO: 4785 - DNA, 472 bp, Glycine max
  unsure (1)..(472): unsure at all n locations
actctcncttgtagttgtctacctcaacctcaatttcatatattggctagcctagtatagttgctactgttaataataactcttgtgtggtttccaattctgttgtttcttcttctagtactcctagcctttggcattctagattaggtcaccctaatggtcatgtaatgaaactagtcttcaatcattgtaacatttctccatcaaataaaaatttctcaggtttttgttcttctagttgtatgggaaagtctcatagattaccatctcacactcttgtttttgtttacttctccttggagcttattttcacatatttgtggggaccttctcatntgacttcatatgctggttataaatattatgtatcctntattgatgtntttttccaagtacacctggatatttcttatcaagtctaaagttgaaactctntgttttcaagctttaaatctatggtgaactgcaacta

SEQ ID NO: 4786 - DNA, 464 bp, Glycine max
  unsure (1)..(464): unsure at all n locations
cttcctcactagcaattgctagtactatcatctcagattccatagtggactaagctaagatagtctgtttcttcgacttccaagaaacagccccaccagctatgctaaatatatagccactggttgctttggaatcatctgaaagagtgttccaatctgcatcactgtatccttcaagtacagcgggaaaccttttataatgtaatccaaggtttatgattcttttaaggtacctcattaccatttcaatagcgtgtcagtgctccatactaggtctgctggtaaacctacataataatcctacaacataggctatgtcgggtctagtacaatcagtggcatacctaagggtgccaatgatactngcgtactcagttggttgtataccttcaccagtgttcttaaacaagtttacacttggattatatggtgtactagcaggtntacagtcaaagtagtcatat

SEQ ID NO: 4787 - DNA, 311 bp, Glycine max
  unsure (1)..(311): unsure at all n locations
agctctccaaaaattcaaatggtcataacttttcacacggaggtccgattcaggcacatgatatatcgagacgttcgtaatngaacaatggaagccctcgagaaattcaaatggtcataactttttactcggatgtccgattcaggcacatcacatatcgagacgctcggaattgaacaacggaagctatgaagaaatcaaatggtcataaactttactcgaatgtctgattcacgtgcatcacatatcgcgacgctcgaaattgaacaacggaagcaattgataaattcacatggtcatacttttttgtc

SEQ ID NO: 4788 - DNA, 358 bp, Glycine max
  unsure (1)..(358): unsure at all n locations
tatctaccccatntctgacagtgctngngtaagcccagtccaggtggtaccaaagaaagggggcatgacagtcattcggaataaaaagaatgacctaattccaacaaggattgtcactggttggagaatatgcatcgactaccacaagctcaacgaagccacaaggaaagaccattttcctttgccattcatggaccanatgttggagaggcttgcgggacaagcttattactgcttcttggatggatactctagatacaatcaaattgcgataaaccccaaggatcaggagaagacggccttcacatgcccttttggcgtctntgcttacagacgaatgtcanttgggttatgtaat

SEQ ID NO: 4789 - DNA, 464 bp, Glycine max
  unsure (1)..(464): unsure at all n locations
gcttgagatcctgacaggatccanacacaaacaaacatatggagtgagttatcatattcgtaaacaggtagagataaatgaagacacatatataatataagtataacaagctcaacttagcacaattcacatcattttaccactcatgtaacatcacttgtcccaagaatctaataaaaaaatcacatttcacactttcacataatcacgtgttcagaacaacacattcaagtacaatacaacatctcatgctcacacaattcattactcaccatcacgtaacaaatcacaatgatcattacatagacattatgcaacaaatacactaagactcaattntatatgcaatgtggtattaggtgagtgaaaaatctcatcaggcgcctaggaatacatgacaagacaagtcatacatcggtaagtcaagtcactctcactaggtaaaatcatagagagagcaatca

SEQ ID NO: 4790 - DNA, 468 bp, Glycine max
  unsure (1)..(468): unsure at all n locations
cctcatgaatcttgaagtgttcttcatctnttcttcttgagtcttgaattgttcttgattccatcttgaacattatgaactcattctttcattgacctttgtgccttttgtcattacctttgtcatcatcttttgttataatcattgttatcatcaaaacatctttgaatcattcttgattcaccatgaagctttgcttctacacgttagtccctcaagtcatagaaataagataacatacaaatgctaaatgatgaaacatgaaaagaatacgaatctggggatcccacggtcatgtggctccgcatgccaccggactcttgggtcacggtaacaaaaagtgaggtggtcgacaaaagcatggctnttgctcctacgtatcctcaatntgtgatgaggaactcagacctacgtagttcttgataactgtgagaactaaaatagtctcggtgttttcttcactaaaat

SEQ ID NO: 4791 - DNA, 410 bp, Glycine max
  unsure (1)..(410): unsure at all n locations
cacttccagngccctacattacgagtatatgtgtctagggtaatcatgcttcatatngaatttttgattacagcttcctcttttctaatggtcaatatcatgggtaagttggctattgtatccacttagaagttattattttgaaaaaaaaaaaaaagctatttgctgttttaagcataataattctggcaaaaaaatggaaaaactaaggccagaattagacattacagatggtatggggaagtatgagttcaagttcctatattgcttcaagaagctagttattacaatcaatggcanaactctaggacccagcatccagccataggaaggtgataccattattgttcaagttaataatagtttactcacagaanaccttttgatccattagcactggatcagacaag

SEQ ID NO: 4792 - DNA, 478 bp, Glycine max
  unsure (1)..(478): unsure at all n locations
gtgctcacctttagtagaggagaattcttcaagttgtttcatgtaaacctctttctctagatgaccattaaggaatgtcgttttcacatccatttgatgtaactcanagtcaaaatgagctactaatgccataattactcaaaaggaatctttcttagatacaggagaaaaaatctttgtgtaatcgattccttctctttgagtgaaccctttggcaacaagtcttgcctaatgtctctcaatgtttccttgtgagtctttattggttttaaaaacccatctacatccgatggctnttacaccactaggcaactgtataagatcccagacttggttaaatgtcatagaatccatctcatctttcatggcattgtaccacaagtttgattctttagaactcatggcttctgaaaacatttcaggatcatttgcagctccaatgttgtagtccgattcttgcagatacactacataatca

SEQ ID NO: 4793 - DNA, 455 bp, Glycine max
  unsure (1)..(455): unsure at all n locations
agcttctatacatcattcttctaaataggtctagctttttntgcatttctttggcccagtattcattagatatagcgtcatccatgtgctctggctcgatcttggaaagtagtgttgtgtgcttgagagaattccttgtctggactntgcccttaggatcaccaatgatctaggactctngatgatattttctcagcaagtgtctagttggttctctaacttctttaggttgatcatccattggtgagttggacacaagttggttctgactggatgcaacaatagacttgacgatatcttcaattttcatctctgcaaaggactcatccagttttgacatggtagtgttaggctcgttgtcattaaacctcacatgaatggcttcttccanagtcaaggctctggagttgtacactctatatgcctacactattatcantaaatttttattccct

SEQ ID NO: 4794 - DNA, 382 bp, Glycine max
  unsure (1)..(382): unsure at all n locations
tatgatcatggatctatcaatntaagttaaaggagtaaatcacttctaggaatgatntaataaaagataactaatctattagagattacccaaatagtttgatcatgcaattcagtgcaaaaaattctctacctagatctaccaattacatgcaggtgataactattatgcaatcgattgagtattagaatgacctatgccaaataaacattaaaataaggaagaaaattaattaacataaaacaatgagaaattccattaagaacaaggaaaggagtacatttggacaattacatcataaccctcgaactaaggggactatctactcaaaatcaaagcanaattagcaattctataaaataaaataaaaagtaaagataga

SEQ ID NO: 4795 - DNA, 496 bp, Glycine max
  unsure (1)..(496): unsure at all n locations
tgatagtgagactcaacttggatactcttcttgtgctttatcaattgcaacaagacccactatccataatgagagaacaattnttttttaaaaccttgcatctcgtatgaaatatgttctctctttaggtttgggttaggtcagcggatttactcccaaggagccttctcaccattagaagatcaccttcttcatagggtaaacctcttcaatatgctcatcacccatggcttcaccttcatttccacttgaggaaggagaagaagtagcctcctcttggctactatagatgtcttgacccctcataatcatggttttctttgtgggggtattgagaagcaatgtggcctttcccaatacatttaaagcacttaatgttactagttctatcttatngaactagccttggagtgatttcctctatgcatntacccttatcatccttnggcttagaaggtggtactccttgtctcttacttccatanttaaactactt

SEQ ID NO: 4796 - DNA, 467 bp, Glycine max
  unsure (1)..(467): unsure at all n locations
agaagaagaagaaattcanagagattcatggcttgtaaaagattgattgaatgaattggaaatgtatattgaaaagcanatcanagccttgcttttatagactcttcatgtctggtcaagaaaaccatttagaagagttacaacttttagaanaacttanaaccaatttgaaaaagtcaaaaaaccttttgaagagttacatcttttgatttattcagaaacagtcactggtaatcgattaccaaatcagtgtaatcgattacacaaggcttttaagtgaaaggatgtgactcttcacantttgaattgaatttcaacgttcaaaggcactggtaatcgattaccaaaacattgtaatcgattacagctttttgaaaataatttgaaacgtttaaattcaattttgaaaactttnntcaaaacaattttctactggtaatcgattacagcaatctggtaatcgatta

SEQ ID NO: 4797 - DNA, 357 bp, Glycine max
  unsure (1)..(357): unsure at all n locations
atgtatatctatattcccttattttactttatttcggagnaaaatatcaagttttatatacttgacataacatattgcccgaattctattcaattatcaatgatccattatattaatgaaagtcaaaatagattcctttggttctttaataaaagccatatattctaaggcagatagttccgttatttaggtcttggctcagtcagtggtctgggatgccatggtgccttcaaaaaagaggacacatgtaggtcgtccaaagcctttgtatgttgagaagctcatgagagacctatgcactattcttcacgaacaacagtcttatttttctgcatcttctgaagaggatcttctttt

SEQ ID NO: 4798 - DNA, 416 bp, Glycine max
  unsure (1)..(416): unsure at all n locations
cggtcctgtggaacaatgactgccaagaggtcttctagaagatcaaccagagtctcgcgaatcccncggtgctcatgccacctgtaacaggaagacctcttttcctgtacatgaccgtgttggacgagtctatggagtgcgtgttgggtcagcatgatgattctgggaaaaaggagcaagccatctactatctgagcaagaagtttaccgcatgtgagatgaattactcaatgctggaaaggacgtgttatgctctggtatgggcatcacatcggcttaggcagtacatgctcagccacaccacatggcttatttcaaaatggatcccgtgaaatacatctttgaaaaaccggccctcacgggacgaatcgctatgtggcaggtactattatctgaattcgatatcgtttacgtca

SEQ ID NO: 4799 - DNA, 457 bp, Glycine max
  unsure (1)..(457): unsure at all n locations
gcttaacactttgttgatgggtgcaccatntattatgctgggtgcgtgtaacaaagccccattatggaatggacatccatcaactaccatagaatggacttaacttagtttattgggaccgataataatagtcgtttacaacacttgtcataaacttgtaaaaacaaatgtaataaattttgtagggagataattacattattttaaaaattaatatataagtatattttccttcaattatacattgtcgtatatgataaaattgttgattntaataataattattttaaaatcatattgatgatatcttttattaatcaataatgttaataaaaatatatatttacttaacttacatttaaaagattttttaaatgacctatagttntaccttttaaccaaataacgttttctttataaaattctatgcataaggttaactctttttatataaaaa

SEQ ID NO: 4800 - DNA, 412 bp, Glycine max
  unsure (1)..(412): unsure at all n locations
agcttcacaattatatnntatctttgtcaagtaagtgacagcttgatattgattttttaggccacattggtgcaagttgctgctacagtacctcttaactgttcaagtcaacaagatggcttaagggtgtggttggataaacaatttaattaattgcttattggataaatacttatcatgcaagcgcttatgtataagctatttctgtaatctaagaggaaataggattaaactcttttaatacaagttgtaagttattttcacaagttatcatggagattggagagcttattgaaataagctgaaaacaaattatggagagatcataagctatgtccatatngctctccaaacacttatacaagttcttatgtcataagataagaccaaacaaactgtaaataagttgttc

SEQ ID NO: 4801 - DNA, 421 bp, Glycine max
  unsure (1)..(421): unsure at all n locations
gatgattatgagaaatggtgtgtaaaatatgaacatgtgtataatttataggttacaaaactatttatttattttttntaaaaaatagtaacaacaatgtttttaacattgagtggtccaacattcatagttnttttcctccaatgttcattttaattttttattttttaatttttctctcctgggctattccactttccctctacctttcctctatgtctcttcttttttccatctctctccccgaccgttccacttacccttcctctttatttctcttcctctatcgctgaccctttcacttcccttcttctcttcctctctttttattcttactctcccacataccctcttcctatctcccttttctctttttcctctcccaccacacgactattcctctccctttcctctttttctc

SEQ ID NO: 4802 - DNA, 421 bp, Glycine max
  unsure (1)..(421): unsure at all n locations
gctccagtcttgatctgaccctgttaaataatgacatagcaatatcttatatcagcttcagcttaaggtaaaaaaaaatcatttttcanaatttaaacaaaatttgtcccagaatgcaccactggaacaatgaataagaacatgatatgattgaaaaanaaaagcttctgattctggcaacttacagttgctaatccaactgagaggtcagcaatgaaggtatcctcagtttcaccactacaataaacaagatgaaacacattagtgtgcacaaagaataatacaatgtcacaaaacagaacaaatacctcctgtggctagccatgacaccccaaccagcttgtttagacattctcacagcttcaatactttcagttacactaccaatttgattcacctaacaatgatgaaataataataa

SEQ ID NO: 4803 - DNA, 421 bp, Glycine max
  unsure (1)..(421): unsure at all n locations
tcgcgatnttatctctctcagactngagtgttggaagaccaattacttagtcttctctatccagatgatgtaaatgatgcatgttaatgtgtactgccctacaatgccacaaccatgaatcatctattttacttacgaaacaactcagctcatgaaatgatgcatgttcaacatttagcatatagatattacctattcccttactaatgcggacaactttaccgaatatggtttcacttataagacaacaatttctgttgaactctatnttgaagcctttatcacaaagttgactaacacattctntatcagagttttctattgagtccctatatttccttctcccattattgttcctttgttattgtctccaaatgtgacatatcctgcattnnttgacacaaaatcaaatagtttggac

SEQ ID NO: 4804 - DNA, 485 bp, Glycine max
  unsure (1)..(485): unsure at all n locations
catgcaagcttattgaatatccacgaataacacactgaatatgtgaagagatcgcacactctattcattatatgataatgaaatttataagccttacatacttgactctcagaacagaataacaataaaaacaaaaaccacaaaactgcatgacgcataaaataggattgtttattgacacattaaaataactaacattaatttgtattttaattctcttttaatcactatagtttgaaattgatctttntagttcctataatttgtattttaattaccttttagtccttactgcaataaatatataaaataattagctacaaattagttataaattatcaactatttttttattacaaattatcttgtgataaattagttatgaattacttgctaatattgttgtagctaattataattgataatattaactcatatttgatggtaagaactaaaatgaaatcaaaatataaagtatatggact

SEQ ID NO: 4805 - DNA, 485 bp, Glycine max
  unsure (1)..(485): unsure at all n locations
gcttcttagtctcagatgatgccagctgagttgtagctacctcatgcactcctctttgattatggcatcatttctggcactaaactgctgatagttggaagccatcttctcaattaaatttctggcttcagcaggagtcatgtctccaagggctccaccactggcagcatctatcatacttctctccatattactgagtccttcataaaaatattggagaagctgctccgaaatctgatggtgagggcaactggcacatagttttttaaatcgctcccagtactcatacagactctctccacntgagtttctaatacttgagatacctttcctgatggctgtggtcctggaagcagggaanaaattntctaagaatactctcttaaggtcatcccagctcgtgatggaccttggagcaaggtaatacagccagtcctttgccactccctccagagaatgaagaaaagccttcagaaatatgtgat

SEQ ID NO: 4806 - DNA, 382 bp, Glycine max
ctgtgtctcatcgaggagaccgtaacggaacatccttcggagctgtgcctctccctcgaagatccggcgcgggttcttctcgtcgagggtgaggaggttccgcgcgttgttgcggatgcggctgagcgcgtactgcaccctccacagctctctcttgcaccgaagcccgtactcaccaaccagcttcaactccgcgtcgagacgctccttctcgtacggacgacgcggcttcttgaatgtcttcccatctgacaaacagaacaaaatataacagatcaatggcgttgctagggttacggttttcaaaacggcgtcgtgagaaactagaacgtggatcggttcgtggacttacagttcctgtagaaggagacgtgcaccatgg

SEQ ID NO: 4807 - DNA, 347 bp, Glycine max
cctctctagcaacacgtacaatctcggttggaggaatcatcccagccttagatggtcgaatccttcacaatagcagtaacaacaacaacaacaacagcagcaacatctacagccccagatacagcaaacagttgaggctccttcgcaaccttcccttgaagaacttgtgaggcatatgactatgcaaaacatgtattttcagcatgagaccagagccttcattcagagctcaactaatcagatgggacaattgtctacacagttaaatcaacaacagtcccagaattctgacagattacattctctatctgtccagaatcccaaaaatgtgagttccattacattga

SEQ ID NO: 4808 - DNA, 253 bp, Glycine max
  unsure (1)..(253): unsure at all n locations
cggaaacccaaacagtaccggatcggctgtcgtcaactccgccattgatatctctggtatggcgacatacttgggcgacgccctcatctgatatatcacctcaatcggcaatgtctccaaaaccctatacagaaccccttccacaccttccactctgtccatgacgatcttcaacctattcaccatccccccatgccgactgagagagacgaccactacgacgacgctgctntacgtgctggcactggcgtgt

SEQ ID NO: 4809 - DNA, 395 bp, Glycine max
  unsure (1)..(395): unsure at all n locations
gaacagttcccattttcctactccatactntttgtttgtcaaagcagctgtgtggctcttagacttgtcaaattcagtagcaagttcttcaacaaggcttcttccaacatgaaatgatctatgtgcctctgagaactctttggatgtgacaaatctataaggctgatctttgtctgcccagtactgctcctgatccttccttgatgttacctataacataataattaatggtcaaaattaaatgtatataacattcttttaccagtgcagacagattaaattattgggacagaacacaagaccacttacttcttgcaaaaagtctgccacacctttcctctcangacatttaaaacccattgattnaaaaattccacacatgtcgcggggaccct

SEQ ID NO: 4810 - DNA, 468 bp, Glycine max
  unsure (1)..(468): unsure at all n locations
agcttgaacgatgangactatatggagaaggaatggcttcttgagtgatgtatacagacaggtctttcgagcctgagccatgacgaagaaaagaagaagggttttggtaactgatcgcgtgggggaaaaatggatnttgggggtttaagttatgaataaaacaacatcggtttcttaaaaaaaatcgatgttaagatattaatgttaacatcacgttttggaaaaaccaatgttaacatcaacttgttaacatcggtttttttaanatcgatgttaattaagtcaacttatttaccaaaatgtcaccgcgcttttatttacatcgatttttgcgaaaactaatgctaagcttacgaggttaaatcaataaattgtagtagtgaccttctctcactcacgccaatatatgcaatctcccccttctacanatcatgacaactnnntgtgtcatccttttataagtcttta

SEQ ID NO: 4811 - DNA, 352 bp, Glycine max
  unsure (1)..(352): unsure at all n locations
ctaaagntactatcatgccaagaagatactgtgtctgatgggtatggagtatcanaagattcatgcttgcccaaatgattgcatactgtaccaacatgaattcaagaaatggccatattcccaaggtgtgnggtatcacagtacaaagtgaacgatgatgacgactgtagtagtgacgaaaactcanagaaaggccccctagcgaaggtgatatggtatcttcccgtcattccaaggttaagcgtctggttgctaatggagacgacgcaaaagaccttaatccggctgattcctcacaatggaagaacattgatcgttngtatctggatttcaacaaagaggcaagaaatct

SEQ ID NO: 4812 - DNA, 372 bp, Glycine max
agcttgcttctacacctttttcaatgcagcagcaacttctacaacaacaaagacaacaagcaactggggcctctcctccaccttccttagaagagttagtgaggcaaatgaccatccacaatatgcaatttcagcaagagataagagcctccattcaaagtctaacaaatcagatggggcagatggctactcagttgaaccaagctcagtcccaaaattttgacaaattgccttcacaaactgtgcagaatccgaaaaatgtgagtgccatcaccttgaggtctggcaagcaagttgaagtgcctccaccagtagcaacacctgcacctgaacctgtcaagcttcattctgcacttgaaaaagaggatgaga

SEQ ID NO: 4813 - DNA, 449 bp, Glycine max
  unsure (1)..(449): unsure at all n locations
agcttcacgatatactacgggacacaatcggacatcctattaaaaagntattgtcattntaattntcttagagcttccgttttaattacgagcggctcgatatattacgggactgaatcagacatccgagggaaaacgttttgtcattagaatttgctcagaagctttgttttcaatatcaagcgtctcgttatattacgggacttaattgtacatctgagttaaaatttaatggggtttgaatttgctacgaccttctctttccaattacgagcgcctcgatatactacgggacacaatcggacatccgagatataagttatttttttttgcatttgctcagagacttatgtttcaatttcgagcatctcgatatattacgggactcaatcagacatccgagatataagttattggcctttgaatttgctttcgagcgtctcgatata

SEQ ID NO: 4814 - DNA, 413 bp, Glycine max
  unsure (1)..(413): unsure at all n locations
caacgaaatcaaaacatttgttgtggcattgtgcctgctgcaatttatggaagatgagaaatgaggcttatgatgggcaaaaattacttcaacattctaagattatatggcttgngcttatgatggatggcctgtgcaggaaccatatgttgtcggatgcaagaggattgatggatctgatgatgaggaatggggtttacccagatacaattgcttatagtactctcttgcatggatactgcagcagagggaaggtttttgaagctaaaagtgttcttcatgaaatgataaggaatggttgtcaacctaatacttacacctgcaacacattgctccaggaaatggttgtagtaagagtcttcanacttataatgcattgatccagatatttgcagttataacaatattatcac

SEQ ID NO: 4815 - DNA, 397 bp, Glycine max
  unsure (1)..(397): unsure at all n locations
agcttctatagaaggttctttcctaatttctctattattgaatcacctctcaataagctagtgaagaagaatgtggcatctacctgnggtgaaaaacaagagcaagcctttgctttgctcanagaaaagcttactaaggcacctgttctagctcttcttgactnttctaaaacttttgagctagaatgtgantgccttggagtgggagttggagctgtattgttacaaggtgggcaccctattgcttattntagtgaanaacttcatagtgccaccctcaactaccccacctatgataaagagctntatgccttaataagagccctccaaacttaggaacattaccttgtttccaaggaatttgtcattcatagtgatcatcaatcacttaagtaca

SEQ ID NO: 4816 - DNA, 410 bp, Glycine max
  unsure (1)..(410): unsure at all n locations
agcttcttcaagttccaaggcatagtcttcatgttgctctccctatctctaacaatctctccctttttggctntgatgatgccaaacttgaatntccatttgagtgcatntggagagtcttgagagtagagacttttcttgggaaaacctaaagtttcttaacactaagagaaatgtgtcaattcatatcatcatcatcatcatcattagttggagttatatatgaatgtatgtatgcagtgcactaatcatatgcatctcanatccatgtttcatctgcttgacttgaagtccaaggaagaagttcaactctcccatcatagacatctcanattctttctgcatagaactgganaattccttacacanagtttcattagtagcaccaaaaattatatcatcaacataga

SEQ ID NO: 4817 - DNA, 349 bp, Glycine max
  unsure (1)..(349): unsure at all n locations
tagttatgaacagaatccagaagcatccttggacttcgcatnttanctatgttggagaatagttntgatgtttggtgcagttcctgctgcactcacctactactggcgcatgaagatgccagagacagcacgttacactgcccttgtggccaagaatgcgaaacaagctgctgcagacatgtctaacgtgttgcaagtggaacttgaagctgaagaggagaatgtgacaaaattgacagagaatgagagccacaagtatgcgttggtcaccaacgaattagtgaaacgccatggnctgcatattgtgggaaccaccaccacgtgcgtcttggtggacatagcattctac

SEQ ID NO: 4818 - DNA, 495 bp, Glycine max
  unsure (1)..(495): unsure at all n locations
tattattgagtggacgctactatctcttattcctgtcttaatgagccaatggctacggagctatcgtccaattgtaaatctgcaaaagactcatctagctctaataattctttatcaggcttatttttgtcaaatcttatatggatagcttcttcaacaactaaggttattgagttgtacactctaaatgcctttgaagtttcaaagtatcaaagaaatattccatagtcacttttcgagtcaaaattttcccagactatcatttgtgttaagaatgaaacacttgcacccaaaaggatgaaaatatgatatgttgggttttcttcccttccacaattcataaggagtctttntcaagatgggtcttatataaattatgttntgaagatagcatataagttcttaggggttaagttatcagttggcatggttctagccatctcttggagagaattgttctttctttcaactactccattttgtagcggagttctt

SEQ ID NO: 4819 - DNA, 393 bp, Glycine max
  unsure (1)..(393): unsure at all n locations
agctngaaggtgcgtacccaccatttttataatagagcactggtaatgtgtctactatcattgttatcatttctttctccatcattgagggtgctacctaggctgccaggtctctccacctttgggtgtatactttgaaagatttcatgccccttnttgcacatgttatgtagttgcatcctatccggagccatatcagaattgtactgacactgcctaacgaacgcaaccattagtgatgcaagttccattggagcttgtaggcctaggatcttcttcatcaatggattcctttgcttcttggaagatgaatggcagtggaatggagaaaggaagagagagaggagacgccacttcaaggagaagatgagtctagaagaagctcaccaccat

SEQ ID NO: 4820 - DNA, 394 bp, Glycine max
  unsure (1)..(394): unsure at all n locations
acaatatatcttgtcctgtnttcaccaacatacactgcannagtgccctttggcacatcttctggaagaccaccctcttcattgtagccctgctgcttcttcccaaaacttgaacaccttctcacaatttgcttgatcacatctgcttggggtagcttattggattntttgatggccattgtgatatgtgattgtgttacttagtactctttgcacaccttcaaaagggtctcttgagggtgctgaaagtgtgtgattcatggggcgagtttggataggcatttatcattgngacattggtgtaagtggaaatgagaaattgagttttagagaaacagggtcacgtggctgtggggacacatgtagcagaccacacccannatngtcgtacatg

SEQ ID NO: 4821 - DNA, 474 bp, Glycine max
  unsure (1)..(474): unsure at all n locations
agctntataagctcaattgaagccatatctctagatgtgtgactaaaccaccacccttaaggctgcaattaaggcaaccacaaagaggctgcaactaaggcgggataggggtgaccatggttatcaaacactcgagttaactcattaactcttacaagtttacaaattcacttaccctctatgagttgactntgtataaactctctttttagtagaccctaggtagactttataaactctaagtaaactcggtagactctggagtttaccaccaagtcaacaagtcatcaagttaaaaaaattagaccaaaatgtaagtcattntgggttattntttgtctgtttagtgttcaacataccttcatttagtttgttattcccaaataanaaaattctcatctttaataacatcaaacccttgatgggaatgatctacgactactataacatctgcaagttattatctagtagtca

SEQ ID NO: 4822 - DNA, 446 bp, Glycine max
  unsure (1)..(446): unsure at all n locations
gctatgctgcaacattataatagacccnctcagcttcaaaaccaacaacaccagaataattatgatctttcaagcaacagatacaatccaggttggagaaatcatccaaatctgacatgggcaagtcctccacaacaacaacagcctatccctcctttccagaatgttgctggtccaagcaagccatatgttccttctccaatacagcagcagcagtcacaacaaagacaacaagcagctgaggccccttctcaaccttccttagaggagttagtaaggcaaatgaccatccagaatatgcaatttcagcaagagacaagagcctccattcagagtgtgacaaatcanatggggcagatggctactcagttgaaccaagctcagtaccaaaattctgacaaaattccttcatagactatgcagaatccgaaaatgtgagtgcatca

SEQ ID NO: 4823 - DNA, 208 bp, Glycine max
  unsure (1)..(208): unsure at all n locations
gctgatatgatcacacaagctctcgagaaatncaaatggtcataacttgttacactgttagtctattcangcgcataatatatcgagacgctcgaaattgaaccatggtagctctcgagaaattcaaatggtcataacctatcacacgaaagtccgattctggcagatagtataccgagacgctcgtaatcgtacaactaaagctctc

SEQ ID NO: 4824 - DNA, 472 bp, Glycine max
  unsure (1)..(472): unsure at all n locations
gctacatctcctaaggatctccttagataatgcttaactcanaaaggcctatccttggacaacataattggagaaatatcaaagggagtttctactcgccctagactcgagctaaatcagtttaaaaggaatgaagtgtgagacttagttcctaaacctgcctctcacatgtcaatcggaaccaaatggatgtttcaaaacaaacttgatgaatcaggcatcatagtaagaaacaaagccagattggttgcataagggtacaaccaagaggaaggcattgactatgatgaaacctatgccctgttacaaggttagaagccattatgctgctggttgcttttgcatatatntatggatttagattattccatatgtatgtgaagagtgtctctctcaatggatacattgaagaagaggtatatgtagactagcctncaggtttcgtgcactatgaacatnctaatcatgttta

SEQ ID NO: 4825 - DNA, 306 bp, Glycine max
  unsure (1)..(306): unsure at all n locations
tcggacctcagtgtgaatagttatgagcatctcaacctcgcgagagctttcgttgatgactgtcgagcatctcgacatgttatgcgctcgaatcggacatccgtgtganaagttatgaccatntgagtctctcgagagcttacgtggttcaatttcgagcatctcgacatattatgcgcccgaatctgaccttcgtgtgataagttatgaccattagaatttctcgagagctttcgatgtttaatttcaagcgtctctatgtgttgtaagcctgaatcggatcgtaccgtgaatagatatgaccat

SEQ ID NO: 4826 - DNA, 418 bp, Glycine max
  unsure (1)..(418): unsure at all n locations
agtcacctgcngcatgcaagcttactaaggcacctgttctagctcttcctaacttttctaanactnttgagctagaatgtgatgcctctggagtgggagttggagctgttttgttgcaaggtgggcaccctattgcttattttagtgaanaacttcatggtgcgacccttaactaccccacctatgataaagagctttatgccttaataagagcactccgaacttgggaacattaccttgtttcccaggaaattgtcattcatagtgatcaacaatcacttaagtcattagagggcaaagcaagttaaacaaaaggcatgcaaaatgggtagagtacctagagcaatntccatatgttatcaaatacaaaaagggaaaaaaaaatgtggtagctgatgccctctctatgagacacaca

SEQ ID NO: 4827 - DNA, 391 bp, Glycine max
  unsure (1)..(391): unsure at all n locations
ttcttcgtgggttgatgggttctatctcgtagaatggcttgatcactggctaacatgttctcaattagctcagttgcttctttcggngtcttcagttntatcttaccccctacagaagcaactaacaattgcttggtttgtggtctcagcccatctataaacatattcaattggattagctcggaaaacccatgagtgggagttcttctcaacaagcctctgaacctctccaatgcttcactcagagattcatcangaaattgattaaatgaagagattgcagctttcccttccgcaatcttggactctgggaagtatttttttaggaactnttcaacaacttcttcccaggttttcaacctattacctntgaatgagtagagccacctct

SEQ ID NO: 4828 - DNA, 473 bp, Glycine max
  unsure (1)..(473): unsure at all n locations
agctggcttatacaatctctctccttttgatgatgacatacctganatcaagaaacacatacacattctttttcctagccaatcactcacttaattctccatattctccccctttgtttgtgagtttaagctctacttgaaattaagttattcaatcttgtgagttcttgatttaatccctattttctctccccctttggcatcaacaaaaagccaaagtgcgtaacaaatataaaacatacataaatgactaatcatacacaagacattcattgaanaatctaaaccaatcatgaagcaaaaacatgaataacccaaattaatatataaaccacatagtcatataacataattcataaaaattcagtcatactaaacaaatattaaaagaaatactagatgttcaaatgtcataataatatagccaaatacatggctagaaatcanagtactaataatactaaagaattata

SEQ ID NO: 4829 - DNA, 466 bp, Glycine max
  unsure (1)..(466): unsure at all n locations
taataaatctatatatggtttataacaagcttctcgtcagtgtttccttatgtttcatgggataatttcttcatttggttttgatgaaaaccccatggatcaatgcatataccacaaggttagtgggagtaaaatatgctntcttgttttatatgtagatgatattntacttgcagccaatgatcggngtttgctacatgaggtgaaacaatttctctctaagaatcttgacatgaaggatatgggtgatgcatcttatgtcatcggcattaagattcatagagatagatctcgaggtattntgggtctatcacaggacacctatattaacaaaattctagagagatttcggatgatagaatgttcaccaagtgttgctcccattgtgaagggtgataggtttaatttgaaccaatgtccaaagaatgactttgagagggaacaaattgagaacattccttatgct

SEQ ID NO: 4830 - DNA, 502 bp, Glycine max
  unsure (1)..(502): unsure at all n locations
gcttatggataagctctntatttagtctcatttanaagaagttatttacagcttgttttgacttattttatgccataagcatttgtgcaagtgtttgagaaaactcttgaaaataacttgtgaaatgtccataagctgtttttaagcttatttctataagctcttcaggatagctaatgaaaacagcttacaacttatatgaaaacagtttaacccgaatttctcttcgattatcgaaacaacatatacaaaattgttacatgataagtacttacctaatatgcctttaattaagttgtttttccaatcaggcctaagagattattgaataaacacttaattaagttgtttacactaagatgctgttcatgtgtgcaggggaaatantcaccaatttgccaaagagctgtcgatacattccaacctgcagtgagtattccatggaggcatataagcgatatggatgcggtgaagggtacagtttaactgcgtggcgtatatg

SEQ ID NO: 4831 - DNA, 496 bp, Glycine max
  unsure (1)..(496): unsure at all n locations
agcttgtaaactntatacaagaatgaagctctgataccacttgttagacactcagatatcttaagaaggggggttgaattaagatattgcaaactatttccccaattaaaattctacttcaatttcaatgcaagttacaagttcccttaaaaatgaactcttaaataatgattcaaatagaacaatctgaatataaatataaagcaataataaataaacgagtttaagggaagagaaagtgcaaactcagttttatactggttcggccacacccttgtgcctacgtctagtccccaagcaacccgcttgagagttccactatcttgtaaaatccttttacaagttctaaacacacaaggacaatccttcctttgtgttcagatttctttacaacaagagaacctcggtctctctantccctntgagaatttagaaagaaaagaagaataaatctctcttgaaagagatagaatgtacaatctgagcactcaattat

SEQ ID NO: 4832 - DNA, 467 bp, Glycine max
  unsure (1)..(467): unsure at all n locations
tctaatatcaatttcgagcatgtcgatatattatgggtctcaatcggacatccaagtaaaaagttattatcgtttgaattngctctgagattctctttcaatttcgagcgtctcgaaatattaagggactcaatcagacatacgagttaaaatttattgttgtcttaatttgctatgagctttcgttttcaatttcaaacgtctcgatatattacgagacttaatcggacatccgagtaacgagttactggtgttttgaattgctacgagtattcattttcatcttcgagcgttttgatatattacgggacttaattggacatccgaataataagttattgtcgtttgaatntgctcagagcttctgttttcaatttcgagcgtctcgatatattacgggactcaatcaaacatccgaatangatacgtattggcgttgaatttcacagatgttttgtttcaatcac

SEQ ID NO: 4833 - DNA, 468 bp, Glycine max
  unsure (1)..(468): unsure at all n locations
ctcgcatgtccgattcaggcgcatagcgtatcgagacgctagatatctaacatatgaagctctcgagaaattcaaatggtcataacttttcactcgcatgtccgattcaggcgcataacatatcgagacgcttgaaattgaacaactgattctctcgagaaattcaaatggtcataacttttaactcgcatgtccgaatcaggcgcataacatatcgagacgctcgaaattgaacaacggatgttctcgagaaattcanatggtcataacttttcactctcatgtgcgattcaggcgaataacttatcgagacgctcgaaattgaacaacggaagctctcgagatattcaaatagtcataacttttcactcggatgtccattcaggcgcatagcgtatcgagacgctagaaattgaacaacggatattctcgagaaatcatatggcataacttttactcgcatgccga

SEQ ID NO: 4834 - DNA, 487 bp, Glycine max
  unsure (1)..(487): unsure at all n locations
atactctagcgtcacctgccgcatgcaagcttcacaatcccacaacaccttaattgatgcagtatataagaaattctaaataagattaacaatattctcaggcaaatctgttggatcaagtggcctcagaataattaagaagggggggttgaattaattattcctaaacctttactaattaaaaaattactcttctaaggcttttactaagttgttaagagaataaggagtagaagagaaacttaatagaaagtacaagcggaaattaaatgcacaacggaaattaaaagagtagggaagaaggagacaaatacataagaagttttatactggttccgcaacaacccgtgcctacatccagtccccaagcgacctgcggtccttgagaattctttcaaccttgtaaaacnacctttacaagcaaagatccacaagggatgtacccctccttgttctctttgaaaccctagtggatgtacccttcact

SEQ ID NO: 4835 - DNA, 347 bp, Glycine max
  unsure (1)..(347): unsure at all n locations
aagctatagaaattaaatggtcataatctttaactcggatgtccgattctgtcgtataatatatcgagacgctcgaaattgaacaacggaggcattagagaaattcaaatggtcataactattcacacggaggtcagactcaggcgcataatatatagagacgctaaaaattgaacaacggacgccttcgtgatattcaaatgggcataactattcactcggatgtcagagtcatgcgcataatatatctagacgctcgacattgaacaacggaatctctagagaaagtcaaatggtcataactgttaactcggatgtctgattcangcgcataatctatctagacg

SEQ ID NO: 4836 - DNA, 340 bp, Glycine max
  unsure (1)..(340): unsure at all n locations
agcttccattgttcaatttcgagcgtctcgatatattattcgcctgtatctgactttcgagttaaaagttatgaccatgtgaatttctcgagagcttccgttgttgaatttggagcgtctcgatatattatgtgccggaatcggacatccgagttaaaagttatgaccgtctgaatttcttataagcttncgttgttcaatttcgaccatcttcatatattatgcgcctgaatctgacactcgagttcaaagttatgaccatttcaatttccgagcgcttccattgttcactttctagcgtctctatatatgatgcgcgtgaatctgacctccgagttat

SEQ ID NO: 4837 - DNA, 456 bp, Glycine max
  unsure (1)..(456): unsure at all n locations
agctagtcatttatactatttcttanagttattgtcatataagcaatgcctaggctatatatatatatatatataaggaattntcagatctatttgtttgtaacacaaaagcaagattattattctttatttaaaggcctgaagtaatttgtaaagcgtttattcaatatatgcattcttaagctcttaaataagaacaatataacgttaaggtaattaaattgcttaattaccatgaattcaattaatatttttcagtagtttattattcattataattaaatcattctatctaatactcgctgttaattaacgctaatattctaatcatgcgaatttaattactttaactaaaatcaaataccatcatttatgtttttaattatcataagtttttgctataattcttaaaaaagtagagacaaactcattaattaaagtgatgaattgaattta

SEQ ID NO: 4838 - DNA, 442 bp, Glycine max
  unsure (1)..(442): unsure at all n locations
tctctgagtcacctgcggcatgcaagctnggagtggaaggagaccatcaattagacaccttagtagttttgggtacataacatatgcatatgttttagaccaactcaagaagatattggacgacaaaggtgaaaggtgtattttcattggttacgacatagatttaaaggcatacaaactttacaatccatagacaacgaaagtgattatcagttgatatgtgacgtttgatgagaaaggcatgtgggattggtcgacaagatcccagaggaagctagtggtgactcttgacaactatgaagaaaatgataaacaactagatctaacccccgatgaaccaaaatcatctaggaggccacagaggaaacctcaattgctagttagattacatgcttgtatcatgtctaatgataatgatccttccaacaaggagaatatcaat

SEQ ID NO: 4839 - DNA, 390 bp, Glycine max
  unsure (1)..(390): unsure at all n locations
gctctcgatatattatgcgcctgaatcagacttccgttacaaaagttatgatcatatgaatntctcgatatattatgcgccttaatcggactntcgtgtgacaagttatgtccatttgaatttctcgatagcattcgttgttcaatatcgagcgtctcgatatattatgcgcctgaatcggacttccgtgtgacaagttatgaccatttgaatttttcgagagcatcacgtgttagatttcgagcatctcgatatattatgcgcctgaatcggacatccgtgtgacaagttatggccatatgaatgtctcgagagcatatcgtgctcaatttcgagcgtctcgatatagtatgcgcgttaatcgaacttccgtgtgacaagttatgacca

SEQ ID NO: 4840 - DNA, 376 bp, Glycine max
  unsure (1)..(376): unsure at all n locations
agcttctcgatatattatgtgcctgaatcggacttccgtttganaaattattaccatttgaatctctcgagagcnttggctgttcagtttcgagtgtctcgatatattatgcgcctgaatcggacttttgtgtgacaagttatgaacatttgaatttctcgagacctttcggttttcaatatagatcgtctcgatatgtgatgcgccagaatcggacttccgtgtgacaagttatgaccattggaattatcgagaccttcggtgttaatttgagggctcgatatattatggcctgaatcggctttcggtgaaagtatgaacatggaattctcgagccatacgatgtccattcgagctcttgatatattatgccctg

SEQ ID NO: 4841 - DNA, 462 bp, Glycine max
  unsure (1)..(462): unsure at all n locations
agctngtattgatngcgaatntacgaatgtgggcagcttttatatatatatatatagagagagagagagagagctatgttattattacagtaagattgnggcattatttttccttccattgattcacatgcaggctatattgntattattattttttttttgagaaagttatgttattactgggtaaagattggggagttatttttccttccattgtttcacatgcaggctatgtaatatggatatcnattcgcacgtgcagcaagtcatttgctttgctttccatgatagtaggttgctcatggaaacttgtcaagaagcanaaaatttgcggaagattgtgactcttttctacctcgactgacaattnttatccatgtctatgcattatgtctccgcataagagtgggctgngggagagtagtgcttctttttggtttgaattaataatattcagtgata

SEQ ID NO: 4842 - DNA, 440 bp, Glycine max
  unsure (1)..(440): unsure at all n locations
ttaaggctgaagttgagaaacaatgtggataacaaattaagaatgtgagatcagatagacggaggatggacaagcacggaggatggacaagcaccaggttcatttgcgaaatttcttcaagaacatgggattgttgcccaatacactatgcctggttctccaaatcagaatggtgtcgtagaacgaagaaatcgaaccttattagacatgatgagaagcatgaggagtaatgtaaagcttcctcaattnttttggattgatgctcttaagatggatgcgtatatattaaaccgagttccaaccaaggctatctcanagacaccttttgagttattcaagggttggaaaccaagtttgcaacatatatgcatttggngatgaccatcttgagtangaattataatccacaagagaagaaactagaccctangactattact

SEQ ID NO: 4843 - DNA, 395 bp, Glycine max
  unsure (1)..(395): unsure at all n locations
agcttgttagctngatgacttgtcaganacaatttgtttactagcgtcaaatcagagaattaaacctggacatcttttagaaatgcttgttaagtcaagacaggtagaaatccagtgtctccatttgggacctactgctcagtaaatctgttgagggaaaaattcacagcctccgtcttaacatcattggggttctgaatccattcacactgaataagaattccttgaagaccattataatgtcttctgaaattgatgactttatggaaatacgttgagttgctgtccccttcttttagccatttagctctagatttctgccttaataaagattcataagctattgaggcctcccacaattcttggtgaattctctctaacctttatctcatcat

SEQ ID NO: 4844 - DNA, 345 bp, Glycine max
  unsure (1)..(345): unsure at all n locations
gcttganatgaacaacggaagccctcgagaaattcatatggtcataactcgtcatattgaagtccgattcacgcgcatactatatcgagacgcttgaaattgaacaacgaatgctctcgaaaaaatcctatggccatatctgggaccaccggtgtcggattcatgcgcatgatatatcgagacgctcgaaatctaacaacggatgctcttgacaacattcaacgtgcataacttgtcatacggaacaccgatatacgcgcataatatatcgacacgctcgaaattgaacaacgaatgctctccataaattaaatggtcatcacttgagacacggcatacagagga

SEQ ID NO: 4845 - DNA, 436 bp, Glycine max
tgctcctaccataagtgcctcgtggagacaattatagcctctttctgcaccgtcatcgacccgtacctcatcggaaacccaaacagtacctcatcggcggtcgacaactccgccattgttatctctggtatggcgtcatccttgggcgacgccctcatctgatctatcacctcaatcggcaatgtcctcaaaaccctatacagaaccccctccacaccttccactctgtccatgtcggtctacaacctcttcgccatccctccatgccgtctgagagagacgaccactacgacgacgctgctttacgtgctggcactggcgtgtaatgtcacgcgcgcggcattgtctggaagaacatcagcggcagatggcggtgcggtgacatcgggggagtggagcatctccagctttgaaccctaattgggctgagatcatg

SEQ ID NO: 4846 - DNA, 473 bp, Glycine max
  unsure (1)..(473): unsure at all n locations
agctngagaatgataatcttctaacactttgtttgttattgtgcagttagtctcaattgtcactattataaaatacatcttctacatcggntatgtaggactntctacatcnggttttaaccaatgttgaaagtattattgttaacatcagttttccaagaccgatgttgacatagaattgacaacgtcggttatctaaataaccgatgttatataataagaattacaccaaaaaaagtgtatgaatggtgatagttgacatcggtttttcacaaaaccgatgttaacttatagattaacatctttgttgtataaaaatcgatgttaacttatatattatcatcagctttttataaaaactgatgttanatggttataggttaacatcagttcttaaacaaaaactgatgttaatctataagttaacatccgttcttatacaaagccgatgttaacggtttgaatataacatc

SEQ ID NO: 4847 - DNA, 439 bp, Glycine max
  unsure (1)..(439): unsure at all n locations
tgttaccttgcagtttgtaaaggccattctgccttgtacccttcattacttgtaatgaacctttgaatacctttaaagttccaccttctcctttgaatgaacatccagattaatctagcattcccaaagagagtatgttccttttaagctcaggaacatgcctcacatcagggagcagctttacagatccatcttgtatcttcaatataatagttccaatgccaatgacattacatgccatattgtttcccatgagaacattccctccatctatctccttataagagctgaaccattccatattgggtgtcatatggaatgagcaacccgagtctagaatccattcctcattgtgctnttcagtagagatggagagcacttaatcactttcatatgcatcatccaccactgctatatcagagtcatcattgtatcacca

SEQ ID NO: 4848 - DNA, 440 bp, Glycine max
  unsure (1)..(440): unsure at all n locations
tcttcctgtttcgtcttccatgcagctcgctgatattttcacgaagcctctatctccagctctctntcaaggtctctgttccaagctgggaatgatgaacatccattcctagcttgcggtgggctctcaacaatagcttgttagttagaaaaagctgttagagttagttttctctctggtgtaactaactaaccacccgttttctctatccttcatatgtgtataaatatcttacgaattcagtaatanagacatgcaattatttggtcatctcacgtacacttgcgtcgtttctctctcctttatggctgttgatccatttaatatttgttccgtgctttcccctgnacgacgttttcgagtagagaaatgatgcatttcgaccggtgtcgttggaagcgaacgacgaattgtgtagtgaaagagaaggactctcgcgt

SEQ ID NO: 4849 - DNA, 452 bp, Glycine max
  unsure (1)..(452): unsure at all n locations
accttaccttggctntcatcanatntgccttttacctcaagataatcccaaacaacttttcacactcatggtggacattacaagtatcatgtgatgtcgtttgacctctgtaatgctccgacaacatttcgagccactatgaatgacattttttgccctctgttgtgcaaaacggtgattgcattttctgatgatattttggtctatagtgctgaccatgatcttcacatatcccatctctcttaagtttttgaaagtttggctcatcattagttnttttctattaaacttgagaaatgtgtgttctatcagccttagttgtctacttaggccatgtcattttttgcgggtttagtggcccttattccttccaaggtccaggcgattcttaagtggccaattcctaagaatattaaaggcttgcacatcctcttatgtttgttgggctttta

SEQ ID NO: 4850 - DNA, 435 bp, Glycine max
  unsure (1)..(435): unsure at all n locations
cttcccttttgaagctcgatgtgagccatatctcattggatgtgaatctgctgaaagaattngcttatcttaagaattcgacccttatggaccttatgaataacagattctctggagggttgacattgagtattcaagagatgtattctttagaggaaatggttctgtccaacaatgcaataggtggngatatcatgacccttaagtgggaaaaccttcacaacttgatcattttggatctctctaacatggagttgaaaggggaaattcctgagtctatatcggaattaaagaggttgaggtttttaggccttagtgacaacaacctcacaggcaacctttcaccaaatctatctactcttccttgtctcaatgcactatatgttagtggcaacaattngacaggagagcttatattctctgtgtgagtttatg

SEQ ID NO: 4851 - DNA, 412 bp, Glycine max
  unsure (1)..(412): unsure at all n locations
agcttcatgcttatgtatgtatggcanaacttcattattgttgttcaagacatacaagtgagcttgtaaaaaatcttctacacttgaagtgatcacatgcaatcctcttgaacccttaccacccactctgtcatcatgccgagacttatgaaggccaacaggtttagccttctcaatttattctgaacaaaattcaatggcttcttcagcaatgtacctctcaacaatagatgcttctggatgataaagattctttgtataccctttcaagatcatcatgtatcgctcaaccgggtacatccaccatagataaacaggaccacaacatttgatttctctgactagatgcacaatcaagtgaatcatgatgtctaagacagcaggcggagaatacatctccaactgacacagt

SEQ ID NO: 4852 - DNA, 475 bp, Glycine max
  unsure (1)..(475): unsure at all n locations
gattcagctatcggcgaagctgttcatggtcatgtntggaaacatgggtttgattctcatgtgtttgtgcagactactctgattgagttttattcaactntcggtgatgtgggtggctcaagaagggtgtttgatgatatgcctgacagagatngttttgcttggacgacgatgatttcggctcatgttcgggatggggatatggcttctgcaggcagattgtttgatgagaatgcctgaaagaatgtagctacatggaatgccatgattgatgggtatggaaaattatggaatgctgagtctgtctgagttttgtttaaccaaatgcctgcaagggatattatttcttggacaaccatgatgaattgctattctcggaacanaaggtataaagaagtgatagcactttttcatgacgtgattgacaaaggaatgattcctgatgaagtgactatgaccaccgtcatttcagcat

SEQ ID NO: 4853 - DNA, 485 bp, Glycine max
  unsure (1)..(485): unsure at all n locations
agcttaagtgcttatacaaaanatgggcttcaagatactataatgtggaaaataataaataaagtttctctcgaanaaagactaacaaagaanacatcattggtgatgctagctattttagtttgtcaaattatttatatggaagttatttaataatttagagacaaatgtgtataattgtatattattgtaaaaagatattattcaacattgatttatttttcttcataaaattcttttaaaaatgaaataataaatgaattgctatcgagaactaagaacaactgattaatcgtcttaatacaattgattgatgcaggaaatgtatccctataaccacctaaagggaaacatcattttatataaaaaaactggttctatatntacttgactgagtctttcgttataatctagaaatgtaataaataaatagacacctctttagcatcatagatattttttatatgatatatggtcacattatg

SEQ ID NO: 4854 - DNA, 434 bp, Glycine max
  unsure (1)..(434): unsure at all n locations
ctgccaacccatggaagctcctaatatctcccacactntgtgtggtgtgccattcttggatggccttgattttctcatggtccactaggaccccatttctaccaactacaaaccctaaaaaaactatattatctacacaaaacgtacacttctctatatttgcataaagggtgtttttgctaaggaccgaaagaacttgcctgagatgtcctcagagatcatctaagctcctactgtgcactaaaatatcatcaaaataaacaactacaaatctacctatgaaatgccttaagacatgatgcataagcctcataaaggtgcttggtgcattagtgagcccaaaaggcatcactatccattcatacaaaccaaacttggtcttgaaagcggttatacactcatcaccctttttcataccgatgtggtgataccca

SEQ ID NO: 4855 - DNA, 316 bp, Glycine max
  unsure (1)..(316): unsure at all n locations
ggaatcatacctcactgtgataagttatgagcgtatgaatttcacgttatcttgcgctgnccaatttgcagcatctcgtcttattatgcgcccgaatcggacatccgcgtgaaaagttatgaccatttggatctgtcgagagctttccatgacgaatttccgacgtatcgatttaatgttatccaccgctcggacatcgcgagtgaatacgttctgacgcatttgaatttcacgagagctttcgttgctcaatttcgagcgtctctatatgtgatgcgccccaattggacatccgagttgaatgttatgaccattt

SEQ ID NO: 4856 - DNA, 303 bp, Glycine max
  unsure (1)..(303): unsure at all n locations
agtcacctgcngctgcagcttgcaaaattcaacggttagaacttgtcacttgtatgtccgactcaggcgcatcacatatagaggcgctcgacaaggaacaacggaagatctcaagaaattcaaatggtcataactcttcacacggatgttcgattatggcgaatcacatatctcaacgctaaaaaatatacaacggaagctcttgagaaattcaaatggtcataacttttaactgggatctccgattcacgcgcatcacatatagaggcgctcgaagatgaacaacgaaagctctcgagaaat

SEQ ID NO: 4857 - DNA, 467 bp, Glycine max
  unsure (1)..(467): unsure at all n locations
tatnntgaattgtactctattgtataaaggatcgattataagttattntgaacttatttgtataaaggatcgattatgcatgattcacaaacataaatctatggaaatataaaacttaagattgtttatccaataccatataatttacttattttaaccaacatttatatcgagaacttgtttaataacaagttttagtgaaataatatttatttattacactttacggcaattatagatcctaaaatgccttcttaatagctgctgccaattcatcataggctacttcccaagcactgctcaactcgtcactccatttgtccccaactgtcttcttaatagcatatgccaattcatctcaatttccttccacccaatcaatggggaacagtgacaggacgactactagtcctagatgggtatatgtatatngcttaattaacttcattntattctttaattacata

SEQ ID NO: 4858 - DNA, 301 bp, Glycine max
  unsure (1)..(301): unsure at all n locations
tctggtgggacatcttgacttgctttccaatctgacattcaccacagattctgccttcttctattntcagattgggaatgcctctaacagcatctttgtcaatgattttcttcatgcctcttaagtgcagatgtccaaatctttgatgccatattctgacttcatcttctttggagaatagacatgtggaggagtagctggtttcttgaggtgtccataagtaacagatgtactttgatctcctgcccttcattaggacttcactcttctcatttgtcaccaagcattctgatctttgtga

SEQ ID NO: 4859 - DNA, 276 bp, Glycine max
  unsure (1)..(276): unsure at all n locations
agctngaatcggacatccgngtgaaaagttattaccatttgaatttctcaagagcttccgttgttcaatttcgatcctctcgacatattatgcacccgaatcggacatctgtgtgaaaagtcatgatcatttgaatttctcgagagtttccgatgtttaatttcgagcgtatcgatatattataaccctgaatcggacctcagtgtgaaaagttatgaccatttgaatttgacgagagcttccgttgttcaatttctaatatcactgtatgtgatg

SEQ ID NO: 4860 - DNA, 403 bp, Glycine max
  unsure (1)..(403): unsure at all n locations
agcttatgctgcaaacatttataatagacctcctcagcagcaaaaccaacaacaacagaataattatgatctttcaagcaacagatacaatccaggttggagaaatcatccaaatctgagatgggcaagtcctccagaacaacaacagcatgtccctcctttctagaatgctcctggtccaagcaagccatatgttcctcctccaatacaacagcagcagtcataacaaagacaacaagcaactaaggctcctcctcaaccttccttagaagagttagtgaggcaaatgaccatccagaatatgcaatttcagcaagagacaagagcctccattcagagtctaacanataagatggggcagatggctactacagtgaaccaagctcagtcccaaaattatgac

SEQ ID NO: 4861 - DNA, 325 bp, Glycine max
  unsure (1)..(325): unsure at all n locations
tctagatgagttatgtctgcgaatcggacatcctgtgaaattgtttttctcatttgaatttctcgagtgcttccgttgtttaatttcaagcgtctcgatattntatgtcctcaaatcagacatcggagcgaaatgttatgaccattcgaatttgtcgagagcttccgttgttcaatttcgagcgtctagatgagttatgtcaccgaatcagacatctgagtgaaatgttatgaccattcgaatgtgtcgagagcttccgttgttcaatttcgagcgtctagatgagttatgtcaccgaatcggacatccgtgtaaaaagtatgac

SEQ ID NO: 4862 - DNA, 314 bp, Glycine max
  unsure (1)..(314): unsure at all n locations
ggaatcggacatccgtgtganaagttatgaccatttgaacttctcaagagcttccgctggtgagtttcgatcctctcgacatattatgcgcccgaatcggacatctgtgtgaaaagtcatgagcgttcgaatgtctcgagagttttcgatgtttaatttcgagcgtatcgatatattataaccctgaatcggacctcagtctgaaaagatatgaccatttgaatttgacgagagcttccgttgctcaatttcgaatgtcactgtatgtgatgcgcctaaattggacattcgagttaaaagttatgaccatttga

SEQ ID NO: 4863 - DNA, 318 bp, Glycine max
agcttttgagaaattcaaatggttataacttttcacacggatgttagattaaggcgcatcacatatagagacgcacgaaaatgaacaacggtagctctcgagaaattcaaatggtcatcacttttcacactgaggtctgattcgggcttataatatattgatatgctcgaaattaaagatcggaagctctctagatattcaaatggtcataacttttcacacggatgtccgattcgggcgcataatatgtcgagaggctcgaaattgaacaacggaagcactcgagaaatacaaatggtcataacttttcacacggat

SEQ ID NO: 4864 - DNA, 332 bp, Glycine max
agcttcctatggatttaatagtgtcaccatttttcaccaagtaaaccagcaaagaggggatccctcttgctgtctgattttcaattggacaagcacgtgaattggaattgtgagcttagcaccaattacaatgttgacaagagcataataattctgacccatcattgcctgacatgtggtgaggccttggaaggtttcttttaccaactcataataagtgtcattcttgcttgtagagtagggtgtgttatactggtaaatgtttcctgaaacaaaacatatgaacaatgattgacttatcggactttttaaatatacattataaaactaat

SEQ ID NO: 4865 - DNA, 351 bp, Glycine max
  unsure (1)..(351): unsure at all n locations
agctntctaaacagttaaaattgagaagagatacaactgcataaagagtcatctatttttgaccaaactcaaattttgattttttataaattatttcttgttataaatttgattttgtataaattctctattgttattttgattttgtatgaattctctcttgttatantttattttcattaaccttgatgcgtacgatttgntttagcttgttctttttcctttatgtgaggtaaatttcctacaaataaatcattatttgatccagatattatcaagactaataggaagaacaagaaggaaaagaaacaaacaacaactaagccaccgggtgaatcttcttgtactaat

SEQ ID NO: 4866 - DNA, 428 bp, Glycine max
  unsure (1)..(428): unsure at all n locations
agctntagcaactctttctttntgtttagtcaaaacctctaatgctcttaatctctcctcatctaaatcaaccaactcatctaacatcattttccaataatggtcgattggaatgtccatttgtttttgtaccctggctgattgcaaatgtatttcgaccggaagtacagcatcatgcccataagtcagtcgaaatggggtagtattagttgattccttaggagaatttctacatgcccatagaacttgatctaacgtcttattccaatttcttggcttttgggcaatgtgatttttaatcaagttaattacaatcttattggctgcttcgacctgaccattagtttgcgcgtaatatggtgttgaggttaataatccaaagccaatttttgggcaaattcttttattttctgtcacgaaaaactgaa

SEQ ID NO: 4867 - DNA, 316 bp, Glycine max
tctcgatatattatgcgcctgaatcagacttccgttacattatttatgaccatatgaatttctcgagagccttcgttgttcaatttcgagcgtcttgatatagtatgcgcctgaatcggacttccgtgtgataagttatgaccatttgaatttgtcgagagcttccgattttcaatttagagcttctcgatatattatgaacctgaatcggacttccgtgtgacaagttatgaccatttgaatacctagatagcattcggtgttcaatttcgagcgtctcgatatattatgcgcctgaatcggactttcgtgtgac

SEQ ID NO: 4868 - DNA, 370 bp, Glycine max
agcttctcgatatattatgcgcctgattcttattttcgtgtgaaaagttatgaccattggaatttctcgagagcttccgatgttctatttcgagcgtctcgatatattatgcacctgaatcggacttccgtgtgacatgttatgaccattttagtttctcgagagtttctgttgttcaatttcaagcttctcgatatattatgtggctgaatcggactttcgtttgaaaagttatgaccatttgaatttctcgggagctttggttgttcaatttcgagcgtctcgatatattatgctcctgaatcggactctcgtgtgacaagttatgaccatttgaatttcacgagagcattccgtgttcaaattcgag

SEQ ID NO: 4869 - DNA, 406 bp, Glycine max
cttgaaatctgaagtttaatattcaaatgatcaatgttcttataaaatgcacacacatgacctctatttatagcctaagtgtcacacaaaattggagggtttgaaattgaatttgtggagccaaactttggagccaaaatttcactaattatgattagtgaattttatttatggttcagcccactaatccaagatcaaatataatattctccactaagtgtgcttaggtgtcatgaggcatgaaaagcatgatggacatgcacaaagtgtgactatatgatgtggcaatgatgtgtagtaagcaaatgctcacctgcccctctaaaatttaattggatggagcttctaccaattcaattaaatttatttccaaccacacacattatatatccacttaatgcatgtg

SEQ ID NO: 4870 - DNA, 308 bp, Glycine max
ctgtcaaattgctgggattactattgctgcgaccataactctatgcaattcctctcatgatacccagatatgtaagaattgtaagataggaaaacaggttccgcgtcagccaggactatgtggagcaattgttcctcgatcctgtgatcatgttccataagtttagtccttgctttagttcgctttgcttgactcatgatatgctctactcttttattactattttgggatgtctcttactaggtaaaggatatttgcaacctggtgtagaaacatgtccaattgatccctggctcgtggatcctgac

SEQ ID NO: 4871 - DNA, 419 bp, Glycine max
agctagcatggggctttggcttgtgtgatatggccattcactccgccacagtggatggagcttgaacattttgctaatttagttgatgaacaattatttagttattaatacatagcttttttgttttgttaataatataattctcaccattatttagttattaatatttagttttttatgcattaacactagattgctttttaatggtatattgcatattaaaaaacgacccgtgcgttacgcacgggtttatattataataacgatattgtgatagcaatataggtcattttaaacttattaatactatttagtttttggattggactacataaaccaatcattttatgtctaaaaatatttctttttaaatatgataatagtgtcataatgattttttaattcatagcctcctcctt

SEQ ID NO: 4872 - DNA, 321 bp, Glycine max
agcttcaacatcagaccactttttggtgctggaactacttcacatggacttgatggggcctatgcaagttgaaagccttggaggaaagaggtatgcctatgttgttgtggatgaatccttcaaatataaacgtgacgagactatccttatcttctagtggcacaacagtctagtccaaagattactcctattaagtcaaagagaaagcgactgtgtgatcaagagaaccaggattgaccactggcggaacttagagaacacaggatgaatctacttttatcatcctgaggaagcgcatggttaaacaatcactaattctta

SEQ ID NO: 4873 - DNA, 325 bp, Glycine max
agcttaccaaagactacatgtttcctgcataatggccacataactgtacagtcaggcattttaccttgccaacccccacaatcaaaaatcaaaatagaacatccatgtaagaagtaaaatgctgccaataattaaccagacacacaaacctatcaagatgatgatcagctttcaaagtgataatgaaatgggaaccgagtgtgtcacggtctgcaattgccattgataaaaggccagtagcatcatgctttagcctatgtgaactcatctaaacaaatcacagatacataatacattaattattaaatacaacactacagtacta

SEQ ID NO: 4874 - DNA, 301 bp, Glycine max
tatttcagtacaatacccaaagcttgttgattttctccttcattctgctcccaattccaattcttttgttcttcaaagattacatctttgctaattataatatttctgttgactggatcaaataatctatatgccttggattcatcactgactccaaacaaaacacattgcttactcttgtcatccaacttaacccgctgttggtctggtgtatgaacatgagctaggcaatcaaatacccaaaaataattaacagaaggcgtaattccactccatgcttctttaggagttttgtcttgca

SEQ ID NO: 4875 - DNA, 452 bp, Glycine max
tctcatcaatggtattataatttccatcaagtcattacctcatatggttttgaggcaaatgtagttgatgattgtgtgtatcataagttcagtgggagtaaatacatattattgctagcaatgatataggcttcttggaagaggccaaaagatttctaacgaaaattttgaaatgaaagattttggggaagccttttttgtgatttcaagatactaagagatcactctcaaggtatcctaaggttgttacacgtgaactatatcgataaggccctagatagattcagcataaaagatagtaaataaggagattccccaatagctaaaggagataaatgcagtctcaaacaatgcctcaataatgacctttaaagaattgagatgcaagagatttcatatatgtcaacagtaggaggtctaatgtacacctccagttgtactcatcccgacat

SEQ ID NO: 4876 - DNA, 421 bp, Glycine max
gacactatgaaactaagcttaacattcaatttcgagcatctcgatatgttacgggactgaatcttacatccgagtaaaaagatattgtcgtttgaatttgctcagagcatcaacattcaatttcaagcatctcgatacatgacgggactgaatcagacattcgagtaaaaagttattgtcgtttgaatttgctcagagcatgaacattcaatttcgagcgtctcgatatattacgggactcaatcaaacatccgagtaaaaagatattgtcgtttgaatttgcttagagcatcaacattcaatttcgagcacctcgatatgtgacgggactgaatcagacatccgagtaaaaagttattgtcgcttgaattggctcagagcttcaacattcaatttcgagcgtctcgatatgtgacgggac

SEQ ID NO: 4877 - DNA, 369 bp, Glycine max
  unsure (1)..(369): unsure at all n locations
agcnttgagccaattaagacgacaatatctttttactctgatgtctgattgagtcccgtcatatatcgagacgctcgaaattgaatgttgaagctctgagccaattcaaacgacaataactttttactcggatgtctgattgagtccgataatataacgagacgctcgaaattgaatgttgaagctctgagaaaattcaaacgacaataactttttactcggatgtctgattgagtcccgtaatatatcgacacgctcgaaattgaatgttgaagctctgagccaattcaaacgacaataaatatttactcggatgtctgatttagtcccgtcatatatcgagacgctcgaaattgaatgctgaagctc

SEQ ID NO: 4878 - DNA, 393 bp, Glycine max
  unsure (1)..(393): unsure at all n locations
ntactgaaagagatcactcctcgatgtaccaaggttgaattgcatgatcctcaatggttagatacaatgaaggaagaatacatggttctgacgcagaataaaacatgggatctcgtccctttgcctcctcataggaaggctattggttctaaatggatatatcggttgaaatacaatgttgatggctctgtagccagacataaagctagactggtagctcaggggtattctcaacgaccaggacttgattataatgagacattcagtcccgttatcaaacacgtaaccattcgaacggtcttgagcattgctgtcaccagaaaatggaatatacgacaagtagacgttaacaatgctttcctaaatggttccattcaagaggaagtatatatg

SEQ ID NO: 4879 - DNA, 430 bp, Glycine max
  unsure (1)..(430): unsure at all n locations
tgagccaactcanacgataataactttntactcggatgtctgattgagtcccgtaacatatcgagacgctcgaaattgaatgttgaacctctgagccaattcaaacgacaataacttttttcacggatgtctgattgagtcccgtaacatattgagacgctcgaaattgaatgttgaacctctgagcaaattcaaacgacaatatacttttactcggatgtctgattgagtcccgtaacatatcgagacgctcgaaattgaatgttgaagctctgagccaatacaaacgaccataactttttactcggatgtctgattgagtcccgtaacatatcgagacgctcgaaaatgaatggtgaagctctgagccaattcaaacgaccataactttttactcggatgtctgattgagtcccgtacatatcgagac

SEQ ID NO: 4880 - DNA, 338 bp, Glycine max
agcttcaacattcaatttcgaccgtcttgatatgttaagggactcaatcagacatccgagaaaaaagttattgtcgtttgagttggctcagaacttcaacattcaatttcgaccgtctcgatatgttaagggactcaatcaaacatccgagtaaaaagttatggtcctttgtattggctcaaagcttcaacattcaatttcgagcgtctcgatatgttacgggactcaatcagacatccgagaaaaaagttatcgtcgtttgagttggctcaaagcttcaacattcaatttcgagcgtctcgatatgttacgggactcaatcagacatccgagtaaaa

SEQ ID NO: 4881 - DNA, 308 bp, Glycine max
agcttgtaggaaattcaaacgacaataactttttactcggatgtccgattgaatcgggtaatatatcgagacgctcaaaattgagactagaagctctgagcaaaatgaaatgacaatatacttatacacggatgtccgggtgagtcccgtaatatatcgagacgctccaaattgaaacggaaactcttagaaaattcaacgacaataactttttactcggatgcccgacagattgccgtaatttatcgagagatgctccaaattgaaaacagaagctcgtatcaaatacaaacgacaataacttttta

SEQ ID NO: 4882 - DNA, 285 bp, Glycine max
tcagctgtagaagtcaatttcgagcgtatactagattctttactcaagcagacatccgagcaatacattactgtcgttggaattagctcagagcttcagaattcattttcgatcgtctcgatatattacgggtctcaatcagacatctgagtaaaaaagttattatcgttcgaatatgctgagagcttcatcattcaatatcgagcgtctcgatgttctatgggacttaatcagacatgcgagtaaaaagctattgccgattgaatacgctgagagctgcaacat

SEQ ID NO: 4883 - DNA, 238 bp, Glycine max
agcttttgagaaattcaaatggtcattacttttcactcggttgtcagattcaggcgtataatatatcgagacgctcaaaatagaacagtggaagctattgagcgagagaaatggtcataactgttcactcggaggtccgattcaagcacataatatatcgagaggcccgaaattgaacaacagaagctcttgaaaaattcgaatggccaattctttacactcggatgtccgatcaggc

SEQ ID NO: 4884 - DNA, 466 bp, Glycine max
  unsure (1)..(466): unsure at all n locations
ngcaactttctcagcagccacgtaacacaacacttcatggccttcatccttctcttccaccttaacctcaaccctcttcttcttctgctcacattccccatacacctcttcctcagcttcatcatcatcttcatcaatttcaacaacctcaaaaggaccatcatcctcactctctcccagaaactcaaaacccctttccatagatttttcaatcttcgcactcgcaccttcacctccacccttgagttctttcacgaaaaccaattcatcatcatcgtaatccaccactctcctcctcttccgactcctgatcaaaccaccccgaacctcgactcctttgcttcgcgtcctacgagctggtccagtatactcattcatttcaaacaacaaaaccaacacanaaaaaagacccttttctntcctgtttcttcgaacaataatcagaaacaccccacaacgcaagatc

SEQ ID NO: 4885 - DNA, 346 bp, Glycine max
tctcgatatattacgtcccaaattcggacatccgtgtgatatgttatgaccattcgaatttctctagagcttccattgttcaatttcgagagtctagatgagttatgtacgcgaatcggacatccgtgtgaaaagttatgaccattcgaatttctcgagagcttccgttgttcaatttctagcgtctagatgagttatgtacgcgaatcggacatccgtgtgaaaagttatgaccattcaaatatctcgagtgcttccgttgtgcattttcgagcatctcgatatattatgtcccccaattcagacatccgtgtgaaaagttatgaccattcgaattctcgagagc

SEQ ID NO: 4886 - DNA, 454 bp, Glycine max
  unsure (1)..(454): unsure at all n locations
taacataaggcatgtgaagtgggtggaattcctatagcaattcccttatgttatcaaacataaaaagggaaaaggtaatattgtagccgatgctctttctcggcgtcatgcattactttctatgcttgaaacaaaattgattggtcttgaatgtttgaaaagcatgtatgaaaatgatgaaactgttggagaaatttgtaaaaattgtgaaaaatattcagaaaatggtttctttagacatgaaggctttcttttcaaagaaaacaaattgcgtgtgcctaaatgttctactagaaatttgcttgtttgtgaagcacatgaaggaggtttaatggggcattttggggtccaaaagactctatanacattacaagaacatctttattggcctcatatgaaaaaggatgtgcagaaatattgtgaacatcgcattgtattgtaaaaggcaaagtct

SEQ ID NO: 4887 - DNA, 333 bp, Glycine max
tccttaagaagattcctaaagaagctagagcttagctacacttacctctctaatagctaagctcacctccttgagatgagaagctagaacttagctacacaccccctataatagctaagctcacccccatgacaaaaaacatgaaaatacaaaaaaaaagtccttactacaaagactactcaaaatgtcccaaaatacaaggctaaaaccctatactactagaatggccaaaatacaaggctaaaacgaaggaaaaacctattctaatatttacaaagataagcgggctcatacttagcccattggctcgaaatctaccctaaggctcatgag

SEQ ID NO: 4888 - DNA, 399 bp, Glycine max
  unsure (1)..(399): unsure at all n locations
tacggacactataaaactcaagctngtaaacgattctatgaaccataccaagttttggaccatattggctaggttgcatacaaacttctattgcctgagagatcccgcattcatcctgctttccattgttccttccttaaacccttccaccaaacatctgaagaatattgtgtcccactagcattgacttccaatgatgttgaaaatcaaccagctatctctcttttagccattctgggcactcattatgcctctgagtctactgatccaaagctaaggtattagttcaatgggcagggttgtctcttgatgacattacatgggaagattgggaagaactcaagactgtctatcaccttgtggacaaagtgtttttggatggcgcaagggatgatagga

SEQ ID NO: 4889 - DNA, 463 bp, Glycine max
  unsure (1)..(463): unsure at all n locations
tatacaaactgactcattacctttgttatgcaaacgctattattattatcaagttcagaaggatcaatctcatactccgggacttcacgagcattttgcacatgcatgggagccatctaccaaaaaaaaaaaagaagttcacaattgaaacagatatcataaaccaactattctaaaaagagtttaacaattatgcaatgtcagttgaattgttttatacgtaaaaatcaaccctttttttttactctctaacagtaattccgatattattatagtctttttagtgaataatacaaaagaaaataatagaagaaacttttttgaataatagttacaaattccttcatatntttagagacaaccaacttatatgataatttgtaactaaacatatatcanaaactgctggtatgtgtgttgactttcataatcattatcttaaaagtcatacaaaactactaaa

SEQ ID NO: 4890 - DNA, 343 bp, Glycine max
  unsure (1)..(343): unsure at all n locations
agcttctggtgggacatcttgacttgctttccaatctgacattcaccacagattctgccttcttctattttcagattgggaatgcctctaacagcacctttgtcaatgattttcttcatgcctcttaagtgcagatgtccaaatctttgatgccatattctgacttcatcttctctggagaatagacatgtggaggagtaactggtttcttgaggtgtccataggtaacagttgtcctttgatctgttgcccttcattaggactttactcttctcattngtcaccaaacattctgactttgtgaagtttacattgaatccttcatcacacagctgactgatgc

SEQ ID NO: 4891 - DNA, 392 bp, Glycine max
  unsure (1)..(392): unsure at all n locations
cttgtcctctnttcgtctggaacatgggtataggcaatgctttcaaacactntgaggtgagagatcccgggcttccttccactccatgcttcttgtggtgtcttctcatgcacgctttttgttggggaacagtttgttaggtaaactgcacatgccactgctttagcccaaaactccttcggcatcttcttgctcttgagcatgcttcgcaccatgttaagtatggtccggttctttctctctgctactccattttgttgtggcgatcttggcactgtcagtgggcgacggattccatggtcttcacaatatttgttgaacttaattgaagtgaactctcctcctcgatcagatctcatggccttgatggaaagaccagtttctttctccac

SEQ ID NO: 4892 - DNA, 299 bp, Glycine max
  unsure (1)..(299): unsure at all n locations
ntctcttttgtgcagctatctcatctctcttttctagtgtataatgaagctcgacaggttcatgtgcatgtgctgctactaatggaggcacttgaatatggttgccagacctcaaggtgatggcactcacatttttcggattttgcacaatatgtgaaggcaatttgtcaaagatttgggactgagcttgattcatctgagtagccatctgtcccatctggtttgtcagactctgaatggaggctcttgtctcttgttgaaattgcatattctggatggtcatttgcctcactaactct

SEQ ID NO: 4893 - DNA, 463 bp, Glycine max
tcttaggtgttattccttccaatctctttgaagggctcttattctaaatgaagacagctgtagacactgcctctccccacaagtacttgggcagactcttgcctttcaacatgctccttaccatattcattatggttctgttttttctttctgcagctccaatatgttgaggtgtgtagggaggagtcacttcatgaattatgccttcttgatcacaaaattcttgaaattctgtagaaacatattcaccaccaccatctgttctcaatatcttgattaatgagtcactttgcctttctgccatatttttgaacttctcaaagacttcaaagacatcactcttccttcttattaggtaaacccatactttcctagtcaattcatcaataaaggatatgaagtatctgtttccacccagagattcagtttgcatagggccacacacatcagagtaaatcacctc

SEQ ID NO: 4894 - DNA, 460 bp, Glycine max
  unsure (1)..(460): unsure at all n locations
tagtaaagctaagcactaacaatctcccnncttggcaaattttgtctaaaacatacttagacacttcctgagcaggtacgagcagttatgcaagtgggatcagcaactttcattatcagagtaatcaagcacagcggaaattctgcaagttgcaaatctacaagtcttctccaggatgtcaagacatctcacgtgacatcagctntctgctcctgctccccctgtctccatgcttactgcagcatcttctatcagctactagtcttttccaggatgtcgagacttctcatgtgacatcagctntttgctccccctgtcttcatgctcttactgcagcatcttttatcagctagtagcttacaccaatcatcagcagcagtctccccctcaaagtcatatacatacaactccccctcanaatcatgaatcatgcgtacatcgtatcctactgccatacatc

SEQ ID NO: 4895 - DNA, 369 bp, Glycine max
agcttcacagtggtagcagccacgatcctcatcgatccaatgagccttcgcctactgtgccgtcgccttcgtgcgccaccgatcagtctgagagctccgccgccactccgccgagtccttcttcggcgtcgacgtcgtcgtcgccgtccacgctggtggtaactcccagctgcggcggcggcggcgcgagtccggtggtgaatcggcaggactttttctcgtcggaggaagagtttcaggtgcagctagccctagctatcagcgcttccaattcggagttccgcgaggatcctgagaaggatcatatccacgcggcgacgctggtgagcttgggatgccatcggatcgattcgacgaggaacacggacg

SEQ ID NO: 4896 - DNA, 223 bp, Glycine max
agcttccatcaagttatgactcatttgaattctcgagatcttccgtggttcaatttcgggcgtctccatatgtcatgtgcctgaatcggaccttcgtaagaaaatttatgaccatttggacctctcttgagcttccgtggttaatttcgagcttttctatatctgatgtgcctgaatcgggcatccgagtgataagttgtgacaatttcaatttctacagagc

SEQ ID NO: 4897 - DNA, 301 bp, Glycine max
ctcttttgtgcagctatctcatcctctttttcaagtgtataatgaagcttgacaggttcaggtgcaggtgctgctactagtggaggcacttgaatttggttgccagacctcaatgtgatggcactcacatttttcggattttgcacaatttgtgaaggcaatctgtcaaaattttgggactgagcttgattcatctgagtagccatctgtcccatctggtttgtcagactctgaatggaggctcttgtctcttgttgaaattgcatattctggatggtcatttgcctcactaactctttct

SEQ ID NO: 4898 - DNA, 353 bp, Glycine max
gggtcttagggaagaacctagctagcccaaagtctctaatcttatgctgaaacttctcatcaagaagaatgttgcttgctttgatgtctcggtgaacaattcttaaatgtgaattctctgggaggtattgtaatccccgtgctacaccaagaataatttggaatctagagctccaatgtagaaattgatcactcttttctgacatcacagaaacatcctaataaggaattattctcttaaaactactttcagttctttgaattactcatgacacattggacatggtgtacattttcacaagatctactacttctaggaaagcacttatctttacatatgataaacaccatgct

SEQ ID NO: 4899 - DNA, 467 bp, Glycine max
  unsure (1)..(467): unsure at all n locations
tatataacatggccatcattcacaaactntgtatacatgcatctattagcatcactactagaagaaccatcaacaagttaagtctcattaaacttttcatgccattgtttaggaacttgttttaaaccatatagggatttcaaaagtttgcacattttgttctcttgaccatccaccacacaccccttaagttgagtcatatatatcctcttcgctatatcaccattcaagatagttgtcttaacacccatctgatgaatcactaacttatggattgtagctaaggctatcataatcctaatggaggaaatccttgtaatatgtgcaaaggtataaaaaaaatctatgttaggtttctaagtaaaccctttagcaatcaaccttgctatgttattatctatagattcatcacgattatacattctcttatagatccatttacattcaataggattagcacccttaga

SEQ ID NO: 4900 - DNA, 429 bp, Glycine max
gaatctcagcttccatttcaatttcgagcgtctcgatatattacagggctgtttaggatattcgagttaaaacttattgtcatttcattttactcagagcttccgttttcaattacgaacgtcacgataccgtacgggactcaatcggatatccgattgaaaagttattgtcgttagaatttactcagagcttctgttttcaatcacgaacgacttgatattctacgggacacaatcggacattcgagtcaaaaattattggcgtttgactattcttagagcttccgttttcaattctaagcgtctcgatatattagagagctcaatcggacatctgagttaaaagttattgtcgttcgacttttcttagaggttccgttttgaatttcgacggtctcgatataatacatggctcaatcggacatccga

SEQ ID NO: 4901 - DNA, 298 bp, Glycine max
  unsure (1)..(298): unsure at all n locations
agctntgagaaaaatcaaacgacaataatttttaacgctgatgttcgantgagacccgtaatatatcgagacgctcctaattgaaaaccgacgctctgagcagatttaaaggacaataaattttcactctgatgtccgattgtgtcccgtaagatatcgagacgctcttaattgaaaacggatgctcttagaaaattctacgacaataacttttaactccgatgtctaattgagccgctaaatatatcgggacccctgaaaatgaaactgagctctatgaaagttaacgacataactt

SEQ ID NO: 4902 - DNA, 215 bp, Glycine max
ccttactactttcttgatgtacaactccactagcgttgccattctatacttcatccgagtgaaatgttatgaccattcgaatttttcgagagcttccgttgtgcaactatgagcgtcatgatataatatgggctcgaatcgaacattcgagtgaaatggtttgacaatttcgaattttcgagagacttcgttgttcaatttgagcggctagaaga

SEQ ID NO: 4903 - DNA, 460 bp, Glycine max
gctctggactgagcaccagatcgtcgctgtggcagaaactacgctgctcactctcttgaattaggcaacgccgttcccaaggttccttccttctctgattctgtctgataagttgttatcttaattgaagaatctaagcttttgaattttcatgagccggtgttgtttctgaaaccgacgtcgtcttacttgaaaaacggcggaaccatccaaattccacacaacgagggctctctgcatcacgaggttgagctcgctgtggtcatcgccaagaaagcacgtgacgtctccgaatcctctgcgatggattatgtcgccggtattcactattcatttatcttatgccttatcctgctgttaaccgtgaaaatcgttaatagatttcttaaagtattttttatctctaagaagttaattctcactgctgattttatctagagtgagatattatattcatttt

SEQ ID NO: 4904 - DNA, 450 bp, Glycine max
  unsure (1)..(450): unsure at all n locations
ctgagngatgcaagctttgacaagacagnacacactgttgtcttcttcaacaagattaattttggaaatctactctaaagatacgtgtaattatacccataattatacacactccccctcaagctggagcatataaattatatgcaccaagcttggaacatataaactgaattctaggcccccttaaggatttagtcaaaatatctgctggctgatcattggaattaatgaattcagtaacaatctctttagacagtagcttctcccgaataaagtgacagtcaatctctatgtgcttggttctctcatggaagactggatttgaagcaatatgcagagcagtctgattatcacaatacaacttcatttgcatcactttgcagaatttcaactcttcaagaaattgtttganccacataagttcacatgtgactacagccatagatctat

SEQ ID NO: 4905 - DNA, 369 bp, Glycine max
  unsure (1)..(369): unsure at all n locations
tgctggaactacttcatatggacttgatgtggtcctatgcaagntgaaagccttggaggagagaggtatgcctaatttgttgtggatgatttttccagatatacctgggtcaactttttcatgatagaaatcagactccttcgaagtattcaaagagttgagtctataacttcaaagagatatagactgcgtcatctagagaatatggagtgaccattgctgagagtttgataactgcaagtttactgaattctgcacatctgaaagcatcactcatgagttctctgcagccattacaccacaacaaaatggcatagttgaaaggaaaaacatgactttgcaaaaanctgctagggncatgcttcatgc

SEQ ID NO: 4906 - DNA, 431 bp, Glycine max
  unsure (1)..(431): unsure at all n locations
agcttgcaacttttataaccgncgatcaaatttttaatttaataacaactcttgatttaatttaatcatgattagccattgatcaaaaattacaattaaaaattgtcgttcattaagtgttaccatatttaacattaattaaagattaaattgatcatattcatactacttttaatgatttataatgttttactctacttattaagaaatatttaaacacacataagtctattttttaaattaatgtactttaaaatatattttatgagcaataataattaaaaacaatgattctataatataaaaataatacattttatattaacgaacagtaattatagtatgtgttataaatgaattacagatacgtaatatatttaaacaatcataataagctacgtattttttaataactatatatatttttaaaa

SEQ ID NO: 4907 - DNA, 410 bp, Glycine max
ttactatgcagagaatatccaaagagaatacctccatctttcttagcatcatattttcctaaattatcttttccattattcaatacaaagcatatacaaccaaagatatgaatatgtgagatgtttggttttctgtcactgaacaaatcatatggagttgtctttaagatggggcttattaaagcccttatttaatgatgtagctatgcgagtgttaacgactttaacccaaaaatattatggaagacgtgtatcatttaataaagttctagcaatcttttcaaagatctattatgtctttcaacaacaccattttgttgaggggatcctggtgcagaaaagttagctcaatcccatgcttatcacacaataagtcaaattctatatttcatactcaccctcatgattac

SEQ ID NO: 4908 - DNA, 460 bp, Glycine max
  unsure (1)..(460): unsure at all n locations
ntcagaaagcgtngatgtcgagtgtatactatntttcttgcatgttgttcgtagcttgtgtcttcttcatagatagggcatgcatgatggcccttaacactgtatccactcaaattcccatatgttggaaagtcattaatgatacaaaatatcattgcacacaacttgaatgtttcattntgatacggcaaccccctcgtcccacaactttgtcaagtcttcaatcaagggactgagatgaacatcaatgtcatttcttggttgtcttgggcccgatatcatcatacacaacatcatgtattttcgcttcatgcacaactaaggaggcaagctatacattactagcaaaataggccacgaactgtgttgagtgcttaaactgccatacagatccattccatcactggcaagtccaagcctaggatntcttgcctctttttcgaattctggatacaaacta

SEQ ID NO: 4909 - DNA, 420 bp, Glycine max
tacgtctctaaataagtcgattctgagtggaaaccttatctccggagtgatcccggagacgctggggctgtgtaaggctttgcagttgctggatataagtaacaataggatcactggttctattcctgatgagatcggttatttgcaagaattagatatcctcttgaacttgagttggaattctcttactggccccattccagagaccttctcaaatctctcaaaactatccatcttggatctctctcacaacaagctcacaggtacactcacagttctggttagtcttgacaatctagtgtctctaaatgtctcctacaatagcttttctggttctcttcctgatacaaaggtcttccgggatctacccactgctgtcgttgctggtaaccctgtaccttgcattagcatgtgtcatgc

SEQ ID NO: 4910 - DNA, 439 bp, Glycine max
  unsure (1)..(439): unsure at all n locations
tatatcnncccttttaatgattataaagcaaattccaacttatgcaatgcatgaaaaacaaaatgaaaggaatcagaactgggttgcctcccaggaagcgctcttttaacgtcattagcttgatgcatatacctcaataggtgatattaaatttggccctcactttcaggacctcccttacctgtaagcaaacattttgttctggcacaggcttgtcttctacaaataaatcaaaatcaattctttgatcttcaaaacccatttctagtttctttcttcccaagattaagggaatgtcattatcttcacagatatccattacaacaaagtctgttgggaagataaaatgttttactctgacctaaacatcttcaattactccgtatggtctggtaatggagcggtcaaccaactgtagagtcattctagtgggcatgat

SEQ ID NO: 4911 - DNA, 347 bp, Glycine max
  unsure (1)..(347): unsure at all n locations
agcttaaaggaagtgaacgaattagcatggttataattgtctccacattgattggtaaatctgctccccaaattcctgaaaaatgtaaagatccaggtacattcagcataccttgtattatagggaatagtaagtttgacaatgccatgctagatttaggagcttctgttagtgttatgcctctgtctatatttaattctctatctctaggtcccttgcagtcaactgatgtggtaattcatttagctaatagaagtgttgcctaccctgttggtttcatagaagatgtcttagttagagttggtgaactggattttcctggtgattnttatatattgaatatggaa

SEQ ID NO: 4912 - DNA, 471 bp, Glycine max
atacaatactcaagcttatgagataggactaccattcattaaaaagcctggcccataacacaagaatgacttcatagagtctcaagctttaccagtccttgataaactcctagaagatgtaagcatgcatctctacagcactattgtccctatcacgtttcatatcagatgcgtgagtgtgcatcttaattagcaatagaaataggtaggtttgttagtaaaatacctgtctacacattaaattaacgcaatgtggggaggaactgtttccttgcctgaaaaggcattttcggaatcgaaacgagaatggagacgattatcacttgtttcaacaaagccatttcaaatgattggcgtgtcgaaattgctcttgtttcaatatgtgacagagtcattatctgcagacgtcttcgctgaaatgatatgaccaatatatttaagccactccagaacataattaaaatacatttt

SEQ ID NO: 4913 - DNA, 406 bp, Glycine max
agcttcaaaggcttagacaagggactatgagtgttgtttaatatagacaaaaaatggaattactccttttaagagctggacttagggaggaggaaagaacaagcatagctaggttccttagtgggcttaatatggaagtgagggacaaggttgaactccttccatatagggacctagatgagctagtccaactttgtataagagtggagcaacaacttaaaagaaagccttcttcaaaatcttatggctctcactcttatccaaggaaggaccaagcctatggaattttaggggctgcaccttcaaaacccaaggaagaatagggtaagaccatagagaaatacacccctaagactagttcccaagaaaggactaacaacattaaatgctttaaatgtcttgggag

SEQ ID NO: 4914 - DNA, 465 bp, Glycine max
taagcaaaagtttcatttaaactactcttccaaaacttttatataaaagtaaataaatgatattgtctattgtacttaaatataaataaatttaattaattttatgccatttaatgttatcattcctaaaatattattctttcgtctaattctttttctatcttgaatgactctcttatttatgataataagtttcaaatgaaagatattttaaaagaaaagaaaattattatttttactttttcacgtaagattaaatgatggtaggagatgtggagtggacttgagaatagatatgttttgcttaccttcataggctagttttttctaaaagataatttattctttggtacagagactcctttgtcatgtatatgatagcattacttaaaagtaatgcatgtattatctcatggaattcaagataatgatatatgatagtttattcattctttgatatcatac

SEQ ID NO: 4915 - DNA, 378 bp, Glycine max
  unsure (1)..(378): unsure at all n locations
agcttcatctggaaaagtatcatagatattgttctccttggaagtgactttttcattcacaagtctagataggtggttagccactaaattntcacttcccttcttatcctttatttcttgatcaaattcctacaacataagtatccacctaataagtatttgtttggaattaggcttagttaagaggtacttaatgttagacaagtggcctcagatatcttaagaagggggggttgaattaagatattccaaacttttctcctaattaaaaatctatcttactttntacttaagttatgaattcccttaatgacaatcttcttacatattaattcatatgaagcaacttgaattatgaatattaagcattaatatata

SEQ ID NO: 4916 - DNA, 325 bp, Glycine max
  unsure (1)..(325): unsure at all n locations
agcttcattcactaatccttccttacacaatgtttctataattctactatacataaccacattgngtttaacattaaaaacacaatgttgtatcatcctcaacaatctaacagcgacttttgttnttcctgcatcacagagtccgttaattaaagtcccgtaggtgatttcgttgaattcgaatccatccgcgagcatttcgtcgtgaaatttgagcgcggtggaaacggcgccgttgaggcagatgccgttgatgagggtgttgaccgtgacgacgtcgtacgggagaccgcgctngagaagcttcccgaagacggagaatgcg

SEQ ID NO: 4917 - DNA, 305 bp, Glycine max
agcttgcaaactaggtacttatttgcaacctgaaagctaggaggacgctgtgtcataaatactgactcctcaagaaacccatttagaaaagcattgttcacatcaaactgaaataactctcacccatgtgaaagagcaagagtgagaacaatacgaattgtgacaggcttgaccacaggagaaaatgtctcatgaaagtcaaaaccccatgatgaaaacccttagctaccaaccttgctttaaacttgttgatggaaccatcaacattttcttttactctaaaaacccacttacactcaatggca

SEQ ID NO: 4918 - DNA, 474 bp, Glycine max
  unsure (1)..(474): unsure at all n locations
acggaccttgaaactaagcttaaggaagtgaaagaattagtatgggcagaaatgtctccttattgattggtaaatctgttccccaaatccctgaaaaatgtaaagatccaggtacattctccatacctagtattatagggaacaataagtttgacaatgccatgctagaattaggagcttctgttagtgttatgcctctgtctatttttaattctctatctcttggccctttgcagtcaactgatgttggaattcatttagctaatagaagtgttgcttatcctgctagtttcatagaggatgtcttagttagagttggtgaactgatttttcccgttgattnttatattatgaatatggaggagggattttcttaaggatcagttcccatcattctaggcagacctttatgaaaactgctagaacttagatagatgtatatgtaggcacactatctatggagttttgtgatat

SEQ ID NO: 4919 - DNA, 350 bp, Glycine max
  unsure (1)..(350): unsure at all n locations
agcttatcattctctacgtnganttattagttaactgtcttncgcctctcacattcttggttcttacttccctctaaatttggcttagagctttgctcatactcattgcttcttattttcctttccgaacaagaaattcctaataccaacaacacaaattttatgagttggaaaccttgattttttgttagcatgtctccaacaaaaaacaattagaaaagaattgcattttagaccttagaaagcattatcctcgctccaacatgcttgttatcccatccaaaggtattgtcagaatctgcagcccccagtgtctgtccattaatcttaatgtagtttaggtacattgg

SEQ ID NO: 4920 - DNA, 587 bp, Glycine max
  unsure (1)..(587): unsure at all n locations
agctttgaatgcactatttaatggagttgactagaacatcttcagactgatcaacacttgcacagtggccaaagatgcatgggagatcctgaaaatcactcatgaaggaacctccaaagtgaagatttccagattgcaactcttggctacaaaattcgaaaatctgaagatgaaggaggaagagtgtattcatgacttccacatgaacattcttgaaattgccaatgcctgcactgccttgggagagaggataacagatgaaaagctggtgagaaagatcctcagatccttgcctaagagatttgacatgaaagtcactgcaatagaggaggcccaagacatttgcaacatgagagtagatgaactcattggttctcttcaaacctttgagctaagactctcggatagggctgaaaagaagagcaagaatccggctttcgtgttcaatgatgaaggagaaaaaaatgaagttgacctggatactgatgaaggtctgacaaatgcaggtgtgcttctttggnagcaggtcaacaaagtgctaaacagaatggacaagaggcagaaaccacatgtccagaacatccctt

SEQ ID NO: 4921 - DNA, 534 bp, Glycine max
agctttgagccaattcaaacgacaataactttttactccgatgtctgattgagtcccttcatatatcgagacgctcgaaattgaatgttgaagctctgagccaattcaaacgacaataactttttactcggatgtctgattgagtcccgtaatatatcgagacgctctaaattgaatgttgaacctctgagctaattcaaacgacactaactttatactcggatgtctgattgagtgccgtaacatatcgagacgctcgaaattgaatgttgaacctctaagccaattaaaacaacaataacgttttactcggatgtctgattgagtcccgtcatatatcgagacgctcgaaattgaatgttgaagctctgagccaattcaaacgacaataactttttactcggatgtctgattgagtcccataatatatcgagacgctcgaaatgaatgttgaagctctgagccaattcaaacgacaataactttttactcggatgtctgattgagtccccgtatatatcgagaccctcgaaa

SEQ ID NO: 4922 - DNA, 337 bp, Glycine max
  unsure (1)..(337): unsure at all n locations
agcttgcagcaaatgcaaaccacaagaacttttaactccaatatccgattgagtcccgtaatatatcgagacgctcgaaattgaaaacagaagctctgagcaaattaaaacaacaattactttttactcggatgtccgaatgaatccagtaatatatcgagaactagaaattgaaaacagaagctcgttacaattgcaaaccacaattagttntaactcggatgtccgaataagtctcgtaatatatcgagacgcttgaaattgaaaacagaagctttgagcaaattcaaatgacaattactttttactcggatgttcgaatgaatcccgtaatata

SEQ ID NO: 4923 - DNA, 311 bp, Glycine max
agcttgcaaaccaaatgctcatcactgctagaggagaagccttcaagttgtttcatataaatctcctcctctaaatcaccattaagaaagattgttttcacatccatttgtttcaactgaaggtcaaaatgagaaactaatgcccacataatacaaagagaatattacttatatacaagagaaaaagtcttaatgaaatcgattccttctttggagtaaatcccttagcaacgagtcttgccttgtatctctcaatgatgcctaatgaatcctttttggtcttaaagacccatttaataccaatatacttt

SEQ ID NO: 4924 - DNA, 539 bp, Glycine max
agcttgaggatgtgctcgaggtttttggggtctcacgtgacagtcaccaggcactgttttcgggcgaggaaggggagggcgcatatgcaggtctggtacgtgccgccgcacgcgcggaggttgtcagcgatccagtcgtgcatgcggttggcgtgttggatgaggccagggaggctgcccaataggggccagacacgtggacctttgagggagcgagtgaccaaggtgaaccatattaaataggccgctattgctgataggatcattaaagccgttgctgcgtccatgtgagtgctgggcccaactcccaaaacaaaaaattaaacctttattgcttgcaccttccctcaccggaggagctagaggctgctattaccatcaccacgcaaattcaattggatccattgcagcttaaatgaggaaagtaaaccctagctgtgtagtattcaagtgggggctaaaacgggagtgatagatgaaattattgtgttcaactaaaaaatgtgcaagtggttttgattggtgaataattgagatct

SEQ ID NO: 4925 - DNA, 537 bp, Glycine max
agcttgtgcatccaataccctgatgaggatgtcccatatgttcttaaaactgggctgattcatttgcttccaaagtttcatggccttgcaggtgaagacccgcataaacatttgaaagaatttcacattgtctgctccaccatgaaacccccagatgtctaagaggatcacatatttctgaaggcttttcctcattcattagagggagtggcaaaggactggctgtattaccttgctccaaggtccatcacgagctgggatgaccttaagagagtatttttagaaaaatttttccctgcttccaggaccacaaccatcaagaaagatatctaaggtattagacaactcagtggagagagcctgtatgagtacttggagcgatttaagaaactatgtgccagttgccctcaccatcagatttcggagcaacttcttctccaatatttttatgaaggactccagtatatggagagaagtatgatagatgctgccagtggtggagccccttgagacatgactcctgtgaagccaggaatt

SEQ ID NO: 4926 - DNA, 543 bp, Glycine max
agcttgtttatcccatgttgaatttgcttctttagagctgttcatagcaccactaattgttctccttttgaagttgtttatggttttaacccactaactcttcttgatcttttgcctatgcctaatgtttctgtttttaagcataaagaaggtcaagcaaaggtggactatgtgaagaagcttcatgagagggtcaaagatcaaattgagaggaaaaataaaagctatgcttaacaagccaacaaagggagaaagaaggttgtcttctaacccggagattgggtttgggtgcacatgagaaaagaaaggtttccggaacaaaggaaatcaaagcttcaaccaaagggagatggaccatttcaagtgcttgaaagaataatgacaatgctatcaagttgagctacccagtgagtataatgttagtttcaccttcaatgtctctgacttatctctttatgatgcagatggagaattccgatttgaggataaatccttctcaagagggagagaatgatgaggacatgaccaagagcaagggccaag

SEQ ID NO: 4927 - DNA, 409 bp, Glycine max
agcttctcgatatattattcgcctgaatcttacatctgagtgaaatttatgaccatttgaatttctcgagagcaattgttgcccaatttcgtgcgtctggatatattattcccctgaatcggacatctgagtgaaaagttatgaccatttgaatttctcgagagcttccgtttttcaatttcgagcatctagatatattatttcccggaatctgacatccgtgtgaaaagttatgaccatttaaatttcttgagagcttccattgttcaatgtcaagcgtcctgatatgttatgcgcctaaatcggacatccgagtgaaaagtcaggacaatttgaatttctagagagcttttgttgtttaatttcgaccgtgtcgatatattatgggccggaatcgaatacctgagta

SEQ ID NO: 4928 - DNA, 488 bp, Glycine max
agcttgtcttgacatattagaagtttatactcatgataaaaacattctgaagaattgcttatgattaatagcatgttttcgttatatttcttttaataaaaagagattttaagtgaattagtaattagtgaggatagaagtaaaaagaaaaaaagaaaaaggaaaaaagccagtaatatgtaagttataagctagttgaagtaataagccaaaaattacataaataaaatagcataatgtatatctaataaatttattttgattaaaataactagtcaaactaacttatactagagtgttgtgttaaacacaattggaaaaaattgttgacggtaattattatttaaatacgtttatgatttatattattatcaaaaattataatcttaatagaaggaaaaaaaaaacaccttaatggttctaaagctattgaaagcaaagaaaatattgatgaaaaaaaaaagaagtgaagttgaccggttcaaaca

SEQ ID NO: 4929 - DNA, 386 bp, Glycine max
  unsure (1)..(386): unsure at all n locations
agacctcctcaacctcagcagcaaaatcaaccacagcagagcaattatgacctctccagcaacagatacaatcctagatggaggaatcaccctaacctcagatggtccagccctcagcaacaacaacagcagcctgctccttccttccaaaatgctgctggcccaagcagaccatacattcctccaccaatccaacaacagcaacaaccccagaaacaaccaacagttgaggcccctccacaaccttccctcgaagaacttgtgaggcaaatgactatgcttaacattcagtttcnnnnngaaatcagagccttcattcagagcttaaccaatcagatgggacaattggatacccaattgaatcaacaacagtcccagaattctga

SEQ ID NO: 4930 - DNA, 510 bp, Glycine max
  unsure (1)..(510): unsure at all n locations
agcttcgtgaagaggttttgaatgaccgggatttgatttgaatcaagggggctttgcattccaacccagcagccatgtctgattatactttgagagatggtttaatgtttttcaagggcagacttatattgtctaagagctccaacttgattcctactttgttgattgaataggaggacactccagatttaccaagactaacaaacggatggcagcaaccttctattggaaaggtatgaaaaagacaataatggaatatatccttcgttgtgatgtgtgccagtggcataagtatcaggccatgtcaccaaccgatctgctgcaatccattcccatcctagaggtggtttggacagatatctctatggattttattacaggattgccccttttacagccaaaacagttgcagaaaagttcatcagagatgtggccaaactgcacgtgtntcccaaattctattattgatcgagaaccccctctttctgagtaaattttggggaaactttt

SEQ ID NO: 4931 - DNA, 605 bp, Glycine max
agcttggccataagaatcaaagatgtcttttataacgacacggtctctatattatctaccttgtaaaatagaaaacaaaaggtgtgtgaggatatgagttcctttacacatctttactctatgaatgtcacatttcatttcatgatattttaaaagtgtagaaagataatgagtcatcctacctaagttctctcctgagaaaaatttgtccaattgagtatccattaataatcatagcatattggacaatctgaagacatatattaatccaactaagtcatttttcatgaaagcccatttttttattactaccaaatagccccaattaactctatcaaaagctttgctaatgtcaatttcaaagtaacttgcccaatttttcctttgtacttacacctcatgtgatgaataatttcataagctaaaagaacattgtaaagaatggatcgatcctctacaaaacattattgctcttcataattatgcaatttggaaagagaagttaaagacacttggctaaaactttggacacatgatttttgttaggacattgcacggagagattgaccaaagtcttttatacaaacagggtttttaattttgga

SEQ ID NO: 4932 - DNA, 512 bp, Glycine max
agctttgagaatatggttgcagccattggtcaatatgggccacatttgcccattcctagctatcatgacatcagagttccactcttgaagaaggaagttgaatatactgaaaatttgatgaaaggccataaggagcaatgggtcaagtatggatgtactattatgtccgatgcatggactgatcggaaacaaagatgcatcattaattttttgattaactctcaagctggtacgatgtttttgaagactgttgatggctctgattttgtaaagacaggtgaaaagctttttgagttgcttgatgccattgtggaggaagttggagaagagaatgttgttcaagttgtaaccgataatgggagcaactatgttttatcgggtaagttgttggacgagaaaaggaaacatatttattggactccttgagcagctcattgtattgatttgatgcttgaagatattgggaagcttcccttgatgaggaagacaattagaacgaattaatctagttg

SEQ ID NO: 4933 - DNA, 574 bp, Glycine max
agcttttctttgagcaaagcaaaggcttgatcttgtttatcacccaaggtaaatgccacattcttcttcaccagctcattgagaggtgatgcaattgtagagaaattaggaatgaaccttctatagaagcttgctaacccatggaagctcttaatatctcccacacttttcgggatgggccattcttggatggccttgattttctcagggtccacttgaaccccatttctaccaactacaaaccctaagaaaactatattatctacacaaaaagtacacttctctatatttgaatagagggtatttttcctaaggactgaaagaacttgcctgagatgtcctaagtgatcatctaggctcctactatacactaaaatatcatcaaaataaacaactacaaatctacctatgaaatcccttaagacatgatgcataagccttgtcgcaacctaaccttcggcgggagggcaacgcgtgactcgcggatgcgtgttccaagaaaggaatacgtgcggagtcgccaccaacgtttattcgaggagaacgttcggaaaacccgaaaagacgtgatcta

SEQ ID NO: 4934 - DNA, 644 bp, Glycine max
actaaactttgacatattaaatgcggtcaatttttcccccacatttcaaatttatgttctacgagtataaaaatatatctacccaaatgaagctcattttatattaataatattatttttttaaccaaaaattaaaattattatcattaattattaaatcttaattttgaatttcaagtaaggattaggtttgctttattaattaaaatattattttttgagattataatagttcaacattatgattaattaattaaatctttttgtatcccgtagtttgatgtattttctttatacatttgacattttaaataagtcattcatccttatttgaaatacacactaatagcattaatttcaataactgaaattaatctaacagcccaaccgatgaattaatatggaaacaatattttaaaattttactttaaactaatttattcactaaaatatatgtataatttattcttacttactgcccaattcaaattgaacaacttacacaaatgttaagaaaaatgttaaatccaaaagtcattgacttccaatcaactattgtttttaacaatagaataaaatgactctaaatatttttgaaaacctcggaaaatatcaaattttatctatgaacccctataaaaaaa

SEQ ID NO: 4935 - DNA, 493 bp, Glycine max
agcttgataatcatatcaggctttcattctgaaatgaaagatttggcacatttactcactccactccaaaaacctattgaggcaccatgcattatcattgcctcctcaatgaccctagcaaagatatgtgcaagaggaaggtatgataggtatacatctttttcattcaactgcaagcaggaaaaaggagggtaagtcaaagagaggatagcaaaatattcattatcctaaaactgaaaacatttctagagactagagctctcaaaataccaacactagcttactttttcattacaactcttcagcaattgctgaatcccagctaagagtgtaataatgctttcgttggttatcaacactcccttgggatcacctgtagttccactcgtatacattattgtacacacatcacttttctttttaacaggaagatcaaaactctgattatgaccctgctctagacataaaaaactggaatgagtattgagaaatg

SEQ ID NO: 4936 - DNA, 337 bp, Glycine max
agcttctagagctttctttgctgcatcaatgacatagaatgcatgcaaagaaacatttggtggcccgtctttttctgctttgttgtttccttttgaatttagcagcacagaggcatcacaccccttcaagagtataggaaaaaagaaaacaatatgatttgatttcatgatgcatcaaatgaggcggaagcagtcaagaggaaaggagggaggaggggtcaaaatagcattacccgaacgaaacaatcatggaagtgcattcgcagaattgctgctggaacagttttgtccctagcagtggcatcctttactgccttggcaacaatgaactccacat

SEQ ID NO: 4937 - DNA, 412 bp, Glycine max
agcttgtaaacatgattaggatgttaaaagtctacaaaacttgaagactggtctacatgtatctcttcttcaatgtatccattgagaaaagcactcttcagatccatttggtataacttgatatccataatccatgcaaatgcaagtagcaatctaatggcttccaaccttgcaatagggacataggtttcatcatagtcaatgccttcctcttggttgtatccttttgcaaacaatctagtcttgttccttaatatgatgcgtgattcgtcagggttatttcgaaacactcatttggttttgattgacttatgagaggcaggtttagttccacacttcatccgtttaaactgattagttcttcatgcatagccagcaaccaatgctcatcgtacaaagcttcatctatgtt

SEQ ID NO: 4938 - DNA, 597 bp, Glycine max
agcttcatctggaaaagtatcatagatatcgtgctccttggaagtgactttttcattcacaagtctagataggtggttagccactaaattttcacttcccttcttatcctttatttcttgatcaaattcctacaacataagtatccacctaataagtatttgtttggaattaggcttagttaagaggtacttaatgttagacaagtggcctcagatatcttaagaagggggggttgaattaagatattccaaacttttctcctaattaaaaatctatcttactttttacttaagttatgaattcccttaatgacaatcttcttaaatattaattcaaatgaagcaacttgaattatgaatataaagcaataataaataaaggagattaagggaagagaaaatgcaaactcagttttatactggttcggccacacccttgtgcctacgtccagtccccaagcaacccgcttgagagttccactaacttgtaaattccttttacaagttctaaacacacaaagacaaccccttccttttgtgtttagagattctttacaacaagagactcacagtctcttaatcccttagagaatgaga

SEQ ID NO: 4939 - DNA, 533 bp, Glycine max
  unsure (1)..(533): unsure at all n locations
agcttgcaagaggattggtagaggggatctcatccaaggcttttatgtcttagacctcagggacactcttgattgtaaatttactttttttgttatcaattcacatacaacttccattccttgtaaaaatgctcatatttggcattctagatttggtcatatctcagacaaagttttcaaacatttgaataataaaattggtctacacctttctcccaatttctcttcttctaattgttttgtttgccctcttgctaaatttagaagattatattttcctaactctaaccatttattagaattatcatttgacttaattcgctgtgatatatagggtccctatgctcaccctacctatgagggaaagagaattttccttacattggttgatgactactcaagattcacttgactatttctgcttaagcacaaatctgaagctttaatctatgtgcaacaatttttcaccatggttcagactcagtttggtgtatctatcanatgccttcggtctgataatgctaaggaacttg

SEQ ID NO: 4940 - DNA, 552 bp, Glycine max
  unsure (1)..(552): unsure at all n locations
agcttatcaaatatgctttcaggtgataaacttttatcaattaagtaattaattaagttgtttatccaaacgcaccctttgcataaaaacttttactactctctagctgatataagtgaatgtttattgcaggctgtggtaaaaaggttgatgactgatgttccctttggtgttttgctctctggaggtttggactcttcattggttgcagccgtcacggctcgctacctggcaggcacaaatgctgccaagcaatggggaaccaaattacactctttctgtgtaggccttgaggtatgtaagcgtacatattcttgaattagcagtggatgtttttaatataagaaggaagccatgaaatttgtcttaatctttaatcatcttatgttgagtagggtgcacctgacctaaaggcagcaaaggaagtagcagactacataggtactgtacatcatgaanttcactacactgttcaggtatatctaaatgagatagtgttgttactgctaagaaattcggggggtttgatgcctaaaattataatttgtaaat

SEQ ID NO: 4941 - DNA, 559 bp, Glycine max
  unsure (1)..(559): unsure at all n locations
agctttcaaattactatacgagtaattttcaacttaaaataatattgagtattttatttttattaacaggaataaactaaacgtaatgtttgaaattgaaaaaatataaagtttgatgaagagatattatgttcaattgatgtgatgtgtcaaaaattaatattaaaaaaactataaatttaatttaagattaacttatattataataattttactttcacttcatctagaaaaagaaatactttcaatatattaagattcacattttaaaatttaaagaaaaattaaaatgattgattaagaaataataattataaataaaaaataaaaatgaaatacccaatgcaataaaagtcacaaacttaatatggaagaaaaagattgggctaattattggacagaggaatcaaagtacgcatcagactcaactcccagagtgttatgaagagtttttcttttatcgataaatattacgatattagtttaatttggttggttttattaataaagaatcttnggtccatcacttaattttttataattctaaattttttatatg

SEQ ID NO: 4942 - DNA, 556 bp, Glycine max
agcttctattgctcttattcatctttacttgggctatctcagaccttttatttttgttgtctaagattttgcatacacctccttcaaagtgaagtgtgtagcctctctccatcatttggccaatgcttagaagattttcttttaggctgggaactagtaagacatcatggatgagtcgcgtacctttatttgtctccaccatgacagtgcctttgccttttgattcaaccacacttctatttcccagtcgacctttgactttgacagactcatcaatacatttgaaaatagtctcatccttggccatgtgattgctacatccactatccaagtaccagcttcctcccttttcttttattgagtcttgagtggcgtagaatgtacattgttcttgatcatgctcctttgtgatatgcttgatgcctatttttgttgcgacaatttttctctacgtgcccgaacttctttgcatggttgcattgtggcatattacagaaccaacaatttttctctacgtggcctttgccttttgcatatattgcatggaggattttta

SEQ ID NO: 4943 - DNA, 446 bp, Glycine max
  unsure (1)..(446): unsure at all n locations
tctaaactntatacaagactgaagctctgatatcacttgttggacaagtggcctcagatatcttaagaaggggggttgaattaagatatcacagactattccccaattaaaaaaattctacttttaatttaacccaacaacccaagatttcttttaaacaagaactcctagataattatgcaaattaatcttactaaatagaaataataaccaataaaggagtttaagggaagagaaaatgcaaactcagatttatactggttcggccacacccttgtgcctacgtccactccccaagcaacccgcttgagagttccactatcgtgtaaaatccctttacaagttttgaaccacacaaggacaacccttcctttgtttcagatttctttacaacaagagaccctcggtctcttaatcccttttgagaaatagaaagaagagaagac

SEQ ID NO: 4944 - DNA, 393 bp, Glycine max
actggatgcattggttaacttggtaacccagctggccttgaaccaaaaatctgtacctgtcgcaagggtctgcggtttgtgctcctctgctgaccaccatacagacctttgcccttccatgcagcaacctggagcaattgagcagcccgaagcttatgttgcaaatattttcaatagacctcctcaacctcagcagcaaaatcaaccacagcagaacaattatgacctctccagcaacagatacaaccctggatggaggaatcaccctaatctcagatggtctagccctcagcaacaacaacaacagcctgctccttcattccaaaatgttgctggcccaagcagaccatacattcctccaccaatccaacaacagcaacagccccagaaata

SEQ ID NO: 4945 - DNA, 400 bp, Glycine max
agcttccttaagaagattcctaaagaagattgagcttagctacacatacatctctaatagctaagctcacctccttgagatgagaagctagagcttagctacacaccccctataatagctaagctcacccccatgacaaaaaacatgaaaatacaaaaaaaagtccttactacaaaaactactcaaaatgccccgaaatacaaagctaaaaccctatactattagaatggccaaaatataaggcccagacgaaggaaatacctattctaatatttacaaagataagcgggctcatacttagctcatgggctcgaaatctaccctaaggctcatgagaaccctagggccttcccttggatctctagcccaatctacttggagtcttctacccaatgccctt

SEQ ID NO: 4946 - DNA, 452 bp, Glycine max
  unsure (1)..(452): unsure at all n locations
tcatgcttaactatgtatggcaaaacttcattactgttgttcaagacatacaagtgagcttgtaacaaatcttctacacttggagtgatcacatgcaatcctcttgaacccttaccacccactctgtcatcatgccgagactcaagaaggccaacaggtttagccttctctaagtattatgaacaaaattcaatggcttcttctgcaatgtacctctcaacaatagatgcttctagatgatatagattctttgtatacctttttaagatcttcatgtatcgctcaaccgggtacatccaccgtagataaacaggaccacgacatttgatttctctgaccagatgcacaatcaagtgaatcatgatgtcaaagaaagcaggaggaaaatacatctncaactggcacagtataattgcggcctcattttccaactcataanacatgactggatc

SEQ ID NO: 4947 - DNA, 395 bp, Glycine max
  unsure (1)..(395): unsure at all n locations
ntgcctgactccttcatttcctatgacccattcttctatctatgtccctttctttntacatttaattgttcatctttctatagctctttatttattttcttgctttattgaaatcattttcaaaaatacttagtcgaatatatctcataaaaaattacatattttatattcaaatctgtattttcatgaaaaggtgccaagaattgttatatttcttcaaatctagctgttattggaaatcaacttttagtacattgtcttttcaataaagattactacaaaatttgaataacttgattttttgctgatttgaataaaaataatttgctgatttgaataaaaataattcacatctttgaatcttgcgattctaaatcttaagaactcaagaatac

SEQ ID NO: 4948 - DNA, 352 bp, Glycine max
  unsure (1)..(352): unsure at all n locations
nttcgttcactttgcatgagntttgccaccatatgttcccatttccatggatggtaccaccacctttaactgatagtttctcaacactgtcgaaagtaagccagtgagtgagatcttcgctgtaatctgataggttttctgatgcttcaatggttccagaaatctgaaaaacaaaacaatgaaaaatcatcccaaattcatatatacagatatcgaacaattgaagatctcttcaatgtttataattcaatttttaaaaatatttgaactagcaaatttaatttgttccaaactataacctgcacttcgatgttggatctgcaagggccagacaatctgaatggcttgagta

SEQ ID NO: 4949 - DNA, 444 bp, Glycine max
  unsure (1)..(444): unsure at all n locations
agctggtcacgaagntgctgcatttctccctataagaatgcaacnttttaataagcggaaagcgaagccaaatgtgggaaattaatataaaagaagaaatataagcaaaaagagtcatggaagtcaagaactcaaccactaaattcagatgaattggcagagtaaagcaaaaaaatattacctgcaagaatcgacgttcttcaagccactgtttgacaggcatcactttatcattagcatctttccattcatttgcaaccacaacagctactctggttgctgttaccttggcacgagccaactccctgtctagagtctntctttcctcctaaagaatgtcaaataaaccgcgcaaaaataaatatgatcttaactagaggcagtacaatcaagaataaagcaaatgtgagtttgaacatgctgaagacttttcacacaatacat

SEQ ID NO: 4950 - DNA, 452 bp, Glycine max
  unsure (1)..(452): unsure at all n locations
tgtgcctcctcacgtctggaatatgaatgtagcttatattattcaaagacccttaggtgctttgttgatggcttcttctcgttccaagcttcaattggagtcttgtcttttacagacttagttggacatctgttgagtatgtaaacaacattgtagactgcttcagcccaaaatgtgttaggtagtcccttctccttgagcattcatctagccatttccataactgtgcgattctttctctcggacacttcattttgttgaggagaatatgcgactgtaagttgtcgctcaatgccttcatcctcacaaaatctttcaaactcacgagagatgtactctttgtcgngatcacttcttagtacttttattcgttttccactttgatttcaacaagggccttgaactttttgaatactccagagacttctgattnttcttttaanaaatatacc

SEQ ID NO: 4951 - DNA, 417 bp, Glycine max
agctctcataaattcacgaaactattccaaatgctctgcttctccatggctaccgcaccaaaagaaacctcagctcctggatcaccctctgtaccatcatccaccatagcaccatcaaaccaggaacaacctgaattccatatccaacccatacaaatgattcctggtcaagctcctgtccttgagaaactggttcccaaacgacaacagggagtgaagacttctgaaaaccctagccttgcaacaagtcctatggaagtagacacggagatggacaagaaaatccgcagtattgtgagtaacattctgaaaaaagcttctgtccctgatgctgatgaagatgttccaacatctttcaccccgaatgtttctgtgcctgatgctgagaaagaatgttcaacatcttccactccaaat

SEQ ID NO: 4952 - DNA, 363 bp, Glycine max
agcttgtagggttaatgtctcacgattatcacatgcttatgcaacaattgttagtcgtggctatacgagacatcttgccatacaaagtcaggttaacgataactcgcctgtgatttttcttccatgctatatgtagcaaagtcattgatccagtcatgtttgatgagttggaaaataaggccacaattatactgtgccaattggagatgtattttccccctgctttctttgacatcatgattcacttgattgtgcatctggtcagagaaatcaaatgttgcggtcctgtttatctacggcgaatgtacccgattgagcgatacatgaagatcttaagagggtatacacagaatctatatcatc

SEQ ID NO: 4953 - DNA, 369 bp, Glycine max
agcttcttggggttgtttggctattatagatagttcattgaaggattttctaaattggcattgcccctaactaagttgactcgtaagaatgagaagttattctggaatgagaagagtgatcaaagtttccaagagttgaagaggcggttgacgacagctccagtgttaattttgcccgaccctaagagaacatatgaagtgtattgcgatgcaagcgggcaaggcttggggtgtgtgttgatgcatgagggaagagtactggcttatgcttcgcgtcaattacgtgctcatgaatttaactatccgactcatgactaggaactagcggcggtggtcttagccttaaagatttggaggcattatttgtac

SEQ ID NO: 4954 - DNA, 440 bp, Glycine max
  unsure (1)..(440): unsure at all n locations
agcttgttaatccatggaagctcctaatatctcccacactttntggggtgggtcattcttggatggccttgattttctcaggttccacttggaacccatttctaccaactacaaaacctaagaaaactatattatctacacaaaaggtacacttctctatatttgcatagagggtgtttttcctaaggattgaaagaacttgcctgagatgtcctaagtgatcatctaggctcctactgtacactaaaatatcatcaaaataaacaactacaaatctacctatgaaatcccttaagacataatgcataagcctcataaaggtgcttggtgcattagtgagcccaaaaggcatcactagccattcatacaaaccaaacttggtcttgaaagccgttttccactcatcaccctttttcatcctgaattggtgataaccactt

SEQ ID NO: 4955 - DNA, 431 bp, Glycine max
  unsure (1)..(431): unsure at all n locations
agcttgtanggttaaagtctcacgattatcttatgcttatgcaacaattgttagtcgtggctatacgagacatcttgccaaacaaagtcaggttaacgataactcgcctgtgatttttcttccatgctatatgtagcaaagtcattgatccagtcatgtttgatgagttggaaaataaggccacaattatactgtgccaattggagatgtattttccccctgctttctttgacatcatgattcacttgattgtgcatctggtcagagaaatcaaatgttgtggtcctgtttatctacggtgaatgtacccgattgagcgatacatgaagatcttaaaagggtatacaaagaatctatatcattcagaagcatctattggtaagaggtacattgcaaaagaagccattgaattntgttcagaatacttagag

SEQ ID NO: 4956 - DNA, 365 bp, Glycine max
tagtaaatctccgtatggcctcaaacaatctcctttgtgttttgacaggctaacaaaagttgtcaagcaagatgattttgcttaatgccaaacaagccatactatgtttgttaagcatttcttggatggaaagatagcttttttattgtctatgtagatgatattgtaattacaagagacgattatgatcaaataaatcatctgaagaatcttctagccaaggaatttgaagtcaaggatctaggccaacacaagtattttctaaggatggaaattgctcggacaaagaatggtatttttgttcattaaaggaagtacactttggatttacttcaagaaatatggatgcttggatgaaaagcagc

SEQ ID NO: 4957 - DNA, 449 bp, Glycine max
gcttaggtctgcttaatataacactttttagtttattattttcttagttgcttcctgctattagtgcaaaccattttgctatgtttcatgtttttctgtttgtgttgtggttttgagtttgaaagttgaacgattgtgcctagctttttgaactttaggggacattgttgttgttgaatggcactatatcacatgaatgcattttggtttgcaacctgctgagtttgcaaggggttgtgaagcaaatttaataataaataaaaataaatgttttctctctggctctctttgtatatttattgaaaaagtatacaatatttatagagtatcaatacttaaaaaaattaagtattataataaaaaaaatatttacattaagtgacttaaatatattttttaatccaaagttttacgatacttaggtagacgtaggcacttacctttgatat

SEQ ID NO: 4958 - DNA, 443 bp, Glycine max
  unsure (1)..(443): unsure at all n locations
agctttcatnntttaattatttttattatatttgatattgatacaaaatatttgtctaaatagttatttttgtctttgattgtgtaattcgttgacaaatgtgggatgaaaatacaaaatttaggattcaagagtgtaaaaagtgcgataaaaatatatctggccgttaaaaaaatagtctacttaacttttgtttgtcatagttaataaaataatctacgtggtatagagagatgaatttctcaatgaaatgattaccaacgtggttatatttatatttaattgtcagtataggagcatatttgtcatataatattttttttattttttgtcttctaccttattggtaaattgtgattaattatcataatttgaaaaaaaattataatgattgtggcaaaattttttagcanactctaaaataaattaagtttaaaagaaaa

SEQ ID NO: 4959 - DNA, 443 bp, Glycine max
tccattgttcaatttcgagcgtctcgatataatatgcgccttaatcttacctccgagtgaaaagttatgaccattagaattgctcaagagcttccattgttcaatttcgagcgtctcgatatatatatacgcctgaatcggatctctgagtgaaaagttatgaccttttgaattgctcaagagcttccattgttcattttcaggcgtctcgatatattatgcgccagaatcggacatccgatttaaaagttatgaccatttgaatttcttgagagcttccgttgttcaattttgagcgtctcgatatattatgcgcctgaatcggacctccgagtgaaaaggtatgaccatttgaattactaaggagctttcattgttcactttcgagcgtctcgatatattatgcgcctgaatcggacgtccgagtgaaaagttatgaccct

SEQ ID NO: 4960 - DNA, 398 bp, Glycine max
  unsure (1)..(398): unsure at all n locations
agcttgctgccacggagttntccgactatgctcttgtgtggtggatcaagctacaaaaggagagagcaagatatgaagagccaatggttgatacatggacggagatgaaaaagatcatgaggaagcggtatgtgccggctagttactcaagggacttgaaattcaagctccaaaaactaacccaaggcaacaagggggttgaggagtatttcaaggaaatggatgtgctcatgattcaagcaaatattgaagaagatgaggaggtaactatggctcgatttcttaatggtttgactaatgatatccgtgatattgttgagctgcaggagtttgttgaaatggatgatttgcttcacaaagcaatccaagtgtgagcaacaataaaaaggaagggagtg

SEQ ID NO: 4961 - DNA, 435 bp, Glycine max
  unsure (1)..(435): unsure at all n locations
agcttagtaaagctaagcactatcaatctcctcttcttgtgcaaatttgtctaaaacatacttagacacttcctgagcaggtacgagcagttatgcaagtgggatcagcaactttcattatcagagtaatcaagcacagcggaatctgtagtttagacaagttgcaagtcgtttccaggatgtcaagacatctcacatgacatctgctttctgcttctgctccccctgtttccatgcttactgcagcatcttctaacagctactagtcttctccaggatgtcaagacatctcctgtgacatcagctatctgctccccctgtctccatgctcttactgcagcatcttctagtagcttccatcagtcatcatcagcagcagcagtctccccctcagaatcgtatacatacaactccncctcaaaatcatgaatcatg

SEQ ID NO: 4962 - DNA, 417 bp, Glycine max
  unsure (1)..(417): unsure at all n locations
ntgaacatgagacatccaagccctctagctcataacatcttttcaaattcaaatcttcaagagccctacatccaacatgaaggtattttaaccccaaacacgaatcgaggtttagggtcttgagaagagggaaagatgattccgagaacaaatcaggaagagaaggttggttgttcaaaatgactagggaaagagatagggtttgtagggattgaaagccatgtctcataaccgatgaaggaggcaaacgaaaccctgattttagtttcaaaaccctaagagtttcacttccaataacacacctaggaaagttgaagtaatcatctgtacacactgtggaagctccaatatcaagctctctaacgttgtgcctaatggccctacggatcaaactattcagccgcgaaaaactcaaac

SEQ ID NO: 4963 - DNA, 436 bp, Glycine max
  unsure (1)..(436): unsure at all n locations
agctntataatatagtgcaaaagtttttttctgccatttgtaatttttatttacaataatttttttcatgcaggattatcaaactataacatcaccacccgtctatattagtccacttgacttaggtcccaagtatgctgacaaattgggagcaggatttcaggagtatcgaaagatatacggtgaaaattattgtttagggcaactgattttttggcataatcagagtaacgcggagccagattgcaccctggctagaataagcaggggttgcttgtcattaccagacatcagttccttttatgccaaagctcagaagccttcacgacatcgtgtttatggtccaaggactgtcagatctatgctggcaaggatggatagttattctgtatttatgaagctctcattcctaactttcttttttgtggtggggggg

SEQ ID NO: 4964 - DNA, 297 bp, Glycine max
atggacatgatggggcctgagctagatgaacgccttggaagaacagaagtgtgcactctgttgtatgagcatgatatcttcagaattacctgagtcgacttgtgtctagagatatcagacacctttgagagtttcaaggagttgagtctaagactatgtatatacctagagtggggaatgaagagaatcatgagtgaccatggcactgtatgctgcacatctgaaggcatcactcatgagttctgtgcagccattacaccacatcggaatggcatagatgagaggatagacaggact

SEQ ID NO: 4965 - DNA, 330 bp, Glycine max
agcttctcgatatattatgcactctgaatcttatttccatttgaaaagttatgaccaattgaatttctggagagcttccgttgtgcaatttcgagcgtctcgatatattatgcacctgaatcagacttccgtttgaaaagttatgaccatttgaatttatggagagctttcgttgtgcaattccgagcgtcttgatatattatgcgcctgaattggacttccgtgtgatatgttatgaccatttgaatttctcgacagcttccattgctaatttcgagcgtctcgatatattatgcgcctgaatcggactttcgtgtcataagttatgac

SEQ ID NO: 4966 - DNA, 446 bp, Glycine max
tcaagaaaaagatggcctcagcaaattccttatttttcagaaggaattctatcaatagacctccaatctttaatggagagggttaccactactggaaaacccgaatgcaaatttttatcgaggcaatagatctaaatatctgggaagccattgaaatagggccttatatacccaccacagtagaaagagtttcaatagatggtagttcatcaagtgaaagcataaccatagaaaaacctatagatagatggtctgaagaggatagaaaacgagtacaatacaacctaaaagccaaaaacataataacatctgccctaagaatggatgaatatttcagagtttcaaattgcaagagtgctaatgaaatgtgggacactcttcgattaacacatgaaggaactacagatgttaaaagatctatgataaatgcactaactcatgagtat

SEQ ID NO: 4967 - DNA, 418 bp, Glycine max
  unsure (1)..(418): unsure at all n locations
tatcattngactcaacttgcatacccacttctaaaacaatctagatacgggagcatagtattaaatccatccaatgcagctataaacggttttcccattttatctgcttattcagcctctaaaggtatgcatttctagctagtttttttttcatatcccagtatcccaacattgtaagtaaatataacctttgaatttgaatgacactactaaaaaaccctttttttacgtttctagggaactgtcttanaatgtgactcagtggcatttgtgtaattaatgcaaatataactacgatgatctctcacacccgtctttgtaggtaggacgcaatgaaactttttaaattgaagacttcattaaagatgggatatagaagcaaatcgtcattgtaattaagaaaataattaaaaataag

SEQ ID NO: 4968 - DNA, 404 bp, Glycine max
agcttccatcaagggagtgatgtctaagatgtgacctatgccttccttcgtaatagtcacgaagttcttcacttaggttcttgcaagagttatgactactattggaggcatgtttttctcttttcatttctttcattatttttcttctttcttcctctcttattttctttctttcatcttgacttatttcttctacttttgtttttcatttttcttttctctcttgtttttcttttcataacctgagggaactcaactcatctaagattctagataaagggtctttatgactagtaccctcgccattaacactagatgaatgatgactcatgttggctcctaagttgttgttctttcttgttggaggtttgaaaacataaggaaaaagaaactatggttgaaac

SEQ ID NO: 4969 - DNA, 343 bp, Glycine max
  unsure (1)..(343): unsure at all n locations
nttaactcggaggtccgattcaagcgcattatatatcgagacgctcgaaattaaccaacggaagctctcgagaaattcaaatggtcataacttttaactcggaggtccgattcaggcgcataatatatcgagacgctcgaaattgaacaacggaagctctcgagaaattcaaatggtcataacttttcacacggaggtctgattcaggcgcataatatatcgagaccctcaaaattgaacaacggaagctctcgagaaataccaatggtcataacttttcactgggatgtccgattcatgcgcataatacattgagacgctccanatgaacaacggaagctct

SEQ ID NO: 4970 - DNA, 448 bp, Glycine max
cttttattgtaatcttgaaattcaggacagcactctaatttctgaaatttttgggataaaaatggtcattgaccagtcccttttccatgacttaaccaaattacccagtgacggtgtaccatttgaaggttcactgaatgacgactggaaatttgatttctctgcccatgatgcccgccagttggtttgcaccaacaatgcggatatgaccggacgtcttcttgccgggtcattggcttttgaaagccgcatccttcactatttaattgtgcgtattttgcttccacggtcttccaaccttgccctggtttctgaggaagatctaattatcatgtgggcctttcatacagggcgtcaacttgactgggcacacttagtcaaatatcgcatgcataaggcattgcgattaaatgctccactaccatatccacagcttgtcactctcttt

SEQ ID NO: 4971 - DNA, 437 bp, Glycine max
  unsure (1)..(437): unsure at all n locations
agcttgttgtcaacaaacaaatcanaatcaattttctgatcatcaaaacctagctccaacttcctcttccccatatcaactatgcagcttgcagtcaacatgaatggccttcccaatattacagggatgtcagtatcttcagagatatccattaccacaaagtctgtcaggaagataaaatgtttttctctgaccaacacatcttcaattactccatatggcctggtaatggaacagtcagctaattgtaaagtcattcgagtgggcattatttccaactcccccaatcttctgcacatggagagtggcatcaaattgacactggctcccaggtcaataagagcttttcccacattgacttctccaattgaataaggaatagttacactcccaggatctttatgcttgggtggaaggatcttttggatcatagcact

SEQ ID NO: 4972 - DNA, 434 bp, Glycine max
  unsure (1)..(434): unsure at all n locations
gggatttcctttagtagggaatctatccttcctaagatggagccattcttaatcaccctcattaagaactagcttgtttcttcctctattgcttttagttgaatacacctttgtttggttctctatttggntcttaaccctctcatgcaacttctttacaaactctgacctagattccccttctttatgtataaaagaagtgtctagcgggaggggaataaggtctaacagtgttaggcgattgaacccatatacaacctcaaaaggggactgcttggtggttctatcaacccccctattgtatgaaaattctacatgaggaagatactcatcccatgacttatggttgcctttcagaagagcccttagaagggtggataaagacctattcactacctatgtttgcccatcagtttgtggatgacaagtggtag

SEQ ID NO: 4973 - DNA, 299 bp, Glycine max
tatctcagatggagtgatctgattcgtcctgagcagaacatccaagatgggaaaggtcaagagactgaagcttctgctttcagaaatgcagatatttgtgacaataaacttgtcgaggggaaaagttgttatggaataacttttgggagccaaaaacatcttccttctcgggtgatgaaaaatgttgttcaagtggagcacgatccacacggaaaggaaaagtattgaggttttgaaacacgcattccattatattagataaaagagtatgaagaacgtcatggaaatatgccatgtaa

SEQ ID NO: 4974 - DNA, 409 bp, Glycine max
  unsure (1)..(409): unsure at all n locations
tcattggagcttgtaggcctaagatcttcttcatcaatggattccttcntttcttggaagataaatggcagcggaatggagaatgaagagagagaggagacgccacttcaaggagaagatgagtctagaagaagctcaccaccatacgaggccatggataagagcttggaggaagaaggagatgaatgaagggagagggagagaagagcacgaaattttgtgctcaaaaggagctctgaaatctgaagttaatattcaaatgatcaaagttgaaaaaaatgcacacacatgacctctatttatagcctaactgtcacacaaaattggagggaaattcacatttcacttgaatttgatattgaatttgtggagccagactttggagccaaaatttcacgtaatatgacta

SEQ ID NO: 4975 - DNA, 450 bp, Glycine max
  unsure (1)..(450): unsure at all n locations
gacactatgatactcagcttaancattcaatttgagcgtctcgtaatattacgggactctttcatacatccgagtaaaaatttattgtcgtttggattggctcagagattcaacattcaatttcgagcgtctccatatattacgggactcattcagacatccgagtaaaaagttattgtagtttgaattagcttagagcttcaacaatcaatttcgagcgtctcgttatatcacgagactcaatcagacatccgagtaaaaagttattgttgtttgaattagctcagagcttcaacattcaattttgagcgtctcgatgtatgacgagactcaatcagacatccgagtaaaaagttattgtcctttgaattggctcacagcttcaacattcaattttgagcgtctcgatatatgacgggactcaatcagacatccgagtataaagttatt

SEQ ID NO: 4976 - DNA, 428 bp, Glycine max
  unsure (1)..(428): unsure at all n locations
agctntgagccaattcaaacgacaataactttttcatggatgtctgattgagtcctgtcatatatcgagacgctcgaaattgaatgttgaatctctgagccaatccaaacgacaataactttttactcggatgtctgattgtgtctcgtaatataacgagactctcaaaattgaatgttgaagctctgagctaattcaaacgacaataacttttaactcggatgtctgattgagtcctgtcatacatcgagacgctcgaaattgaatgttgaagctctgagccaattcaaacgacaataactttntacttggatgtctgattgactctcgtcacatatcgagacgctcgaaattgaatgttgaagctctgagccaattcaaacgacaataactttttactcggatgtctgattgagtcctgtcatata

SEQ ID NO: 4977 - DNA, 447 bp, Glycine max
tatcaattctcaagaagcataagaaggctataggctggactctggcggacattcctggtattagcccatccacatgtatgcatcggataaatttagaggatggggctaaaccagtaagacagccatagagaagactcaacccggtgattcttgatgttgtgaagaaggaggtaaccaaacttttgcaagctggaatcatctatcctatctccgacaaccaatgggtgagtcccgtccaggtagtcccgaagaaaaccggcctcaccgtgataaaaaaatgagaaggaggagttgattcctactcgggtgcagaacagttggagagtctgcatcgactataggaggctgaaccaggttaccaaaaaggaccattttcccctgccattcattgaccagatgcttgaacgcctggcaggtaaatctcactactgttaccttgatggtttt

SEQ ID NO: 4978 - DNA, 440 bp, Glycine max
  unsure (1)..(440): unsure at all n locations
tgaaggtgtgtagcccaccatctggtaatgtgtctactattattgtcatcatttttttttcgtcattgaggtgccacttgagctgccaggtctctccacctttgggcgtattctttgaaagatctgtgcccctttttgcacatgttctgttgttgcatcctatccggaaccatatcaaaattgtactgatactgcctaatgaaggcaaacattaggtccttccaagagtggactcgagaaggttccaggttggtgtaccaggtaacagctaccccagtaagattttcttggaaggaatgtatcagcaattcctcattttttgcgtatgcccccatcttccgataatacatctttagatggttcttggngcaagtagtccccttgtacttgtcaaagtcagctccttgacttgggaggggatgatattgggtctaggacaa

SEQ ID NO: 4979 - DNA, 449 bp, Glycine max
  unsure (1)..(449): unsure at all n locations
ngaaatngaacaacggaagctctcgagatattcaaatggttataacttgtgacactttagtcctattcaggcgcataatataccgagacgctcaaaattgaaaacggaagctctcgagaaattcaaatggtcataacttatcacacggaaggccgactccggcggatagtatatcgagaaggtcggaattgaaaaccgaaagctctcgagaaattcaaatggtcataacttaccaaacgaaagtccgattcaggcgcataatatatcgagaagcttgaaattgatcaacggaagcactcgagaaattcaaatggtcataacttatcacacggaagtccgattcaggcgcataatatatcgagacgctcgaaattgaacaacgaatgctctcgagaaaataaagtggtcataatttgtcacacggaaagtcgattcatgcgcatactata

SEQ ID NO: 4980 - DNA, 404 bp, Glycine max
tcacagtctgagtcatgaataaggggtcatttaatttttttattggataagttattaaggttttttttttactcaaatgcataggagtagtaagttaattaagttgataatcacgaaaagagacataccgacagtggcagctctataagtgttcgttccatctatgaagtttttgttaccagatattcgtgtctttttccccccttcaccaataaacaccacatgggtcatttattttgtaacttcaacatactcttggaaaacgccttccttgatgtagatcacaaatggctttctgtgtttctacggcacttgcttcaatgcctcattgatgcttttgaaatctccactaccatctatggctcagtaacattacgcttgcggtttaatggacttgcattttc

SEQ ID NO: 4981 - DNA, 360 bp, Glycine max
agcttttaatggaagtcaggagaatgaaagtgcgctgcaaccattagctggaaacgaagttcatgattgggtgatgacctaaaagaagacaccatctgacacaaacatatggaagaaaagctcaatattctttgatcttccatactggtctgatctacatgtgcatctagatgttatgcatatcgagaaaaatgtgtgtgatagtttaattggtacccttcttaacattaaaggcaagacaaatgatggtttgaaatgtcatcaagacctggttgacatgagaatacaagagcagttgcatccgatatcacatgatcgttaaacgtatcttcccccagcatgccacacaatgtcagcaac

SEQ ID NO: 4982 - DNA, 413 bp, Glycine max
tccgttgttcaatttctagcctctcgacatcttatgcgctcgaatcggacatccctgtgaaaagatatgaccatttgaatttctcgagactttccgatgtttaatttcgagcgtatcgatatattataagccagaatcggacattcgtgtgaaaaggtacgaccatttgaatttctcaaaagcttctattggtgaatttccagcctctcaacatcttatgcgcacgaatcagacatccgtgtgaaaaggtatgaccatttgtatttctcgagagtctccgatgtttaatttccagcgtatcgaaatcttatgagcctgaatcggacctccgagtgaaaaggaatgaccattcgaatttctcaagagcttccgttgttcaattgcaagcctctcacatactatgcgcccgaatc

SEQ ID NO: 4983 - DNA, 412 bp, Glycine max
  unsure (1)..(412): unsure at all n locations
agcttataatatatcgataggctcgaaattttacatttaaactctcgcgaaattcaaatgggcataaattttcacacggatgtccgattcgggcgcataatatgtcaagagtctcgaaattgaacaacggaagctcttgagaaattcaaatggttataaaatttcacacggatgaccgattcaggcaaatcacatatcgagacgatcagaattgaacaacggaagctcttgagaaattcaaatggtcataacatttatctcgaatgtccaatttaggcgcatcacatatagtgatattcgaaattgaacaacagaagctctcgngaaattcaaatggtcataacttttcacactgaggtccgattcacggttataatatatcgatacgctcgaaattaaacatcggaaactc

SEQ ID NO: 4984 - DNA, 402 bp, Glycine max
  unsure (1)..(402): unsure at all n locations
tccatcaagagccatcaacaacatcacggtaaatatatacatcccattcctaggctagacgatatgttggatgaattgcatggagcctgtgttttctctaaaattgatttgaaaggtgggtaccatcaaattaggattagagagggggatgaatgaaaaacaactttcaaaactaagtatgggctgtatgaatcgcttgttatgccctttgtgctaaccaatgctcctaacactttcataagattaatgaaccatgtgttaagggaatttctaggaaaatttgttgtggttattttgatgatatcttgatttacagcaaattccatgatgaacatcttgtgcatctgagaagagttttagaggcctttangcgtgagagcttgtatgctaacatggataaat

SEQ ID NO: 4985 - DNA, 402 bp, Glycine max
  unsure (1)..(402): unsure at all n locations
tggatttcctcttagtagggaatctatccttcctaagatggagccaaacccagncccccctattaagaactagctcctttcttcctctattgcctttagttgcatacacctttgtttggttctttatttggttcccaaccctctcatgaaacttctttacaaactctgacctagattctccttctttatgtataaaagaagtgtcaagtaggagggtaattaggtctaatggtgttagaggattgaacccataaacaacctcaaaaggggattgcttggtggttctatggacccccctattgtaggcaaattctacatgaggaagatactcattccatgacttatnggtgcttttcagaagagcccttataagggtgtatagagactattcactacctttat

SEQ ID NO: 4986 - DNA, 349 bp, Glycine max
gtgcctgtatattgatgcacgctgaatcagagatccgagtgacgagtgatgaccattcgaatttgtcgagagctgtctatgtttaatgatcagcgtctcgatatattattcgcctgaatcgaagctaagggtgaaaagctatgaccattcgaatttctctagagcatccggtgttcattttctagcgactatatatgtgaggcacctgaatcagacctgcgtgtgaaaaggtatgaccattagaattactcgagagctgacgttgatgaatttgcagcgtctacacatgttatgctccgtaatctgacatccttgggaaaaggtatgagtattcgaatttatgcgagag

SEQ ID NO: 4987 - DNA, 423 bp, Glycine max
  unsure (1)..(423): unsure at all n locations
agcttgaaatgttatgaccatttgtttntctttagggctttcgatgtttaatttcgagcgtatgaatatattataagcctgaatcggacctcagtgtgaaaagttatgaccatttgaatttctcgagagcttccgttgttcaatttcgagcgtctctgtatgggatgctcccgaatcggacatccgagtgaaaagatttgaccatttgaatttctcgagagctttcgttgttcattttcgagcgcctctatatgtgatgcgcctgaatcggacctcagtgtgaaaagctattactgtttgaatttctcgagggctctcgatgtttaatttcgagcgtatcaatatattataagcctgaatcggacctcaacgtgaaaggttatgaccatttgaatttctcaagaacttccggtgttcaatttc

SEQ ID NO: 4988 - DNA, 354 bp, Glycine max
  unsure (1)..(354): unsure at all n locations
agcttcctcccttcatcaaaccatttatatatcaaaggaccacaaattctataaaaaaaaaatggagatttatacaccggactcatgctactaataacatcaatcataggttgataatatgtcgagttaattgcattaaatggcactatagcatctatcatccattttgcaatggctttgtcacacttttctacaattttcttattttgcaagacactcttcaagctaggttgagctttaggagttgttctaggcatgaaatagtcatctacatgaatagtgttctttcctttntgagacttggaagaaacaggtgaatttggagttcttcttaattcctcaactattctcaca

SEQ ID NO: 4989 - DNA, 323 bp, Glycine max
ctggatgcgatgggcaacttggaaacccagttggccttgtatcatacatctgaacctgtcgcaagggtttgtggattgtgctcctctgctgaccaccatacaaacctttgccctgccatgcgagaatctataacaattcgaccatccctgtagctgatgcaccaaatatatacaatatacctcctcaacctaagcagcaaaatcaaccacagcagagcaattatgaccttttcagcaacagatacaaccctgcatggaggaatcaccctaaccttaaatggtccaggcctcagcaacaacaacaacagcctgctccttccttc

SEQ ID NO: 4990 - DNA, 452 bp, Glycine max
gtataaataacaaataactcgtgattattcattattcctttggagatacaaatatgaccaagtttcagaggatagaatgacactggccgtttacctaaagttcaatatgtaacacactaaacgactcagttcaccagatatatacaagtttatagctttaggaactcaaacctacacaacactaaacacgatagctcattcaacttccaacatgctgtatatgattcacaagatggattccttatctcactgataaacatcttacggtcttcttccagagacattcctttcattgttatttataagattcaaatttaaaatgatatgttttaataacactcaatctataatgttccttatataaattatgtttacaccagagatatttctctctaaaaaaataaatataatgtattaataaactattagaagagtagaaagaagcactaatg

SEQ ID NO: 4991 - DNA, 386 bp, Glycine max
gtgcctgtatattgatgcgcctgaatcggacatccgagtgaaaagttatgaccatttgaatttctcgagagctctctatgtttaattttgagcgtctcgatatattatacgcctgaatcgaacctcagtgtgaaaagttatgaccatttgaatttctttagagcatccggtgttcattttcgagcgtctctatatgtgatgcaccttaatcggacctccgtgtgaaaagttatgaccatttgaatttctcgagagcttccgttgttcaatttggagcgtctcgacatattatgcgcccgaatcggacatccatgggaaaagctatgactatttgaatttctggagagcttccggtgttcaatttcgagcgtctgtacatgttatgc

SEQ ID NO: 4992 - DNA, 432 bp, Glycine max
  unsure (1)..(432): unsure at all n locations
agcttcttagttncagatgatgcatatgggtttgtagctacctcatgcacttctctaatgactatggcatcatttctggcgctaaactgctgggagttggaggccatcttctcaattaaatttctggctttagcaggagtcatgtctccaagggctccaccactggcagcatctatcatacttctctccatattactgagtccttcataaaaatattggagaagaagctgttctgaaatctgatggtgggggcaactggcacatagtttcttaaatctctcccagtactcatacaggctctctccactgaattgtctaatacctgagatatccttcctgatggatgtggtcctggaagcagggaaaaaatnttctaagaatactctcttaaggtcatcccagctcgtgatggaccttggagcaaggtaatac

SEQ ID NO: 4993 - DNA, 302 bp, Glycine max
  unsure (1)..(302): unsure at all n locations
agcttagagaaatcgattatgtcgaccctgatatagttttgttcctctacattcaatcctacaagagtttcctcctacgcacgcacaagaactctgtcgttgtcgctgatgtatggccttccatcttcaccttcgacgactacttgctgctctctcgttgcttcaggtgaattcttttttcgagctggtgttcattgctattttttttgttcgttatgattcttttttgatttctatattaaattgttggcgagttcattttgagtgattttgntgacttgatacaaaagatattagttcta

SEQ ID NO: 4994 - DNA, 369 bp, Glycine max
  unsure (1)..(369): unsure at all n locations
tccttaagaagattccttaagaagctagaagctanctacatatactcttttaatagctaagctcacctccttgagatgagaagctagagcttagctacacaccccctataatagctaagctcacacccatgacaaatacatggaaataactaataaaaggccttattacaaagacaactcaaaatgccccgaaatacaaggctaaaaccctatactacttgaatggccaaaatacaaggcctggacgaaggaataacctattctaatatttacagagattagcgggctcatacttagcccatgggctcaaaatctaccctaaggctcatgagaaccctagggcgctttgttggatctctagcccaatct

SEQ ID NO: 4995 - DNA, 288 bp, Glycine max
gcattggatcaaagacctcaacaagattatgctagagatgcaggacaaggccctaaggctctcatgatccgtagggtacattatgagtccatggactaagtacgagtccacttatccttggacaactgagaataagatttcataactgttggacctcgcatttacggctccatagtataaagagggcaccctagtaatgcaggtattttagcccttatatttgagaacacagagactaatttttgtattacgggtagctttgtaatttcacatacattaagtgcacta

SEQ ID NO: 4996 - DNA, 361 bp, Glycine max
  unsure (1)..(361): unsure at all n locations
agcttaattaacttgtgttctgaacatntgttatcatttaattttaaatacaataccatgtaaaatattcctaattgtgccattggggctcctccacatagacttcagtccaaattctctcactcgggtctcatctgaaaatttggaagggttaagataatatcagttctgcacaaaaatgataaatcatgattatgcactagttgccacttgcagtgcactatgtaatatgaacaaaccagtacactaaatctagcataacttctgactatggaacaaagtagtctattaattcatgagtcatgatacagaattaacacatttatagagaagaaagattgagtgagaagatattcgtatt

SEQ ID NO: 4997 - DNA, 420 bp, Glycine max
  unsure (1)..(420): unsure at all n locations
ctaagcttgccatttggctccacagatggactgtgtaagactcttcttgtctctcattatagctgatcaagttgcccacgtgtatgttaagttctttggatggtggactaagatcattntgcattttgttctttctactgctttgaagactccagttttgttccaccactgatttatgctgacatgggtagctctcgtgatattgctataggaccagaggcagtggtttctctcttgttggggacgttacttattaatgagatcgatgcctatacacatccagcaaaatatcagcgacttgctttttcagccacttttattgttgggattacttaaacaacgcttggtgttcttaggtatgatactactactactatatctatatgtatatatatctttatatatgatatagatatttat

SEQ ID NO: 4998 - DNA, 420 bp, Glycine max
ctgcagctaggaagcatctggagaggcttattttattttgagatccaccctggagcgactaatatgtactaagaccttaggttgatgttttggtggccgggtgtgaacaaagaagttattgagcttgtccttgcatgcctagtgtgtcagatagctatgatagatcaccagatgccttcagggaagttgcaacctttatagatacccgagtggaagtgggatagtatctacttggatttcgtggtggggttacctaggaccctcaaaggtttagattccatttgggttattgtatacatgtcgaccaaatctgcttcctttatccctatttacatcagatattctttatagaggttgatgatcttgttcgtctgtgagattgttagaccactcagcgttccttctaccataatctttgat

SEQ ID NO: 4999 - DNA, 364 bp, Glycine max
ttaagcacgcgctgcacttctttgtactgcttggattttttatctggcactctacactttgtcatataaatagtcgatgcatatctaacatgagtaacttatgttttattccaaagctatcttcaaatcactttgaaaaatgtgtgtcttgcagtcaatctacaaaaactaagaaatcacatcaatcagtagctaaagaacttgagccattggatttaatacattctaatatatgagaatttgatggaatgttgaccaaaaatggaaaacgatattttatcactattattgatgactgctctgattatacatatgtatatcttatgaaatataaaagtgaagcgcttgacatgtttaagttatt

SEQ ID NO: 5000 - DNA, 371 bp, Glycine max
agcttctcattctctctcataaggtatttattgttttttctttatataatacattaacattaaaattatcaattaaaaacaacattatataatctgttttagtagttgatggattactctatggcttaatataattctttaacattgcttttttttttttttgtggtgtgtctgcacactatgcttgggttgtctttgtactcaagtggtctgcaatagccacactcttgcccaagagaacggacaatgatatcaagaactaccggaacacgcatattaagaaaaggctaactaaaatgggaatcgaccctgtgacacacatgcctaaaaacgatgcacttttctctagtgacggtcattcctaaaccgct

SEQ ID NO: 5001 - DNA, 310 bp, Glycine max
  unsure (1)..(310): unsure at all n locations
aaccccatggatcaatgcatataccacaaggtcagtgggagtaaaaaaagttttccttgtttatatgtagatgatantttacttgcagccaatgatccgggttcgctacatgaggtgaaacaatttctctcttagaattttgacatgaaggatatgggtgatgcatcttatgtcatcagcattaagattcatagaatagatctcgaggtatttgggtctatcacaagacactatattatccaaattttagagagaattcggatgaaagattgttcaccaagngttnctcccattgtgaagggtgataggt

SEQ ID NO: 5002 - DNA, 407 bp, Glycine max
  unsure (1)..(407): unsure at all n locations
ancttaagcagtgatcaaactcgctctttgtttctggttttgcgaacatatcagtaggattatgcagagtgctaatcttatgaactttggttcttctttctgaccgaatgaagtgatatctaacatctatatgcttggctctatcatgatgaacctgatccttggccaagcatatagcactaaggctatcacaatagatgtcagcatattcttgattaattccgagatcatatatcaaacctcttagccaaattcctttctttgcagcttcagaaagagccatatattcagcctcagtatttaagagggcaacagaacgttgaagtgttgccttccaactcaccaagcagccaccaagggtgtaagcatatcctgtnatggaccttctcttgacaagataagctgca

SEQ ID NO: 5003 - DNA, 414 bp, Glycine max
  unsure (1)..(414): unsure at all n locations
agcttagcaaatggacctgngaggngttcattttcatcatatcttccgtaatactcatcacctctatcatatctaataattatcacatttatgtctaattgcccatttatttcattgtagtaaatttctaaggcatccattgcctaagaaatcttgggcagtaagtagacataacccgaacatgaataatcatcaataatggtgataaagtatctttcctttctgaaagaactaacatctaatggtccacaaatatcagtatgcacaacttcaagaagctgagtgcttcttgtagcttctttctttgaatgtttagcttggtttcccttaatacatcccacacaaatatttagattcatataatctagataacgaagagattcattctttattaatctttccatcctttctcta

SEQ ID NO: 5004 - DNA, 385 bp, Glycine max
atatattagagggactcatggtcactatgaatgacaaattccttaagataaaggtagagttgccatgttttcaaagcgcgtactaaggcatacaactccttatcatacgttgaatagttatgggtaagaccacttaacttttcactacaataggcaattggatggccttattgcatcaacacagccccaatcccaacatttgaagcatgacactcaatttcaaaagattttttacagtttggcaacgcatacatggggcattagttagctattgctgaagaacattgaaagcttcttcttgtttctctccccatttgaaaccaacatttttcttgagcacttcattgagaggcgctgccaatgtgctaaaatccttcacaaatcg

SEQ ID NO: 5005 - DNA, 419 bp, Glycine max
  unsure (1)..(419): unsure at all n locations
actaagcttacatattatatatataatgatatgatggaaaaattatttataatgaatacttagtacacaatattttntttcttaaaaaaacataattacaatattatatgttcaaatattctatatttgtctcttataattatcccatactccaatataataatatttaacaagcttacatgttaaaattaactcatttaaataagtgaatcaaacttcagatacaatatatttttntaatccatgcttgagacttaagtgctcgaatcaactcaaatcgtttacacaagggttctctaatacacacacaaatgcatataacttctaattataagaaaatttcaagtacagtataaaatatttatgaattagtatattaantacttaataattcaaagattggattgctaaatatcatg

SEQ ID NO: 5006 - DNA, 430 bp, Glycine max
  unsure (1)..(430): unsure at all n locations
agcaattcaacgacnaagcttttacttgatgtttatgaggcccgcaaatatggagacgctcgaaattgaatggtgaagctttgagcaaaatcaaacgacaacaactttttactcggatgtctgattgagtcccgtaatatatcgagacgctcgaaattgaatgctgaacctctgagccaattcaaacgacaatcactttttactcggatgtctgattgagtcccgcaatatattgagacgctataaattgaatgttgaagctttgagcaaattcaaacaacaatcactttttactcagatgtctgattgtcgcccgtaatatatcgagacgctcgaaattgaatgttgaagctctgagccaattcacacgacaataacgtattactcggatgattgactgagtgccgtatataacaagacgctaaaattg

SEQ ID NO: 5007 - DNA, 660 bp, Glycine max
  unsure (1)..(660): unsure at all n locations
cttatagaggccttttggatctcatgcctcacacaattttaaaagcatgttcatgaaaacctgtaaatacagttccactatcaaatatcatataaactaactaatacaaatgataagaaatgcctaatggtgccttgcctcaataaaatttgcatcaggtaacatggcacggcaagtgtctcggtctcttctgtaaggagatatcagactagcaacacatattaagccagcatcagcaaacagttttgccacttctcctagattaaataatttttttatcagtaaaaccaagttgatatgcatcagattttttaatacactacagctatatacaataactttgaaggattaatagattatttttcatcatggaactaatccaaatacactaatattgattagaagtttttttcatgtaataagttggccaagagtagattgcaatattgtgtagactgcaaaccaaccattttgagaaaggtgaagtgtgtcccacaagaaagaaagattcgggttctcacataaactgtatttctttgatccttcgtcatccacacttncacatgaatcttccacttgtttccctcacagcatggttgcaacggattcatcagtgtagacttttctgcataatgtagaaagaaaaaaaactgtcatcat

SEQ ID NO: 5008 - DNA, 500 bp, Glycine max
  unsure (1)..(500): unsure at all n locations
agcttttaaaattaaggatcttggtgatttgaaaattttccttggtttctaagttgcaagaagtaaagttggtattaacatttctcaatgcaaatatgcacgtaagctattatataatgctggtttattgggttcttgccctgttagtactccaatagattacaacactagaattcatcacaattcaagattacatttgcctgatccttcatcatatagatgcctaattggtagattgatctatttgaccaatactcagtctgatattacatatgttgtacaacatgttagtcaatttatttatactcccactactgcacatcagcaggtagtagcttgtatccttcgttacattaagggtgctcctagtttcgatctcttctaaccagcaaataatactgctaaactcaaagcctttagcgactttgattgggctagctacataaagactagacattccatcattggattntctatttatcttgggtcttgtcttattt

SEQ ID NO: 5009 - DNA, 456 bp, Glycine max
agcttcatggggcaacattgaattattccccgtatgacaaagttgtgtatgctttggtaagagctttatagacatggcaacactatttatggccaagggaattcataattcattttgaccatcaaagtttgaagtttctaaaatctcaaggtaagcttcaaaagagacatgccaagtggttggaattaattaagatgtttccttgtgtgatcaagtacaagaatggtaaggaaaacatagtggttgatgctttgtccagaaggtatgttttgcttacttctttgcaaactaaattgcttggttttgagtttgtgaaggacttgtatgctactgattctaactttggcaaagtatgagattcttgttctaaacatgcttttggaaattatatagacatgatggtttattgtttaaaaaaataaattgtgtgtgcctatgtggtccttgtgtgaaatg

SEQ ID NO: 5010 - DNA, 640 bp, Glycine max
  unsure (1)..(640): unsure at all n locations
tccttcaattggacaacagtggtgtgcctcttaatatcaccacctaagtagtgtttggttctactgccacgctgtccatgtccttttggtggttgggtcctccaatatcaccactccaagtggcataacttcattgatgaagaatggtctagaccacttggatttcagcttacctagaaacaatctcaatctagaattaaataacaaaacctgttgaccaggctgaaaattcctttctgaaagctttttatcatggtaaattttaactctttgcttataaatcttggaattctcataagcttgaaacctcagttcctcccattcatgaagttggagcttcttattttcactagttgcatttgagtcaaaattcagaaacttcaatgcccaataagttttgtgctccaactcaacaagtaggtgacaagatttgccatagaccaattggaagggagtgcatcctgcatgagccttgtatgttgttctgtatcccccacanagcttcttctagtacttgngaccaatctttccttgattgagcaattgttttctctaagatcttcttggcttccctgttagaactntagctngtccattggtctgggggtggtaaggagaagctaccttgtgtctaacacta

SEQ ID NO: 5011 - DNA, 295 bp, Glycine max
cttctagctcactccaaatagcacctccaaggtgctgttgctacaacacatggacttggtcgggcctatgcacgtaccaaaccttgaaagaaacaagcaggccacaaatgctggggcagatttttaccgatgcaccttgatgtatttttctctagaaacttcattacgatgcttgcttctcaagctttatttctaagactttaacacactacagacattgtcttaaagataacaacggacagatcatggagaggagtttggagcagcaggatacctgaattcgagacaattgaac

SEQ ID NO: 5012 - DNA, 608 bp, Glycine max
  unsure (1)..(608): unsure at all n locations
tctcgatatattgagcacctgaatcggacttccgtttgaatagttatgaccttttgaatttctcgagagcttccgttgtttaatttcaagcttcttaatatattatgtgcctgaatcggacttctgtgtgataagttatgaccatttgaatttctcgagagcattcggtgttcattttcaagcttctcgatatattgtgcacctgaatcggacttccgtttgaagagttatgaccttttgaatttctcgagagcttccgttgtttaatttcaagcttctcgatatattttgcaccttaatcggacttccgtgtgacaagttatgaccattttaatttctcgagagctttcgttgttcaatttcgagcttctcgatatattatgcacctgaatcggacttccgtgtgaaaaggtctgaccatttgaatttctcgagagctttcgctggtcaatttcgagggtctcgatatattatgcgcttgaatcggacttccgtttgaaaagttatgaccatttgaatntctcgagagctttcgttggtcaatttcgagggtctcgatatattatgcgcctgaatcggacttccgtgtgataagttatgacccattg

SEQ ID NO: 5013 - DNA, 335 bp, Glycine max
agcttgaaattgaaaaacggaagctctcggaaaattcaaatggtcataacttatcacacggaagtccaattcaggcgcataatatatcgagacgctcgaattgaacaccgaatgctctcgagaaattcagattgtcataacatgtcacagggaagtccaattcacgaacctaatatatctagactcttgaaattggacaacggaagctgttgagaaattcaaattgtcataacatgtcacacggttatccaattcaggcgcgtaatatatcgagactctcgaaattgcacaacggaagctctctagaaatttaaatgagcattacatttcacacg

SEQ ID NO: 5014 - DNA, 501 bp, Glycine max
tgaaattgaacaacggaagctcttgagaaactcaaatggtcataacttgtcacacggaagtccgattcaggcgcataatatattgagatgctcgaaattgaacaacaaatgctctcgagaaattcaaatggtcataacttgtcacacggaagtccgattcaggtgcataacatatcgagacgctcgaaattgaacaaccaaagctctcgagaaattcaaatggtcataacttatcacacggacgtccgattcaggcgcataatatatcgagacgctcgaaattgaacagcgtatggtgtcgagaaattcaaatggtcataacttgtcacacggaagtccgattcaggcgcataatatatcgagaagctcgaaattgaacaacagaagctcttgagaaactcaaatggtcataacttgtcacacggaagtccgattcaggcgcataatatatcgagacgctcgaaattgaacaacgaaagctctcgagaaatcaaatggtca

SEQ ID NO: 5015 - DNA, 327 bp, Glycine max
agcttgaaattgaacaacggaagctctctatatattcaaatggtcataacttatcacatggaagtccgattaaggcgcataatataccgagacgctcgaaattgcacaacggaagccctcaagaaattccaatggtcataactatcacacggaagtcccaataaggcgcataatatatcgagaatctcgaaattgaacaactgaagctcttgagaaatttaaatggtcataacttatcacacaaaagtccgattctggcgcataatataactagacactctaaattgaacaacggaggctctctagaaatataaatggttattattt

SEQ ID NO: 5016 - DNA, 500 bp, Glycine max
agcttgttcaagatatgctccgcaacttttgtctagccacggggctagaggtcaatgtttagaaatctaaattctctgtctctaaaaatttgaggaggtagaaagttgataaattcaccaccattctagatttcctacacactcaacatctggggaaatatttgggattccctttattagttgggcagaacaaagaatacttaattttctttcattttggacaaaattgataaaagaattgttgggtgaaagagcaaagttcttaacagagctgggaggatcactcttgcaaactcagtcatgtttgcaatccctacctatcctatgcaaaatttgtagattccttaaggtatttgtaatacaatcgatgctataagaagctttatatggtggactggtcgactattacaaaaccgcgccacatagggggttttgacataagcgagagtacgccattccacattgtcttactatgaaaacatgtttgggctctcatgaac

SEQ ID NO: 5017 - DNA, 522 bp, Glycine max
  unsure (1)..(522): unsure at all n locations
agcttcaagaaaaaagatggcctcagcaaatttcttatttccagaagggaattctataaatagacctccaatcttcaatggagagggttaccactactggaaaacccgaatgcaaatttttattgaggcaatagatctaaatatctgggaagccatagaaatagggccttatatacccaccacagtagaaagagtttcaatagatggtagttcatcaagtgaaagcatagccatagaaaaacctatagatatatggtctgaagaagatagaaaacgagtacaatacaacttaaaagccaaaaacataataacatctgccctgagaatggatgaatatttcagggtatcaaattgtaagagtgctaaggaaatgtgggacactcttcgattaacacatgaaggaactacagatgttaaaagatctaggataaatgcactaactcatgagtatgaattatntataatgaatgcaaatgaaaatattcaaaacatacaaaagagatttacacatatagtaaatca

SEQ ID NO: 5018 - DNA, 639 bp, Glycine max
ttggagtttccaagtgccaattcgtcttcttctttagtccagtcttcttctggcttcaattcatcagtgggctttccttctgtgtccaacatcttgggatgttcccagcctttgatgacagctttccaggttctgctatccagtgatttgaggaaggccaccattcttgctttccagtattcatagttggttccatcaagaattggtggtctgttcactggtcctccttctttctccatgttcatcagaatttatctccctagatctcactctgtgatttcgagtgttggctctgataccaattgaaattctgataccaggggacagatgtcgtacaggatgtcacgacatcacgcttcagaacatgcagtttatatgtgtctgtatgaacagattaaacaagtaaataacacaagagaattgttaacccagttcggtgcaacctcacctacatctgggggctaccaagccagggaggaaatccactctcaatagtgttagttcaaggtctaacagcccctgtttacaaccttctcacctaaccactacccgtgcgatctctacctaagagccactcttagatatgagaacctctgctcactccctctcactcacactcccgtgtttacaattaagtca

SEQ ID NO: 5019 - DNA, 564 bp, Glycine max
tctgcttattagtgcacaactctttcaagaatttagcatatcttggaatttgctttattgcatccagcagaggtatgtttacctctacttttctaaatgtttccaatatctccttctcagtatcttccatttttttgttggaaattgctcttggagggaatgaaagagggatatgttgcttctctttagattcacctgcatagaaattgttaggtaacttactctttaaatttttgtcatcatctttttctggagtagagtgaagttgggcaggttcatttgcagatgaggaagatgttgctggttgaggttcttgacactgctttcctgacctcaatgaaatgacactcacatttttgggattctggacagattgagaaggcaatatgtcagaattctgggactgttgttgatttaactatgtagccaattgtcccatctgattagttaagctctgaatggaagctctggtatcttgttgaaactgcatgttttgcatagtcatttgcctcacaagttcttcaagggaaggttgcgaaagagcctcaactgtttgctatttct

SEQ ID NO: 5020 - DNA, 567 bp, Glycine max
tctacagaaggtttgttcctaatttctctacaattgccttacctctcaatgagctggtgaagaagaatgtggcatttacttggggtgaaagacaagagcaagccttttttttctcaaagaaaagctcatcaaggcacttgttctagctcttcctcacttttctaaaacttttgagctagaatttgatgcctctggagtgggagttggagctatattgttacaaggcgggcaccctattgcttattttagtgaaaaacttcatggtgcccccctcagctaccccacctatgataaagaactttatggcctaattagaacccttccaaacttgggaacattacctggtttccaaggaatttgtcattcatagtgatcatgaatcacttaagtacattagatgacatagcaagttaaacaaaaggcatgcaaaatgggtagagtacctagatcaatttccatatgttataaaatacaaaaaaggaaaaacaaatgtggtagctgatgccctctctaggaggcacacattgtttttctccttgggaactcaaattttaggatttgataaca

SEQ ID NO: 5021 - DNA, 523 bp, Glycine max
  unsure (1)..(523): unsure at all n locations
agcttctccacttgtaacttgggcctaaattcaaatagcatggttaacacttgttgaagagcttccttggccttctttgatctagcccttggcataggtcctccaagtccttctaaaggttccttgcccttagtccttgcatgtcctcatcacatgtggaaaaaaatgtgtgtgatagtgtaatcagcatgcttcttaacattaaaggtaagacaaaggatgatttgaatactcgtcaagatctagctgagatgggtatacgtgaccaattacatccaatgttttaattaaataaagagtcttgttaaccagtgcctttaacgtattggttaaggaattaaaaaagaaatgtatttattatgtaaattataggagagtgtaaaaaaagatcatgggcaacacaatttttcacctctcaataaaaacattcctattttatgttttttaaccattacccttangacactagttagcatttaacttaaataacaatgaaaacattaatttcattatgtgtgagact

SEQ ID NO: 5022 - DNA, 459 bp, Glycine max
agcttatgctgctaacatctacagtagacctcctttttctgagcagcaaaatcacccacaacagaacaattatgacctctccagcaacaggtataatcccgggtggaggaatcatcccaaccttagatggtcgaatccttcacaatatcagcaacaacaacaacaaccttattttcagaatgctgctggcccaagcggaccatacgttactacaccaatccagcaacaacaacagctacaacatctgcagctgcagccaccccagaaacaacaaatagttgaggctcctccgcaaccttgccctgaagaacttatgacgcaaatgactatgcaaaacatgcagttttaacgagagaccagcaccttcatttatagcttaactaatcatatgggacaattggctacacagttaaatcaacagcagtccgagaattctgactgattactttctcaatctgt

SEQ ID NO: 5023 - DNA, 538 bp, Glycine max
  unsure (1)..(538): unsure at all n locations
tccttaagaaaattcctaaagaagctagagcttagcaacacacacatctctaatagctaagctcacctccttgagatgagaagctagagcttagctacacaccccctataatagctaagctcacccccatgacaaaaaaaagatgaaaatacaaaaaaaaaagtccttactacaaagactactcaaaatgccccgaaatacaaggctaaaaccctatactactagaatggccaaaatacaaggcccaaacgaaggaaaaacctattctaatatttacaaagataagcgggctcatacttagcccatgggctcaaaatataccctaaggctcatgagaaccctagggccttcccttggatctctagcccaatctacttggagtcttctacccaatgcccttgcgggataagatttcatcattccctccaccttggaaaggatttgacctcaaatcccaaggttcttcatactctgggctccttccctcaacacctgtaaaaagaaaaaaaacatatgtattantggtgtttggtatgtt

SEQ ID NO: 5024 - DNA, 397 bp, Glycine max
agcttctcggtatattatgcacctgaatcatacctccgggtgacaagttatgaccatttgaatttctcgagagcttccgttgttcaatttcgagcgtctcgatatcttatgcgcttgaatcggacctccgagtgagaagttatgaccatttgaattgctcaagagcttccactgttcaatttctagcgtctcgatatattatacgcgtgaatcggacctccgagtgaaaagttgtgaccatttgaatttctctagagcttcggttgttcaaattcaagcgtttcgatatttgatgtgcgtgaatcagacctccgagtgagaagttatgacgatttgaatatctcgggagcttccgttgttcaattgcgagcgtcactatatgtcatgcgccggattc

SEQ ID NO: 5025 - DNA, 544 bp, Glycine max
tactttgaaatttgtgattcaatatgatgtatgctagtttatatatagagaagtagttatttatattaataatttatgtaaatagtattgtagagtgttatagtatgattccaaaaattattaagtgttggagtttgagaatattatggttaaatttgatgaacatgtgtatgttgtaccttacgaatatcattaggaatgttatgagatggttgatgtgatgttatgagatgttaaagtgtggacatgatatttgattgtgaataagtggatgtgtttaacacttgatgttacattaattatattttgagctatgaattatacaataactcgaccagtgtttatgcgcagtgttaaagagaaagtgtaggttcctagttaggaaccagtgttaaattgtagcgcaatgtgttaaacatgtttgaaacataagtgtgaggtcgtggtattgtgtaattcatgagttgtgtttataaatggaatatgtgatgaattgtggaataacatgttgctttgagattttaatattggtattgagattgag

SEQ ID NO: 5026 - DNA, 507 bp, Glycine max
ttaaaatttgaattaaaacgttcacaaactgttggtaatcgattaccatatatgtgtaattgattacacagggcaaattttgaattcaaattttaatagctgttgtaaatccgttttggccactggtaatcgattacatcctctggtaatcgattaccagagagtaaatttgttgaagaagactttttaacttgtaatccttggccaaaccttttgctacttcaattggaattcccttcctatttaatataccctttctaagactctatagactgtcttgatcatccatcttgaatatctttaatttctttgtcttgagtaaatctttgagaagcatatgattcatgtaatcctttggcatcatcaaaacattcagcttaatcctttgtctacacccacgttctactatgaaaagctgattggctacatgccagctaactttgcggatctcgtcttcgccggagaaaggattgaatcccgactacaaaaaggcaagttcgaatatgc

SEQ ID NO: 5027 - DNA, 497 bp, Glycine max
tcttagtttcagatgatgcagatgggtttgtagctacctcatgcactcctctaatgactatggcatcatttctggcgctaaactgctgggagttggaggccatcttctcaattaaatttctggcttcagcaggagtcatgtctccaagggctccaccactggcagcatctatcatacttctctccatattactgagtccttcataaaaatgttggagaagaagctgttctgaaatctgatggtgagggcaactggcacatagtttcttaaatcgctcccagtactcatacaggctctctccactgagttgtctaatacctgagatatctttcctgatggctgtggtcctggaagcagggaaaaaattttctaagaatactctcttaaggtcatcccagctcgtgatggaccttggagcaaggtaatacaaccagtcctttgccactccctctaatgaatgaggaaaagccttcagaaatatgtgatcctcttggaca

SEQ ID NO: 5028 - DNA, 502 bp, Glycine max
agcttgtgtcacactttcaattgtctaatctgaatacatagctgcaagaagttgttgtgctcaaagtctttggatgaagcaacaatgatgtaagctccattggagcttgtaagcctaggatcttcttcatcaatggattcctttgcttcttggaagatgaatggcagcggaatggagaaaggaagagagagaggagacgccacttcaaggagaagatgagtctaaaagaagctcaccaccatatgaggccatggataagagcttggatgaagaatgagatgaatgaagggagagggagagaagagcacgaaattttgtgctctacatgagctctgagatctgaagtttaatattcaaatgatcaaagttgaaaaaaatgcacacacatgacctctatttatagcctaagcgtcacacaaaattggagggaaattcagaattaacttgaatttgaaattgaatttgtggagtcaaactatggacccagaatttcactaaatat

SEQ ID NO: 5029 - DNA, 614 bp, Glycine max
  unsure (1)..(614): unsure at all n locations
tgtgtggaatcgacaagcaaggacaaaaaggaatcttcaagtgacgtgacgaggaatccgtggggtagctcactataggtaaggggagtttattataaaatttaccattttaacaccatagttaggattaaggaacctagctatgaggatatctgcctgtccttgtgcatgctgatttttcttcaaagaaaattacgttttaactaatgggatgcgatatatatattgtgatgaatgatattgttttggctgtttgaaggctgtgcgtgaggaaatgatattgttgtgtttgtttgaattgttgttgatgttgctattgaggattttaattgatatgtgatgataatgatgattatgatgatattgatttgagatgacattgttaataaagaccatgtcaacatgaattgttattattgatgaatatgtgaatatgaaatgatgttgttgttgttgttgataacgtcattgagatgagatgatatttatgttgtgaatgacatggaaatacgatttgttcattgatgttggaaatgcattggcatgtgcatgttgtgtatgttcgtggggggcactgtgcactgacctttcannggtctttggcattagctttt

SEQ ID NO: 5030 - DNA, 595 bp, Glycine max
  unsure (1)..(595): unsure at all n locations
agcttgcttcttgcgattccaagacacaagatatcttcctaataggtggcatgtaatttgcaacctgcacaatcagaatctctatatcttgactcatccactgatttacctttctcatctaagtcaaggtatgttgaagtggtcgttggagtatatggttctttgcattttttatgccaaatttcttaattagttctatagagtatttggtttgacataggaaggttccatgtttcatctactgcacttggagtccaaggaagaaatttaactcacccatcatagacatctcagattccttctacatacaactagaaaattccttacacaaaatttcattactagcgccaaatataatatcatcaacatatatttgaacaatgaacaactcactatttactttcttaataaacaatgttttgtcaacttggcctctagtgaaagattgcttaattataaaactgtttaatctatcatacgatgaccttggtatttgtttcaaaccatacanagccatttttagtgtatagacatctttaggatgttcatagtccacaaaacctggggatgacctatatatacttctttttcaatg

SEQ ID NO: 5031 - DNA, 647 bp, Glycine max
agcttgtgcttcaagcataaagggaaataattaaatatgacaccatattcatttttgtgttaaggttgtttgcatacatatattcataaattcttcactgtattcagtgtattgcatatttgcattgaatacactttaagtttgttaagtatatgtcgaactaaatgtatcattgcattgtttgctaaaaaaatgtttgagctaaagtaactctcttaaaaagggtttgttcaacttaattaaataataaatatgataattgactagttagataagatacatcaattatgatctagtttaccgcgcactttaaggttaagctgcgttcgtcctgcttaatccgcctgataaaacattacaaccgaataaatgacaagcataggtacatgttctaattcatttcaccaacaaaatattgcgttttttcttcttattttacgcttcggctaatgcatttataaaagattaagagattattttgtttcacaaaacatattttgttttaagttgatatacgaaaattgaaacacaaaattgaaacggatataatagaaaattatttacactattgtcataagtgtttaaaaaaaagaaataaagtgaaaaaattgtgacattttttaattaaaaagaaaaataaatttttt

SEQ ID NO: 5032 - DNA, 447 bp, Glycine max
tccaatttcattttggagcgtctcgatatattacgggactctattgggcatccgagtaaaaagttattgtcgtttgaatttgatacgagcttccattttcaatttggagcgtctcgacatattacgggactcaatcggacatccgagttaaaagttaatgtcgtttgaatttgatacgagcttccaatttcaatttggagcgtctcgatatattacgggactctattggacatccgagaaaaaagtcattgtcgtttgaatttgatacgagcttcccttttcaatttggagcgtctcgatatattacgggactcagtcggacatccgagaaaaacttattgtgctttgaattttctaggagtttctgttttcaatttcgcgcgtgtcgatatattataggactcaatcggacatccaagttaaaagttattgcggttttcatttgct

SEQ ID NO: 5033 - DNA, 444 bp, Glycine max
agcttgtatcaaattcaaacgacaataagttttttctcggatgtccaatagagtcccgtaatatatcgagacgctccaaattgaaattggaagctcgtatcaaattcaaacgacattaacttttgacttggatgtccgattgactcccgtaatatatcgtgacgctccaaattgaaaacagaagctctaagacaattcaaacgacaataactttttattcggatgttcgattgagtcccgtaatatatcgagatgctccatattgaaaacggaagctcgtatcatatgcaaaccacaataactttttactcggatgtccgattgagtcccataatatatcgagacgctccaaattgaaaacggatgctcgtatcaaattgaaaccgcaataacttttaactcggatgtctgattgagtcccgtaatatatcgagacgctccaaa

SEQ ID NO: 5034 - DNA, 479 bp, Glycine max
agcttatgaccatttcaatttctcgagagctttcgttgttcaatttcgagcgtctcgatatgtgatgttcctgaatcaaaccttcgtgtgataacttatgaccatttgaatttctcgagagcttccgttgtacaatttcgagcatctcaatatatgatgtgcctgaatcggacatccgagtgaaaagttatgacaatttcaatttctcaagagctttcgtggttcaatttcgggcgtctccatatgtgatgtgcttgaatcggacatccgagtggaaagttatgactattttaatttctcgagagcttccgttgttcaatttcgagagtctcgatatataatgcccctgaatcggacctccgtgtgaaaagttatgaccatttgaatttctcgagagcgaccgttttttaatttctagcggtctgatatttgatgtgcctgaaacggacattccagtgaaaagtttgaccattttaact

SEQ ID NO: 5035 - DNA, 513 bp, Glycine max
agcttgcagaccagggatttatctgcaacttcaaaactaggaggctgagtcataaatacatatccctcaagcaacccattaagaaaagcattgttgacatcaaactgaaataactcccacccttgagaaagagcaagagtgagaataacacaaattgtgacaggcttgaccacaggaaaaaatgtctcatgaaaatcaaatccatgaacctaatgaaacaaaccccttagcaaccagtttggctttgaacttgttgatagaaccatcaacattttcttttactctgaaaagccatttgcacccaatagcttgcctattaggaggtaggggaaccaagtcccgagttctgttttacagtaaagcatcatactcctcttgcatagctgtagaccaatctgaattttccagggcctctttgacagtcttgggttcaaaatgagcaaggaacagtgaaggatgtaggctaggattatgaattccagacttggacctaatttgcataggatgagtgtt

SEQ ID NO: 5036 - DNA, 433 bp, Glycine max
tatcgtcattggaaagagatcattaaaatcaccaaatatgcaccaagcaccaatagaggaatgagctaaagatcacaaaagattccatgaaccttttctcttatctctcttttggaatccatagtaaactattaacttcgagacaattttgacaagatggattttcatgttgataaaattaaaatagtagtttaagagacaacaattaaagggggttttccaaaacatagtcagcccaccactccggcctttagcatcaacaaaaaaaaaagcataaatcaaaaccaatttgaatacaaatatcatcaatatgctaagagtaaacacgagtttcacataataaaatgatattccaatgagatcttttagggtaggaattgtgctcgggttgcccaagccctgacagtttcaactttgagactaatcttccctg

SEQ ID NO: 5037 - DNA, 694 bp, Glycine max
  unsure (1)..(694): unsure at all n locations
ttgagccaaaatcctgactcaccataaaccttgacccagggtgagaatgtcaatccttaccttcggaagcgaaaagaatagaagggaaatttccaatcaaagaaaaggaaagaaggaagatttccaatcaaagagaaagcaaaaaaagaaaagaaggaaaattcccaatcaaagagtgggagaaagcaaaaagaaaagaaagaaaattcccaatcaaagaatgggagaaagaaaaaagagaaaaggaggaaagaaagctcctgatcaaggatcgaaagaaaacagaagaaatgtgcagagaagtctttggaccggacaatatctgaacaatacagaattgtcaccaaatgaacaaaaagggaaggaaaggaaaccacgacctaaaatggtcttctccctttgattaccaaccaaaatcccgtgcgctagcgacttttttttctcgccccgcactaaacaaaaaaaaaacagaaaaagaaaaagccagaaaaatcaaaagccaaaaacacacaaaagccgaaaaaaaaaaccaccaaaagaacccattcccaagggaagccctattgatccataatcgcgcatgtaatttttgatttgataggaaataattngcaaagtcaagtcatgacatatctatggttcggaattaggatgaaacacttacctgtgcaagattgatacactttgagtgatt

SEQ ID NO: 5038 - DNA, 347 bp, Glycine max
ttggagtgtccaagcgccgctccttcctcacccttaatgcatttttcttcaggcttcatttcatcaatgggcattccttctgtattccgcatcttgggatgtccccagccattgacgacacacttccaggttctgatatcctaggccatcgcgaaggccaccatactcagctctccaatatccacactatgtgtcatgaagagacggaagtctgcacactgagcctacgtctttatccatgtttatcagaatatatctccccacacctcactctgagaatacaaagaaggctcttaaaccaataggaaccctgataccaaagtacatatgtagttcagaacgacaca

SEQ ID NO: 5039 - DNA, 387 bp, Glycine max
agcttttctttgaccgaagctaaggctgaatcttgtttttcaccctatacacatgccatgttcttcttcacccactattagaaaggtgacgcatttgaataaaagataggaactaaccttatatataagcttgctaaccaatggaagctcctaatatctccgacacattattgggtgctccattctagaatagtcgtgattgtctcatggtgcacttcgaccccatttctaccaactcctaaacctcagagaactatattatctactcacaatgtacacttctctatatatgcatagagggagttttctctattgactgaaacaacttgcctgagatgtactcattgatcatataagctcatatggcccactaaaatatcttaaaaa

SEQ ID NO: 5040 - DNA, 570 bp, Glycine max
atactcaagctttgagccacttcaaacgacattaactttttactcggatgtcttattgagtcccttaatatattgagacgcttgaaattttatgttgaagctcttagccaattcaaacgacaataactttttactcggatgtccgattcagtgacgtaatatatcgggacactcgaaattgaatgttgaaactttgagccaattcaaacgatgtctgattgagtcccgaaatgtatcaagacgctcgaaattgaatgttgatgctttgagcaaattcaaaagacaaaagctttttactaggatgtttgattgagtcccgtaatatatccagccgctcgaaattgaatgttgaagctttgagcaaattcaaacgactatatttttttactcggatgtctgattgagtcccgtaatatatcgagacgctcgaaattgaatgttgaacctctgagccaattcaaacgacaataactttttactcggatgtctgattgagtcccgcaatatatcgagatgcttggaattgaatgttgaagctttgagacaattcagacgacaataactttttac

SEQ ID NO: 5041 - DNA, 491 bp, Glycine max
agcttcaaaattcactttcgagcgtctcgatatattacgggactcaattagacatccgagtaaaaagttattgtcgttggaattggctcagagcttcaatattcaattacgagtgtctcgatatattacgggactcaatcagacgtccgagtaaaaagttattgtcgttggaatttgctcatagcttcggcattcaattttgagcgtctctatatattacaggactcaataagacatccgactagaaagttattgtcgtttaaatttgctcaaagcttcaacattcaacttcgagcgtcttattatattataggactcaatcagacttccgagtaaaaagttattttcgtttgaatttgctcaaagcttcaacattcaacttcgagcgtctcgttatattataggactcaattagacattcgagtaaaaacttattgtcgtttgaatttgctcagagcttcaacatcaatttcgagcgtctctatatatta

SEQ ID NO: 5042 - DNA, 651 bp, Glycine max
  unsure (1)..(651): unsure at all n locations
tggaacatatatactgaatcctagttcctcttaaggacttatttagaatatttgccggttggtcattagaattaatgaactcagtgataatctccttggacaatagtttctctcgaatgaaatgacaatcaatctctgtgtttagtcctcttatgaaagactgaatttgaggcaatgtgaagagctgcctgattatcacagtataacttcatttgcacaacttcacaaaatcccaactcttggagaaattgtttaatccacataagttcgcatgtaaccatagtcatagatcgatattcagcctctgcactggatcgagcaacaatagtttgtttcttgttcttccaagagataatatttcctccaataaaaacacaatatcctgaggtagatcttctgtctatgggacaaccagtccaatctgcatcacaatatccagagacttgagtgttacccttgttttcatacaacaatccttgtcctagagccttctttacatatctgagaatacgcatgacgacattccaatgatcaacatgaggattntgcataaattggttaacaaccccaacaacaaaagaaatattangtcttgtaatgtaagataagtgagttttcccacaagtctcttatatctctcgggtttgatct

SEQ ID NO: 5043 - DNA, 451 bp, Glycine max
agcttggctgaaatggtacttggctgtttcatctttatctcttaattactatctaatcattatttgattagatagtaattagtgatttagtccttattacacattatttgattgatactatgtaatgaatactgatcccatttactcgttataaataaaggcttggtgtggccatccaagacacaacattacagaaaaacactgttataggtagcataaaataaagacttttgaggggtactaaggactaactcaaggtgttgtaagtgctcttgccatgtcttgctatatataagtgtgttataaaaaaacaccaaaacaaatgtactaagatacagctgcaagcgtgagttcattgtacattgaaatgtggcaaagacattggttatagcccaaaaggaataaccaagaactcaacaacaagttccgaatgagcttcattcccaacaca

SEQ ID NO: 5044 - DNA, 529 bp, Glycine max
tatcactgcctcacgaatgcccaccctggtctaaatggtacgtgatagaacatgcataatcacatagaaggtggtttctagtagaagaaaaaatgtaatccaagtaagtgcaattggtttatctggagctacagaggggtggcactgaatcatgcagactgccttctgttatagcgattaattgaagttttctttcatgccctgaacgtgaaatacagtgggtcttataatacttttataatattatgccatgtgagtataatgacaaccttttcatatcctttcagtggtttcggtcatgtcatttaaagttttatttgaaaagaaaatttataaaattgtttttatagagaaggaactatattggaattatacattaatgtgggattttgttaattaccaaagatgaaatctatggagtttgtaattctaaattatatggtttattgatataacgatgctatgaaatatttatatttggatttaataaaactgttaattataagatatatatatatatatgaattat

SEQ ID NO: 5045 - DNA, 470 bp, Glycine max
agcttatcgatgttgggcaagggatatgcgttcttggggcatgacttgttaaggtaggtgtagtcagtgcacatatgccatttgccattggccttttctaccatgacaatgttggctagccaagttgaatatctgaccttctaataaactaagccttgagtaacttgtcaatctcttgtctgaccaccttttgtcgctcttctcccatcttttttttttcttttgtgagactagtttggtcagaggatagatggccaatttgtggcatatgatgctagcatgcatacttggcatattagacaactgtcatgcaaatagatttgtgtttcttcgtaagacttctgctacatgtttgtacttgtcgctaatgaagtccttgctgagctaaatacactacccaggtttgggtccaagtgtaacttgacaagctctttgattgttttgggcctttataaatatgtcatcacgca

SEQ ID NO: 5046 - DNA, 470 bp, Glycine max
agcttgtcaatgttgggcaagggatatctgatgtaagctccattggagcttggaggcctaagatcttcttcatcaatggattcctttgcttcttggaagatgaatggcagcggaatggagaacgaagagagaggagacgccacttcaaggagaagatgagtctagaagaagctcaccaccatagaaggccatggataagagcttggaggaagaaggatatgaatgaagggagaggaagagaacagcataaaattttgtgctctaaaagagctctgaaatctgaaatttaattttcaaatgatcaaagttccaaaaaatgcacacacatgacctctttttatagcctaagtgtcatacaaaattggagggaaatttgaatttctattgaaactttacttgaatttgaaattggatttgtggagccaaattttggagccaaaatttcactgattatgattagggaatttagc

SEQ ID NO: 5047 - DNA, 511 bp, Glycine max
tcaggttgctcattgactccagattgctgcaaagaaggacagagatctgtatggtgatctacagaagaacatagaccatagactcttgcaacaggtgcagatgcagatttttgattcatggcaagctgagttactaggtagaccaaggcatcaagttttccctcaagcttttttattttcagtagatgaagatgaatctatggccacctcatggactcctctaaggacaatagcatcatttcttgcggcctcagttgcttgttgtctttgttgttgctgctgctgtattggaggaggaacatatggcttgcttggaccagtagcattctggaagggagggacaagctgatgttgttgtggaggacttgtccatctcagatttggatgattcctccaacctggattgtatttgttgcttgaaaggttataattattttgttgttggtggtttttctgctgaggggatctattataaatgtttgcagcatgagcttcaggttgctcattgact

SEQ ID NO: 5048 - DNA, 575 bp, Glycine max
  unsure (1)..(575): unsure at all n locations
ttgagcaaattgaaatgacaataactntatacacggatgttcggttgagtcccgtaatatatcgagacgctcaaaatttagatccgaagctctgagaaaattgaattgacaataactttatacacggatgtccggttgagtcctgtaatatatcgagacgctccaaattgaaaacggaaactcttagaaaattcaaacgacaataactttttactcggatgcccgacagagtgtcgtaatttatcgagggatgctccaaattgaaaacgaacgctcgtatcatattcaaacgacaataactgtatactcggatatctgattgagtcccgtaatatatcgagacgctcaaattttagatccgaagctctgagaaaattgaattgacaataactttatacacggatgtccggttgagtcctgtaatatatcgagacgctccaaattgaaaacggaagctcgtagaaattcaaacgacaataacttttacttcgatgtccgaatgaatccgcaatatattgagacgcttcaaattgagactagaagctctgagcaaattgaaatgaccataacttttt

SEQ ID NO: 5049 - DNA, 493 bp, Glycine max
agcttttgttttcaatttcgaccatctcgatatattaccagactcatccggacttccgtatataaacttattgtcaattaaattttctcagagctttggatcaaaattttgagcgtctcgatatattacgggattcattcagacatccgagtaaaaaattattggcgttagaatttgatacgagcttccgttttcaatttggagcatctctcgctaaattgcgataggctatcgggcatccgagaaaaaagttattgacgtttcatatttctaagagtttccgttttcaatttggagtgtctcaatatattacgggactcatccggacatccgtgtataaagttattgacattttaatttgcgcaaagcttctagtctcaattttgagcgtttcaatatattacccgattcaatcggacatgctagtaaaaagtaattgtccgttggaatttctacgagcttccgttttcaatttggagcggattgacatttt

SEQ ID NO: 5050 - DNA, 550 bp, Glycine max
agcttgtaggttaagtgacagtgattgtactggagatgaagatgatcggaaaagtactagtggatttgtgtttttcatgggggaacacaaccttcacttggatgtcaaaaaattagtcgatagtcactctttcaacttgtgaggcacaatacatagcaactacttcatacatttgtcatgcactctggcttaggaatttgttaaaaaagttgggcatgtcacaagaatagccgaccaagatctttgttgatagtaagtcagccattgttcttgcaaagactccactgttccatgatcgaagcaaacatattgatacatgttaccactacataagggagtgcatatcaagaaaggatgtacatgcacaatatgtgaagtctcaagaccaagtagctgacatcttcaccaagctgctcgagtaagaagacttaatcaagttaagaagcttacttggaatggtaaatcaagtttaaggggggggtgttgaataatataaacttgatttatcccattaatcatgtgttaagtcccataagtttgtgctactact

SEQ ID NO: 5051 - DNA, 434 bp, Glycine max
tcaaacttgcaacaaaggagttgagcaggtaaaaaagattcgtcttcaaactcttagaggtgactttgaacgtttgtttatggaggagtccgagtcaatttctaattatttttctcgagtattggtcgtagtcaatcaacttaaaagaaatggtgaagatgttgatgaggtgaaggtcatggaaaaaatacttcgaactttaaatccaagttttgacttcattgttaccaacattgaagaaaacaaggatttaaagaccatgactattgagcaactcatgggttccttacaagcatacgaagaacaacaaaagagaaaaattctacaaaaggaggctacggagcaactactacaactcaacatatatgaagcaaactatgcatattacaacagccaaagaggacgaggtcgcggccaacatcgtggacgtggac

SEQ ID NO: 5052 - DNA, 671 bp, Glycine max
  unsure (1)..(671): unsure at all n locations
ttgagccaaaatcctgactcaccataaaccttgacccagtgtgagaatgtcaatccttaccctcggaagcaaaaaaagaatagaggggaaatttccaatcaaagaaaaagagaaggaaaatttccaatgaaagcaaaaaaagaaaagaaggaaaattccccaatcaaagagtgggagaaagcaaaaagaaaagaaaggaaaattcccaatcaaagaatgggagaaagtaaaaaaaggaagaagaagaaggaaagaaagctcctgatcaaggatcgaaagaaaacagaagaaatgtgcagagaggtctttggaccggacaatatctgaacaatacagaattgccaccaaatgaacgaaaaaagaaggaaagggaaccacgacctaaaatagtcttctccctttgattaccaaccaaaatcccgtgcgctagcgaccctttttttctcgccccgcactaaacaaaaaaaacagaaaaagaaaaagccaggaaaatcaaaagccaaaaacacacaaaagccgaaagaagagaccaccataagaacccattcccaagggaagccctattgatccatgatcacgcatgtaattnttgatttgataggaaataatttgcaaagtcaagtcatgacatatctatgggttcgaattangatgaaacacttacctgtgcg

SEQ ID NO: 5053 - DNA, 442 bp, Glycine max
ggagaaccaagccaatcggaatgctatactatttatatatgggaatataggtaacaatggcggttatgacggaccgaggcataaccgggttgagggagtaaagctcaatgttcctcccttcaaaggtataagtgatccagatgcctacctgtactgggaaatgaagactgagcacgtatttgcctgcaatgactacactgatgcgcataaagtcaagctagcagcagctgaattctccgactatgcccttgtttggtggcataaataccaaatagaaatgttgagagaggaacggcgagaggtatatacatggactgagatgaaaagggtgatgagaaaaaggtatgtgcccactatctataacaaaaccatgcgacagaaacttcaaaggctgtcccaagggaatttaaccgtggaatgattttaataaagaaatggaaat

SEQ ID NO: 5054 - DNA, 492 bp, Glycine max
ttcaagaaattcaaatggtcataggttatcacacggaggtcctattcaggaacatcaactatttagccgatcaaaattaaacgacggaagctctcgagaaattgaaattgtcataacttttcacacggaggtccgattcaggcacatcacatatggagacgcccgaaattgaaccacggaagatctcgagaaattcaaatggtcataacttttcacacggaggtccgattcaggcgcatcatatatcgagacggtcgaaattgaactacggaagctctcgagatattaaaatggtcataacttttcactcggatgtccgattcaagcacattacatatggagacgcccgaaattgacccaccgaagatctcgagaaattcaaatggtcatagcttttacacggaggtccgattcaggcgcatcatatatcgagacgctcgaaattgaacaacggaagatcttgagaaattgaaattgtcttaacttttcact

SEQ ID NO: 5055 - DNA, 582 bp, Glycine max
tgttgtcctcattagtggacgcctctattaaacaagtggcctcaataacttaagaggagggaggggggtgaattaagtttaaaaatttctccctaatcaaattttaattctctcttgaaatagaatatgcacacttaatatgaatgaagtaaagagctattcaaatgatacttctttaaaataagcaaagcaaaaataaaatgtaataaattaaagaagtttagggaagagagaaatgcaaactcagtttttatactggttcggccacgccctatgcctacgtccagtcctcaagcaacctgcttgagattttcactaacttgtaaattccttttacaaattctgaaccccacatggatacccttttcttgtgttcagagatccttacaaatcaagatacccactgtctcttgaacaacagttgtttgctttaaagtaagaagaatatttctctcttgtagagaagaatgttacaagatgaagatcttattagaattcttattgattttgcaagtgtttgaccaatgctttcttttgagaagaaaaaacaattattgttctgaaaaactttcgagaaatttg

SEQ ID NO: 5056 - DNA, 621 bp, Glycine max
  unsure (1)..(621): unsure at all n locations
tcttgcagaggctgaagaatcagctctcggtgaaatcctttttatgatttcgttctgttttaggtcgaagaagttggttgaactgatgaagatgtgtagagatctgaggcacaaggtcccagagatattggaggtggaggtggatccaaagggagcaccaaggattcaagaggcgataatgaagctctacgtttcaaagagcgcgttcgagaagattcacttgttgcaggcaatgcatcttagaatttcctctctataaacataatttagaattccaaaattttagttaattaaaaattatctattaaaatactgaaatttcaaatttcagtgaacaagacatccaaaagaaaattttagacttagaaattttaaatcctctaaaaaattactttctttgctttaaatactccatccaaacagattctgaagagaaaaaaaacattttcttaaagtatcttttgtttgaaattaattttaaaaataaaaaagaataattaaaaatagaatttcaattaattgaaatatatttttaaaataatatcattaaatagggtgaaaaatggttaaatttatttatatttaagtttaanaattacttttggtttatttaagtcaaga

SEQ ID NO: 5057 - DNA, 465 bp, Glycine max
agcttcaacatcagaccacttccagggtgctggaactacttcacatggacttgatggggcctatgcaggttgaaagccttggaggaaagaggtatgcctatgttgttgtggatgatttcttcagatttacctgggtcaactttatcagagagaaatcagaaacctttggagtattcaaagagttgagtctaagacttcaaagagaaaaggattgtgtcatcaagagaatcaggagtgaccatgacagagaatttgaaaacagcaggttcactgaattctgcacatctgaaggcatcactcatgagttctctgcagccattacaccacaacagaatggcataattgaaaggaaaaacaggactctgcaagaggctgctagggtcatgcttcatgccaaagaactttcctataatctctgggctgaagccatgaacacagcatgctacatccacaacagagtcacac

SEQ ID NO: 5058 - DNA, 492 bp, Glycine max
  unsure (1)..(492): unsure at all n locations
tgtaatcgattacacacatactgtaatcgattaccagaggagtttttcaaaaaacattctcaacagtcacatctttttatctgattcttaagtggccatcaaaagcttatatatatgtgactagagacacgaatttaacaagagtttttaagaacaaaaaggtcttatcctcttaaaaagcaaaatcattttaccctcttacaaattccttggccaaaactcttgtgattcaataaggaattatttgagtgctcaaattgttcaatctatctctttcaagagagatttcttcttttcttcttcttcattctgaaaagggattaagagaccgagggtctcttgttgtgaaagaattctaaacacaaaggaagggttgtccttgtgtgtttagaacttgtaaaaggaatttacaagatagtggaactctcaagcgggttgcttggggactggacgtangcacaagggtgtggctgaaccagtataaatctgagt

SEQ ID NO: 5059 - DNA, 446 bp, Glycine max
tcacaaaattcttattcaatgcaattccagcctttgcatttaaaatacttgatctagaacaataatttaaaaaaaaggttaacagaccaatcactaacaagaaaatgaataatgtcaagttgtcaacttaaaaaaggcaattgtgttcaataactttacagctgttaacataatttatacctgttatcaccaacaaagtcggtggagaccacatcatcttcagtgtaaccaagaattcccttcaacttgccctctgattcctccctgagaaagacaacattatataagacaatacaattgagaaggaccaatcccaaaatggaggcctttattaataacaagtaatgaaaatttgctttaagacccaataatacacaacatatatcattagaggagaatcaaagaattctgtcattacttgatagcatttttaatttcatcatatg

SEQ ID NO: 5060 - DNA, 441 bp, Glycine max
taaacattcaatttcgagcgtctcgatatattacgggactcatatcttacatccgagtaaaaatttattgtcgtttgaattggctcagaggttcaacattcaattttgagcgtctcgatatattacgggactcaataagacatccgagtaaaaagttattgtcgtttgaattagctcagagctttaacattcaatttcgagcgtctcgatatattacgggactcaatcagacatccgagtaaaaagatattgtcttttgaattggctcacaggttcaacattcaatttcgagcgtctcgatatattatgggactcaatcagacatgcgagtaaaaagttaatgccggttgaattggctcataagttcaacattgaatttcgagcgtctcgatatattacgggactcaatcagacatcccagtaaaaagttattgtcctttg

SEQ ID NO: 5061 - DNA, 407 bp, Glycine max
agctttgagcaaattcaaacgacaataaccttttactctgatgtctgattgagtcccgtaatatatcgagacgctcgaaattgaatgttgaagctcagagcaaattcaaacgaccataacttttttctcggatgtttgattgagtcccgtaatatatcgagacgctggaaattgaatgtttaagctatgagcaaattcaaacgacaataactttttattcggatgtctgattgagtccagtaatatatcgagacgctcgaaattgaatgttgaaactttgagcgcattcaaacgacaataactttgtactcggatgtctgattgaatgacgtaatatatcgagacgctctaaattgaatgttgaacctctgagccaattcaaacgaccaaaactttttactcggatg

SEQ ID NO: 5062 - DNA, 521 bp, Glycine max
agctttgaatgcactattcaatggagttgacaagaacatcttcagactgatcaacacttgcacagtggccaaagatgcatgggagatcctgaaaatcactcatgaaggaacctccaaagtgaagatgtccagattgcaactcttggctacaaaattcgaaaatctgaagatgaaggaggaagagtgtattcatgacttccacatgaacattcttgaaattgccaatgcttgcactgccttgggagagaggataacagatgaaaagctggtgagaaagatcctcagatccttgcctaagagatttgacatgaaagtcactgcaatagaggaggcccaagacatttgcaacatgagagttgatgaactcattggttctcttcaaacctttgagctaggactctcggatagggctgaaaagaagagcaagaatctagctttcgtgtccaatgatgaaggagaagaagatgagtttgacctggatactgatgaaagtctgacaaatgcagttgtgcttcttggaa

SEQ ID NO: 5063 - DNA, 619 bp, Glycine max
  unsure (1)..(619): unsure at all n locations
tatctgtaaaatcttctagtcctccatatatgtgtgctttctctcctcatatgtattgcttaaattaagggatttattttatgcattatgctctatattaaaccttcttcaagattcatttgcatttatcaatattcattatgcttactacctctggactgatataaacaaccaaaaaaatgactgacgtaaatataaacaaatttaactacttttgccctattataatgatatcataccaaaaatacccttcaattaaaagatatcatattttcaatgactcctttttattcttgattcaagttccaatgaaggagactttatgaaaaacatttttttaaatgtgattagtaggattaaattatgttaactaaatggtgtgaagttagttaatttttcttgtatttcagtcccgagggaatattatttactgtgtagcacgaattcctttntaacccaaggttgtcaattttaagagagtatgtataagcgcaaccttttaggagcttagcgcatatccttgcggcagatgttcaacttagcgggcactttccagcanagtcaattctgcagaagctgaatttctgtaacttccgcttagtggctccacatatctcta

SEQ ID NO: 5064 - DNA, 528 bp, Glycine max
gcaagctttgaatgctgtatataatggagttgactataatatcttcagactgatcaacacatgcgcagtggccaaagatgcatgggagatcctgaagaccactcatgaaggaacctccaaagtgaccatgtccagattgcaactcttggctacaaaattcgaaaatctgaaaatgaaggaggaagaatgtattcatgacttccacatgaacattcttgaaattgccaatgcttgcactgccttgggagagagaatgacagatgaaaagctggtgagaaagatcctcagatccttgcctaagagatttgacatgaaagtcactgcaatagaggaggcccaagacatttgcagcatgagagtaaatgaactcattggttcccttcaaacctttgagctaggactctcggatagggctgaaaagaagagcaagaatttggctttcgtgtcccatgatgaacgataagaatatgagtatgacctggacactgatgaaagtctgactaacgcagtttggcttcttggaaaaca

SEQ ID NO: 5065 - DNA, 504 bp, Glycine max
agcttgtgcctcttcacgtctggaatatgaatgtagcatatagatccaaagacccttaggtgctttgctgatggcttcctcccgttccaagcttcaattggagtcttgtcttttacagacttagttggacatctgttgagtatgtaaacagcagtgtagactgctttagcccagaatgtgttaggtacttgagcatcgatctagccatctccataactgtgcgattctttctctcggacactccattttgttgaggaggatatgcgactgtaagttgtcgctcaattccttcatcctcacaaaatctttcaaactcgcgagaggtgtactctttgtcgcgatcacttcttagtacttttatccgttttccactttgattttcagcaagggccttgaactttttgatactccaaatacttctgatttttcttttagaaaatatacccatgtcattctagagaagtcatcaatgaagagtatgaagtacctggttgttccatgtga

SEQ ID NO: 5066 - DNA, 576 bp, Glycine max
tgaaccttgaggaagaaatttcagtgtcacatgcatgtcattgaaacgttgatttggcaccaaatgaccctatgctttctttagtgggagggaagttccatgcatgtggcattaagagctatgaccgtggagttatttgttggggatttatcatcaaaccaagttcaccatctcctaaagggattaaggtttttgaagttgctgctggtgattactttacttgtgcagttcttgctgacaaatctcttatgcctttatgttggggtgttggctttcccacttctcttcctttagctgtttcaccaggaatgtgccaaccttctccatgtgctcctggctcctatgcaattgataagcataagagtctttgcaagtcaccggattctcgtgtttgcatgaagtgcagtggtgcttgtcctcctgaaatgtatctgaagagtgcatgcaattttgcatatgatagaatgtgtgaatataactgttcctcttgttcttcatctgaatgcttcttgaactgctcctcttcatattccaatgctgctgcttctactgagaaaaaaagtgaaaaaattgggc

SEQ ID NO: 5067 - DNA, 559 bp, Glycine max
  unsure (1)..(559): unsure at all n locations
tcaacatcagaccacttccagggtgctggaactacttcacatggatttgatggggcctatgcaggttgaaagccttggaggaaagaggtatgcctatgttgtgttggatgatttctccagatttacctgngtcaactttatcagagagaaatcagaaacctttgaagtattcaaagagttgagtctaagacttcaaagagaaaaagactgtgtcatcaagagaatcaggagtgaccatggcagagaatttgaaaacagcaggttcactgaattctgcacatctgaaggcatcactcatgagttctctgcagccattacaccacaacagaatgggatagttgagaggaaaaacaggactttgcaagaggctgctagggtcatgcttcatgccaaagaacttccctataatctctgggctgaagccatgaacacagcatgctacatccacaacagagtcacacttagaagaggcactccaaccacactgtatgaaatctgganagggaggaagccaactgtcaagcacttccacatctttggaagtccatgttacatcttg

SEQ ID NO: 5068 - DNA, 247 bp, Glycine max
  unsure (1)..(247): unsure at all n locations
tctatacctgttgcaagagnttgtggtctacgttcttctgcagatcaccatacagatctctgtccttctttgtagcaatctggagtcaatgagaaacctgaagcttatgctgtaaacatttataatagacctcctcagcaacanaactaacaacagcagaataattatgacctttcaagcaatagatgcaatctaggttggaggaatcatccaaatctgagatggacaagtnctccgcaacaacaac

SEQ ID NO: 5069 - DNA, 250 bp, Glycine max
  unsure (1)..(250): unsure at all n locations
ccttcacccgacgaagacactgacananacttatcttctccttcttggacaaagtatggcaggctgnggggcaagtaaatttcttcccatcagaccttggatgcaactatgatcgtatacccatatcagctacatcttgacnggtattcaagccatcctttgtcttgcctttgaatgtaaggaacgtcccaatgacactatcacagacattnttctccacatgcataacatcaatacaatgtctaacgtc

SEQ ID NO: 5070 - DNA, 377 bp, Glycine max
  unsure (1)..(377): unsure at all n locations
tctataaatctataaagttctntcaaatattttataattttaaaatatatatccattaaaatccanacctaaaaatcttaatcctaaaagtcnttttaaaaatctaataagtcaaaatatttctacataatcttttaatatctaaaagactnnttttatactanaatagtcttttaaaatcctataccccttttatattccttcanagttttttaanattcataaaattttaataaaacattaaaataatattttanaatcatatggaatacattatgataaaataaataaccatgatacacgaaccattacacagtaacatccacccatgagccacctacctatgtggacatttttaaatcattcaattagttttt

SEQ ID NO: 5071 - DNA, 236 bp, Glycine max
  unsure (1)..(236): unsure at all n locations
caccatcaataagtatacatcgttcataagggtccaccacttgaaagagggctngcaccagcgtagaatttccattctctgtcctgtctactataccaattgtcttttgtcctgcgaagatacaagtaacatctttgaggaccatangagcagcagggtcattctgtatatgaagggtatgaagttcaactnttccctcctttggccactctggttcatgcctgcaatcttgaatg

SEQ ID NO: 5072 - DNA, 395 bp, Glycine max
  unsure (1)..(395): unsure at all n locations
actcggatgtccgatgagtctctgttatatatcgacacgctcganatngaatgttgaagctctaggcctattcaaacaacaataacgtnttactcggatgtccgattcagtgacgtaatatatcgggacgctcganattgaatgttgaacctctgagccaactcanacgacaataactnnttactcggatgtctgattgagtcccgtattatatcgagacgctcgaaattgaatgttgaacctctgagccaattcaaacgacaataactntntactcggatgtctgattgagacccataatatatcgagacgctcgaaattgaatgtngaacctctcagccaattcaaactacaantaacttttactcggatgtccgatcagtgacgaatatatc

SEQ ID NO: 5073 - DNA, 240 bp, Glycine max
  unsure (1)..(240): unsure at all n locations
tgtccgattcggggacataactcatctagacgctcgaaattgaacaacgcaagctctcgagaaattcgaatggtcataacatttcgcacaaatgtccaattctgggacataatatatcaagacgctcganactgaatagcggaagctctcgggaaaatcagatggtcatnaactttcacatggatgntccgattgtgaaaataatatatcgagatgctccaaatcgaacaacgaaagcta

SEQ ID NO: 5074 - DNA, 307 bp, Glycine max
  unsure (1)..(307): unsure at all n locations
gcgatccttgagtcacctgcngcatgcaagcttgtaatcgattacacatatactgtaatcgattgccagagcatattttcagaanatattctcaacagtcacatctttttatatggctcttgaatggctatcaaaggcctatatatatgtgacttgagacacgaatttgctaagagttnttcagaacaaaaaagtcttatcctcttataaagaaaaattgttttatcctcttacaaattccttggccaaactacttgtgattcaataaggaatttttgagtgctcaaactgttcaatctatctcttt

SEQ ID NO: 5075 - DNA, 265 bp, Glycine max
  unsure (1)..(265): unsure at all n locations
caacttccgtttgcccatcggtttgtgggtgacaagtggttgaanataacaatttagtgcccaacttgctccacatagtcctccaaaaatggcttatgaacttagagtccctatcactaacaatgctccttggcaaccatggagtctcacaatctccttgaanaacaaatcagccacatgggaagcatcatcaactttnttacatggaatagaatgagcccatttagaaaacctatcaacaaccacaaaaatggaatctctacca

SEQ ID NO: 5076 - DNA, 251 bp, Glycine max
  unsure (1)..(251): unsure at all n locations
caacacgaacaacaggtgagacaganaacttcatagctctaatgggatgggcatcaacttccttttcattagtcaaagtagcattctttggtatgaactgatccataccaaccatagcaacagtgttaccacaggggacatcttccacagtttcctgtctttttcccatccacatgacagttctttgaacacttttaacatacaaatccttcttctccccacggacataatatggtcccataatcctcacc

SEQ ID NO: 5077 - DNA, 294 bp, Glycine max
  unsure (1)..(294): unsure at all n locations
atccacgtcgattaccaatccttngaaacatagcacgagacctatcagctatgcttctttctatagtaacatctgagtctgcatttagcatacgtggaagggtgctcgatccatttcgtagttctctatcacatgaaaagccagaggcccttatctgtacacaagaatggctcanagatacaccttcacgcaccattttagacttcgatttggaagagcttcaaagtttcgacaaacgtatattgttttcccaatttgtagtaataatataattaaaatatttattgagtaaca

SEQ ID NO: 5078 - DNA, 309 bp, Glycine max
  unsure (1)..(309): unsure at all n locations
aactcggatgtccaaatgaaacccgtattatatcgagacgctcgannattgaaacagaagctcgtagcaaatgcaaaccacaataactntttactccgatattcgactgagtcccgaattatatcaagacgctcgaaatngagaacagaagctctaagcaaattcaaacgacaatacactttaactcggatgtccgaatgtgtgctatagtatatcgagacgctcgtaattgagaacagaagctcgtagcacattcaaacaacaacgtaattttacacggatgtcctgtngagtcgcataatatatcga

SEQ ID NO: 5079 - DNA, 345 bp, Glycine max
  unsure (1)..(345): unsure at all n locations
acatgggaaacatntataatcttgaatattntataataaaatatattntggtaggtctctatctaaaaatatattatattttttttcacaaaccacgaatatctntcctaaaagccagtggttaatgaatattgattcctatgactcanatctgatgtcactggttaaattaaaataatgttatgtcaatggattcaagcactctatnggtntatataatatctttgttatcatttcggaaacatataattatgaaatttttatcatattctatcttaatatatctggtagataacatttaattttctcacaaacaggatatataaatcttaatttctattattt

SEQ ID NO: 5080 - DNA, 341 bp, Glycine max
  unsure (1)..(341): unsure at all n locations
ccatgctaacatctgaatcatatcagcatatcacanaaactgtttattcacaatctgagtcacatgttgtaagtggacattctttaatgtattcatactatacagtatccatggcagccagaattcattcatgagaccaaccctcttgtctgtctgtngcagtccttcctttgtcagttntcgcactttgctaatcacaaatgtctgctctcaaaacaactaaattattttattattggatcaatacctataagaaaaaagagagcagttattgttaagaataggaacaacataccaaatatatcagtttcaactatactaaattcacaactctctaacat

SEQ ID NO: 5081 - DNA, 231 bp, Glycine max
ctcaatagctcttgcaacatggtgagtcagtcccattggtggctttggctgtatcatctgtagaagcatgatccccagtgaataaatatcagatttgattccagcatgctcgtttgctgatactcagggtcaatgtaaacagaaagtccagcagttgatgtcatgcgatactgtgtcactgtgtctgcaactgtaggagggacaagccttgccaatcccacatcactgatc

SEQ ID NO: 5082 - DNA, 318 bp, Glycine max
  unsure (1)..(318): unsure at all n locations
tctgacattcaccacagattctgtcttcttctatnttcagattgggaatgcctctaacagcacctctgtcaatgatattcttcatgcctcttaagtgcagatgtccaaatctttgatgccatattctgacttcatcttctttggaggatagacatgtggaggagtaactggtttcttgaggtgtccataagtagcagatgtcctatgatctgctgcccttcattagaacttcactcttctcatttgtcaccaagcattctgacttttgtgaagttacatttgaatccttatcacacagctgactgattgctgatcaag

SEQ ID NO: 5083 - DNA, 432 bp, Glycine max
  unsure (1)..(432): unsure at all n locations
agcttgcttaagaaacttctatgaaggttggatctttaagcttcaatgaggtccttcaatggtgattttccaccatggagatgcagcggaagataaaggagaagaggtgagaggaggcgccatctactatgatgcaagctccattggagcttgtaggcctaggatcttcttcatcaatggattcctttgcttcttggaagataaatggcagcggaatggagaaggaagagagagaggagacgccacttcaaggagaagatgagtctagaagaagctcaccaccataggaggccatggataagagcttggaggaagaaggagatgaatgaagggagagggagagaagagcacgaaattntgtgctcaaaaggagctctgaaatctgaagttaatattcaaatgatncaaagtgaaaaaaatacacacacatga

SEQ ID NO: 5084 - DNA, 413 bp, Glycine max
  unsure (1)..(413): unsure at all n locations
agcttagactaagtttatcctaccatcctcagactgatggtcaaactgaacgaactattcagtccctagaggaccttttgagggcatgtgtcttagagaaaaagggaatttgggagagttttcttccattgatagagttcactcataacaatagttttcactctaccattggcatggctccctatgaagctttgtatggtaaaaggtgtatgacacccctatgttggttagagcccggagaagacctcaccttatgacctgaagtggtataacaaaccatcgagaaggtcaagttgatccaagaaaggatgaggactgcttanagtanacagaaaagttatcagaataagaagaggaaagacctggaattcgaggttggtgatcatgtattcttgagagtcactccatggact

SEQ ID NO: 5085 - DNA, 475 bp, Glycine max
  unsure (1)..(475): unsure at all n locations
ngctntaagactgtatattgatttctttagtttgcacaccatgtgttcctttcctttaactgagaaccccattagttggtccatataaatattctcctctaaatctccatttagaaaggcagttttcacatccatctgatgtagctccaagtcataatgggctactaatgccatgataatcctgaaagaatcctttcgtgagaccggtgaaaacgtctctttataatcaatgtcatctttctgagcaaattccttagcaacgagtctagccttgtaacgttcaaggttgccatgagagtcacgcttagtcttgaagacccacttacaaccaactctcttacaatcctttggtaattctacaaggttccaaacaccattatgttccatggaaattatctcttctttcatgacattaaaccacttctcagaattatcacannatatagctngtgaaaacaaaacttgatcattatca

SEQ ID NO: 5086 - DNA, 411 bp, Glycine max
  unsure (1)..(411): unsure at all n locations
gtcattaatcgtaatgaanaataacaattaaacaacaattaataaaagagaagtcaagcttattgaaaagctagtaaatacttggaaaatatccatttgcaacatgttggtataaaaaagtaacaacgataataaaattaattaaggcgtacccaacaagctttctcttgctttgaaaagtcattaatcgtaatgaaaaataacaattaaacaacaattaataaaagagaagtcaagcttattgaaaagctagtaaatacttggaaaatatccatttgcaacatgttggagtaaaaaagtaccaattatctcactaatgaaacttatatataaaaaacattaataaattaatcaacatgcacctttcaataagcgataataaattaatcanagcgtataactagagacatg

SEQ ID NO: 5087 - DNA, 437 bp, Glycine max
tggaaatgaacaacggaagctctcgagaaattcatatggtcataacttatcacatggaagtccgattaaggcgcataatataccgagacgctcgaaattgcacaacggaagccctcaagaaattcaaatggtcataacttatcacacggaagtccgataaaggcgcatagtatatcgagaatcttgaaattgaacaacggaagctgtcgagaaattcaaattgtcataacttatcacacggaagtccgattcaggcacataatatatcgagacgctcgaaattgaacaacgaaagctctcgagaaattcaagtggtcataacttttcacacggaagtccgattcaggcgcataatatatcgagacgctcgaaattgaacaacagatgctctcgagaaattcaaatgatcataacttatcacacgtaagtccgattct

SEQ ID NO: 5088 - DNA, 426 bp, Glycine max
agcttgaaattgaacaacagaagctcacgagaaactacaatggtcataacatgtcacacggaagtccgattcaggtgcataatatatcgagacgctcgaaatagaacatcggaagctctcgagaaattccaatggtcataacttttcacacggaagtccgattcaggcgcataatatatcgagaagctggaaattgaacaacgaaagctctcgagaaactcaaatggtcataacttgtcacacggacatccgattcaggcgcataatatatcgagacgctcgaaattgaacaacgtatggtgtcgagaaattcaaatggtcataacttgtcacacggaagtccgattcatgcgcataatatatcgagacgcttgaaattgaacaacggaagctctcgagaaactcaaatggttataacttgtcaca

SEQ ID NO: 5089 - DNA, 382 bp, Glycine max
  unsure (1)..(382): unsure at all n locations
agcttgagaatggaggatttccttgagggtcctctcttatgcaatcatggaacacagctccaaactcaaaaatggaggacacatgaatgacaacgcaattcattcatggggctccgaaaaagggtaagaatggaggatttgcttgagggtcttctcttangcaatcatggaacacagctccaaactcaaaaatggaggacacatgaatgacaacgcaattcattcatggggctccgaaaaagggtgagaatggaagattgccttgagggtcctctcttatgtaatcatggaacacagctccaaactcgaaagtggaggacatatgaacagccctcagcaataacattcatgtggccctggaaaagaatgagaatggaggatt

SEQ ID NO: 5090 - DNA, 397 bp, Glycine max
  unsure (1)..(397): unsure at all n locations
agctngggtccaattcaaacagccctaacttttgacattgagatgctagaaattgagaaatggaagttcttgagaaattcaattggtcataacttttcactcggatgtcagattcaagagcaaaatatacagagacgctcgaaattgaacaacggatgctctctagaaatttaaatggtaaaattttttcacatggatgttatattcagacacataatatatcgagacgttcgaaattcaagaattcaaaaattaaagttctcaagaaatatagagatgaaaaattatgaccatgggtgtacgattgagacccatgatatatcgatatgctcaaaattcaaaaattggtccaattcaaaaattcaaagagccctaacttttgacatgggtgtacgat

SEQ ID NO: 5091 - DNA, 471 bp, Glycine max
  unsure (1)..(471): unsure at all n locations
ntcgcaaggcggggatgttcatgagcatatcagttcgttgtcgtgtagtcatgatctacataatgtcagatcatattactttgtatgtatgacaaaaatgaaaccaagatttttggacctctcatttatagttatacaaggttgcatacctccatgcttgttccatccttagctatctgttgtgatggagcaaattcaacaatataatcagttacagatagaagccactcaatttcttttctccacctggcctttctttctgaggacattggctccagctttgattgttctccgaaaacagatgctgcattgaatcaggaaacaaattattgaatggaaatttcattgagacttgagagatcacatttcagttagtcacagttataatatgcatgtgcttgaatntgaattgagatgactacactatctattaattntatagaaatcaagccccatgatngaaatcacact

SEQ ID NO: 5092 - DNA, 464 bp, Glycine max
  unsure (1)..(464): unsure at all n locations
taagctccttcaactgcacaaggctcttaatatttgaagagtatccttgtggaaccttcacccgatgaagacactgacaaaaacttatcttctccttccttgacaaagtatggcaggctgggggcaagtaaattttcttcccatcaaaccttggatgcaactgtgatcttatacccatatcagctagatcttgacgggtattcaatccatccttcgtcttgccttgaatgttaaggagcgtcccaatcacactgtcacaaacatttttctccacatgcataacatcaatacaatgtctaacgtcaagatcacaccagtacggaagatcaaagaaaatggacctcttcttccatatgcaactctgacntttatccttcttttgggtcttcccaaatacaatgttcaagtgttgaacccgctgatatacctgctcaccanngaacggtttcggcgtaatatcatgc

SEQ ID NO: 5093 - DNA, 429 bp, Glycine max
tctattggatgtgatgacaataagtatatcactaattattttataaaaatcgcggaaaaggattatagactcacaaatttaatccgaattgattatatataattgagcttatttggtttaagttttaactttctttcttgttcattatagaagattattatatatttttaagtcttttatctatattcattgcctttatatataaacttttaaatctatattaatatagcggcaaatatattttactcattaataatactcaaatatattttatttaacatctagtattatttgtgcttatcagtgctatcacattacatgtctcattatttttttaatccaaaatatgatagaattattaccgaacttatcagtgatatcactatacgtgtctctttattaaactaaaactagagcatattaataaac

SEQ ID NO: 5094 - DNA, 316 bp, Glycine max
agcttgcttattcaaatttcaagatacaagtgaactccccaagaagtgacatggcccacttgtggttttccaatctagcttacattctgcaaagttagaatatgaaaatccaattaaactcaaggaggtacctttggggtaccttaaaccaacattggttgtgcccttaaagtacttaataatccttttgacaacatttaaatggtattccttgggattttatttatatctttcacatatgcacacacttagcatgatgtcaagttggcttgtagtcaaatatatgagataaccaatcatacctctatactttgac

SEQ ID NO: 5095 - DNA, 456 bp, Glycine max
aagaactattactattgaagaattaattcatgttattttttatgagactaactctattaggccaagaaaggatatacttgatgatattacagatactttagaagatacgcatattcatgaagaagtccacaaagacaaagaagatggaaatagtagagactctcaatccaaagaaaatcaaataaacgtggatcttccaacggagtggagaacttcaaggtatcaccctcttgataatatcataggtgacatctcaaaaggggtaacaactcgacactttcttaaagatgcatgcaataacatggcttttgtctctttaattgaacctaaaaacataaatgaagccataatcgatgaacattgaattattgctatgcaagaagaattaaatcaatttgaaagaaatcaagtatgggaattagttgatagacccaatgatcatccaattattggaac

SEQ ID NO: 5096 - DNA, 423 bp, Glycine max
  unsure (1)..(423): unsure at all n locations
ntctgcagggaagctaagtgtgaagtatgcaatcctgcatatgattggcgctgcaaactgggtacccaccaatcatacttccactgttgccacaggtttgggtaaatttctgtatgctgttggaaccaagtccaaatttaattttggaaactatatttttgaccaaactgttaagcattcagaatcttttgctgtcaaattacccattgccttcccaactgtattgtgtggcattatgttgagtcaacatcccaatattttaaacaacattgactctgtgatgaagagagaatcggctctgtccctgcattacaaactgtttgaggggacacatgtcccagacattgtctcgacatcagggaaagctgctgcttcaggtgctgtgtccaaggatgctttgatngctgaactcaaggacacatg

SEQ ID NO: 5097 - DNA, 442 bp, Glycine max
  unsure (1)..(442): unsure at all n locations
agcttattctttatctagagtagttgagcacaacaacttactactgacatatattcgactttagtagtggacaatgtagttgagccttgcatcttgcatattcatgttactaagttagcaccgataaagtaatagcttccactagtgctttttctttcaactttatcaccaacatagtcaacatcataatagcttgtaagtctgaaactttctcttcttttgaacataagaccaagattagaagttccaattaaatatctacaaatatgtttaattttagttaggtgaacttccctttgttctttttgaaatcttgcacatagataaacattgaacataatatcagaaatggatgcagtgagatagaccagtgagttgcatccactttnnttgatccttgtccaatccaaggtatgtcatggtgtgcatnggagtcttcatt

SEQ ID NO: 5098 - DNA, 467 bp, Glycine max
  unsure (1)..(467): unsure at all n locations
tcttattcacataacaccaatagtattccatttataagcagagattgacgattcanattacatatttataagagaccaaccaaacacaaagcaaccacagcttataacacccgtaacaaatcctagaacatttgaatttgcaaaggcgggccatgaccactttattctaaaacttcaaacacaacacatacttattatttattgatacatgtattacagctatctctgcttgaaggttatgcatgttgatctcacttgcagctgcatgggtcgcaagtgcagtttgatccacagttgcagccaccgttctcagctgcaacacccatttcagcaccctcgaattgggccttcaccggcccaacacccaaaactagagtctcatttgtgatcttctcaacgtagtcaaaagagtacttgttgcaactgcaatacatganaaattaacatacataaggttggggaaaaca

SEQ ID NO: 5099 - DNA, 351 bp, Glycine max
tcctttacttgtactcatttttattgcgtgcggttgtaatccaactgccgggcatgttcagaacaaccagttgaatccagtatggaatgagcactttgaattcattattgaagatgcgtcaacgcagcacttgacagtaagaattttcgatgatgaaggcgttcacgcttctgaacttattggctgtgcccaagcttccttgaaggatcttgaacctggtaaagtcaaggacgtatggcttaagctggttaaggatttggaggtccatagagataacaaatacaggggtgaggtaagatagtatgttcttagtgtcttcgcaactttcatctagcattctagctgatcaat

SEQ ID NO: 5100 - DNA, 416 bp, Glycine max
  unsure (1)..(416): unsure at all n locations
agcttnttagttttagtagatgaagatgaatctgtggccacctcatggactcctctaaggataatagcatcatttcttgcactgaattgttgggagttggaagccatcttctcaatcaaattcctagcttcagcaggggtcatatcaccaagagctccaccattggcagcatcaatcatattcctatccatgttgttaagtccctcatagaaatattgaagaaggagttgctcagaaatctggtggttaggatagcttgcacacaatttcttgaatctttcctagtactcatacaagctttctccactaagttgcctgatgcctgaaatgtcttttctgatggcagtggtcctagatgcagggaagattttcttcaagaacaccctcttaatgtcatcccagctgaaaacggacct

SEQ ID NO: 5101 - DNA, 398 bp, Glycine max
  unsure (1)..(398): unsure at all n locations
agcttcacagaggagatagagttagggtccttnggagcggtttatagaggcacaattggtgacactaacacaagtatcgccgtcaagagattatagacaattgctgatgaaggggagagggaatctcgaactgaaattactgccattgctcgaacacatcataagaatttggtgaagctcattggtttttgcatcaatggagctaggaagcttcttgtttatgaatatgtcagcaacgggtctcttgcaagtcttctcttcaatgatgagaagcacatgtcttggagagacagactaaaaatcgccttggatgtcgctagaagagtcctatatctacatgaagagtgtgagggccgtattattcattgcagataaatcctctaaatatacttatggat

SEQ ID NO: 5102 - DNA, 419 bp, Glycine max
agcttggggagctaggaagactctctgcattattgaagaagttagagaaagatctcaagaacaagaataaatacgatgtatgttatccattcttgtggataaattcttcaaactttctgttatgggtttctttggactgtgattgccttacttttgtatgtgtattggttacctatatatggctgcaggatgagcaataccgtgccaaactaaacaagtcaaatgagaggactctatcacttatcaaagcaggaattgatactgtggtagcagtaggactgcttcaattggcacccaagacagttactcctcgcgtaactggggcttttggatttgtttcgtctctaatatcttgctatcaggtacctgctagtataattgtagtttaattccgttgtgcttctattttcctatcctat

SEQ ID NO: 5103 - DNA, 437 bp, Glycine max
agtcgctccaacaatttatatacttaactcctacctccttagccaatcttaggtgggctaagagggtttcatactcaactttattattcgtcatctcaaactcgaaccttagggattgctctaggattacttcacctatgctttctaggatgactccagccctactcccttttttcattggatgaaccatctacgtatagcttccacctctcagattatggttctgtagtggttgtcattttggctatgaagtttgctaggcactacgccttcattggacctattggctcatatttaagcctaaacttggacaacttgatcgatcaggctatcattcgactcgtgagttctggtttcttcataactgttcagatagggtggtcagttcaaaccacaatctaatgactttggtaggaagtatgggtctagtctcctac

SEQ ID NO: 5104 - DNA, 357 bp, Glycine max
  unsure (1)..(357): unsure at all n locations
agctnttccatctatctatatgtgagtcgataaggagtttcattggttgctatctggagtgtacagtggtacgcccagggtatgttgtagagttcttctttccataggcccttagacttatcgagtctagtacgcagggccctgaggatgactctgttagctgcctctgcttagctgttagtatgaggatgttcgacagaggtgactaggtccttgatgcctagccttgttaggaagtcttcataagtgtgagctctgaattgaggttgttgtcggtgacaatggtgtatgtgaggtcgtacctgcatatgaggggtttctaggtgactatttccacctcgttggctggtaatttac

SEQ ID NO: 5105 - DNA, 394 bp, Glycine max
agcttgagctaaaaggtttctccacataattttattaataagaggctcagttctacccactggccttttctccattaactcctttgtaggcctttctgtagctagtgccaatgctcctagagtatccataatgagatttacccataatagttgaactgttgttaggggaacgtctcccgaagaaactgctgcaataaaattgatcactagtgctgcaacattcacggttagttgaaactggatgaatttctggatgttgttatagacacatctcccccaccttaagacagtggcaacagaattgaagttgtcatctaagatcacaatgtcagaactctccttggcaacttcagttccttggatccccatagagagtccaatatcagcttctttt

SEQ ID NO: 5106 - DNA, 428 bp, Glycine max
  unsure (1)..(428): unsure at all n locations
tctcgagaaattcgaatggttataactnttcccacaaatgtccgattcggggacataactcatctagacgctcgaaattgaacaacgcaagctctcgagaaattcgaatggtcataacatttcgcacaaatgtccaattctgggacataatatatcaagacgctcgaaattgaatagcggaagctctcgggaaattcaaatggtcataacttttcacatggatgtccgatttgggaaaataatatatcgagatgctccaaattgaacaacgaaagctatcgagaaattcgaatggtccgaacttttcgcacggatgtccgattcggggacataactcatctagacgcacgaaattgaacaatggaagctctcgagaaatttgaatagtcataagatttcacacggatgttcgatttggggaaatatat

SEQ ID NO: 5107 - DNA, 492 bp, Glycine max
  unsure (1)..(492): unsure at all n locations
tattacggacacttgaatctcagcttcaagacaactctccttgttgttgtctacctcaacctctatttcatatattggcttgcctagtatagttgctactgttaataataactcttgtgtggtttccaattctgttgtttcttcttctagtactcctagcctttggcattctagattaggtcaccctaatggtcatgtaatgaaactagtcttcaatcattgtaacatttctccatcaaataaaaatttctcaggtttttgttcttctagttgtatgggaaagtctcatagattaccatctcacacttttgtttttgtttactctcctttggagcttattttcacatatttgtggggaccttctcatttgacttcatatgctggttataaatattatgtatcctttattgatgnttttntccaagtacacctggatatttcttatcaagtctaanggtgaaactctnntgttttcaagcttntaaatctatg

SEQ ID NO: 5108 - DNA, 473 bp, Glycine max
  unsure (1)..(473): unsure at all n locations
tcttatccaggcaattctnggtggtgaagctccttcttccttggcttattccctagtggatggtgcctcccctatcctcttctcctttgccttccgctgcatctccatggtgaaaaatcaccattgaaggacctcattgaagctcaaagatccagcctccatagaagctccacaagcaagcttccatcatgaatgaagtgatttctaatgttagtgtgtttagtcctctcatgatggacttgatccttggcaaaacaaaatgcatttagacagtggcaaaaaatgatatgcctctttttgtggaaacccaagattgctaattagacccttcagccaagttcattcctttactggttcttccaacgccatgtactctacctgtgtaatggataaagccaccatgggttgaagtgtagtcttccaactgagtagagtgttgcttccatgtncttcatctcaaattactacttagt

SEQ ID NO: 5109 - DNA, 133 bp, Glycine max
tattgcaagagaatgaatttagcacctgatcaatgaattatacaagcaacttctcaccacgatcacgctccccggatagggaggctgtctccatggcatctttgtaaggtaatccttctttgacaaacaatat

SEQ ID NO: 5110 - DNA, 432 bp, Glycine max
agcttcttagtctcagctgatgaagatgaattcatggctacttcatgcactcctctaatgacaatagcatcatttctggcactaaattgctgggagttggaagccatcttctcaattaaatttctggcttcagcaggggtcatgtctctaagggctccaccactgacagcatctatcatacttctctccatgttaccgagtccttcataaaaatattggagaagaagctgctcagaaatctagtggtgagggcaactggcacatagttttttaaatctctcccagtattcatataggctctctccactgagttgcctaatgcctgaaatatcctttctgatggttgtgatcctggaagcaaggaaatttttttctaagaatactctcttgaggtcatcccagctcgtgatggaccttggagcatggtaatat

SEQ ID NO: 5111 - DNA, 161 bp, Glycine max
agcgttgagccattgaatttctcgagagctttcgttgttcaattttgagggtctcgatatattatgcgcctgaatctgacctccgcgcgaaaagatatgaccatttgattttcatgaaagctaccgctgctcaatatctagcgtcttgatatattatgcgc

SEQ ID NO: 5112 - DNA, 412 bp, Glycine max
agcttgtgcatccaataccctgatgaggatgtcccatatgttcttaaaactggactaatccatttgcttccagagtttcatggccttgcaggtgaagacccacacaaacatctgaaagaattccatattgtttgctccaccatgaaacccccagatgtccaggaggatcacatatttttgaaggcctttcctcattctttagagggagtggcaaaggactggctatattaccttactccatggtccatcacgagctgggatgacctcaagagagtattcttagaaaaaaatttccctgcttccaggaccacgaccatcagaaaggatatttcaggtattatacaattcaatggagagagcctatatgaatactgggagagatttaaaaagttatgtgtcatttgcccgcacc

SEQ ID NO: 5113 - DNA, 415 bp, Glycine max
  unsure (1)..(415): unsure at all n locations
tcaagaattatggcctcatcaaactacttgtttcccgagggaaattctataaatagacctcccatctttaatggagtgggttaccactactggaaaacccgcatgcaaatctttatagaggcaatagatttaaatatttgggaagccatagaacaaggaccttatgttccctctatagtggccggaagtgcaacaatagaaaaacctagagcagattggactgaggaagaaagaagattagtacaatataatttaaaggccaaaaatattattacatctgccctaggaatagatgaatactttagggtttcaaattgtaaaagtgctaaggatatgtgggatacactacaagtaacacatgaaggcacaacanatgttaaaagatctaggataaacactttaactcgtgaatatg

SEQ ID NO: 5114 - DNA, 271 bp, Glycine max
agcttaagctccttcaactgcacaaggctcttaatatttgaagagtatccttgtggaaccttcacccgatgaagacactgacaaaaaattatcttctacttcttggacaaagtatggcaggctgggggcaagtaaattttcttcccatcagaccttggatgcaattgtgatcgtatacccatatcagctagatcttgacaggtattcaagccatccttcgtcttgccttgaatgttaaggagcgtcccaatcacactttcacaaacatttt

SEQ ID NO: 5115 - DNA, 386 bp, Glycine max
agcttcaagaataatggtctcatcaaacttcttattcctagaaggaaattcaattaataggcctcctatttttaatggagaggattaccattattggaaaacccgaatgcaaatcttcattgaggcaatagacttaaacatttgggaagccatagaagtagggccttatgtacccactatggtggctggaaatgcaacaatagaaaaacctatagaagagtggactgaagatgaaagaagattagtgcagtacaatttaaaggctaaaaacatcattacttttgccctaggaatagatgaatattttagggtttcaaattgtaggaatgctaaggatatgtgggacactctacaagttacacatgaaagcacaactgatgttaaac

SEQ ID NO: 5116 - DNA, 436 bp, Glycine max
agcttcttatccaaagctcatcttggtggtgaagctccttcttccatggcttattccttaatggatggcgcctcctctcacctcctttcctttgtcttccgctgcatctctatggtggaaaatcaccattaaaggaccccattgaagctcaaagatccaacctccatagaagctccacaagcaagcttccatcatagggtgacgaaagtggtcttttccacatcttcgggtgccatttttatttggttataccctgagaaaccatccataaatgagaaaagggcgaacttagctgtattatctactagtatatcaatgtgtggtaagggaaaattgtctttaggactggctcggtttaaatcccgatagtcaacgcacatttgcactttgccatctttttttgggacagggacaatgttggctacccactccgggt

SEQ ID NO: 5117 - DNA, 428 bp, Glycine max
  unsure (1)..(428): unsure at all n locations
tcttaacattcaaggcaagacaaaagatggtttgaatactcatcgagatctagctgggatgggtatacgagaccagttacatccaaggtctgatggtaagaaaatatacttgcctctagcttgtcatactttgtctagaaaggagaagataagtttgtgtcattgtttttgccatgtcaaagtgtctcggggattctctggaagcaatgtcttccaaggttattttgatgatgtcaaagaatcaagagttaagcaaagtttcaagcaaagattcaagaatcaagtttcaagattcaagactcaagaatcaagtttcaagaatcaagattcaagaataatcaagatcaagattcaagactcaagattcaagaatcaagaagaagactcaatcaagataagtattaaanagtttttgaaaacattgagta

SEQ ID NO: 5118 - DNA, 438 bp, Glycine max
agcttttccatctagctatatgtgagtcgataaggagtttcattggttgctatctggagtgtacagtggtacgcccagggtatgttgtagagttcttctttccataggcccttagacttatcgagtctagtacgcagggccctgaggatgactctgttagctgcctctgcttagctgttagtatgaggatgttcgacagaggtgactaggtccttgatgcctagccttgttaggaagtcttcataagtgtgagctttgaattgaggttgttgtcggtgacaatggtgtatgtgaggtcgtacctgcatatgaggggtttctaggtgactatttccacctcgatggctgtaattttacgaagtgatcttgcttttatccacttggtaaagtagtcgatggctactagtaagtatttgacagctcttgcggattatggca

SEQ ID NO: 5119 - DNA, 372 bp, Glycine max
  unsure (1)..(372): unsure at all n locations
agcttaactctcaaattccncttcatcccatgctcttttgatataggcattccttcattagggacaacaacctcagcaccaggtttgacaatatctgtcaatgggatcatgagactccttccgtccaaggtggtgagatccaacgttttaccagtaagggcctcaagaagggttatctcttggttgatcaccaaatcattaccatcccttctataaagagcatgcggcttctcatctatcacaaaaatgagatctgctgggatgacaccaggctcacggttacctttctctgggaaggtaatttttgttcctttcttccagccaggttttatctcgatagtcaaaatctcctccacatccccacatttgctg

SEQ ID NO: 5120 - DNA, 464 bp, Glycine max
tagtaaagctaagcactaacaatctcctctcttggcagaatttgtctaaaacatacttagacacttcctgagcaggtacgagcagttatgcaagtgggatcagcaacttccattatcagagtaatcaagcacagcggaatctgtagtctagacaagttgcaagtcgtttccaggatgtcaagacatctcacatgacatctgctttctgcttctgctccccctgtctccatgcttactgcagcatcttctatcagctactagtcttttccaggatgtcaagacatctcatgtgacatcagctttctgctccccctgtcttcatgctcttactagtagcttacatcagtcatcattggcagcagtctccccctcaaagtcatatacatacaactccccctcaaaatcatgaatcatgcatacatcgtatcctactgccatacatcatacatagtatcctactactc

SEQ ID NO: 5121 - DNA, 416 bp, Glycine max
  unsure (1)..(416): unsure at all n locations
agctngatccctcaaaaaaggataacgttaatgaaaatagtgaaaacaaaataattaaagagatagtttaccttgatgtggtttttgtagtatcccttcaccacaggatttgtaaaaaagtcatcctcagaatttatggactgtccctgactccttgcccattccacatactgtttctttccacccatgttctcatagttattcaccaaactcaacaccatcttgatcccatattttcttgcttcggctattgcgaaatccaagccctttttatttccaatccaagaaaacaacagagttaacaaatgggaaatgaagttttgttctatacactattagaaaaaatacaattagatagaaaaaaaaagtaattttccgtcactaaatttgatcattaatccattggtatgaaaatg

SEQ ID NO: 5122 - DNA, 451 bp, Glycine max
  unsure (1)..(451): unsure at all n locations
nntgcttncattgtagccacttaacctcaggacttattgagggtgatgaattaagaagaaattctgatgtgatggagattcttaagaagacaaggtttctacgtgtacatgatgctgacaatgagaagtctcccgagacaatcctcgagcatgagtatgaatttacttgcatacatcttagtataactaatactcttaacatgtttatgtaatttgaggccctccttgcattttcctgttttgcattacatgttctaattttggatccatttattttagtcgaattatatggcttggagacttgaattatcggattgccctctcctaccgttttgctaaggcacttgttgagatgcaaaactggagagcattgttggagaatgaccatgtacgcctatataactctgttcttttaatatctaattttctatcttttaacttcaactggatt

SEQ ID NO: 5123 - DNA, 426 bp, Glycine max
agcttatgttgcaaacatctacaatagacctcttcaacctcagcagcaaaatcaaccacaacagaacaattatgacctctccagcaacaggtacaatcccgggtggaggaatcatcccaaccttagatggtcgaatccttcacaacagcagcaacaacaaaaacagccttattttcagaatgctgctggcccaagcaaaccatacgttcctccaccaatccagcagcaacaacaacaacaacaatagccccggaaacatcaaacagttgaggcccctccgcaaccttcccttgaagaacttgtgaggcaaatggctatgcaaaacatgcagtttcaacaagagaccagagcctccattcagagcttaactaatcagatgggacaattggctacacagttaaatcaacaacagtcccagaattctga

SEQ ID NO: 5124 - DNA, 343 bp, Glycine max
  unsure (1)..(343): unsure at all n locations
agcttatacgacctatgatgtggttntgtgactaaattcaatttagacacaagtctttcacttgccatattggtacaactccctccatcaatgatcaccatgcaaactttgccattgatcaaacatctagtgtggaaaatgttttctctttgactttcctccatagatttcaattgatggccaagtaaccgcctaatcatcaacaattctccctccggtgttttctccacttcctcctcatcatcctcactctcttctcccttttcaacttcggactcactaatgtaatctccatctctaagaatcatggctntcttgttagggaactcatatagcataatgt

SEQ ID NO: 5125 - DNA, 348 bp, Glycine max
tgacgatccctgtttatacatcaaaagcaaacatattggtgacaaaaatcactacataaaaaagataaatcataaaaaatgcgaataaataataatctaaaagatttaaaccagataaagaaactaccaccttctataaaatccaacaaaagtaagtcggttatcaatataaagatttttatatcaactaataataaatccttctagatataatccacctgttgttagggtcaatctcaagcgctttcttaatatcaaattcggccaagtctaaatcagccaactggatatatgcctgggcccttctatagagagccttcacattagtactctcaaggtccagtacct

SEQ ID NO: 5126 - DNA, 430 bp, Glycine max
ttaagtcacctgcggcatgcaagcttccagattagtgtaccaaatgaccgctgctccagccaagctatcttggaaaaagtgcattaacaacttttcatccctagaatgcacccccatcttgcgacaatacatcttgagatggttcttaggacaagtcgtccctttgtacttgtcgaaatcaagtaccttgaattttggggggatgacgacgtctggtactaagcaaagattcgccatgtccgcgaacggataatcaccaaagccttcaacagctctcaatctctctttgatgagatcgagtttccttctttcttccgttgccggggatggtccttctatggacaagaatattggctgtgctgggaggttgggctgaggcagtatgttgggtgccggcccctcgatggggaccagggggtagaaatcgatg

SEQ ID NO: 5127 - DNA, 416 bp, Glycine max
tatacttcatcactagattgctgatgtgcatttccagcactgtcgctgcgtggaagttcatctcttacaaacactgctcagaagcataagccagggcttggatacagaagcgcaaacactgctatcttggactgaggcaaccttttaaagatctcacataggcattcatctggcaaagactcaatagatgtcttatgcttctgctcaaaccattctccactgatatcaaatggaacactgaagcgagacctcttctgaagaggaaggataacatgaacttgactgtcaagagacaagatgagacacggctccttcgggttaggataaataggaccaccatgactacaatcatcattttctgacaaaccaaacatgtctaaagtcaagatggcgacaaaactgcacataaataaata

SEQ ID NO: 5128 - DNA, 435 bp, Glycine max
  unsure (1)..(435): unsure at all n locations
ntggagtttccaagtgccaattcgtcttcttctttagtccagtcttcttctggcttcaattcatcagtgggctttccttctgtgtccagcatcttgggatgttcccagcctttgatgacagctttccaggttctgctatccagtgatttgaggaaggccaccattcttgctttccagtattcatagttggttccatcaagaattggtggtctgttcactggtcctccttctttctccatgttcatcagaatttatctccctagatctcactctgtgatttcgagtgttggctctgataccaattgaaattctgataccaggggacagatgtcgtaccggatgtcacgacatcacgcttcagaacatgcagattagatgcgtccgtatgaacagattaaacaagtnaataacacaagaggattgttaacccagttc

SEQ ID NO: 5129 - DNA, 438 bp, Glycine max
agctagaactcttgcacctccttgaagatcaactcatgacttctcccaaactttggctgcataaaccttctttggcccaccatctttggcctccaaagtgatggtgtacaatgaaccagaaaccacttgctgtttcgcagttaccaccttttcaaactccaaaagggcattctgcatagccatttacaattcaataaaaataaaatataattcatatataccacagaataaaaagataatagaagcccgttcgtggttattgaaattgaccctaccaatctatttattccttgacagtaatggaaatgcaaatttatcctaacaatcaattaatttttggtgaacaaaattttgggggaggggtgatgccccagaacaagacagataaagcctccgagctcaaagaacattcacagaagaacttacatttaccccact

SEQ ID NO: 5130 - DNA, 459 bp, Glycine max
  unsure (1)..(459): unsure at all n locations
ctatctactactcaagcttatgctgcaacatctgcgatgnacctgctaaacctcagcaacaaaatcagccaccacagaacaattatgacctctgcagcaacaggtacaatcccgggtgaaggaaccatcccaaccttagatggtcgaatccttcacaacagcagcaacaacaacaacagccttattttcataatgctgctggcccaagcagaccatacgttcctccaccaatccagcagcaacaacaacaacaacaacaaccccaaaaacagcaaacagttgaggctcctccgcaaccttcccttgaagaacttgtgaggaaaatgactatgcaaaacatgcagtttcaacaagagaccaaagcctccattcagagcttaactaatcagatgggacaatttgctacacaattaaatcaacaacagtcccaaaattctgacagattaccttctcaatctg

SEQ ID NO: 5131 - DNA, 426 bp, Glycine max
  unsure (1)..(426): unsure at all n locations
taagctccttcgactgcacaagactcttaatatttgaagagtatccttgtggaaccttcacccgacgaagacactgacaaaaacttatcttctcctttttggacaaagtatggcaagttgggggcaagtaaattttcttcccatcataccttggatgcaactgtgatcgtatccccatatcagctagatcttgacgggtattcaagtcatccttcctcttgccttgaatgttaaggagcatcccaatcacactgtcacaaacatttttctccacatgcataacatcaatacaatgtctaacgtctagattagaccagtatggaagatcaaagaanatggacctctgcttccatatgcaactcttacttttatccttcttttgggtctttccaaatacagtattcaggtgttgaacccgctgatata

SEQ ID NO: 5132 - DNA, 413 bp, Glycine max
  unsure (1)..(413): unsure at all n locations
tcttagtttcagatgatgcagatgggtntgtagctacctcatgcactcctctaatgactatggcatcatttctggcgctaaactgctgggagttggaggccatcttctcaattaaatttctggcttcaacacgagtcatgtctccaaaggctccaccactggcagcatctatcatacctttctccatattactgagtccttcataaaaatattggagaaaaagttgttctgaaatctgatggtgggggcaactggcacataatttcttaaatctctcacagtactcatacaggctctctccactgagttgtctaatacctgagatatccttcctgatggctatggtcctggaagcatggaanattntttctaagaatactctcttaacgtcatcccagctcgtgatggacctt

SEQ ID NO: 5133 - DNA, 429 bp, Glycine max
ctgttttcaatcttgtgcatctcgatatattacaggtctcaatcagacatccgagtaaaaagttattgttgttagaagttgcacagagcttcagttttgcattttgagggtctcgatatattacgggactcaatcggacatctaagttaaaagttattgctgtttgcatttgcttcgagctttcattttcaattacgagcgtctcgatatattacaggactcaatcggacatccgagtaaaaagttattgtcgttagaatttgctcatagcctctattttcaattttgagtgtgtcgatatattacgggactccgtcgtacatccgagtaaaaagtaattgtcgttagaattttctcaaagcttctgttttcaatttcgagcgtctcgatatattacaggactcaatcggacctctgactcaaaagtta

SEQ ID NO: 5134 - DNA, 440 bp, Glycine max
  unsure (1)..(440): unsure at all n locations
cggttacctccttcttcactacatcaagaattactgggttgcgtcttctctgtggttgtcttactcgtttagccccatcctctaaatttatccgatgcctacatgtggatgggctaataccaggaatgtctgccagggtccagcctatagccttcttatgcttcttaagaactgataacagcttctcctcttgctcatcaacaagggaggcaaatataattactggaaaacttttgctctcatctaagtaagcatattttaaatttgatggcagaggcttcaattctggtgtgggcggctggatagtggtagaaagagatggtttctcagcctgtacctcataaagaaagtcagaggtacgtgtacttcctgaaacatggttagttctatctgactntataaaatcaatctcaagaggtaaaacatcagacatgtgatca

SEQ ID NO: 5135 - DNA, 422 bp, Glycine max
  unsure (1)..(422): unsure at all n locations
tcaacattcaatatcgagcgtttcgatatgttacgggactgaatcagacatccgagtaaaacgttactgtagtttgaaggtgctcagagctaaggcattcaagtccgagcgtctcgatatactacgagactcaatcagacatccgagtaaaaagctattgtcgtttgaatttgctcaaagcttcggtattcaatttcgagcctctcgatatattacaggactccatcagacacccgagtaaaaaagttattgtcgtttgaatctgcttggagcttcaacattcaatttcgagcgttccgatattttacaggactcaatcggatagccgagcaaaaagttattgtcgtttgaatttgctcagagctttngtattcaatttccagcatttggatatattacgggtctcaatcagacattcgatt

SEQ ID NO: 5136 - DNA, 349 bp, Glycine max
agcttgccgccacagagttttccgactatgctcttgtgtggtggaacaagctacaaaaggagagagcaagaaatgaagagccaatggttgatacatggacggagatgaaaaatatcatgaggaagcggtatgtgccggctagttactcaagggacttgaaattcaagctccaaaaactaacccaaggcaacaagggggttgaggagtatttcaaggaaatggatgtgctcatgattcaagcaaatattgaagaagatgaggaggtaactatggctcgatttcttaatggtttgactaatgatatccgtgatattgttgagctgcaagagtttgttgaaatggattattt

SEQ ID NO: 5137 - DNA, 417 bp, Glycine max
  unsure (1)..(417): unsure at all n locations
agcttcatacttgcaacanaggagttgagcttgtaaaaaagattcgtcttcaaactcttagaggtgactntgagcatttgtttatggaggagtccgagtcaatttctgattatttttctcgagtattggccgtagtcaatcaacttaaaagaactggtgaagatgttgatgaggtgaaggtcatgaaaaaaatacttcgaactttaaatccaagttttgacttcattgttaccaacattgaagaaaacaaggatttaaagaccatgactattaagcaactcatgggctccttacaagcatacgaagaaaaacaaaagagaaaaattaaacaaaaggaggctacggagcaactactacaactcaacgtataggaagcaaactatgcatattacaagagccaaagaggacgaggtcgtg

SEQ ID NO: 5138 - DNA, 436 bp, Glycine max
  unsure (1)..(436): unsure at all n locations
agctngtaggttaagtgacagtgattggactggagatgaagatgatcggaaaagtactagtggatttgtgtttttcatgggggaacacaaccttcacttggatgtcaaaaaattagtcgatagtcactctttcaacttgtgaggcagaatacatagcaactacttcatacatttgtcatgcagtctggcttaggaatttgttaaaaaagttgggcatgtcacaagaatagccgaccaagatctttgttgatagtaagtcagccattgttcttgcaaagactccagtgttccatgatcgaagcaaacatattgatacatgttaccactacataagggagtgcatagcaagaaaggatgtacatgcagaatatgtgaagtctcaagaccaagtagctgacatcttcaccaagctgctcgagtaagaagacttaatcaa

SEQ ID NO: 5139 - DNA, 409 bp, Glycine max
gagcgtctcgatatattacgggactcattcagacattcgagtaaaaagttattgtcctttgaatttgctcagatctttgaaattcaatttctagcatcttttatattacgtgactcaatccgacatccgagtaaaatgttattgtcgtgtgaatttgctcagagctttaacattcaatttctagcatctcgatatattacgtgtctcatccgacatccgagtaaaaagttattgtcgtttgaatttgctcagagctcattattcaatttctagcgtctcgatatattacgggactgaatcagacatccgagttaaaagttattgtcgttacactatgctcaaaacttcaacattaaatatcgagcatcttgatatattacgggactcaatcatacatccgagtataaag

SEQ ID NO: 5140 - DNA, 437 bp, Glycine max
tgttgtcattaaatcttacatgaattgcctcttccatagtcaaggtttttgatttgtacactctatatgccttggatgattcaaagtatccaatattccaaaatcacattttgagtcaaactttccaaggttatccttggtgttgaagatgaaacactggcatccaaatgggtgaaagtcagaaatgttgggcttatgtccctcccacaattcataggaagtcttttttaagattgaccttatataaattatgttctgtaaataataagcagtgattgctgcttcagcccataagtgtttcagagttaagtagtcgttaagcattgttcttgccatttcctgaagagaatccattttcctctcaacaactccattctattgtgatagtcttggagtagaaacaatattatgaataccattctcttcatagaattttt

SEQ ID NO: 5141 - DNA, 419 bp, Glycine max
  unsure (1)..(419): unsure at all n locations
agaatcggacatccgtgtgaaaagttatgaccatttgaatttctcaagagcttccgttgttcaatttcgatcctctcgacatattatgcacccgaatcggacatctgtgtgaaaagtcatgatcatttgaatttctcgagagtttccgatgtttaatttcgagcgtatcgatatattataaccctgaatcggacctcagtgtgaaaagttatgaccatttgaatttgacgagagcttccgttgttcaatttcgaatgtcactgtatgtgatgcgcctaaattggacattcgagttaaatgttatgaccatttgaatntctcaagagcttccgctgttcaattctgagcgtctcgatatgtgatttgcctgaatcggacatccgtgtgaaaagttatgaccatatggaattctcaagagc

SEQ ID NO: 5142 - DNA, 421 bp, Glycine max
tcttgagtgggaagcacaatgagcctataaacattgtgcattatgctgacgacacggtctttgttggagaggcctcttgggataatattctagtgttgaaatccatgcttaggggatttgaaatggtctctggtttgagaatcaactatgcaaaaagccaatttgggggcgtcggttttcaggccaattggactcagcaagcagcccaattcctgaactgtagacagttggatacccctttctactatttatgcatgcctattgctgttaaagcttccaacatggtggtttgggagcctttgtttaacaaattacaagccaagctctcatagtggaatcagaaaattttgtctatgggtggtaaggttaccttgataaaagctgtcctgagtgcactcgctatatatcttctatctttctt

SEQ ID NO: 5143 - DNA, 321 bp, Glycine max
agctataccagctggtttattacaacctttttccattccacaaagaatttgggaggacattgctatggatttcatcactaatctacctccctcacgcggttatgctactatatttgttgtggtggatatactttcataatttgctcattttataccattgaaggctgcttttaatagcaaatctgatgcagatgctttcatttctaattatgacaagatgcatgggtattcaaatacattagtctttaatagagatcgtatttttatcatttcatttcggcagcagttgctcatagcacatggaactatataggctatgat

SEQ ID NO: 5144 - DNA, 410 bp, Glycine max
cggaagctctcgagagattcaaatggtcttaacttatcacatggaagatcgattaatgcgcataatataccgagacgctcgaaattgctcaacggaagccctcaagaaattcaaatggtcatatcttatcacacggaagtccgataaaggtgcatagtatattcgagaatcttgaaattgaacaacggaagctgtcgagaaattcgaatcgtcataacttatcacacggaagtccgattcatgcgcataatatatcgagacgcttgaaatagaacaacgaaagctctcgagaaatacatgtggtcataacttttcaacggaagtccgattaggtgcataatatatcgagacgcttgaaattgaacaacagaagctcttgagaaattcaatcgatcattacttatcacacg

SEQ ID NO: 5145 - DNA, 287 bp, Glycine max
agcttgatattgaacaacagaagctcacgagtatactacattggtcataacatgtcacacggaagtccgattcatgtgcataatatatcgagacgctcgaaatagaacatcggaggctctcgagaaattccaatggtcataacttgtcacacggaaggtcgattcaggcgcataatatatctagaagctggaaattgaacaacgaaagctctcgagaaacacaaatggtcataacttgtcacacggacattcgattcaggcgcataatatatcgagacgctcgaaat

SEQ ID NO: 5146 - DNA, 373 bp, Glycine max
  unsure (1)..(373): unsure at all n locations
tcatctatnttcctttagtttctgttacgtgatctctccgttttctaacttgaatatcaatatagacagtaataaacacatttaaatattaaatagtaatacctgagacaggaatttatatagcgattccccttggtagctgcatcaagcactgcaaaaccacaaaatatgaatgattattatgattttttttatgaatttttaattagagagagatgtgattgggaaattacagcaccagattcctgaaggcgaccggtggcatcggtgaagcactgcatgtgatggaaagaggtggatgtggattcggagagggccaatcggagggaagcgaagagagaagtgaaactctgagcgatggccaacgagtctc

SEQ ID NO: 5147 - DNA, 377 bp, Glycine max
tggaaggtagtcataccttacaaaacatatatatgtatgtttaggtagtgaaaataccttagatatgcatgtatgtaaacaaaaaaacacttcacaaaatatatatatgtatgtttaggtagaaaaataccttagatatgcatgtatgtaaacaaaaaacacttcacaaaatatatatatgtatgtttaggtagaaagataccttagatatgcatgtatgtaaacaaaaaatacttcacaaaatatatatgtatgtttaggtagaaagataccttggatatgcatgtatatagcaaaaataccttacaaaacatatatatgtatgtttaggtagcaagataccttggatatgcatgtatatagcaaaatacctcatg

SEQ ID NO: 5148 - DNA, 344 bp, Glycine max
  unsure (1)..(344): unsure at all n locations
agctntatgataggagtgtgaagcatgtgttcattggttatgatgcaagttcaaaaggctacaagttgtacaatccatacaatggaagattgttgtaagcataaatgctaaatttgatgaagaagagacatggaattgggagaaaaaagaagccccctatgatttattttcttattttgaagaaaatgatgaattaagtgtagcaccaaatgagatttctactccacctcctatacaaactcattcaattcatgaagcatcatcttctgaagggagttaaagtgaaagaccaagaaaaatgagaagccttctagacatatctaatggattgtttgaggtttatt

SEQ ID NO: 5149 - DNA, 410 bp, Glycine max
agcttaactctcaaattccccttcatcccatgctcttttgatataggcattccttcattagggacaacaacctcagcaccaggtttgacaatatctgtcaatgggatcatgagactccttccgtccaaggtggtgagatccaacgttttaccagtaagggcctcaagaagggttatctcttggttgatcaccaaatcattaccatcccttctataaagagcatgcggcttctcatctatcacaaaaatgagatctgctgggatgacaccaggctcacggttacctttctctgggaaggtaatttttgttcctttcttccagccaggttttatctcgatagtcaaaatctcctccacatccccacatttgctgaaatggaattgcatgtgtcaaatattgtcaaaaaacac

SEQ ID NO: 5150 - DNA, 431 bp, Glycine max
  unsure (1)..(431): unsure at all n locations
agcttcctcttatgagtgcatagctctttcataaatttagcatatcttggaatatgctttattgcatccagtagaggtatgtttacctctactcttctaaatgtttccaagatctccttctccgcctcttccattttcttgttggaaattgctcttggtgggaatggaagagggatatgctactactgtaagtcagaattaccagtagaagattcacctgcatagaaattgttaggcaacttactctttaaatttttgtcatcatctttctctggagttgagtgaggttgggcaggttcatttgcagatgaggaagatgctactagttgaggtccttgatactgttttcccaacctcaatgtaattgcactcacanttttgggattctgtacagattgagaaggtaatctgtcagaattctgggactgttt

SEQ ID NO: 5151 - DNA, 433 bp, Glycine max
tctcagatctggtcatggaaagacttggctactgccttcattaggaagtaccaatacaacacggatatggctcctgatcggaaccaacttcagagcatgaccaaacgggaacatgagtccattaaagaatatgctcaaaggtggagagacctagcaatccaagtcatcccacctatgacggagaaggaaatgatcacaattatgataaatacgttgcctacgttctactacgagaagctgataggatatatgccggctaactatgcaaacctcgtctttgccggagaaagaatcgagtccggactgaagaaaggcaagtttgaatatgactccaacgctgcccccacaacaatagaagagccccattggtgggcacacgcgaaaaggaaggagatacccacgcagtcaccactcgcccaacatggatgaaaac

SEQ ID NO: 5152 - DNA, 394 bp, Glycine max
agcttaaaggaagtgaacgaattagtatggtcagaaatgtctccgcattgattggtaaatctgttcctcaaattcctgaaaaatgcacagatccaggtacattcagcataccttgtattatagggaatagtaagtttgacaatgccatgctagatttaggagcctctgttagtgttatgcctctgtcgatttttaattctctatctctaggtcccttgcagtcaactgatgtggtaattcatttagctaatagaagtgttgcctatcctgttggtttcatagaagatgtcttaattagagttaatgaactgattttccgtgttgatttctatatcttgaatatggaagatggattttctcaaggatcacgtcccatcattctaggcagaccgtt

SEQ ID NO: 5153 - DNA, 426 bp, Glycine max
  unsure (1)..(426): unsure at all n locations
ntgagccaattcaaacgacaataactntttactccgatgtctgattgagtcccttcatatatcgagacgctcgaaattgaatgctgaagctctgagccaattcaaacgacaataactttttactcggatgtctgattgagtcccgtaatatatcgagaccctccaaattgaatgttgaagctctgagccaattcaaacgacaataacgttttactcggatgtctgattgagttccgcaatatatcgagaccctcgaaattgaatgttgaatctccgagccaattcaaacgacaataactttttactcggatgtctgattgagtcccgtaatataacgagacgctcgaaattgaatgttgaacctctgagccaattcaaacgacaataactatttactcggatgtctgattgagtcccgtaatatat

SEQ ID NO: 5154 - DNA, 361 bp, Glycine max
agcttcaacattcaatttcgagtgtctcgatatatgacgggactcaatcagacatccgagtaaaacgttattgtcgtttgaattggctcagagcttcaacattcaatatcgagggtctcgatatattgcgggactcaatcagacatccgagtaaaaagttattgtcgtttgaattggctctgagcttcaacattcaatttcgagagtctcgatatatgatgggactcaatcagacatccgagtaaaaagttattggcgtatgaattggctcagagcttcaacattcaattgcgagggtctcgatatattacgggactcaatcagacatccgagtaaaaagttattgccgcttgaattggct

SEQ ID NO: 5155 - DNA, 415 bp, Glycine max
agcttaataaatctatatatggtttaaaacaagcttcccgtcagtggtaccttaagtttcatgggataatttcttcatttggttttgaggaaaaccccatggatcaatgcatattccacaaggtcagtgggagtaaaatatgtttccttgttttatatgtagatgatattttacttgcagccaatgatcggggtttgctacatgaggtgaaacaatttctctctaagaattttgacatgaaggatatgggtgatgcatcttatgtcatcgacattaagattcatagagatagatctcgatgtattttgggtctatcacaggaaacctatatcaacaaaattgtagagagatttcaaatgaaagattgttcaccaagtgttgctcccattgtgaagggtgataggtttaatttgaa

SEQ ID NO: 5156 - DNA, 428 bp, Glycine max
  unsure (1)..(428): unsure at all n locations
agctngaaggtgtgtaacccaccattttccatagtataatactggtaatgtgtctactatcagtgttatcattttttctccgtcattgaggtgccacttgagctgccaggtctctccacctttgggcgtattctttgaatgatctgtgcccctttttgcacatgttctatagttgcatcctatccgaagacattatactagcactgcctaacgaaggcaaccagtaggtccttccaagaatggactcgagaaggttccaggttagtgtaccaagtaacagctaccccagtaagactctcttggaaggcatgtatcaacaattcctcatcttttgcgtatgcccccatcttccgataatacatctttatatggatcttggggcaagtagtccgcttgtacttgtcaaagtccaacaccttgaacttggg

SEQ ID NO: 5157 - DNA, 289 bp, Glycine max
cgcataccaaatgttcaccactactagaggatataccttcttcatgttgcatatgaatctcctcctctaaatcaccattctgaaagactattttcacatccatttgttgcaactcgaggtccacatgagcaactaataccaagatagtctgaagagaatctttcttagatataggagaaaaagattgtgtgtagtcgattacttctatttgagtaaattctttagcaacgagccttgccttgtatctctcaatgttgcctaatgaatcccttttggccttaacgactca

SEQ ID NO: 5158 - DNA, 431 bp, Glycine max
  unsure (1)..(431): unsure at all n locations
tcaacatcagaccacttccagggtgctggaactacttcacatggacttgatggggcctatgcaagttgaaagccttggaggaaagaggtatgcctatgttgttgtggatgatttctccagatttacctgngtcaactntatctgagagaaatcagacacctttgaagtattcaaagagttgagtctaagacttcaaagagaaaaagactgtgtcatcaagagaattaggagtgaccatggcagagagtttgaaaacagcaagtttactgaattctgcacatctgaaggcatcactcatgagttctctgcagccattacaccacaacaaaatggcatagttgaaaggaaaaacaagactttgcaagaagctgctatggtcatgcttcatgccaaagaactttcctataatctctgggctgaagccatgaaca

SEQ ID NO: 5159 - DNA, 375 bp, Glycine max
  unsure (1)..(375): unsure at all n locations
tgctcttctgctgtcaaatatgaacttcagttcatcttctgctcatgtactaacanagaancttgcaattcatcaagggagggtgcatctatatctttggactcttcaattgcacaaacaacataatcaaacgttggtgttacggatcgcaaaatcttttctacaatggtgacatctttcatcttctcgccatggaatcacatcatgtttcttatctccattgttcttgcaaaatagctagaaatagattcaccatccttcattgctaatgtctcaaaatctcttcttaagctctgagctgtgcacgcttcactctagcagaaccttgatactttttcttcatagaatcccanatgtccttgaaagtttctctgc

SEQ ID NO: 5160 - DNA, 359 bp, Glycine max
agcttgtaatcgattacacatatactgtattctattaccagagcagattttcagaatatattctcaacagtcacatctttttacgtggttcttgaatggctatcaaaggcctatatatatgtgacttgagacacgaatttgctaaaagtgttttagaacaaaaaggtcttatccttcttatagagcaaaatcgacttatcctcttacaaattccttggccaaattacttgtgattcaataacgaattatttgagtgctcacattgtacaatctatctcttttaagagagagtacttgttctcttcttcttcattctgaaaagggattaagagactgagggtcttcttttgggaaagaat

SEQ ID NO: 5161 - DNA, 423 bp, Glycine max
  unsure (1)..(423): unsure at all n locations
agctnnttagaaatattttaataagtattagaaaataatattactagagattaggtgtgttaaagttagttggactattttgtatacagaaatattttatataaaggacgtcgaagtattgcttatattcttaattatatatttcttatattctaaaaaatgtgtgagattaatttctttattattcaatttataaattatttgaaatacatgcatggatcggaatgcaagttgaatacccaaaatgttagttatataaacataaaatggtttataacacttctattacttacttgacttaatgtttaacactttaactaaaggatatttcaaaaagtgtcaatgaataaacaaatagataagatcacgttcgagttctttaattactcggaagtgcacaacagaaagtangtttgactgttg

SEQ ID NO: 5162 - DNA, 439 bp, Glycine max
tgtgttgcaaaagttggtggtattcatacaaagatgggtttgagcttagatgtcattactaggtggaattctaattttgtgatgcttgagagtgcccttgtatattgatgtgctttttgtagtcttgcaattgatgataggagctattcaagttgtcctattaatgaagaatgggagagaggacaaaaaatgtgtgattttttgcatcctttttttcaaatcacagagttgatatctggttcctcttacccaatgtctaatttgtatttcatgtaagtgtggaaaattgaatgtttattgcttcaaaatttgagtaataaagatgagttgattagaacaatggcaattgatatgaaaacaaagtttgataaatattggagtgattatagcaatgtgctttcctttgggtgcattctagatccacgctctaaaataaaaa

SEQ ID NO: 5163 - DNA, 440 bp, Glycine max
cgtcttgacatattagaagtttatacacatgataaaaacattctgaagaattgcttatgattaatagcatgttttcgttatatttcttttaataaaaagagattttaagtgaattagtaattagtgaggatagaagtaaaaagaaaaaaagaaaaaggaaaaaagccagtaatatgtaagttataagctagttgaagtaataagccaaaaattacataaataaaatagcataatgtatatctaataaatttattttgattaaaataactagtcaaactaacttatactagagtgttgtgttaaacacaattggaaaaaattgttgacggtaattattatttaaatacgtttatgatttatattattatcaaaaattataatcttaatagaaggaaaaaaacaacaccttaatggtttaaagctattgaaagcaaagaaaa

SEQ ID NO: 5164 - DNA, 435 bp, Glycine max
tgttcttaagcaaaagctaactaatgcccccatacttgcgttgccaaactttcaaaaatcttttgaaattgagtgtgatgcttcaaatgttgggattggggctgtgttgatgcaagaaggccatccaattgcttattttagtgaaaagttaagtggtcctacccttaactattcaacttatgataaggagttgtatgccttagtacgggctttgaaaacatggcaacactacctttatcccaaggaatttgtcattcatagtgaccatgagtccctcaaatatatcaaggggcaaggcaagcttaacaaaaggcatgcgaagtgggtggaattcctatagcaattcccttatgttatcaaacataaaaagggaaaaggtaatattgtagccgatgctctttctcggcgtcatgcattactttctatgcttgaaac

SEQ ID NO: 5165 - DNA, 397 bp, Glycine max
agcttgaaattgaacaacggaagctctccagaaactcaaatggtcataacttatcacacggaggtccaattgaggcgcataatatatcgagacgctcgaaattaaacaacgaatactctcgagaaattcaaatggtcgtaacttatcacacggaagtccgattcaggtgcataatacaccgagacgctcaaaattgaaccacgaatgttctcgagaaattcaaatggtcataaattttcaaacggcagtccgatttaggcgcataatacatcgagaatcttgaaattgaacaacggaagctatccagaaattcaaatggtcgttactcgtcacacggaagtccgattcaggcgcataatatatcgagacgctcgaaattgaaaatcggaagctctcg

SEQ ID NO: 5166 - DNA, 461 bp, Glycine max
  unsure (1)..(461): unsure at all n locations
ggatccttaagtcacctgcggcatgcaagcttcanattatggtggttcagccgaacagtacgaggctgcagaagatcaatttacaaaattgtgaatattatgacatcaccaacatcatatacatctgcaaatttcttgtgagtagatcaaattcattctgcccaaaattttagcacaactcaaagtgtgcagactgcagaagcaagccatacctgaaaaagtgtcattggaaaagagtggtgaatttccctgcctttgatttcatctggcacaatgtttctactaatggatatgttaaggtaactatacatcaaagccaaaaacttggcaatgaccaaagcttcataacattctttaactgactccaaaaaggtgaaaaactccttgcttcctctgatatccaagagacccacaaaggagacagctgcatagattggagccatgaggatgataatgataat

SEQ ID NO: 5167 - DNA, 409 bp, Glycine max
  unsure (1)..(409): unsure at all n locations
ntaccctctcttataacatgcagaattcgaaaattccactacataaagacaaatgatctaatatggttgaccagatgagcataaatatgacaggaactcactccaagggaaatcatgtccacaacaagctnggagtcatattcacaaatgatgcttgtaacacccttatcccacgcaatctgcaacccttgagcaatggcaagcaacttcgcattcagactcattgtgaagcggcaacaaccaaaaaaactgagaaatcaattacccaaattatcacgaatcaatctgtcaattccagcctgactcggattgcctaaggagcttctatcagtgttgagtttgtaatcaaaatcaaccggaggagaccaacacaccatacgactaggaagacttgagatattgtgatgag

SEQ ID NO: 5168 - DNA, 424 bp, Glycine max
agctttagaactagcatgatatgccatgaattcttcatacacactttcaagatcaggagctctttcttcttcataattgaaattctgataccaggggacagatgtcgtaccggatgtcacgacatcacgcttcagaacatgcagattatatgtgtccgtatgaacagattaaacaagtaaataacaccagagaattgtttacccagttcggtgcaacctcacctacatctgggggctaccaagccagggaggaaatccactctcaatagtgttagttcaaggtctaacagcccctgtttacaaccttctcacctaaccactacccgtgcgatctctacctaagagccactcttagatatgagaaccttcgctcactccctctcactcacactcccgtgtttacaattaagtcaaagacacacca

SEQ ID NO: 5169 - DNA, 430 bp, Glycine max
  unsure (1)..(430): unsure at all n locations
agcttggacaggaggataaggatgatacctgataactttatgcccaccccggatttcgacattttcaacttgaaaaagggtttaggggtgggggagtttaaaaaaagcatttaatcggaatgcattgatagtttaggtattttataatgaaatgcaatatatagtaatattgttgctttttctaacaattcttttaaaagttatatttgagatgattttgtaaaaatcattatagtaaattagtaatgtatcaaaattaaaattttaaaaatatgttgaggcatgatttaatttatgttattntatcaaaataaactctaaaatttattttaagaagctttaaggtcaaaattataatataaactttttagtgatactaaactcgttcattcatgattttntgttgtgtttcaaaattcacttttactaa

SEQ ID NO: 5170 - DNA, 398 bp, Glycine max
  unsure (1)..(398): unsure at all n locations
cgaggttaatcgtaaaactgcaaagacatgaccttgtgagaggtttaccaagaatgtcatacaaagttgatttactttgtgaagcatgtcacgagaggaaacaaattaaaacctctttctcaagcaaaaactctatttccacctaaagaccacttgaattattacatatcaatttgtttggtccaactagaacaacctctgtcagtcgaaagagatatagtctggtagtagtggatgactactcaagatggacatgggttatgttccttgctcacaagaataattccttagagatcttctttaaattctataaaaggattcaaaatgaaaagggagtatgccttacttcaataagaagtgatcatggtggagagtttgaanatgagaactttcatcta

SEQ ID NO: 5171 - DNA, 423 bp, Glycine max
tagctccatactcgaaggtggaggacacatgaacagtgctatgcaatgacattcaaggggcttcgaataaagtggagaatggaggattgcacttgagggtccacacttatgcaatcatgaagtatagctccaaactcgaagatggaggacacatgaacaacgctaggcaatgacattcatggggcttcgaaaaaagtggagaatggaggattgcacttgagggtccacacttaggcaatcatgaagtatagctccaaactcgaatgtggaggacacatgaacaacgctaggcaacgacattcaaggggctccgaaaaaagtggagaatggaggattccactttagtgtccacactaaggccatcatgaagcatagcttccaactcgaagatggaggacacatgaacagcgctaggcaatgaca

SEQ ID NO: 5172 - DNA, 440 bp, Glycine max
tgagactgagtgaacgatccatgatatcaccatattattgcatcttttccatgcagaatgcagaggatgggtaatgactggttgtgagatagttccatccacaaattcaaccttgttatttgcactcagagtagtaagcattgaacgactccgaggattataattcggtggatcaagaaatggagatacaagcgttattgctgaactttcactagggtgaaggtaataggaactatgaacattcaaagattggtcagtttctgtgttcatgttcaatcaatagagtagagattctcttgaaattgaggaagatagaaagaaatttcaaagaatcgaacaaaccgaaaatcgcagaagcagagaatggaccacataagcgaaaacagagtgtgaaaaaaaaatgatgcgaagagtggcacatcagacctcttcaatcgaag

SEQ ID NO: 5173 - DNA, 369 bp, Glycine max
cttgatggttgtgttgaatgcattaaaggtaatcaaaccaatagcaagaaattaagtgcatatagggctacaaacatcttggaattgatacatacgaatatgtgtgggctatttcatacaccttcgtggaatggtcaacaatattttatatcattcatagacaattactccagatatgcatacttggttcttatacatgaaaagtcacaatctctggatgtgttcaaaacatctaaagttgaagttgaaaatcaactcaacaaaagaataaagtgtgtcagatcttaccgtggtattgctccaagaacatgaggaaaataatggtatgatggaaaatgacccataaaataagggtagaaactttgtctt

SEQ ID NO: 5174 - DNA, 427 bp, Glycine max
  unsure (1)..(427): unsure at all n locations
ntggccgatccatatcctccaccaagaatatttnttgatagatattcttcacctcccatttcactttcttaggatccacctcctaaatcccatcaatatgtagacccctatgtagatttttccttctcctccaattaatagtaccatggaagaatattgagttgttgtctccttccactaaccatctagatctagatttttgtcttagaaatgactcattcctccttgccaatatccaaaattgctctttcaaatctatcttcatgttcaattcactctccaccaaaactctagcctcctcaagcttatccaactcattcattttcaaggcaatctctttctgtgatgaatgaaagtcttcaaaacatgtagcattccactctctaagcaccttctagaggccttttagatttcactgaggacatat

SEQ ID NO: 5175 - DNA, 430 bp, Glycine max
  unsure (1)..(430): unsure at all n locations
agctngctccatataaatatatatatatatatatagaggtatatatatatattgaggagaaagataattcaaggaaacaattcctatgatgagataagtagattatgattatgatgatggcaagttcaagagaaggtcgtcaagcaaagcaagagggtgacaccactaatattgacaagttctcccaggcatcgtccacttcaagacaatggtcagctttcataaatccaagaattgtgagagtgtcacgttcttttggagggaaagataggcatagcaaggtttgcaccataagagggttgagggacagaaggattatgctctcagttcccacagcaatacagctatatgatcttcaagacaaacttggactaagccaaccaagcaaagtgattgattggttgcttgaagccacctaaattgacattga

SEQ ID NO: 5176 - DNA, 426 bp, Glycine max
agctttaagagaagttgcaagagaaaagactacagcctcaatgtggctgaaactagagtcattgtatatgacaaagtcccttgcaaatcgactatgcttgaagcaacaattgtactccttcaagaagacagagtcaagaacagccactgaacaattggctgatttcaacaagattcttgatgatttggaaaatattgaagtaaagcttgaagaggaggataaagctcttttgcttttgaattccttaccaaaatcctttgaacatttcacggatgcaattctttatggcaaagatcaagacattgccctagaagaagtccaaacctcaataaggaccaaggagatgcaaaaacagcaagactccaaatctgaggataatggtgaaagcctgaatatttcaaggggaaggagtgaaaagaaggaaca

SEQ ID NO: 5177 - DNA, 531 bp, Glycine max
tatgctgcaaacatttataatagacctcctcagcagcaaaaccaacaacagaaaaataattatgacctttcaagcaatagatacaatctaggttggaggaatcatccaaatctgagatggacaagtccttcacaacaacaacagcttatccttcctttctagaatgctgctggtccaagcaagccatatgttcctcctccaatacagcaacaacagtcacaaaaaagacaacaagcaattgaggctcctcctcaaccttccttagaagagttagtgaggcagatgaccatccagaatatgcaatttcagcaagagacaagagcctccattcagagtctaacaaatcagatggggcagatggctactcatatgaaccaagctcaatccaaattctgacaaattgccttcataaactgtgaaaaatccaaaaaaatgtgagtgtcatcaccttgaggtctggcaaccaaattcaagtgcctacaccagtagtagcagctgcacctgaacctgtcaagctatattctacacctg

SEQ ID NO: 5178 - DNA, 564 bp, Glycine max
tcatgatgaatcaagattgattcaaagagttttgatgataacaaagatgatgaacacttcatgataacaaagatgatgatcttaagaatcaaagaatgagttcaagattgaatcaagtacacttcaaggatcaagaggaaagttgagttcaagaatcaagaatcaagtttcaagattcaagttccaagaatcaagatcaagattcaagacttaagattcaagaatcaagagaagacttaatcaagataagtattaaaaagttttttcaaaaactgagtagcacatgaatttttctcaaaacctgttcaccaaagagtttttactctctggtaatcgattactagattattgtaatcgattaccagtagcaaaatgcttttcaaaaagctttcaactgaatttacaacgttccaattgatttcaaaaagctgtaatcgattacaatgttttggtaatcgattaccaatgtgcttgaacgttgaaattcaaattcaaatgtgaagagtcacattctttcacaaagaaactttgtgtaatcgattacactgatttgggaatcgatta

SEQ ID NO: 5179 - DNA, 542 bp, Glycine max
ttataccgatatgggctcaaaacggcagcaggtatcttcagtttccgagtaagtggtctccagggtctgctcatcaattcagttggctgaacaacatcatcctctttttcatttccaaaaccaccttcctttggccatatagcattgccatagccataggtgccctttgtttcaaagagccacctattatgatcaaaatctccagtttggctcctcattagtgccgactttgttgatttcatcatggacaatctcctctccattttagacattccacttggtggaggaagtggaaggggacgtccattatctacagccacttcatctagctctgtgttcttgtatggctccttgcatcctgggcatataccacctcctggttttacagcatctatataacaatctctgcatatcttgaaatcacactcacatgggagaatatcagcaccacgttcatcgctcatcaccttagaatcacaaccaggaattgcacatgaagatcctcttgcaccagccatctgcggatgatttgcttcagattc

SEQ ID NO: 5180 - DNA, 510 bp, Glycine max
  unsure (1)..(510): unsure at all n locations
agcttggcaacaggtgaaaaagtgtctgaaaaatctattccagcttgttgtgtgtaggctttagctactaattgagctttgtatctgtccactaccattaggtttatatttgagcttgtaaacccatctatatccaatacagtgcttgtcagtaggtaaaaagactagagacaagtgttatttgcttctaatgcttaaatttcttcagtcataacttgtctccacttagggtatggaattgcttgatgataaaaccgtggttcataagtagtggagatttgattgatgaagttgtgataagatgagctaagtcgagccatgaaacaataatgtcatattagatatggttgagaagacgcgaagtagatgaaattagacaagtaaaaaggtctcttatgctttctggatgaccttctaagaattttttgtggtggcatagactcaaaaactctanttgaagaagtggtaggaagagggacaggatttgaccgagtctttgttgattgagca

SEQ ID NO: 5181 - DNA, 478 bp, Glycine max
  unsure (1)..(478): unsure at all n locations
agctttcaacttattgtgatgtattaaaccatccaaaaagttggtgtgatgatgcttttccaaaatagattatggtcaaaaatcctgcatccactatatacattattattatcaacaagatttaatgtcctgattaattgtataaagatttaaaaagattagcacgtactacagattttgaaatacttccttgaaaatcacattggtagntatatttcatagttttccttctttatcatgaatcagaattttcaatatacttttactttgaactcttgagaatgccacataaagttggccatgactgaaaactggtttaggtagatataacccaaccgattcaagagattgtccttgagatttatagattgtcatgacatatgaaactataattgagagtngcttctaatcatcttgaaaggccaggagaatgagatggtgataatgacattcatggaacatacaccaaactacctat

SEQ ID NO: 5182 - DNA, 426 bp, Glycine max
cttgcacttgagtgatgtagctccttgtagagcttgtaagcctttttttttcttcatcaacggagtcctttgcttcttgaagattacatggggtggaatggagatggaataatgatgacttggagatgccactttctggagaagattagtcaagaagaagctcaccaccatatgctgccattgataacatctttcaagttatatccttggactgctggactgggtttatttgtgcacaatatttcatgcgtctaaagcttgctgcactttgcccattttgtctcctatgatcggggttgaattaaggctcacacctgaccactatttatagcctcagtgtcacacaaaattctacggatagcttaatttctatccaaagttcacttgagtttgaaattgaatttgtgcagccaaattttggaacca

SEQ ID NO: 5183 - DNA, 519 bp, Glycine max
agcttatcatgagagatatgtcctaacctattatgccaaacattgcatttattgaaagggatggtattgattttacaagtgtaggacaactgagttggtgatgaagataggatgtataagccaacacttaattcagctgctccaatcgtcctcaaggaggagttgtcctgtatagaacaaccagtagggtgaaaaatcatactacaatgtagattagctatgagtcttgaaactaaaatcaagttgaatgtgaaagaaggaatatacaagacatcagtgaggtaaagttgatcattaaaatgtatagtgcctgccaaattggtttgaatttgagatccatcaggtagtttaacaagtataggtctaatttgcttaaggcattgaaactgagtttgggaaaaacacatatgatcagtagctccactatccaaaccccaagagtttatgttggaactataagcatgaagagtggcacagaaaatacctgaattctcattcttatgagagctaaccaactga

SEQ ID NO: 5184 - DNA, 319 bp, Glycine max
tgcacttgaggtatcaaaaccagtgggaggatctacatatactttctcttggataaaaccattcaagacggcactttttacatccatttggcaaagccaaaaatccattatcgatgcctatgctaataatatccttatcggcttctaatctaccaaccggagcatgtgtttcctcataaaccaacccttctaggagactatatactcggactacataacccatattgatttgcaaggactatagaaaactaataccactagctgataaatacccattttgctacgataacaggataataagcaggcttctcgactaatt

SEQ ID NO: 5185 - DNA, 597 bp, Glycine max
tcaagatgtgatgtagctccttgtagagcttgtaggcctcggatcttcttcatcaatggagtcctttgcttcttgaagattaatggcagtggaatggagatggaagaatgatgattggagatgccacttcaaggagaagattagtcaagaagaagctcaccaccataggaagccattgataagagcttgaaagtaagagaaaaggagtggagggaaagggagagaaggagcacgaaattttatgcgtcaaaagtagtctgaactttgaagtttaattctcaaatgatcaaagttgaaaaaatgcacacacatgaccactatttatagcctaagtgtcacacaaaattcgagggaaatttgaatttctattcaaattttacttgagtttgaaattgaatttgtgcagccaaattttggaaccaaaatttcactaattatgattagtaaattttagctatggttcagcccactaatccaagatcaagtccaagattctccactaaatgtgcttaggtgtcatgagacatgtaaagcatgaaggacatgcacggagtgtgactatatgatgtaacaatggggtgtagcaagcaaatgctc

SEQ ID NO: 5186 - DNA, 463 bp, Glycine max
  unsure (1)..(463): unsure at all n locations
agcttctatttcaactgagctctttatatttcgggaagagaaatcaactgctgagagaaaggtaattctatgttataattgaaattaaaccaatttacagttatctgttcaatattgaaatccccaacctagttaccctaaaattattgtacattggtagattctatattatgtttatcgcttaccaacttttgtaccctacttctgattctgctgcgttttgcatgccatttcaaatgaggacttgtacaaaagatcacaagagtataatatgagtctgctacagtacaatagtcgccttcagtcggatcttgaaataactaatgaggcacataaacgattggagacggagaaagcaaccattgttgaaaacctancaatgtgagaggccacaacaaggcattacaggaccaggtgccatctcttaaagtaagttgttttgtttgattattgattttaatgc

SEQ ID NO: 5187 - DNA, 559 bp, Glycine max
tggaggtaaactagatgccttggttaacctggtaacccaactggccatgaataaaaaatctgcacctgtcgccagactctgtggtttatgctcctctaccgaccatcacacaaacctttgcccttctgtgcaacaatctgaagcaattgaacagcctgaagcttatgctgcaaacatctacaacagacctcctcaacctcagcagcaaaatcagccacaacagaacaattatgacctctccagcaacaggtacaatcccgggtggaggaatcatcccaaccttagatggtcgaatccttcacaacagcatcagcaacaacaaccttattttcaaaatgttgttgaaccaagcagaccatatgtctccaccaatccagcagcaacaacaacaacagccccagaaacaacaaacatttgaggctcctccgcaaccttccattgaagaacttgtgaggcaaatgactatgcaaaacatgtagtttcaacaagagaccagagcctccattcagagcttaactaatcatatgggacaatgggctacatagttaaatcaacaaca

SEQ ID NO: 5188 - DNA, 563 bp, Glycine max
  unsure (1)..(563): unsure at all n locations
tgaccaggaattatttggatgggttggatgtggaattcaggttgttcctggtgcggagatgatggtactgtgggtgaaccagaagctgcagtttcttttggtgaggtagccatggaaaagcagagcgtttgaaatgatttcgtaaatctcagaaggctattgggaaatgctggtaaaaacacgaatgccaagcagatataaatttgaatgaagaatgtagaggggcgtgtgaagcaacggtcgaatttgctttgtagtgaacgtgctattaatgttaagtgattcgtttgggcacgttcagattgcagtagctgctataattcctctagcagacaaatgcccagcttgcccctcagtttttcaaactgatttgcatccaaagcctttgtgaaaatatctgctatttgttcctcagtgtcaacatgcttcagtgtgatcactttatcatcaacaagatctctgatatagggatgtctaatgtcaatgtgcttggttctgctgtgttgaacaggattcttaganatattaatagcactcatgttgtcacagtacaatgtcatgac

SEQ ID NO: 5189 - DNA, 497 bp, Glycine max
  unsure (1)..(497): unsure at all n locations
agctngtagaaaattcaaacaggaataactttttactcggatgtctcattatgtcccgtaatatatcgagatgcttgaaattgaaaacggaagctcgtagcaaatgcaaaacacaataactttttactcggatgtccgattgtgtctcgtagtatatcgagacggtcgttattaaaaacataacctcgtagcaaattcaaatgacaataactatttactcgaatgtttgattgtgtcccatagtatatcgagacgctcgtaattgaaaatagaagctcttagaaaattttaacgacaataactttttactcggatgtccgattgggacccgtaatatatcgagacgctggaaattgaaaacataagctcttaggaaattctaaagacaatgactttttactcggatgtacgattgtgtcccgtaatatatcgagactctccaaattgaaaacaaaagctcctagcaaattcaaactacaataacttttactcagatg

SEQ ID NO: 5190 - DNA, 620 bp, Glycine max
  unsure (1)..(620): unsure at all n locations
tgtgactcttggcaatttctttaaaactagtcacttaaaaagttgaattttgaaaaaatcttcagaaacaagtcacttgaagaattgtgacttttggaaatttatttttcgaaatcaaacactggtaatcgattaccattaaggtgtaatcgattacacatcagcaaacgtgactcttcattttaaattttgaaaattaaaacatttagaagctctagtaatcgattacacaagtttaaaatgatttgaaaatgtttaaacacaagttgtaactcttgaaatttgaaatcttaacattttaaaacactagtaatcgattactaccttctggtaatcaattaccagagagtaaaactctttggtaatgattttgtgaaaacttcttgtgctactcaatgttttgaaaaactcttttagtacttatcttgattgagtcttctcttgatttttgaatcttgatcttgattattcttgaatcttagatcttgaaccttgaaacttgattcttgaatctttgctagaaactgtgcttaactcttgattctttggcttcatcaaaataaccttggaagacattgcttncacaatctccccctttntgatgatgacaaatctgaaat

SEQ ID NO: 5191 - DNA, 577 bp, Glycine max
tctttgagaaaacttccttgagaagctggagcttagctactcacacccctgtcataactaagctcacctccttgagaagcttccttaagaagattcctaaagaagcttgagcttagctacacatacctctctaatagctaagctcacctccttgagatgagaagctagagcttagctacacacccgctataatagctaagctcacccccatgacagaaaacgtgagaatgccacaaaaagtccttactacaaagactactcaaaattccccgagatacaaggctaaaaccctatactactaaaatggccaaaatacaaggcccagacgaaggaaataactattctaatatttacaaagataagtgggctcatacttagcccatgggctcgaaatttaccctatggctcatgagaaccctagggccttcccttggatctctagccaatctactcggagtctcttacccaatgcccttacggggtaggattgcatcagtatgtttgtccctgtgtatgttggttttcaagagaaattgagtttttaactaagtggatgtgatatatttgttattgatga

SEQ ID NO: 5192 - DNA, 480 bp, Glycine max
agcttctgtccctgaaaaactggttcttatatgacaacagggagtgaagattgctgaaaaccctagccttgcaacaagtcctagggaagtagacctggagatggataagaagatccgcagtattgtgagtagcattttgaaagacgcctctgttcctgatgctggtgaagatgttccaacatcctccaccccgaatgtttctgtgcctaatgttgataaagatgttccaacatcttccgctccaaatgctgaagccctcccttcacccagtgaagaggaatcaacagaagaagaagatcaagccacagagaagacccctgcaccacgggcaccagaacctactccaggtgacctcattgacctagaagaggtagaatctgatgaggaacccattgccaacaagttggcacctggcattgcagaaagactacaaagcagaaagggaaaaacccccatcaagaggtctggacgaatcaaaac

SEQ ID NO: 5193 - DNA, 555 bp, Glycine max
ttcttgagaaaccttccttgagaagcttctttgagaaaacttccttgagaagctagagcttagctacacacacccctctcataactaagctcacctccttgagaagcttctttaagaagattcctaaagaagctagagcttagctacacatacctctctaatagctaagctcacctccttgagatgagaagctagagcttagctacacaccccctataatagctaagctcacccccatgacaaaaaaaacatgaaaatacaaaaaaaagtccttactacaaagactactcaaaatgccccgaaatacaaggctaaaaccctatactattagaatggccaaaatacaaggcccaaacgaagaaaaaacctattctaatatttacaaagataagcgggtcatgcttagcccatgggctcgaaatctaccctaaggctcatgagaaccttagggccttcccttggatctctagcccaatctacttggagtcttctacccaatgcccttgcaagataggattgcatcacatgtcatgatagttttgaaagcctcatttg

SEQ ID NO: 5194 - DNA, 521 bp, Glycine max
  unsure (1)..(521): unsure at all n locations
agcttatggttgaaggaatagctcgcccaagcgagctggttgcttaggcctgaaggcatttcatggcctangcgagccatatgctagcctgggcaagcttaggtccagaaaaatccacaaaaggacccttttgccccctttcccttgtatctttttgctttcttgatcaaaactcggagtgatccctggcttcgcactgtaactagtgccaaacaccgtaattcaactagcaatgatcaaaacatcatattgaatgatatttcccggatgaaattagggtctgacaacttgttatcatgataacttttgcattgactttttgttgatgaatgaaattagttaaatgtgttttagaaaaaacaagcttaaatatgtttaaggtcactgataaatgactaaattttattttgggtccctaataattattttggtgttttaagtgtttgatatatttaaacttttgttttgattccctattgtcagctaagtgatgatatgacaccatcacaatcgttaataat

SEQ ID NO: 5195 - DNA, 615 bp, Glycine max
  unsure (1)..(615): unsure at all n locations
tgagcttagctacacatacctgtctaatagctaagctcacctccttgagatgagaagctagagcttagctgcacaccccctataatagctacgctcacccccatgacaaaaaacatgaaaatacaaaaaaaaaagtacttactacaaagactacttaaaatgccccgaaatacaaggctaaaaccctatactactagaatggccaaaatacaaggcccagacgaaggaaatacctattctaatatttacaaagataaacgggctcatacttagcccatgggctcgaaatctaccctaaggctcatgagaaccctagggccttcccttggatctctagccaatctacttggagtcttctacccaatgcccttgcggggtaggattgcatcaaaaccttctcattacccaccacccagtcatccacaaaggccatccctaaaatgaaccacaaagtgtacctaccgcacttgcaatgacaaacaccacctttagcataaaccaaaacaccaaccaagatnatgaatttgcaacgaagagcctgtagaattcaccccaatttcagtgtcctatgctgacttgctcccatatctacttgatattcaatggtatcataac

SEQ ID NO: 5196 - DNA, 454 bp, Glycine max
  unsure (1)..(454): unsure at all n locations
agctttgcctctggttgctctgctagggttttcaagcattagagagaaggagaagagattagagcctcaatttcactgtctctgtgtgaggggcgtttatctccctacaaacattattttttaaatcccaatggtgggaatatgtgaaaatgagttttgaacccgatgtccaaatttgaaaatgatccaacagttaattagtctgctattatagttttattggaatagatttggatgtatgtgggaaaaagagaggattttgggagaggggaagggagaacgaatttgtgaggaagacatagcgtcaacaacagcagcctgctccttccttccaaaatgctgctggcccaagcagaccatacattcctccaccaatccaacaacagcaacaacctcaaaaacagccaacagttaaggcccctccacaaccttccctcggnaaaattgtttcgcc

SEQ ID NO: 5197 - DNA, 457 bp, Glycine max
agcttagtgacttaagtgtctccaaactgtaattgtaggagaagttgcctaagccatgtaattttgaatgcagcaacttccatggcatggcatttagcttcgatgctgggtctagcaactatattttgcttcttacttctgcatgagaacaaatttccttccaagagtcagaggtagacctcctatctgatggtgatcctacccaatcagcatcagagtaagaaacaatcttcgcattgcctttgtcttcatgtaagagtctacaacctggtgcatacttgatatatctaaggattgatatatctaaggatgcgcatgacagcatcccaatggctatcacaaggggcattgaggaattgacttaccacacttactgcaaaggtgatgtctagtctagtgatagtgaggtaattgagtttaccaataagtctgtgatatcttcccgggtcattcagta

SEQ ID NO: 5198 - DNA, 632 bp, Glycine max
tggcaaaggtagttttaggcctgtatacagggggtatgcgagctatgtggctattgataattaagctcaaaatttgttattaaccacatttaattttctttcccacaaatttggtgctaaggaaacactacaacatggacaagagatcgctgctaagaggctttcacaaacatctggacaaggtttaaaagaatttaagaatgaggttctgttatgtgccaaacttcaacattgagatcttgttaaagttcttggatgttgcattcaagaagatgagaaattgctcagatatgaatatatggcgaacagaagcttagacttctttctttttggttagtctcataatcagcttagaactgctaatatttggaacgatagaagccgtgcttggaaagcagacggttaccaagcattgtcttaaagggggaaaaaacacacgtgtctttcgtacatatataatttacttttatcattttgccacttttccaactaaaataaagaaataataaaagattgtattggaatttgaaatctttgtattatttctgtactatgttaataaataattgaactaaaaatcttacattaattttattctaaattattaaattctatgttttttcattcttttc

SEQ ID NO: 5199 - DNA, 466 bp, Glycine max
agcttcttattcaaggctcatcttggtggtgaagctccttcttccatggcttattccctagtggatggcgcctcctctcacctcttcttctttgtcttccactgcatctccatggtggaaaatcaccattaaagaacctcattgaagctcaaagatccagcctccatagatgccccacaagcaagcttccatcaggacgtgtaatcctctgaaggtgagggcatgtagccctctgaaggcaaggatgtgtagtcctctaaaggcgagggcgtgtagccctttaaaggtgagggcgtgtagccctccgaaggtgagggcgtgtagccctctgaaggcaagggcatgtagccctctaaaggtgagggcgtgcaaccctctgaaggcgagggcgtgcagccctctgaaggcgagggcgtgcaaccctctgaaggcgtgggcgtgcagccctctgaaggcgaggacgtgt

SEQ ID NO: 5200 - DNA, 550 bp, Glycine max
  unsure (1)..(550): unsure at all n locations
agcttgccttgccccttgatatatttgagggactcatggtcactatgaatgacaaattccttgggataaaggtagtgttgtcatgttttcaaagcccgtactaaggcatacaactgcttatcataagttgaatagttaagggtaggaccacttaacttttcactaaaataagcaattggatggccttcttgcatgaacacaaccccaatcccaacatttaaagcatcacactcaatttcaaaagatttttgaaagtttggcaacgcaagtatgggggcattagttagcttttgcttaagaacattgaaagcttcttcttgtttctctccccatttgaaaccaacatttttcttgagcacttcattgagaggtgctgccagtgtgctaaaatccttcataaatcgtctataaaaacttgttaagccatgaaaactccgcacctcggtcacggacttaggtgtaggccattcttgaatagccctaaccttctcctcatcaacttgcactccttttgaactcacaacanaaccaagaaacacaacatggttag

SEQ ID NO: 5201 - DNA, 569 bp, Glycine max
  unsure (1)..(569): unsure at all n locations
tgaccctggtagaaaaatgaagataatgagcttacaaggcttaagctctatagcttgagctcaacctttgaataaaaataaagaaaagactctagcaaaacttaagcattagagcttaagctcgagcctataattaaaagaagaaaaatcacttacaaggcttaactcgaggctcaaagaaaaattaagaaaataggcttaagattgacccttgaagaaaaatgaagaaaagactccgacaaaacctaagctttggagattaaactcgaccacacaagaatgaagaaaatgaacttacaaggcttaagctttacaacttaagcttgaacttgaaagaaacatgaagaaaagactttaacaaggcttaagctctatagcctaagtttgatccttgaagaaaaatgaataaaataggcttacaaggcttaacctctatagtttaagcttaggcctagaagaaaaatgaagaaaataggcttacaaggcttaagctttgtggcttanacttgacctttgaagaaaaatgaagaaaatactctgaaagaggttaagctntagggcttaatctc

SEQ ID NO: 5202 - DNA, 618 bp, Glycine max
agcttcttttgttaggttttgcttacgtttatgagtgtatcgcgattttgtgcttctttttgggttgctcccgttggctgacctttctgctcctattcattctctcttttcttttctttccggttactcttacattgtatctgggttttttatagcttcttttcttaggttttgcttacattcatgattgtttatcaatttttgttgccaggttgttctcctatccaggtgtcattctgcgattttgtgcttctttttgggttgcttttgttgtccaggtttgtatttccctcccagtggctaacctttctgttttgttttttggttccttttcattctctctattcttctggatctttcttttgggttcctctttaaccttttttggttaggttttgctaacgtctgttgctattttgttctcctatccaggtctgaaactgtgattttgttcgtcttttccgtttgcttttgttgtccaggtttgaattttcgtctcggtgtctgacctttcttttttgcattggttctctcattctctgaaggttgtgggtttttaaaacgtctgctacatttgtgctatgcctccattgccgagcgattttatatataaaaaaa

SEQ ID NO: 5203 - DNA, 462 bp, Glycine max
tcaacatcagaccacttccagggtgctggaactacttcacatggacttgatggggcctatgcaagttgaaagccttggaggaaagaggtatgcctatgttgttgtggatgatttctccagattcacctgggtcaactttatcagagaaaaatcagacacctttgaagtattcaaggagttgagtctaagacttcaaagagaaaaagactgtgtgatcaagagaatcaggagtgaccatggcagagagtttgaaaacagcaagtttactgaatactgcacatctgaaggcatcactcatgagttctctgcagccattacaccacagcaaaatggcatagttgaaaggaaaaacaggactttgcaagaggctgctagggtcatgcttcatgccaaagaacttccctataatctctgggctgaagccatgaacacagcatgctatatccacaacagagtcacact

SEQ ID NO: 5204 - DNA, 582 bp, Glycine max
agcttgttaagtattaagtggttatttaagcacgggtacttgacatgtgtgtagggttcaacaagtaacatttatatattagaacagttaaaataaaatatatttatgaatgacatgaaaaaataagcaatatacaatgacgaattcatttaagatgtgtaaaaaatttaaaagagagatattaagcgcatgtttgctttagactcatatttatctctagttatttgatgtgattttccacgtggattcgtgaatccaaacatagtctaagagaataatattacttaattgtaagaggtaaaaatcatttgtataatagtaagatttatttaagacatctaaaaagtggaaagaaatttaataagatgaagatagcctaaagacatctcaaaatatgtgtttattttgtcatttcttatttagtactagtgtgtaataatttttttttaaaaaaaaacaatagaacttattaaacactcataaaaaatatgcttacataagtctttctctaacagtagagtcttaaaaaatttgtgggttcttcatagactattaaacatcatataaatgtgagatgaagtt

SEQ ID NO: 5205 - DNA, 405 bp, Glycine max
tctgttttcaattttgagcgtctagatatattacgggtatcaatcggacatccgagcaaaaagttattgtcatttgaattttgtgtattcattttttagcatcaagaattattaaatgactcaatcggacatccgagtaaaaagatattgtcgattgaatttgctgacagcttgtgtattcaatttcgagagtctcgaattattaaatgactcaatcggacatccgagtaaaaagttattgacatttgaattctcttagagcttctgatttcaatttcgagcatctagaattattagaggactcagtcggacatcccagtaaatagatatggtcatttgaatttgcttaaagatactggtctaaatttcgtgcgtctcgatatactataggactcaatcggactt

SEQ ID NO: 5206 - DNA, 627 bp, Glycine max
  unsure (1)..(627): unsure at all n locations
agctttatatggacgaaagtgcaaaagtcctatttgttggtatgatgatggagaagcagtacttcttggacctgaaatgctacaacaaattaacgaacaagtgaagttgattcgagagaagataaaagcatctcaggataggcagaagagctattatgatagaaggaggaagccactagattttcaggaaggagaacatgtgtttatgaaggtttctcccgtaaccggagtcggaagagctcttaaggctaggaagttgacacccaagtatctaggtccgtatcagattttgaagaagattgggcctgtagctaggaattgcccacagctccagcagacgacaataacttttaactcgaatgttcgattaagtcacgtaatatatcaagacactagaaactgaaaacgcaagctcgtagcaaattcaaacgataataacttttaactcggaggttggattgagtcccggaatatatcgagacgctcgtaattgaaaacggaagctcgtagcanatgcaaacgacaatanacttgaactcggatgttcgattgaatcccggtatatatcgagacgctcgaaattgagtatagaagctcagagcaaatgcaacgacaataaattttact

SEQ ID NO: 5207 - DNA, 640 bp, Glycine max
  unsure (1)..(640): unsure at all n locations
tggttcccaacgctctgttcaagctctcccaaaatctagaggtaaatctaggatctctatcagatactatgctagatggcacaccatgtaacctgacaacctcacttatatacaaggtggtcaacttttccaaggaaaatcttatattaatgggaatgaagtgagcagacttagtcaatctatcaacaataatccagatagaatctaaacctctaggggttctaggtagtcctaccacaaaatccatggaaatattgtcccacttccactggggtatctctaagggttgtaacatccctgaaggtctctgatgttctatcttagccttttgacagactaggcatgcatacacaaactcactaacctctctcttcatgttgggccaccaaaacatcgtctttaaatcatgatacatcttggtagcaccagcatggatgctcanattattcctatgtccttcctctaagatcatcttcctaagttcaggcacattgggaacacaaatcctatcttggagtcttcaaactccatctgatccaatattgaaactactgtcctttcctgactctatagcctctaactgagtccttagaaaaggatcaatcttctgacctttcctgatatcacctagtaactcact

SEQ ID NO: 5208 - DNA, 527 bp, Glycine max
agcttgaagagatcttcaatggctacgaacaacaacgcatttcattttgcttcttctttccccaattacatatcacataaagtagaagattcaagctttcttttatggcgtcaactagttaagcctattatcaaatcaaacaaacttcaatgattcattgctaatccgcaaattccactttgatttctctttaaagaagatcatgaagttggacgtgaaaatccagtttatgaggcatgggagtagcaaaattaggtgttattaatctggcttcaatccattctttctacactgattttttctcatgtaatcggttataatcactcctatgaagtctaggagcacatccatgattacttccacaagcagagcatcgccacaacgcgtcagttgcacattcaacttcgagcaatgaaacttggaagcaagttgatgcaatagtttctatctcaaatcaaggtactcgctgatgctcttgcttcattaggaagccctataatgattcaagagctcgttgattcaattct

SEQ ID NO: 5209 - DNA, 583 bp, Glycine max
agcttcttttagaaaacttccttgagaatctagagcttagctacacacacccatctaaaaactaagctcacctccttgagaagcttccttgagaagctagagcttagctacacacacccctctaataactaagctcacctccttgagaagagaagctagagcttagctacacacccctataatagctaagctcacctccatgacaaaatagatgaaaatacaaaaaaaaagtccctactacaaatactactcaaaatgctatgcacacacatgacctctatttatagcctaagtgtcacacaaaattgaagggaaatttgaatttcaattcaaatttcacttgaatttgaaattgaatttgtggagccaaactttggagcctaaatttcactaattatgattagtgaattttagttatggttcatcccactaatccaagatcaattccaagattctcaactaagtgtgcttaggtgtcatgaggcatgtaaagcatgaaggacatgcacaaagtgtgactatatgatgtggccatggggtgtagtaagcaaatgctcaccctccccttctaaaattaattgga

SEQ ID NO: 5210 - DNA, 365 bp, Glycine max
tttgttctcaatatcgagcgtctcggtgtattacgagacttaatcggatatcggagttaaaagttattgtggtttgcatttgctacgagcttctatttttaattacgagcctctcgatgtattataggactcaatcgaacatctgagtaaaaatttattgtcttttgaatttccaacgagcttttattttcaattacgagcgtctccatatattatgggatacgatcggacatccgagtaaaaatgtattggcttttgaatttactacgagcttccgttttcgattgctagcatctcgagatactacaggacaccattggacattcgagtaaaaatttattgtgcgttgaatttgctcagaattt

SEQ ID NO: 5211 - DNA, 442 bp, Glycine max
agcttcaaccaaggggagatggaccattttctagtgcttgaaagaatcaatgacaatgcttacaaagttgagctgcccggtgagtataatgttagttccaccttcaatgtctctgatttatctctttttgatgcagatggagaatccgatttgaggacaaatccttctcaagagggagagaatgatgaggacatgaccaagaacaagggcaaggatccacttgaaggacttggaggacctattgatgaggacatgaccaagagcaagggcaaggatccacttgaaggacttggaggacctatgacaagggctagagcaaggaaagccaaggacgctctttaacaagtgctgtccatactatttgaatacaatgccaagtttcaaggagaaaagtccaaggttgtgagttgtatcatggccccaatggaggacttaatgacac

SEQ ID NO: 5212 - DNA, 478 bp, Glycine max
agcttcccgccaatggtatttgaagtttaatgataccattgttttctttgaatttaaggaaaatactgttgatcggtgtatatatctgaatgtcagtgggagtaaggttatttttttaatcctatatgttgatgatatattgcttgcaattaatgatctttgtaatatcccattttttgtaaactaatttaaaaagaatttttatttataaataaatagagttttagaaaaatgatgaggtttttgtaaataaataaataatgagaaataatgatttgaaggaaaaaaaaaagaaaagatatttgatttattcatttgatagggaataaaatagagttcctttttataaaatattaaaaataaataaatagagtaataataagttgtgtataccccaggtataaatagttctgttaagtcaaatttcagactgacgatgcctcatcttttcctcaatttcggttttctttattctcct

SEQ ID NO: 5213 - DNA, 581 bp, Glycine max
agcttatgctgcaaatatttacaatagacctcctcaacctcagcagcaaaatcaaccacagcaaagcaattatgacctctccagcaacagatacaaccctggatggaggaatcaccctaacctcagatggtccagccctcagcaacaacaacagcagcctgctccttccttccaaaatgctgctggcccaagcagaccatacattcctccaccaatccaacaacagcaacaaccccagaaacagccaatagttgagggccctccacaaccttccctcgaagaacttctgaggcaaatgattatgcagaacatgcagtttcaacaagagaccagagcctccattcagagcttaaccaatcagatgggacaattggctacccaattgaatcaacaacagtcccagaattctaacaagctaccttctcaagctgtcccaaatcccaaaaatgtcagtgccttttcattgaggtcgggaaagcaatgtcaaggacctcaccccgtacacctttcttatctgaaatgaacctgccaaacttcactctactccagaaaaaggtgatgaccaaaatttacctaacaat

SEQ ID NO: 5214 - DNA, 533 bp, Glycine max
  unsure (1)..(533): unsure at all n locations
agcttcctcttattagtgcatagctcctttaagaattcggcatatcttggaatttgctttattgcatccagcagaggtatgtttacctctacttttctgaatgtttccaagatctttttctctgcctcttccatttttttgttggaaactgctcttggagggaatggaagaggagggatgtgttgcttctgcaaatcagaattaccagtggaagattcacctgcacataaattgttaggtaaatttttgtcattacctttttctgggttagagtgaagttgggcaggttcatttgcagatgaggaaggtgctacgggttgaggtccttgacactgctttcccgacctcaatgaaatggcactgacatttttgggattttggacagcttgagaaggcagcttgtcagaattctgggactatttttgattcaattgtgtagccaattgtcccatctgattggttaaagctttaatggaggctctggtctctntgtgaaactgcatgttctgcatagtcattttgcctcaaaattc

SEQ ID NO: 5215 - DNA, 475 bp, Glycine max
  unsure (1)..(475): unsure at all n locations
ccttatgaccctgcatgaaccttgaaattatggcttcagacgatatcccatatatatatttgcacgtgtgcctgttgacgattgcttcacggacttcacgatctattgcctgtaaaaagaaatactttacctttaagaccttcaactcctgctcctcgatcaattagcattgcgccttcgcacgctctattccatctaccaccatctatatcccattctcaatgagatcccaagatccttggagtggagaaaatacttcatcaacattgcccagtggctataaagaccattaaaccttcggattgcaagctgcacaatactgctactcccacctgctgctattgaaatgaactcgttctactcgaaagatagaaaaactgcagtttcgttcttgactcgcactcattgttgttgtcacacactcactgctntcctcacgtgcactcaatatcaagcgcctactgaggatctctga

SEQ ID NO: 5216 - DNA, 609 bp, Glycine max
  unsure (1)..(609): unsure at all n locations
agcttcatgcttaagtatgtatggcaaaacttcattaatgttgttcaagacatacaagtgagcttgtaacaaatgttctacacttggagtaatgacatgcagtcctcttgaacccttaccacccactctgtcatcatgccgagactcaggaaggccaacaggtttagccttctctaagtattctgaacaaaattcaatggcttcttctgcaatgtacctctcaacaatagatgcttttggacgatatagattctttgtatacccttttaagatcttcatgtatcgctcaaccgggtacatccaccgtagataaacaggaccacaacatttgatttctctgaccagatgcacaatcaagtgaatcatgatgtcaaagaaagcaaggggaaaatacatctcaaactggcacagtataattgtggcctcattttccaactcatcaaacttgacaggatcaatgactntgctacatatagcatggaagaaaaagcacaggtgagttatcgctaacctgactttgtttggcaagatgtctcgtatagctacgactaacaattgttgcatgagcacgtgacaatcatgagactttaaccctacaagcttaagctc

SEQ ID NO: 5217 - DNA, 605 bp, Glycine max
  unsure (1)..(605): unsure at all n locations
agcttatgcatgcttaagcgctataactagaacaaatgaagttgtttctaaatttgcgcttaagcaaaaaattagtggtgcaagcgagaaaacacgtttcaaacttgattagaatggcttccaaatggaattcaattagaattgtcactgttatgtgaggatcatttccattgtttaagatatctatgatttgaagaagagaattattttttatattgtaagactttaaagggaaaattgatatttaatatacctttgtcttcaagtttctatttacctataaaggggagaaatgactattttattgttgattaagacacttatagtatttgttgagaaatattttttgttgttaagacgaaatcattttgaaaagataatgatgatgtattgattgatcacttgtagtttagtatttttctattcttcttagctcaattaacatctctttgagccttattttctcactttaacttagttttggtcttagacaaatgaatgagcttaattgataattatggcttattttcatatttttgtgcttacttgacctatttgggtttgcanggactattngatactacaaagatgaaatggatcgtgtg

SEQ ID NO: 5218 - DNA, 722 bp, Glycine max
tctggagaagagaagagccatttcatcaagttctattttattaattgtttttcaatgttgtagtattaactaagcatgatttgatttccattgtttgtgggtgggtttatgacggtggaggaatggaaggagaagtggacaacattgatattacagacagaaaacatagggattcctgaatcttctccaccttacatccatcaatgtgatcatgctgtctttgtattacctcccaaaaaataaaaagcaaataaaatctacttaaatttgtgaagtagaacaactaactataagataaacaacaacgtgcttgctaacgtattaaaatataatcaatttaattagaatgtattcttttcttttatataataataataatattaatgcatttgttaatttttttagtatttaaaatttattaaaaatataaataaataagagataataatcataccatttggtgattaaatttcaatcaataaaaaaatgtattttaaatagggggttttttatattctctatcatttataataactgctttttatacctcaattaccttttattagttaataatgtaaatgtttttacactaccaatacataaagtaaaaaatttcttgatatattttagaattaattacattgttatcatcttctaattaatttttaaatttattggatcatcttattatttaaaaattaattaggtctatgtttttaaaa

SEQ ID NO: 5219 - DNA, 595 bp, Glycine max
  unsure (1)..(595): unsure at all n locations
tcttagtttcagatgatgcagatgggtttgtagctacctcatgcactcctctaatgactatggcatcatttctggcgctaaactgctgagagttggaggccatcttctcaattaaatttatggcttcagcaggagtcatgtctccaagggctccaccactggcagcatctatcatacttctctccatattactgagtccttcataaaaatattggagaagaagctgttctgaaatctgatggtgagggcaactggcacatagtttcttaaatcgctcccagtactcatacaggctctctccactgagctgtctaatacctgagatatctttcctgatggctgtggtcctggaagcacggaaaattttttctaagaatactctcttaaggtcatcccagctcgtgatggaccttggagcaaggtaatacaaccagtcctttgccactccctctaatgaatgaggaaaagccttcagaaatatgtgatcctcttggacatctggnggtttcatggtggagcagacaatatgaaactcctttcaatgattgtgcgggtcttcacctgcaaggccatgaaactttggaagcacatgaat

SEQ ID NO: 5220 - DNA, 508 bp, Glycine max
  unsure (1)..(508): unsure at all n locations
agcttctatagaaggttcattcctaatttctctacaattgcttcacctctcaatgagctggtgaagaagaatgtggcatttacctggggtgaaaaacaagagcaagcctttgctttgctcaaagaaaagcttactaaggcacctgttctagctcttcctgagttttctaaaacttttgaactagaatgtgatgcctctggagttggagttggagttgtattgtaacaaggtggacaccctattacttattttagtgaaaaacttcatggtgccaccctcaaccaccccacatatgataaaatgctttatgccttaataagagccatccaaacttgggaacattaccttgtttccaaggaatttgttattcatagtgatcatcaatcacttaagtacattagagggcaaagcaagttaaacaaaaggcatgcaaaatgggtaaagtacctagagcaattccatatgttatcanatacaaaaggggaaaacaaatgtggagctaatgccc

SEQ ID NO: 5221 - DNA, 540 bp, Glycine max
agcttagactgagttcagcctaccatcctcagactgatggccaaactgaacggaccattcaatcattggaggaccttttaagagcgtgtgtcttaaagcagaagggaagctgggagagttttcttccattgatagagttcacttataataacagttttcactctaccattggcatggctccctatgaagctttgtatggtagaaggtgtaggacacccctatgttggttagagcccggagaaggccttaccttagatcggaagtggtaaaccaaccacagagaagatcaagttgatccaagaaaggatgaggactgctcagagtaggcagaaaagttatcatgataagaggaggaagggtttggaattcaaggttggtgatcatgtattcttgagagtcactctgtggactggggttggtcaagcattgaaatcccgaaaactcacacctcgctttattggtcctttcccaattcttaagagagttggccctgtggcataccaaaaggccttacccccgtctctttctaatcttcacaac

SEQ ID NO: 5222 - DNA, 485 bp, Glycine max
tgaaggcaaactggatgcgttggtcaacttggtaacccagctggccttgaatcagaaatctgtacctgtcgcaagggtttgtggtttgtgctcctctgctgaccaccatacagacctttgcccttccatgcagcaacctggagcaattgagcaacctgaagcttatgctgcaaatatttataatagacctcctcaacctcagcagaaaaatcaaccacagcagagcaattatgacctttccagcaacagatacaaccctggatggaggaatcaccctaacctcagatggtccagccctcagcaacaacaacagcagcctgctccttccttccaaaatgctgctggcccaagcagaccatacattcctccaccaatccaacaacagcaacaaccccagaaacaaccaacagttgaggcccctccacaaccttccctcgaagaacttgtgaggcaaatgactatgcagaacatgcagtttcagcaag

SEQ ID NO: 5223 - DNA, 561 bp, Glycine max
tcttagtttcagatgatgcagatgggtttgtagctacctcatgcactcctctaatgactatggcatcatttctggcgctaaactgctgagagttggaggccatcttctcaattaaatttatggcttcagcaggagtcatgtctccaagggctccaccactggcagcatctatcatacttctctccatattactgagtccttcataaaaatattggagaagaagctgttctgaaatctgatggtgagggcaactggcacatagtttcttaaatcgctcccagtactcatacaggctctctccactgagctgtctaatacctgagatatctttcctgatggctgtggtcctggaagcagggaaaattttttctaagaatactctcttaaggtcatcccagctcgtgatggaccttggagcaaggtaatacaaccagtcctttgccactccctctaatgaatgaggaaaagccttcagaaatatgtgatcctctttgacatctgggggtttcatggtggagcagacaatatgaaattccttcaaatgtttgtgcgggtcttcac

SEQ ID NO: 5224 - DNA, 434 bp, Glycine max
agctttacttcactgcttcaagtagtgcacgagctgcttccagagggaaacacgttgcctaaaagctactagcaggacaagaagatactgtgtccgatgggtatggagtatcagaagattcatgcttgcccaaatgatgaggactgcaattctaatgaggcatgaattcaaagaaatgtccaaatgcccttggtgcgaggcatcatggtacaaggtgaaggatgatgaggactacagttctaataaaaactcaaagaagggccctctagagaaggtgttgtggtatcttcccatcattccaaggtttaagcgtctttttactaatggagacgatgcaaaagaccttatttggcatgcaaatgggagaaactctgatggaatggtccgtcattcgactgattgctcgcagtggaagaagattgatggtttgtatt

SEQ ID NO: 5225 - DNA, 404 bp, Glycine max
agcttgaaggcaaactggatgcattggttaacttggtaacccagctggccttgaaccaaaaatctgtacctgttgcaagggtttgtggtttgtgctcctctgctgaccaccatacagacctttgcccttccatgtagcaacctggagcaattgagcagcctgaagcttatgctgcaaatatttacaatagacctcctcaacctcagcagcaaaatcaaccacagcagaacaattatgacctctccagcaacagatacaaccctggatggaggaatcaccctaacctcagatggtccagccctcagcaacaacaacagcagcctgctccttccttccaaaatgctgctggcccaagcagaccatacattcctccaccaatccaacaacagcaacaaccccaaaaa

SEQ ID NO: 5226 - DNA, 612 bp, Glycine max
tagtgtaagccttataaaattcttatttaatttaattatttatttttaaatttatatactttttaaaaaggggaatggtcatttaaaaaaatgttctaaaaatttatttaaaaacaaaatttgtaataatatattctaattaaataaaatgacaactctaaaacaagataataaatctaaatttaaagttaagacagaaggtgtgtaatcatttaaataaattaataaatatataatttcaaagtattgtgataaaatactaaaataacagcaataatggtatttatgtagataatgtaatttattaaatataaaataatttttgaataacttcaaatttaaccataataattagttttttttaaataaaaaaaaaacctaatttatttaattactctaaaaaacctaatttatcatggtagtataaacactatagaaacatttaacacgtcccataatctttattatgaaagtattttggaaagcataaaaacagaaacagaactataatataaactatctatagcataatcttattacaaatttgtcaaaattaacaaaattataatctttgatgatataccacagatcatagatgaattaaataaaact

SEQ ID NO: 5227 - DNA, 552 bp, Glycine max
agcttttctttgtggattcattttgctttcattccattaaaacatgtcaatgattcttcaaagcgttatcagttctaccattaaagagtttcgtaatggttgtccaccttgccccataaagctcgcaagccacaagttgctctcatcttccttttttgtaaagggaattttgttaagttgagaatcaagatgattgtgccacctaaatttgtagcttttacctagacaaaagtaatgaaaacccattattcaaaatacattacaaaaataaaattagaacataaggtactacaatataatatatatatatatatatatatatatatatatatatatatatatatatatatatatatatatattaatcttctataccaaagcaatggtttcgtagtactattatctcatttgtaaactctctctagtgaaataagaacaacacgaacatgattctaactaaataatcatacataagttgattatgattaaatataaataaaatatccaagctccgatgtcaaatctatcaaagatatacaaaccccaaccaat

SEQ ID NO: 5228 - DNA, 460 bp, Glycine max
ggatcggacatccgtgtgaaaagttatgaccctttttatttttccagagcttccggtggtcaatttcgagcctctcgacatattatgcgcccgaatcggacatctgtgtgaaaagttatgatcatttgaatttctccagaggttccgatgtttaatttcgagcgtctcgatatattataaccctgaatcggacctccctgtgaaaagttatgaccatttgaatttgacgagagcttccgttggtcaatttcgagtgttcctgtatgtgatgcgcccaaattggacattcgagttaaatgttctgaccatttgaatttctcaagagcttccgttgttcaattctgagcgtctcgatatgtgatttgcctgaatcggacatccgggtgaaaaggtatgtccatttgaatttctcaagagcttccgttggtcaatttcgagcctctttacataattatgcgcc

SEQ ID NO: 5229 - DNA, 522 bp, Glycine max
tctagaagctgggcttatctaccccatttcccatattgcttatgtaagcccagttcaggtggtactaaagaaaggggcatgacagtcatttgaaatgaaaagaatgacctaatcccaacgaggaatgccactagctggagaatgtgcatcgattaccgcaagctcaatgaagccacaaggaaatatcattttcctttgcctttcatggaccagatgttggagaggcttgtgggacatgcttattactgcttcttggatggatactttgggtacaatcagattgttgtggaccccaaggataaggaaaagatgaccttcacatgcccttttggtgtctttgcctatagacggatgtcatttgggctatgtaatgcacctgccacattttagaggtgcatattggccatttttgcagatatggtggagaaaagtattgaggtattcatggacaacttctcggtatttacttgttgatagctttggcaagcataccaactgtcgttgtacgtttcacatttataa

SEQ ID NO: 5230 - DNA, 584 bp, Glycine max
  unsure (1)..(584): unsure at all n locations
tctcaaagctatgttataggcgctctgataagagcatcacccttgttcataacagcctcaaattagtagctttgtggtgcatccttgctgcttacgtaacaccattctttatcattcctcacacggttcaccctcttctgggttggatcctgtatttgcttgctacttttgcactttgctcaattgcaatcaatatctttatgctaccaatgttaccagttttggtaccatggcttggaattgttggggtccttatggtcatggcatttccttggtatcctgatggggtagtgagagcactgtttgtctttgcttatgccttctgctctgcaccatttttgtgggcctctatggtgaggatagttcaaggtcttcagttatctctataaagggaagcttttctgccagcaagattgngagagtcttcgccaaattcatggtttaacaagttatattgagctgtctagttgggcacaccaatacaaggctgggacaaagagggaccttcttggcaagctcagccaacatagaagggagcatgatacattaaataccaaacatgcccagtaggcttcacaatgaat

SEQ ID NO: 5231 - DNA, 361 bp, Glycine max
agcttccaagagttgaagaggcgattgacaacagcttcagtgttaattttgcccgaccctaagataccatttgaagtgtattgcgatgcaagcgggcaaggcttggggtgtgtgttaatgcaagagggaagagtagtggcttatgcttcacgccaattgcgtcctcatgaagttaactatccgacccatgatttggaactagcagttgtggtctttgccttaaagatttggaggcattatttatacggtactcgttttgaagttttcagtgatcataagagtctcaaatacttgtttgatcagaaggaactcaatatgaggcaacaaagatggatggagttcctcaaggattatgattttg

SEQ ID NO: 5232 - DNA, 462 bp, Glycine max
  unsure (1)..(462): unsure at all n locations
agcttaagtgtgattcctttctttttcttatcattctcctcatgttgattcagtctcattagttccatttcgtgttcctataactntccaaataaagttgcaagagacatgttagaaagatcccttgattctgtaatagttggtacctttggctgtcattccctacttaaacatcttagaactttattaataagatcctcattgngaaatatctttcctaatgatgcaagatgatttactatgtgtgtgaatctcttttgcatatcatgtatagtttcattttggatcaatctacacaattcatattcatgggttaaggtatttattctagacctctntacatctattgttccttcatggggtactngtaanggatcccacatatcttttgcactctgcaattngtactctaaagattcatccattcctaaggagatgtaattatatttggctctaaatata

SEQ ID NO: 5233 - DNA, 390 bp, Glycine max
  unsure (1)..(390): unsure at all n locations
tgtagaactgtccaatatcgcgaagtgaacctcggatccctgtctgatacaatactggaagggaattcatgcaaccttaccacttctttgatatacaactccactagctnnttccatttatacttcatattcaccggaataanatgagcagaatcggtaagtcgatctacataatcagccacattcttcttcatgccatgccaccaaaaacttctcttcaaatcttggtacattctagtcattccaggatggaaactaagacgacttntatgcgcttcttccaagatcttaactttcaaatcatctaaagatgacacgcatatccttcccttgaatctaattaacccgggtgtgtccttctcanactctnacatccttatccccattaca

SEQ ID NO: 5234 - DNA, 302 bp, Glycine max
  unsure (1)..(302): unsure at all n locations
tggagctgacccatcaactgccctagctcttttatactggtgattcctangctcttgaccttgacttgatagaacctctttntaagcgaagtcatttgacttgatcccatgttntactaaagtgaacaaaattggtgcgaatcanaactctgacatctatcatgggtggaatggatgaatgcatgaagtggtagtgcttatctctacccgagtttaaaagattggctcagaatttgtaaaacataagcacttatacaatgaaggaaagctggagttgctgcacatgatgtccaacgttatgt

SEQ ID NO: 5235 - DNA, 247 bp, Glycine max
  unsure (1)..(247): unsure at all n locations
cctggagcaaatgagcagcccgaagcttatgttgcaaacatttacaatagaccctcctcacctcagcaagcaaatcaaccacaacagaacaattatgacctcttcagcaacagatacaaccctggatggaggaatcaccctaatctcagatggtctagccctcagcaacaacaacagcagcctgctccttcctcanaaatgttgtggcccaagcatacatacatttctcacaatccacaacagcaca

SEQ ID NO: 5236 - DNA, 308 bp, Glycine max
  unsure (1)..(308): unsure at all n locations
gcttctcgatatattatgcacctgaatcagacttccgtttgataagttatgaccatttgaatntctcgagagctntcgtggttcaatttcaagcttctcgatatattatgcacctgaatcggacttccgtgtgacaagttatgaccatnttaatttctcgagaacattcgttgttcaatttcgagcgtctcgatatattatgcatctgaatcggacttccgtgtgataagttatgaccatttgaatttctcgagagcttnncgttgttcaattcaagcttctcgatatattatgcacctgaatcagac

SEQ ID NO: 5237 - DNA, 363 bp, Glycine max
  unsure (1)..(363): unsure at all n locations
agctntngagcaattcanatggacattacttntctcatggatgttatatntatgcgcataatatatcgagacgctcaaaattgaacaacggaagctctcgagaaattcaaatggtcataacctttcactcggaggttcgattcatgcgcataatatatcgagacactcgaaattgaacaacggaagctctcgagaaattcaaatggtcattacttntcactcggaggtccgactcangcgcataatatatcgatacgctcganattgaacaattgaagctctttagcaattcaaatggtcataacttnttccctcggaggtctaattcacgcgcataatatatctacacgcacaaaattgaac

SEQ ID NO: 5238 - DNA, 310 bp, Glycine max
  unsure (1)..(310): unsure at all n locations
cttccttcatcaatgatcatcatgcanactatgccattgatcaaacatctagtgtggaaaatggtatctctttgactttcctccatagacttcaattgatggccaagtaaccgcctaatcatcaacaattctcccttcgatgttttctccacttgcttctcagcatcctcactctcttcttccttntcaacttcggaatcactaatgcactcttcgtctctaagaatcatggcattctatgtaaggcactcatatgcataatgatccaagccatggcaccgaaaacacttcacatcttgacttttttatt

SEQ ID NO: 5239 - DNA, 335 bp, Glycine max
  unsure (1)..(335): unsure at all n locations
tatgaagatgtagcatcctacagaagattgnatgggaaacttctgtacttgaacaacactaggcctgacatcacatntgccactcaacaacttagtcaattcttaagtaaacctagtatgacacactacaatgctgcctgtagggttgtaagtacctcanaggcagtcctggccgaggcctgttcttcccaagaaagccagaaatccagctactangaatttctgatgttgattggggtggttgcttagattcaaggaggtccatttcaggatattgcttcttcttgngagcatctttgatctcttggagagctaagaagcagcaaacagtctca

SEQ ID NO: 5240 - DNA, 347 bp, Glycine max
  unsure (1)..(347): unsure at all n locations
tgcagcttgagcanattanacgacaaaactttatctncggagttcgattgtgtcccgtagnatatcgagacgctcgaaattggaaacagaagcactgagcaaattcaaacgacaataactttntactcngatgaccgattgagtcccgtaatatatcgagacgctcgtaattgaaacagaagctctgagccaattcaaacgacaatatactttaactcgggtgtccgatggtgtctcgtagtatatcgacacgctcgtaattgaaaccggaagctctaagaaaattcanacgacaataacctttgactcggatgtccgattgagtcctataatatatcgagacgctc

SEQ ID NO: 5241 - DNA, 345 bp, Glycine max
  unsure (1)..(345): unsure at all n locations
agctnntgagcaaattaaatgacaataactntatacacggatgttctggtgagncccgtaatatatcgagaacgctccaatatgaaacggaaactcttataaatatcatacgacaataactttntacttggatgcccgacagagtgtcgtaatttatcgagggatgctccaaattgaatacggaagctcgtaccaaactcaaacgttaataacgttttactaggatgtctgattgagtcccgtaatatatcgagacgctcacaatttagatccgaagctctgagaaaattgaatagacaataactttatacatggatgtcccggtgagtcctgtattatatcgag

SEQ ID NO: 5242 - DNA, 271 bp, Glycine max
  unsure (1)..(271): unsure at all n locations
cggtagaattcaatgaatgtccttttaagtggggcctctatcttgntcttattttttctgctgaaaacaactagctctgtattgctatggaaactgagaacaccttttatagtcgaacgtggagttacatagntgtgtgtgaaatgcactcgatcaagtatttccaaacgggctggtctagtcaccctggtattctttggcttctctgcctcaacttttgggtttacactggtctgattatctgattgttcattatgactgttgctctctt

SEQ ID NO: 5243 - DNA, 352 bp, Glycine max
  unsure (1)..(352): unsure at all n locations
ctgcagctatgctganatattacaatagaccttctcaacctcattatcatatcaaccacagcagaacaattatgaccctctcagcaacagatacaaccccggatggaggaatcaccctaacctcagatggtccaaccctcagcaacaacaacaacagcttactcctttctttcaaaatgttgctggcccaagcagaccatacattcctccaccaatccaacaacagcaacaaccccagaaacagccaacaagtgaggcccctccacaaccttccctcgaagaactngtgaggcaaatgactatgcagaacatgcagtttcagcaagagaccagagccttcattctgagctta

SEQ ID NO: 5244 - DNA, 370 bp, Glycine max
agcttcactaccaacaaatgcttgtgctcatgctcaattggaagacaacaaacttaccataaaccaatcaaaagggagacattatcagaggtttgtaagctatgcagtaactgcataaagcatcaccaagcttcaaggaccaatcttttcttaatcaaaaaataatcttttcaagaatggcctagatctctctataagagacttccacttgacctcttgtctgaagatggtcatgtgtagcgtgagcgactccatacatcttcaatataaattcaatctgcctctcaatgaaatgagaaccaccattactaatcacagatcgtgggacccccaacattggtgaaattatctacttgaacagctggatcac

SEQ ID NO: 5245 - DNA, 438 bp, Glycine max
  unsure (1)..(438): unsure at all n locations
ttaacatcagaccacttccagggtactggaactacttcacatggacttgatggggcctatgcagttgaaaagcctggaggaaagaggtatgcctatgttgttgtggatgatttctccagatttacctgggtcaactttatcagagagaaatcagacacctttgaagtattcaaagagttgagtctaagacttcaaagagaaaaagactgtgtcatcaagagaattaggagtgaccatggcagagagtttgaaaacagcaagtttactgaattctgcacgtctgaaggcatcactcatgagttctctgcagccattacaccacaacaaaatggcatagttgaaaggaaaaacaggactttgcaagaagctgctanggtcatgcttcatgccaaagaacttccctataatctcttggctgaagccatgaacacagcatgc

SEQ ID NO: 5246 - DNA, 502 bp, Glycine max
  unsure (1)..(502): unsure at all n locations
ttgagcaaattcaaacgacaataactttttactcggatgtctgattgagtcccgtaatatatggagacgctcgaaattgaatgttgaagctttgagccaattcaaacaacaataactttttactcggatgtctgattgagtcccgtaatatatcgagacgctcgaagttgaatgttgaagctttgagcaaatttaaacgacaataactttttactcggatgtctgattgagtcccgtaatatatcgagacgctcgaaagtgaatgttgaagatctgagccaattcaaacgacaataacgttntactcggatgtctgattgagtcccgtaatatatcgagacgctcgaaattgaatgttgaagctctgagccaattcaaacgacaataactttttactcggatgtctgactgagtcctgtaatatatcgagacgctcgaaattgaatgttgaagctctgagccaatttaaacgacaataacctttttactcggatgtctgatt

SEQ ID NO: 5247 - DNA, 534 bp, Glycine max
  unsure (1)..(534): unsure at all n locations
agcttcaacattcaacttcgagcgtctcgttatattatacgactcaattagacatccgagtataaagttattgtcgtttgaattttctcagagcttcaacattcaatttcgagcgtctcaatatatgacgggactcaatcagacatccgagtaaaaagatattgtcgtcttaattggctcagagcttctacattcaatttcgagcgtttcgatatatgacgggactcaatcaggcatccgtgtaaaaagttattgtcgtttgaattggctcagagcttcaacattcaatttcaagcgtctcgatatatgacgggactcaatcaggcatccgagtaaaaagttattgtcgtttgaattggctgagagcttcaacattcaatttctagcgtctcgatatatgacgggactcaatcagacatccgagtaaaaagatattgtcgtttgaattggctcacagcttcaacattcaattttgagcgtctcgatatattacgggactcaatcangcatccgagtaaaaagtattgtcgtttg

SEQ ID NO: 5248 - DNA, 487 bp, Glycine max
gagcaacatttaacgacaattactttttactcggatgtttgattgagtttcgtaatatatggagacgctcgaaattgaatgttgaagctctgatcaaattcaaacaacaataactatttactcggatgtctgattgagtcctgtcatatatcgagacgctcgaaattgaatgttgaagctctgagccaatttaaacgacagtaactttttactcggatgtctgaatgagtcccgtaatatatcgagacgctcgaaatcgaatgttgaagctctgagccaattcaaacgacaataactttttactgggatgtctgattgagtcccgttatatatcgagacgctctaaattggactgtgaagctctgggccaattaaaacgacaataactttgtactcggatgtctgattgagtcccgtatattacgagacgctcgaaattgaatgtggaagctttttgccaatataaacgacattatctttttactcg

SEQ ID NO: 5249 - DNA, 474 bp, Glycine max
ctcaagcttgcctaattaacctgaaattgagagaaaattattattaaagacacaaaatgaaaatactaagtatttattacctatacttaacataaaatacttataacattacaaaataaccataaattgggagagtttaatacaatttatacaagttttatacacaaaagttagtcgttttcaccgactaacatgtaatcgattacacaatacttgtaatcgattactagtgtttctaaatgtttttattttcaaatttaaacatgaagagtcacatctattgatgtgtaatcgattacaccttgatggtaatcgattaccagtgactgatttcgaaaaataaattaccaaaagtcacaattcttaaagtgacttgtttttgaagagtttttcaaaagtcacaacctttgagtgactagttctaaaagagtcacaacttttaagtgactagttttaaaagagtcacaattttaa

SEQ ID NO: 5250 - DNA, 433 bp, Glycine max
agcttgtaatcgattacacatatactgtaatcgattaccagaggagattttcagaaaatattctcaacagtcacatcttttttgtgtggttcttgaatggctatcaaaggcctatatatatgtgacttcagacacgaatttgacaagagtttttcagaacaaaaaggtcttatcctcttaaaaagcaaaataattttatcctcttacaaattccttggccaaaactcttgtgattcaataaggaattattttagtgctcaaattgttcaatctatctctttatagagagatttcttcttttcttcttcttcattctgaaaagggattaagagaccgagggtctcttgttgtgaaaggattctcaacacaaaggaaggattgtccttgtgtgtttagaacttgtaaaaggaatttacaagatagtggaactctc

SEQ ID NO: 5251 - DNA, 568 bp, Glycine max
  unsure (1)..(568): unsure at all n locations
taatacctattaaacagttgccatgctgattgttgtctgtttttatgaaagctgtctgcctctcatcaataagaccaaatatcacttgtctcaatctatttgcttataacttagctatcaccttgtacatacatccaatcaaggagattggtttgtagtcatcaaatgactgggggtgtttggttttgggaattagagctatgaaagaagcattactgcctctatggaagctgccatgcacatggaattcatctacaaattttctgaagtcagttntcatcatttcccaaaattctctaatgaattttgaagttgaagccatcaggtccaagacatttgtccccatcacaactccacactgcttctttgatctccaaatccgaaaaaggaacagcccaaaactccctctgctcctggtttattgaaaagaattgcactctatcaagagtgggtctacaaaactactgctcaataatcttgtgaggaaaaattcacaacctccttcttaacatcattgggttctgattccatcacccttaatgaaaattccttgagaccattttatgtt

SEQ ID NO: 5252 - DNA, 511 bp, Glycine max
agcttaagctttgaattgagtgccattaccattgatgatggcataagggagaccatatctgtagatgaggtgtttccaggtgaacttttctacctccctaactgagatttcttgtaatggccttgcctcgatccacttagtgaaatagtcgatggtgaccaataagaacttgaccactcctagggcttttggcaatggtttcaatatgtccatgccccatatggcgataggccaagtggaactcaagctatggtggttgttgggaggggtgcgtggaacatctgtgaattcttacctccttgtaaagttgagggtgtcagccaataatatccgatacacaacactttggttgctagggaacgacctccgatatggaggccacatattctttcatgtagttatcgcatgacatagtctgcttgttggttgttcaagcatttgagtaagggtgttgtcaaccttactttcaatagttcatcgtcaaagatgacatagtaactatccttccttt

SEQ ID NO: 5253 - DNA, 412 bp, Glycine max
tattgaaaagctagtaaatacttggaaaatatccatttgctacatgttggtataaaaaagtaacaacgataataaaattaattaaggcgtacccaacaagctttctcttgctttgaaaagtcattaatcgtaatgaaaaataacaattaaacaacaattaataaaagagaagtcaagcttattgaaaagctagtaaatacttggaaaatatccatttgcaacatgttggagtaaaaaagtaccaattatctcactaatgaaacttatatataaaaaacatttattaattaatcaacatgcacctttcaataagcgataattaatttaataaagcgtattactagagacatggtgaccgaaatatttatcctcatctattattgattttatttataaaaaacttgtatgaaaa

SEQ ID NO: 5254 - DNA, 565 bp, Glycine max
  unsure (1)..(565): unsure at all n locations
agcttgcttctcctgaatatcaaatgcattttgggaaaaagaaatggacaaattaggattggttagaagagcactaactgaaattaaattgaatttgaatttaggaatgtaggcaacattatgcaagaataaggtattggttaagcaaaccgaaccaatggcaatgataggtataacatcattgttaggcagagtgacagttttatcagaaacaagttggtaagatcaaaaatgatgaagagaacaagaaatatgaatgttggcaccagaatctaaaagccaacaatcatgaagaaaattagaagtggatatagaaaggatcataccactggcagaagaaacaccttgaggaatgacagcattggtagcatgactttctaaaagattcatcaattggctatattgttgggcagtaagttgaaactgggaacctgagtcaccagaggaagatggtgagtgagacatatcaacagatacttgttgagcaaccttgtgtggtggtcaaaagatgaagaatgtttcttgacttctgangaaaactagtccctagataatttggaggata

SEQ ID NO: 5255 - DNA, 358 bp, Glycine max
tccttaatcacctcattaaggactagaacaccatgtaggatgtgtctgttttttatgaaagctgtctgcctctcatcaataagaccagatatcacttgtctcaatctatttgctaataacttaattatcaccttgtacatacatccaatcaaggagatgggtctgtagtcatcaaatgactggggatggttaattttgggaatgagagctatgaaggaagcattactgcctctagggaaactgccatgtacatggaattcatcaacaaatcttttgaagtcagctttcagcatatcccaaaattctttaatgaatttgaagatgaaaccatcacgtccaggacatttgtccccatcac

SEQ ID NO: 5256 - DNA, 521 bp, Glycine max
  unsure (1)..(521): unsure at all n locations
agcttgtgaatgtacctatgaattgtttttttgctatgtaaataagccaaccctgagagaatatggcgagtgaaattccgaatgacagattctattagggcaccacaatgatcacggacatatttattaattgaaccaagatgaacatattccagataaatataaaaacggtcctcaacctgcaagcacatatgttaaggttttaatgctgttacagaataatgattattaatcttgagtagctaattatgaagtaggagattgcttactatttcactgccaaaatactgtacgatgtttgaatgttttagattgctaagaancttaatttcctggagaaaaagaataaactattaagaaggataaagaggatatagaaaataacatatcttcaaaactattacggaacgataaatatatatagccaagcagcccaagccattattaagtaaaaccaaccttataagtattcaactacagtggacactaaaacgaaatgaggagcgtcactgcaaaatata

SEQ ID NO: 5257 - DNA, 538 bp, Glycine max
agcttttctaaactcattcacactaaacaggccattcaacaactcattatacgttctggtatcaggcaaacacccatatctctgcatctgatcaacaacatgcattgcccaccgtactctcccaccatgacacaagcccttgataaacgtgatgaatatgacaacatttggaggacaaccatcagccaccatattatcaataagccgataagcctggtcaagcatagaattcttgcaaagcacatccaccatgggcgtgtaaaccacaacatgaggctgaacctcacaattcaccatcctgttccacacttcaaaagcaccctgcaaatccccagccttggcaaacccgtgaacaagagtgctattagcagacacattcagcgggcaaaagcaatccttcctcatccgatcacaaactgccacaggctcagccacattcccactgcagcacaaaccattcaagagtgtgtggtaagcaacaacattcgggctaaccccctccctaaccataaccccacaagcagcttgcaggcagcat

SEQ ID NO: 5258 - DNA, 550 bp, Glycine max
  unsure (1)..(550): unsure at all n locations
ctaagcttgaataggatccttatatgccgaacccagaaactcttcacccttcctctctagcaactgccaaacattagtcaaagcagcactttccctaatcacacagcaaacaaggttttaaaaaaaaaatcactaacctttcatttcatgactaaaactaatacagacatacttcaatcaatcatcaattcacataattgaagaaataaagcacacaaactaatacacacatacttcaatcactcataaaaaattagtaactaccacacgttgataaaaaaaacacagacacacatgtctttgtaagtaacataccggttgggtatccaagcgggtgggtcgggaccgtaatccttgtagcaaccatagtacagcatctgatgaaaggagaagggaagttcanggttgaggatgctgttgctgacgtgctgccacatggcgggggtgccattgctgtgagtttcaatgatttctgcgagacccctgtggagagtggcagcgtcttctcttgcaattccatgggaatcaatatccgacacagtgatggaac

SEQ ID NO: 5259 - DNA, 354 bp, Glycine max
tgtaagttatatattcaatatattttatatgttttatttatgtagatgtttatattttgataaatgaatagttttaggtagtataagataacaattttgtatagtttagtttgaattgttaatgttatatatgccagattattttttgataaatgaatagttttaggtagtataagataataattttgtataatttattttgaattgttaatgttatatatgccagattatattttgataaatgaatagttttaggtagtataagataataattttgtatagtttagtttgaattattaatgttatatggtagattagatttaggtttatttgataaattattgttgcaaccta

SEQ ID NO: 5260 - DNA, 464 bp, Glycine max
aacttagagaagtgaaggcaggctattatggaacttgggcagcacatcctggtctaattccagtctgcatggagattttcaacaacaacatgggcaatgctcccaaccaaaataaagacaatgaaacgcgaagatggcgcaaacataaccgagcaagacctcttgcagataccaagaggagcctgcaccatggaaggtctcagatttatggttatatgcttcttaatttaattattaaactcttaataaatatcttaagtcacttgagccttttttcaatttaattaatttttttttattaaaacattggcactagtatgtgattaacctatctcttttgtattgatacaagattaagctattcttatctcaagttattttattaactatgctcttattgggacaaggaaaaaaggaactacttaaagacacttgacaaagggaatataaatactattcaaaca

SEQ ID NO: 5261 - DNA, 242 bp, Glycine max
tttgtggaaactgctctttggaggaatggaaaaaggggaatgtgctgcttctgcaaatcagaattacctgtggaaaaagattcacctgcacagaaattgttaggtaaatttttgtcatcacctttttctggaatagagggaagtttggcaggttcatttgcagatgaggaaggtgctaccggttgaagtccttgacactgctttcccgacctcaatgaaatggcacttgcctttttggggat

SEQ ID NO: 5262 - DNA, 421 bp, Glycine max
agctttcgagaaatttaaatggtcatcacttttcactcggaagtccgattcaagcgcatcacatatagagacgctcgaaattgaacaacggaagctctcgagaaattcaaatggacatatcttgtcactcggaggtccgattcaggtgcataacatatcgagacgcccgatattgagcaacggaagctcttgagaaattcaaatggtcattacttttcactcggaagtccgattcaggcacataacatatagagacgcccgaaattgaacaatggaagctcttgagaaattcaaatggtcattactttttcattcggaggtccgaatcaggcgcttcaaatatggagacgctcgaaattggaacaacggactcctctcatatattcaaatggtcataacttttcactcagaggtccgattc

SEQ ID NO: 5263 - DNA, 562 bp, Glycine max
agcttgtaacaaacctaattcataatattctcatgttaaaaataaacaaacaaaaatatcatttaaattgtgtctaactacattaaattgtattaaattgaatttaggtttaattactcatttgattcttatagtttcatatttgtaccttttagttcatatagttttaaaataatttttttagttcttataatttacattttaattctcttttagttcttgtagtttgaaattgatatttttagtccttataatttatattttaattctcttttagtccatataatttgaaagtgattttttaaatccttatattttatattttaattcccctttagtctttaccatcaaaatatgagtaatattatcaattacaattaactacaaaaatattaataagtaattcataactaatttattataacataatttgtaataaaaaattattgataatttataattaatttgtagctaattatttttatatgaaggagtgtaaatgatgagaactaaaaagatgacttttaaactataggagttaaaatgaaattaaaatttaatt

SEQ ID NO: 5264 - DNA, 468 bp, Glycine max
agcttctaaaagagtttggtagatctctaggttcagtggaaaaccatcagcccaatggcatgtctcagagatagacccatcagatgatctgcaagaaagagacataacaacagttcgaaaggtttgcattgattcaccattctttccaatatccatgggtttctcaaatgctccgcggattatgtgccgtagactctgtgcagaagggtctgatttatctaagggaagatgaggatgcaagaggagtcctgcttcaagaaccttcaaatttcttctcaaccaagcttcatactcttgttgacttggaaaatctgaactcctgaacagttgtataagctctagtggaagaaccactgactccatgcgtctttcaagctatttcatgaacagagacctagtcagttttaatattgtgattaaacagatgtaagaaagaaccattatgcagatgttcaaacatgacatttt

SEQ ID NO: 5265 - DNA, 484 bp, Glycine max
ttttatttttagtagataaggatgaattcgtggccacctcatggactcctctaagaacaatagcgtcatttcttgcactgaattgttgggagttggaagccatcttctcaattagattcctagcctcaacaggggttatatcaccaagagctccaccactggcagcatcaatcatactcctattcatgttgctaagtccctcatagaaaaattgaagaaggagttgctcagaaatctggtggtggggacagcttgcacacaatttcttgaatctttcccagtactcatacaagctttctccactaagtttcctgatgcctgaaatgtcttttctgatggaagtggtcctagatgtagggaataatttctccaagaacaccctcctaaggtcattccagctaaaaatggacctgtgagccaggtagtatagccaatcttttgccactccctccagagaatgaggaaaagtctttagaaagatatg

SEQ ID NO: 5266 - DNA, 553 bp, Glycine max
agcttaaacgtgttataataaattgaatgattgaaggacgtggatgttaaatctgaaccaatgaaacaggaacttgacttgtatctatgttcaagagtgcccgaatgcgatcccagttgacccaattatcgttagcgtacgaggcaacaattacactaggtaagctagacaaaccaacaatagggcaaagaggggtcacactcaccccactaaagatgatgtggcacgtaattgggcaaagagagtgatgtagctccatgtggagcttgtaggccttgaatcttcttcatcaatggagtcctttacttcttgaagaagaatggcagcggaacggagaaagaagatgattggagacccacttttaggagaagatgcgttaagaagaagctcaccaccataggaaaccattgataaaagcttgaaggaagtttaacatgagtggagggagagggagagaatgaccaccaaatttagtgcctcaaatgagggctgacttttgaggataatcctcaaatgatcaaagttgaaataatcacacacatgacttttattt

SEQ ID NO: 5267 - DNA, 344 bp, Glycine max
agcttgcaatcgattacatcatttgtgtaatcgattaccaggcacaaaaaaattcaaatttcaagtctgaggagtgacaactcttcacaaactaactgtgtaagcgattactacatttatgtaatcaattaccagtaaggaattttcgaaaataactcccaagagtcacaactattcaagaagtttttgaatggccatcaaagccctataaataggtgtcttattattctcaaaatattccttggccaaaacacttgcaaattcaataaggaatcttgctcaatctttaattgtaatatccttcttttaaagagagaaaattcttcttcttcttattcaaagag

SEQ ID NO: 5268 - DNA, 275 bp, Glycine max
tgaccaggaattatttgtattggttggatgttgaattctggttgttcctggtgcggagatgatggtacagcgggtgaaccaggagcggcagtttcttttggtgaggaagccatggaaaaacagagcgtttggaatgatttcggaaatctcagaaaactattgggaaatgctggagaaaacacgaatgccaagcagatataaatttgaatgaagaatgtataggggcgtgtgaagcaacggacaaattggctttgaggggaacgtgctattaaagt

SEQ ID NO: 5269 - DNA, 507 bp, Glycine max
agcttggaagaagaatacatggagatttcatctgaatatggcgccactaatggaggaaataaagtttacatactaaagaaagccttatatggtctcaagcagtctcctcgggcttggtttattaggttcactcaagctatggtatctttggggtacaagtaaagccaaggcaatgatgagcttgaaaaatagaccctgagggagaggttagcagcccaatttgagatgaaggatcttatgaggctaaagtactttctcgggatagaggttgcttatactttacgaagggtatattcatttctcatagaaaatatatacttgatctcctcaaagaagctgacaagatgggctgtaaaaccactggagcacccatagagcaaaatcacaagattggaaatgatgaagaaagcccaaaggtatagaagacacaataccaaagactttggggaaaacttatcttttattccccaccaggcttgtatagcctatgcagatagtgtggttagt

SEQ ID NO: 5270 - DNA, 400 bp, Glycine max
agcttatgagcatttgaatttctcgtgaggttccgttgttcaatttctagcgtctcgatatctgatgtgcctgaatcggagatccgagtgaaaagttatgacaattttaatatatcgagagcttccattgctcaattttgagcgtcttgatatctgatgtgcctgaatcggacatccgagtggaaagttatgacaatttcaatttctcaagagctttcggggttcaattttgaacgtctccatatgtgatgcgcctgaatcggaccttcgtgtgaaaaggtatgaccatttgaatttctcgtcagcttgcagtgttcaattttgagagtctcgacatctgatgggcctgaatcggacatctgagtggaaaggtatgacaattttaatttcttgagagctt

SEQ ID NO: 5271 - DNA, 608 bp, Glycine max
agcttgtccttcacggcaaacatgatagcactggcatgttctgcagcattgcctacaattggaagcaagatgacagaaataaaagccactgacatattcaatgactcagatgctccctgcaagagaccagaaacacaatgtcaatgaatgaacttatgatgcacaatttatggataataggaatattgtgaatgtatgaatacagagttttgatgatgtcaaagtaaaatcaaacaaggttgtttcaacaaacattattgctttaagattaattcaaggtcaaacaaataagatcaagaaaaagataaggtctcaaataatctcactggttgattgatttttgccttaaaacaaattgtttccaagagatcaaaggctctagtattcgattactaggcaatgtaatcgattaccaggagacaagtttacaaatcaacttttataaaaagatttgaaattgaatttttgatcttgtaatcgattaccagatgtttgtaaaaagattaccagtaaccgaactcttgaaattcaaaatgaaaagtcataccctttaaaatataactgtgtaatcgattaccagtgagaatatttcagaaaagctttttgaa

SEQ ID NO: 5272 - DNA, 476 bp, Glycine max
aactaagcttataagtctcttggattgaaacagcctcccgccagtttttttaaaatttatgagtcatttcttcattcgctttgaagagaatgtcatggatcactgtatataccaaaaggttagtgggagtaagatttggttccttgtattatatgtagatgatattctgcttgcgactaatgataaatgtatgctatatgaggtgaaacaatttctctcaaagaactttgatatgaaggatatgggagaggcatcttatgtcataagcataaagatccatagagaaagatctcgaggcattttatgcttgtcttaagaaacctatattaacaaagtttttagagagatttaatatgaaagattgttcaccaagtgtagctcccttgtgaagggtgacaaacttgctttggtcaatgccccaaaaatgattttgagcgggaacacatgaaaaatattccatatgctttagcagttgg

SEQ ID NO: 5273 - DNA, 465 bp, Glycine max
atactagcttcacatcagaccacttccagggtgctggaactacttcacatggacttgatggggcctatgcaagttgaaagccttggaagaaagaggtatgcctatgttgctgtggatgatttctccagattgacctgggtcaactttatcagagaaaaatcagacacctttgaagtattcacggagttgagtctaagacttcaaagagaaaaagactgtgtcgtgaagagaatcaggagtgaccatggcagagagtttgaaaacagcaggtttactgaattctgcacatctgaaggcatcactcatgagttctctgcagccattacaccacaacaaaatggcatagggaaaaacaggactatgccagaagctgctagggtcatgcttcatgccacagaacttccctataatctctgggcatgagccatgaacacagcatgctacattcacaacagagtctcactt

SEQ ID NO: 5274 - DNA, 491 bp, Glycine max
tattgaatgttttttattttaagaaattatgattatataatttgattaatttttaattaaattatatagcatatgatcactttgttaatattttctctaatttttttagtaaatatatggaaaaaatgataaaataacaaaagattatgacttccttaattttataaaagataaatttaaattatatgaatttaaatttcaaattttacaaattaaaaaaaaaacagatgctaacttaaaggattctttttaaatgagtattaaaagaaaatatttatatttaaaataatacgtaatgtaatattggaaaattatttaatcacttatattagaaagaaaaaaaaaagtaatgcttaatgtattttgtaaacctctagtatgcttgatatttttaacacgtgtttgcttcatttggcttttagtatcagacaaacatcactatattactttctttaatctttactaaacttttattttcaatgacattggat

SEQ ID NO: 5275 - DNA, 411 bp, Glycine max
tcttcaccagagcagcatcaaggaaagtggtttgtactatcaatggggtggggaaactacttttgaacaaagcgaagtccagaatttgtagaccaggattggagctactgaagcttacaattgccagggctgaagatttgcctgcattgatttggaaatgaagcaagccttgagggaatgccataacatcccccttcttaagagttttgaggtagacaatgttggcagaagaaatgaatccagctaggatgctcccttcaattacaacaagtaattctgaagctccaggatgagtgtgaagtggtataacttcacctgctgctaagtccaaacgtgctgcggaaatgccaagaccgttgagaccagcaaactgagcatcaaatgcaggggtcactgcagctttgataatgt

SEQ ID NO: 5276 - DNA, 511 bp, Glycine max
agcttggaggagagcaaatcagctatatctttcccaaacgatatgagtctcccataatttatatttttcataaacccaagattctctttgccattttgaaatgcaccggaagaatcattgttcttgttcttctttacactgcaggtataggatacatcagctgaccaatcaaggccaccccatatagtatacccacctttgggtatcattgacatggttgaatcccacgttcgggtcatccgcattagatgctgtaaagttttaagaccaaaaacatccttattccaaaaacctggtgcgaaagtcctgtatgaggtttagagattcattagattatataaggtatcacagctaacatgattcatttttaaacaatatcatcaatggaaattacataaaaattcacccctacaaaatctggataaaattcttatatattggcaaggaaacacaattttcgaagaacttattaacagaatccacagccttataaaaatattttattggagga

SEQ ID NO: 5277 - DNA, 487 bp, Glycine max
actaagcttaagaaaaatggcctcagcaaacttcttatttccaaaaggaaattcaatcaatagaccttcaatctttaatggagagggttaccactactggaaaacccgaatgcaaatttttattgaggcaatagacttaaatatttaggaagccatagaaatagggccttatatacccaccacagtagaaagaaccacaatagatgggagcacaacaagtgaaagcataacaatagaaaaacctagaatagatggtctgaagaggatagaagacgagcacaatataatttaaaagccaaaaacataattacatttgccctgggaatggatgaatatttcagggtttcaaattgtaagagtgctaaagaaatgtggaacactctacaattaacacatgaaggtacggcagatgttaaaagatctaggataaacacattaactcatgaatatgaactatttaggatgaatgcaaatgaaagcattcaag

SEQ ID NO: 5278 - DNA, 383 bp, Glycine max
ttgtccctaggctaaacccgtatcacagaagaaaaagaagatgggagaagaaagatgcaaagctgtcagaaaaaagtagacaaactccttaatgctaaattcattagagacatcagatattctacttggctcgccatcatcgtcatggtcaaaaaggtcaaaggcaaatggcgaatatgcaccgactacactgatctaaacagggcgtgccctaaagatgattaccctctgcacaacatcgaaaaactgtggaaggaatgccttccaagattattttgatgatgccaaagaatcaagtgtaaaacaagtttcaagaatcaagatcaagattcaagattcaagtaaagtatcatgaactcagattcaagaatcaagagaagact

SEQ ID NO: 5279 - DNA, 576 bp, Glycine max
agcttataaagaaaaatgatggcatggttttaacccaatcacattatgttgataagctattgaagaagtttaattattttgatgtaaaacctatttctacttcttatgactcatccattaagttaaagaaaaaattgaataaaggaatttcttcacataaatattctcaaattattggttctttgttgcatttgacaaacttctctaggcctaacattgcatatgaaattggtagattaggaaggtatactaataatcatgatcattctcattggattgcattagaaagagtttttagatacttaaaaggaaccattaattatgacattcattatacatgttctcgtgcagtaattgaagggtttagtgatgcaaattgaatttctgattctaatgaaacaaaattgacaagtggttatgtctttactgtagctggtggggtagtatcatggaaatctgctaaacaaactattatttcatgttctaccatggaagcataaattattgctttaaatactcctactagtgaggttgagtttcttaaagaattgttattgtgatttgccattggttaat

SEQ ID NO: 5280 - DNA, 506 bp, Glycine max
  unsure (1)..(506): unsure at all n locations
agctntgagctaattcaaacgacaataactttttactcggatgtctgattgagtcctgtcatatatcgacacgctcgaaattgaatgttgaagctctgagccaattcaaacgacaatatctttttactcggatgtctgattgaggcccgtaatatatcgagacgctcgaaattgaatgttgaacctctgagcaaattcaaacgacaataactttgtactcggatgtctgatatagtcccgtaatatatcgagacgctccaaattgaatgttgaagctctgaggaaattcaaacgacaataactttttacttggatgtctgattgaggcccgtaatattttgagacgctctaaattgaatgttgaagatctgagccaattcaaaacgacaataactttttactcggatgtctgtatgagtcccgtaatatatcgacacgctcgaaattgaaatgttaagctctgacccaattcaaacgacaattactttttactcggatgtcagatt

SEQ ID NO: 5281 - DNA, 365 bp, Glycine max
  unsure (1)..(365): unsure at all n locations
gaactcctgcttccatcatctcttccaagattatgttccaatatctttttgtcatttatatttatccccacacttttctttcatttcaaaatcgaaattctataaattttttgaaatgaaagaaagagacccggtatactgaaatagaaataagtgttccaaaggaaccttctcttttaccgaagattggcctttgataaatgatcgggccattttttctatttaatatttaatatgattattctctntataatctttcttttattatacaaaataaaatgaccgaagatgaatccgctcttaagaatcattattttaggaattataaatactcagatgctgcgatgtatcgcataaattctttg

SEQ ID NO: 5282 - DNA, 480 bp, Glycine max
agcttcttacaaagcatacggctttctggatgtatatgatgatatctatacagatggatcttatatatctatatatctatagatagatatatagatgtagatatatagatatagatcatacaatgaagtaccgcacgagtgggtatataggaatccaaatctgccgaatcactcatgttatgatcttctacatcctaggtcttcccgttccttcatctggcttatgttcttcatgtagcattcagactgaatgactctatgaaattacgtcgctacttccacatggtacgggtaacgtaggagacatctctatttttcccggggggaatccttagaattaccacagcttagcttttaattcgcctctgaccatcaaatgaaatgtgaataacgccgtctccccttttttgagactttgaaacaaagggtgcttccggttctgtcggtggttgaaacaattttgtcttctccatattacta

SEQ ID NO: 5283 - DNA, 369 bp, Glycine max
tttaaatttcttttaagatctccatgctgaattaatttttgttttgaattcttaatacatccttttgttgcattggatttcttatatattaaatgtgattttgagtttttattgtataacgtgttacatctcaatggtagatatatagtaggaattgactgttgagatgatatcatattatcactcacttactcaaaataaaagttttgacatattagggatattatattataaaaaaattatttgagacccaagtaaaaattgatcatctatttattatgatatcaaagatgtttaaacatttttttggcattttagagtgaattgagatgtaaagaaagagggatatttgtgaattgctagaatcat

SEQ ID NO: 5284 - DNA, 331 bp, Glycine max
agcttgtagggttaaagtctcatgattgtcttgtcctcatgcaacaattttcaaccgtggctatacgagatatcttgccaaacaaagtccggttatcgataactcgactgtgctttttcttccatgctatggttagcaaagtcattgatccattcaagtttgatgagttggaaaatgaggccccaattatattgtgccagttggagatgtatcttccccctactttctttgacatcatgattcacttgattgtgcatctggacagagaaatcaaatgttgtggtcctgtttatctactgtgaatgtaccccgttgagcgatacataaagat

SEQ ID NO: 5285 - DNA, 440 bp, Glycine max
  unsure (1)..(440): unsure at all n locations
tgtaggccttggatcttcttcatcaatggagtcctttgcttcttgaattttaatggcagcaaaatggagaagaagaagagttgagcggagacgccacttcaagaagaagatgagtctagaagaagctcaccaccataggaagccacggataagagcttgaaggtaggagaagatgaatggagggagagggagagaaggagcaagaaattttgtgcctcaaaagaggtgtgaactttgaagtttaattctcaaatgataaaagttgaaaaaatgcacacacatggcctttatttatagcctaagtgtcacacaaaattggagggaaatttgaatttctattcaaattttacttgaatttgaaattgaatttgtggagcaaaaatttcactaattatgattagtgaatnttagctatggtttagccccctaatcgaagatca

SEQ ID NO: 5286 - DNA, 240 bp, Glycine max
aactccccctttgagaaaattcaaacgacaataactttttactcggatgtctgattgagtcccggaatatatctagagggtcgaaattggataccgaagctctgagcacattcaaacgacaaaaactttttactcggatgtctgattgaattccgtaatatatcgtaaagctcgaaattgaatgccgaagctctgagctaattctaacgacaaaaactttttactcggatgtctgattga

SEQ ID NO: 5287 - DNA, 488 bp, Glycine max
agcttatgctaatctaccttgcaccccaagttcaacacggtcccaaataaatcaaacactatcatatataggcataggcacatccatcattctctcatcaattcatccattattagcttttttgtttcttcaattttttcccatttctttagcccacaattccaaggaacaaaaatgatgagagagggtcaacaacatggtatggtgagatcttattggatcctactaaatccacttaatcctagacctaataccagaatcattaatcggtctaattccccttacaccactagaaatatttggtagggtttcttctaagccaactaatcactcaaagtacacaggaaagtgtggcaaaccacgttgccctgggtgccacctctactcagcttggaagtccaagggccaaacccaaggtaccaaaaagcacaaacacttagtaacacactactataaaaaataagctttaaccgatgtggattcaatga

SEQ ID NO: 5288 - DNA, 460 bp, Glycine max
  unsure (1)..(460): unsure at all n locations
tgtaaacttgtccaaaatcgcgaagtgaacctcggatccctgtcagatacaatactagaaggaattccatgcaaccttactactttcttgatgtacaactccactagcttctccattctatacttcatattcaccggaataaaatgagcagatttggtgagtcgatctactatgacccacacagcatcatgtccacgactagtcttangtaaactagatacaaaatccatagatatgctctcccatttccattccgggatttccaatggcttcaattctcccgatggtcgctggtgctcaaccttagccttttgacatgtcaaacatcttgctacatattcagctacatctttcttcatgccatgccaccaaaaacttctcttcaaatcttggtacatcttagtcattcctggatggaaactaagacgacctttatgcgcttcttccaagatcttaactc

SEQ ID NO: 5289 - DNA, 633 bp, Glycine max
agcttctatagaaggttcgttcctaatttctctacaattgcatcacctctcaatgagctggcgaagaagaatgtggcatttacctggggtgaaaaacaagagcaagcctttgctttgctcaaagaaaaacttactaaggcatctgttctagctcttcctgacatttctaaaacttttgagctagaatgtgatgcctctggagtgggagttggagctgtattgttacaaggtgggcaccctattgcttattttagtgaaaaacttcatagtgccaccctcaactaccccacctatgataaagagctttatgccttaataagagccctccaaacttgggaacattaccttgtttccaaggaagttgtcattcatagtgatcatcaatcacttaagtacattagaaggcaaagcaagttaaacaagaggcatgcaaaatgggtagagtacctatagcaatttccatatgttatcaaatacaaaaagggaaatacaaatgtggtagctgatgccctctcttcgagacacacattgttttgctccctaagagctcaaatttacgatttgataatatagggacttgtatgctttagatgaacatttctcttccatttatgatagttggggaaaaaaggc

SEQ ID NO: 5290 - DNA, 378 bp, Glycine max
gacactatgaaactaagcttgagcaacttcaaacgacaataaacttttacttcggatgtctgtatggagtgcccgaaatatatcgggacgccccgaaatggaatacggaagcttttagaaaattcaaacgacaaataactttttattcggatgtctgattgagtcccgtaatatatcgaaacgctcgaaattgaatgttgaagctctgagcaaattcaaacgacaataacgtcttactcggatgtctgattgagtctcgtaatatatcgagacgctcgaaatggaataccgaagctctgagcaaattcaaacgacaataactttttactccgatgtctgattgagtcccgtaatatatcgagacgctcgaaattgaat

SEQ ID NO: 5291 - DNA, 183 bp, Glycine max
gatcaaaagatttgggatggatagtgcaaaacacatgtctacaccgatgagcactaattgttacttagataaagatgaatctggtcagtctatagacataaaacaatatcgaggtgtgatcggatctcttctttatttatctgctagtacacctgatattatgtttagtgtatgcatgtgtgc

SEQ ID NO: 5292 - DNA, 486 bp, Glycine max
ccggtcatggaaagacttggcaactgccttcattatgtagtaccaatacaacatgggtatggctcctgatcggaaccaacttcagagcatgaccaagcgggaacatgagtccattaaagaatatgctcaaaggtggagagacctagcagcccaagtcgtcccacctatgactgagagggaaatgatcacgataatggtagatacgttgcctacgttctactacgagaagctgataggatatatgacgactaactttgcagacctcgtcttcaccggagaaagaatcaagtctggactgaggaaaggcaagtttgaatatgcctccaacactgtccccaacaacaatagaagagccccagtggtgggcacactgaaaaaggaaggagatacccacgcagtcaccaccgccccaacatggatgaaaacgccccagaacggccaaaactcataccagcacaaccacgcgaatcttttttatccgagccg

SEQ ID NO: 5293 - DNA, 471 bp, Glycine max
agcttggaagcattttgatagaatgcattctatgtttactctcctaggaatgtcaaattagaaaaccttactcttgttggctagttatcttaactccatataccccccccccccccccctgatttttgcaggaagagggaaattatggttttgaaattcttaattccatgtccatcaaatccaaagcacaaaattgatgtgactttgcaattgctaataaatgagttatgtaccttatggaatgatggcgtactaaatcaccatgtggctttgaggctaattcttgagataaggctgttttgatgtggactttaaatgacttctcaacttatgggattgtgtcatgttggatgacgacagggacacttggattgtctatttgaatggaaacatacaaaggcattcacaaatataaactttgtcaaagctttggatttttgattgtcatcaccaattccttgcccttgatca

SEQ ID NO: 5294 - DNA, 401 bp, Glycine max
tgctctaagctgtcaattcccttagaaaaattttgatttttatagcttcatcaaaaccatgagtgggagtttgcctaagcaaatatctaaatctttcccaagcttctctaaggaactcatcatatgtttgttggaaaatatatagcagcctttcccttgttgatctttgaccttgggaaatacttgtacggaaacttggccattacgtcatcccacctaaacaagttattcggaggaaaggatcttaaccatgagatgacatctctagctagagaaaaaaggaaacaagcacaaacttcattcgccacatgatttatcttcacggtgttgcatatgtcaatgaaggttgattgatgtgtttatggattctcatgattatgctcatggaattgattattttg

SEQ ID NO: 5295 - DNA, 383 bp, Glycine max
tattcaaatatgacttaaaacaaaaaagaatttcatatttttcagggatcaagaatacattttagtccagaattgaagataacacgttttttaaaatttggacattgctgttcctcaatggttattttggtttgtgttgtagggagtctctgctgttagggccttttatgagctacttagccagtccagcttaaatgtcctaaatcctgaagagaacaagcatgtagccccagtggagctctgtcccatcttgaagatgttatacagaatattgataataaggtaacacatttagctacctccttttttacctttgaatgatcaaaacagagaactgaattctaattgtgaaactaccattttcaatggtttttgctgatctt

SEQ ID NO: 5296 - DNA, 509 bp, Glycine max
agcttgaccaggaattacttgtatgggttggatgttgaattctggttgttcctggtgcggagatgatggtacagcgggtgaaccacaagcggaagtttcttttggtgaggtagccatggaaaaacagagcgtttggaatgatttcgaaaatctcacaaaactattgggaaatgctggtaaaaacacgaatgccaagcagatataaatttgaatgaagaatgtagaggggcgtgtgaggcaacggtcgaatttgctttgtggtgaacgtgctattaatgttaagtgattcgtttgggcacgttcagattgcagtagctgctataattcctctagcagacaaatgcccagcttgcccctcagttattcaaactgatttgcatccaaagcctttgagaaaatatctgctatttgttcctcagtgtcaacatgcttcagtgtgatcactttattatcaacaagatctctgatatagtgatgcctaatgccaatgggcttggttttgctgtgtt

SEQ ID NO: 5297 - DNA, 544 bp, Glycine max
  unsure (1)..(544): unsure at all n locations
agcttctcaaccaaatccaaaaccctcacttgcttcgtgaattgccagcagtaacctctcttctaaatggtgtttagatggatactccggcgagctaatagaataatctgcttgaagaaaattccgttttgattatttcaaatcacacgactataatgatccatcaaaatataaatatagcctatagcttacagataatcacactgaatggtaataggtatataggcctatagggaattttgaaaagggggaaaagacataccaagtatgagcagaaggcaagtgatcaggacttccatatgctttgtgtatctgaaacttctgggagcctgaaattccttgaagagcgctaaagccttccaaaggcacctgaaacattagtgaaaaaaatgttttaacggcttcaagtttgcaaaaataatatgccaacatcattaatatatcataacaaatcccaggacaaagagaaagctctgatccaaggtgggcaaaattgagatcttatggggagaagaatganagaactcgtgaacatgaatcataa

SEQ ID NO: 5298 - DNA, 346 bp, Glycine max
  unsure (1)..(346): unsure at all n locations
tgctaatagcctcatttggagattatgagataaaggagacacaataagagttgattctaanaatattatgtcctgngctatatggaatacacttcaacttcttgaagaacctttgggagattatgaacgaggatatggtgaggttcattttcgaattccatgctcatggaantctacctagaggtactaatgcttctttcataactcttgtgcccaaagtagaagacccatataactgagtgcgttatacccataccttggtgggatgtatgcacaaagttctaacanaactcttatagaatagaatgacaaacgtgatgaatggggtgaatgatcatagacaaag

SEQ ID NO: 5299 - DNA, 451 bp, Glycine max
  unsure (1)..(451): unsure at all n locations
ctacaagggtatgataaatntgctggaagaatcaatgaaacattggactatcgctccgcgagagatgcgcaaggacatggaacacacacagcctcaactgcagctggtaacatggtgagcaatgccagccctttcggcttggcacgcggttctgccagtggaatgaggtacacctcaagaatagctgcttataaagtatgctggcgtntaggctgtgctaactctgacatattggcagctattgatcaagctggtgctgatggtggtgatgtgtagtcactctctntaggtgggatgctaaaccttactacaatgacagcagtgccatagcctcatttggagcaacacacaaaggagttgttgtttcttggtcagcacggcaatctggtccctctagatcaactgctggatatgttgcccatggatcatgactggtgctgctagctacact

SEQ ID NO: 5300 - DNA, 281 bp, Glycine max
  unsure (1)..(281): unsure at all n locations
gctatgctgcanaaattacaatagacctcctcaaccctagcagcaaaatcaaccacagcagaacaattatgacctctctagtaacagatacaatcccggatggaggaatcaccctaatctcagatggtctagccctcaacaacaacaacaacaacaacctgctccttccttccaaaatgctgctggtccaaacaggtcatacgttcctcctccaatgcaacaacatcaacaacaatagcaacaatagccacagagacaacaatcaactgaggccccttctc

SEQ ID NO: 5301 - DNA, 241 bp, Glycine max
  unsure (1)..(241): unsure at all n locations
agtcccgtccaggtagtcccganatagactagcctcacagtgatcaganatgagaacgatgagctgattcctactcgggtgcagaacagttggagagtctgcattgactataggaggctgaaccaggttaccaaaaaggaccatnttcccctgccattcattgaccagatgctagaacgcctggcaggtaaatcccactactgtttccttgatggtttttctgggtatatgcaaattacta

SEQ ID NO: 5302 - DNA, 357 bp, Glycine max
gctatgaaatagtttattatgactccttcgataagcttatgagacaataagaagttcgcgacattaagctctctaagagcttatggaatatgggtggtgttggataaataacttaattaattacttattgaataagtgattatcatggaaaagttgtttatagaaccaaagaggaaataatgtaaggtgtaaggtgttctcataagctatcgtagagagcttattgaagtaaagctgaaaagagcttatatgcatattgtaaccgattttttataagcttttccaccagttacataaatgtttatgtcataagataagtcaaataagctgtgtaaataagctcttaaactcaaactt

SEQ ID NO: 5303 - DNA, 376 bp, Glycine max
  unsure (1)..(376): unsure at all n locations
atgctctngcatnctcanacactcggtctattgntgatctgcctgaaggtaagcaaccatatggttgcaaatgtgtgtacaagatcaagcatcatgctgatggatccattgaacgatacaaggcccgtttggtggcagagggatacactcaactagagggtgtggattatnttgacactntntcaccagttgctaagcttaccacaattcgcacccttctatctgtggctgctattaaggactggcacttagaacaacttgacgtcaacaatgctnttcttcatggtgatctgcatgaggaagtatatatggatctgcctcctgagtcttactgcctgttcttctttaataagtctgaaatacataagtcttatat

SEQ ID NO: 5304 - DNA, 366 bp, Glycine max
  unsure (1)..(366): unsure at all n locations
gcgtctcgatataatacgggactcaatcagacatccgagtaanaagttatggtcgttggaatagcctctgaggttcaacattcaatttcgagcgtctcaatatatttcgggactcaatcagacatccgagtaaaaagttattgtcgtttcaattggctcagaggttcaacattncaatttgagcgtcccgatatattacgtcactgaatcggacatccgagtaaaaagttattgtcgtttggaattgctcaaatcttaaacatttcaattcgagtgtctcgacatattacgggactcaatcaaacatacgagaaaaaagttatggtcgtntgaatttgctctcagcttcaacattcaatttcgagt

SEQ ID NO: 5305 - DNA, 359 bp, Glycine max
  unsure (1)..(359): unsure at all n locations
ctatgaatctccggtagtatcctgctaagcccataanactcttaatctcaaaaacaaacttagcactctcccactcaagaacagcttctatgttagatggatctacagctatacccncttgagatatcacatgtcctaggaaactaactttctctaacgaanactcacacttggacaacttagcatagaagtgtcagtccttaagagtatgcaacacaatcctcaaatggtcttcatgctcctctctagtcttagagtataccanaatatcatctatgaatactaccacanaactatcaaggtaagggtggaaaactctattcatgtagtccataaacacttctggagcattagtcaca

SEQ ID NO: 5306 - DNA, 266 bp, Glycine max
  unsure (1)..(266): unsure at all n locations
tggaagctgtcgagaaantcanatggtcctatcttctcanacggatgtttgtattggacacataatatatcgagacgctatgatattgaacgaattggaacctctcgagaaaaattcaattggtcataacgtttcacactttatgttcgattcgggcgcattatatatcgtgacgttcgaaattgaacaacggaacctcttgagatanttaaatggtcataactattcacacgaatgtccgattcagggacttaatatatcgagac

SEQ ID NO: 5307 - DNA, 360 bp, Glycine max
  unsure (1)..(360): unsure at all n locations
gccactctgattacttttcctcctctgngagcataattctaagggaagccattcttcctaaaacatctatcaactgtatgaatgtctttgccacagtaagtacatgaaaatcctgaattcgatgaggttgtgcttgctgcattgatcaagctactgtttcctatcatatcattgctattaatctatctttcttgttgaattgcataagaaaagactttagttatgccaggtaaaggatccatcatcaatacattggatctgacagtgttgtactgatcatttaatcccctaaggaattgcataactcgatcttgcttctttctttccataacactaacaagagcatcacatgtaccattt

SEQ ID NO: 5308 - DNA, 447 bp, Glycine max
  unsure (1)..(447): unsure at all n locations
agcttagtaaagctaagcactaacaatactcctctttggcgaattatgtctagaacatacttagacacttnctgagcaggtacgagcagatatgcaagtgggatcagcaactntcattatcagagtaatcaagcacagcggtatctgtagtggcgacagcaaaattctgcaggttgcaagtcgttgtcaggatgtcaagacatctcatgtgacatcagctntctgctccccctgtctccatgctgctactgctgtgaagcagttcactgcagcatcttctatcagctactatgcttctccaggatgcaagacatctcacgtgacatcagctnttngctaccnctggctccatgctcgtactgcatcttctatcagctactaagttcagtagcgtacatcagtcatcatcagcagcagtctccccctcacaatcatatacatacaact

SEQ ID NO: 5309 - DNA, 281 bp, Glycine max
actcggatgactggatgagtcccgtcatatatcgagacgctcgaaattgaatgttgatgctctgagcaaattcagacgacaataactttctactcggatgtctgattgagtcccgtcacatatcgagatgctcgaaactgaatgttgaagctctcggccaattcaaacgacaacaacattttactcggatgtctgcttgagtcccagaacatatcgagacgctcgaaaatgaatgtggaagctctgagcccattcaggcgacaataactttttactcggat

SEQ ID NO: 5310 - DNA, 465 bp, Glycine max
  unsure (1)..(465): unsure at all n locations
ctgcagctaagctgttacatttctaaaagtccctgaatttanaattataatggccccttcataatnntcaaaactttttcaataggatcactgaatccaatctgctggtaggtccctacanagatccaattgaaagaataaacaatatggggacccaattatagttnttaaactataggaacctatntaagaataccctacacataaagggggctggcaganntaattaactactaatatattcttcagctcccgcctattatgtgaacaccttgnncaacagaatattnttgttcagtttatattanaatcacatatacgtagaagtagaatcaactactaaantatttacctcaacactattcttgccaatccatgttcctataagacaatcttctttatcctctccaggatatgtatactgaaagatgaagcaatctncactattaaaatttgactgatcag

SEQ ID NO: 5311 - DNA, 256 bp, Glycine max
  unsure (1)..(256): unsure at all n locations
tcgctggggcagcatctagagtcctagaagcatattatatcaccctgtgcaatntatcaattntctgagcaaggacagcgcccaatgcataatttgatgcatcacacataagctcaaaaggggctgttcaatcggctgcctggatgatggaggtggtagtcagcgctctcataatgcaatcaaaagcctctttgcatctgtcattaaagtcaaactccacctcctttngcaacatgttggacagtggaatggctac

SEQ ID NO: 5312 - DNA, 385 bp, Glycine max
  unsure (1)..(385): unsure at all n locations
gctacatcactggggaagataacaatatcgattcatccggagacctcaaanatgaagttgtanatntaagtctcatggccaacaactatgaaagcgaagaagagaggatgctctanacacatgatgggagatgcatcaaagtttactcatatttctcccaagaatagtggacatgtgacttatggtgacaacaacaaaggtaaaattcttggagtcggaaaaataggtatgaatccatctacctccattgaaaatggtttacttggtgatgatcttaagcatagtctgctaagtgttagtcaattatgtgataaaggtntctagtggtcattggactctcataatgtgatattaaaaataaacatgatnaaaaatataaacatta

SEQ ID NO: 5313 - DNA, 419 bp, Glycine max
  unsure (1)..(419): unsure at all n locations
ttaaatgtttaaatattttcatatatttatatattaagtagttaagaattattaataatcagttntttcagggagacttattaattgatatgtgatcatcgattgagaaaattatatatgtgatggttgatgttagatgaattatggtactttatcagattatagcaacggtctttatgatttaataaaagagcttgtatgcaaatatatntagtaacatcctctgtgatttcctataataatgctgtgtaaattaaaagcatacactaacattgctttgaagcataccctacactcttcactntcttcaatcttatctacacttctagataagagaattatattaaaacagagatcttgataatatacaaattagaaatatatataatggtctcatttaaatcttagatgttaaaaat

SEQ ID NO: 5314 - DNA, 462 bp, Glycine max
  unsure (1)..(462): unsure at all n locations
tcacctgcggcatgcaagcttggtcatcttgagctagtaggtcatcatccttatttgaagttggtggngcaacatatttctttggcctaataggaactccaatatttttgcagcttctgatgttatgattggtttggccacaccttccacatgtaaagtcaggcaatttcctctttagcctatgtcctatgacattgtcttcatctacagatctcattctatttttcttaggccttcctctttggacctttttatgtggtggaacaggttgtgcatgttgtgtctgggcccaatattgtggtccttggactggttcaataaaatggtggtatgtcttgttataagcctctattgacagccactcatgacacatgtcctcaggcttgcctcctttgtgacttattgntgcaatggcatgtcgcatggcatccctacatcaaagttgtcaaatcagcacacatg

SEQ ID NO: 5315 - DNA, 449 bp, Glycine max
  unsure (1)..(449): unsure at all n locations
agcttaacaaaaggcatgtgaagngggtggaattcctatatcaattcccttatgttatcaaacataaaaagggaaaaggtaatattgtagccgatgctctttctcggcgtcatgcattactttctatgcttgaaacaaaattgattggtcttgaatgtttgaaaagcatgtatgaaaatgatgaaacttttggagaaatttttaaaaattgtgaaaaattttcagaaaatggtttctttagacatgaaggctttcttttcaaagaaaacaaattgtgtgtgcctaaatgttctactaaaaatttgcttgtttgtgaagcacatgaaggaggtttaatggggcattttggggtccaaaagactctagaaacattacaagaacatttttattggcctcatatgaaaaaggatgtgcagaaatattgtgaacattgcattgtatgtaaaaag

SEQ ID NO: 5316 - DNA, 446 bp, Glycine max
  unsure (1)..(446): unsure at all n locations
agcttatatgcccaacaattaaatcagcgtgcttatgctttatagtgtgggggaaggaattaccaggatccttgcacaagatgaaaataattttctctctttgaccgtttaaaatgataattgctcaaataatcggtttaatcagctctcaaaccgatcaattagagaattgaattgataaagaacataataaaataaaaccaaattaatggcaaaaacggatttgaactggagtatttcttatgctttttattcataaacctttgttaaataacactcgtacaagaaatgtatctgtaaaacggaattttaaataaaatactaaagataaaagtatgaagaaaaaaacttatangttntcaaagttaattcaagtaccttcttctaaaaaataaattattaaaataagtttactttataaacanatagcttataaactagtcaaa

SEQ ID NO: 5317 - DNA, 277 bp, Glycine max
  unsure (1)..(277): unsure at all n locations
cttaactcggaggtccgatacaagcgcataatatatcgagacgctcgaaattaaccaacggaagctctcgagaaattcaaatggtcataacttttaactcggatgtccgattcaggcgcataatatatcgagacgctcgaaatntaacaacggaagctctcgagaaattcaaatggtcataactttttactcggacgtccgattcaagcgcataatatatcgagacgctcaaaaattaacaacggaagctctcgagaaattccaatggtcataactt

SEQ ID NO: 5318 - DNA, 344 bp, Glycine max
agcttctacattcaatttcgagcttttcgatatattacttgtactcaatcggacatccgagtaaaaagttattgtagttcgaatttgctcagggcttctgtattccatttcgagcgtctcgatatattacgggactcaatcggacatcagagtataaagctattgatggttgaattttctcagagctatcgctttccatttcgagcatctcgatatattacggtactcattcagacgtcccagtgacaagttatgtgagtttaaattgcccagggcttcggtattccattgcgagcgtttcgacgtattacgggactcaatctgacatccgagtaaaaagatat

SEQ ID NO: 5319 - DNA, 409 bp, Glycine max
  unsure (1)..(409): unsure at all n locations
tctgttagtgttatgcctctgtctatttntaattctctatcttaggtcccttgcagtcaactgatgtggtaattcatttagctaatagaagtgttgcctaccctgttggtttcatagaagatgtcttagttagagttggtgaactgattttccctgttgatttttatattttgaatatggaggatggattttctcaaggatcagttcccatcattctaggcagaccctttatgaaaactgctagaactaagatagatgtttatgcaggcacactatccatggagtttggtgatataattgttcattttaatattctggatgctatgaaatacccatatgaagatccttctgtatttcgtgctgaaataattgaccatgtcgttgatgaatacatgactgatctttactc

SEQ ID NO: 5320 - DNA, 398 bp, Glycine max
ctcagcttgtgaagcaaaggccagctatggtcttcaaggtggattttgaaaattctctatgactcagtctcatgggcttttctggattatatgctgcaaagaatgagcttttgccccaaatggagacaatggatttctgcctgtctcaattcagcaaccatttcaattcttgtgaatggcagtcctacaaaggagattgctcctactataggcttgatgcaaggggaccctttagctcccttactcttcaatatagttggagaaggcatcacaggattgatgagggaagcagttcagaagaatgtatatagaagttacatggttggaaagaaaaaggaacccactaatattttgcagtatgcagatgacacagtatttgtgggaggctgcttgggaga

SEQ ID NO: 5321 - DNA, 306 bp, Glycine max
  unsure (1)..(306): unsure at all n locations
agctntgagcaaattcaaacgacaataacttttgactctgatgtccgattgtgtcccgtagtatatcgagatgctcgtaattgaaaacagaagctctaagcaaattcaaacgacaataacttttgactcgggtgtccgattgtgtccggcgtatatcgagatgctcgaaattgaaaactgaagctctgaaaaaaatcaaatgacgataactttttactcggatgtccgattgaatcccgtaatatatcgagacactcgtaattgaaaatagaagctttgagcaaattcaaacgaccataacttttg

SEQ ID NO: 5322 - DNA, 438 bp, Glycine max
  unsure (1)..(438): unsure at all n locations
ctcaagcttatgctgcatanattacaatagacctcctcaaccttagcttctaaatcaaccacttcagaacaattatgacctctctagtaacagatacaatcccggatggaggaatcaccctaatctcagatggtctaaccctcaacaacaacaacaacaacaacctgctccttccttccaaaatgctgctggtccaaacaggtcatacgttcctcctccaatgcaacaacatcaacaacaatagcaacaatagccacagagacaacaatcaactgaggccccttctcaaccttccttagagcagttagtgaggcaaatggcaatacaaaatatgcagtttcaacaagagacaagagccttcattcagagtttgacaaatcagatggggcagatgaccactcagttgaaccatgctcaatcccaaaactctaacaagct

SEQ ID NO: 5323 - DNA, 456 bp, Glycine max
  unsure (1)..(456): unsure at all n locations
cagcttgagccnaaacccaactcgcgctaaatcttgatctgttttagaatctccatcctcgccctcagaagaaaacaaaaggaaaaaagaatgttcccgaccaaagatcggaagagaactaatagaaaatatacagaaaggtcttctgaccaggcaacatctgaacagaacataactgtcaccagcaaacaagaaaagaaaggaaaccacaatttgaagtggtcctcttcctttgattaccaaccaaaatctcatgcactggcaactttctcgttccgcactaaacaaaaacagagagggaaaggccaaaacactcagagccaaattttccaccaaaaacactattcaccaaaagtcctattgatccgtgatcacatgtgtaatctttgatttgataggaaatggcttgcaattcaagtcatgacatatctatggtttggaattaagatgaaacac

SEQ ID NO: 5324 - DNA, 326 bp, Glycine max
tatcacggacctatgaaactaagcttaacattcaatttcgagcgtctcgatatattacgagtcttatatcaaacatccgagaaaaaagttattgtcgtttgaatttgctcagaggttcaacattcaatttcgagcgtctcgatatattacaggactcaatcagacatccgagtaaaaaggtattgtcgtttgaattggctcagagcttcaacattcaacttcgagcgtctcgatatattacgagactcaatcagacatccgagtaaaaagatattgtcgcttgaattggctcagagcttcaacattcaatttagagcgtcttgata

SEQ ID NO: 5325 - DNA, 386 bp, Glycine max
  unsure (1)..(386): unsure at all n locations
agcttagagccaattcaaacgacaataacttcttactcggatgtctgattgagtcccgtcatatatcgagacgctcgaaatttaatgctgaagctcttagccaattcaaacgacaataactttttactcgaatgtctgattgagtcctgtaatataacgagttgctcgaaattgaatgttgaagctctgagccaattcaaacgacaataactttttactcggatgtctgattgagtcccgtcatatattgagacgctcgaaattgaaagttgaatctctgagccaattcaaacgacaataactttttactcagatgtctgactgagtcccgtnatataacgagacgctcgaaattgaatgttgaagctctgagctcattcaaacga

SEQ ID NO: 5326 - DNA, 401 bp, Glycine max
  unsure (1)..(401): unsure at all n locations
taatacccaaaatcacatctacacgaccaaggtctttcatatcaaattttctagacaagaaagacttcacatcatttacatattactaccaaatatcaatatgtcatccagatacaaacataaaatgacacatccactatcatcaaattgtttcatatacacacattatcactatcattaatttgaaaaccatacgaaagaataactngatcaaacttttgtgtcattgctttggagcttgtttcaaaccatatagagatttaacaatttatttttcaaggaaaaacattttcaaagaaagtgacatctctagattccataatagtaccattagaaatttttgacacttctgaattaacaactaagaatctataagaagtatcatgttaagaatatccaac

SEQ ID NO: 5327 - DNA, 395 bp, Glycine max
  unsure (1)..(395): unsure at all n locations
cggatggagaagaagagagtgcgaggaaaatagggcttgctttctaatatttntaaatgtagcttcaacatcagttttcaatacaaaactgatgttaactatgtgatgtaaacgttaacatcggctttatgaaaaaaatcaatgttaatgaagtcatgttaacatcggtttttgaaaaaccgatgttaatgtaagttcgttaacatcggttttctgcaaaatcgatgtcaactaatgcacattatttacaattatgccaccgcatttatgttaacatcggttttaccaaaaaccgatgttaacctgatgatgttaaatctatagtctctagtagtgcctttgaagcagatgtaaaagaacgtcaacgaaagattacgatttgcccttcattgatt

SEQ ID NO: 5328 - DNA, 441 bp, Glycine max
cgcttgatgtttgtgttgaatgcattaaaggtaaatataccaatagaaagaaattgggtgcatatagagctacaaacgtcttggaattgatacatacggacatttgtgggccatttcatacaccttcatggaatggtcaacaatattttacatcactcatagacgattactccagatatgcatatatgcttcttatacatgaaaagtcacaatctctagatgtgttcaaaacatttaaagttgaagttgaaaatcaactcaataaaagaatcatgagtgtcagatctgaccatagtgatgaattatatggcagatatgacagttcaggtgaacatcgtccgaggccgtttgccagctacttagaggaatatggaatcgtcccacaatacaccatgtcggggtcacttgcatgaacagtgtgactgaaagacgaaacataac

SEQ ID NO: 5329 - DNA, 308 bp, Glycine max
tagcatcactcttaattgtatcattgtgagctttatgtgcttagggaggaaaaacagaagcaaccaaataattcacaatattggaaaactagggagtggggaaggaatcagaaatactatacagaatgtacaaatggtcatccagaaaatcatcccgaataggtgagtccttagacacacgctcaatcctactcaagtggtcaaccacaaggttctgtgcaccgctccgatcacggatctccaaatcaaactcttggagccaaagcatccacctaatcaatctaggctttgattcagccttcttcaac

SEQ ID NO: 5330 - DNA, 413 bp, Glycine max
  unsure (1)..(413): unsure at all n locations
agctntnntattttagcagatgaagatgaatctgtggccacctcatggactcctctaaggacaatagcataatttcttgcactgaattgttgggagttggaagccatcttctcaatcaaattcctagcctcaacaggagtcatatcaccaagggctccaccactggcagcatcaatcatactcctctccatgttgctaagtccttcatagaaatactatagaaggagttgctcagaaatctggtggtgaggatagcttgcacacaatttcttgaaactttcctagtactcatacaagctctctccactaagttacctgatgcctgaaatgtcttttctgatggcagtggtcctagatgcagggaagaatttctccaagaacactctcttaaggtcatnctagctggagatgga

SEQ ID NO: 5331 - DNA, 366 bp, Glycine max
  unsure (1)..(366): unsure at all n locations
tccattggtgtctngaagtctaaagccgatgaaggacatctgttaatcacataggctattgtgtttgcagcttctccccaaaaggtctttggcagtccagcacttatcggcatgcacctcactctttccaaaatggtcatattcattctttctactaatccattctgctatggagtgtaacggactattgagcgccgtttgatacctgatgctccgtcaaactaaacgaattgctctgaaacaaactccatgccatttttactccttaaaactttttgtgttgtaccaagctgatttccaataaaagtatgtcactctctgaatattttaaaagcttctaatgtgttatttaaaacatacagccat

SEQ ID NO: 5332 - DNA, 454 bp, Glycine max
  unsure (1)..(454): unsure at all n locations
agcttgttgtgtcttatccaatgantttctttgatagatagtaggcaaattacaatttgatttgatagctcactaagattgatcttatagagattgcctttcctcttagtagaaaagagcttagtcccatttttattttggacaatacacccttctttgttaaaggaaacatcatttccattgccacataattggcttatgctaagcaaattatgtttgagcccttcaacaacaaaaaaaaaaaaaatctataagaggatggggatgaatacttatcttatgtactcctgttatcttcactttatgattcttgtcaaaaaagactattccaccatgcataggggttaggcattggaagatacacctttctcctatcttgtgtcatgagcattcgttgtccaaataccatgaatgatgtatctttcttttggttaaagatatatgcaacaagaat

SEQ ID NO: 5333 - DNA, 270 bp, Glycine max
  unsure (1)..(270): unsure at all n locations
ttggagtntccaagtgccaattcgactgcttctttagtccagtcttcttctagcttcaatccatcagtgggctttccttctgtgtccagcatcttgggatgttcccagcctttgatgacagctttccaggctctgctatccagtgatttgaggaaggccaccatccttgctttccagtattcatagttggttccatccaggattggtggtctgttcactggtcctacttttttctccatgttcatcagaatttatcttcctagatctcac

SEQ ID NO: 5334 - DNA, 311 bp, Glycine max
  unsure (1)..(311): unsure at all n locations
tcttagatctgtcagatccaagcccagatctatgtctagatttaaaaatagtattagaggaagttgctcaacttccccaacctccaacactaagtttccttcgtcggtggagacgtcaaggagttcatgttgattcattcctctattgacaacaagattcaggccatttgcaaagggttgactgagttgtggaaacaaggaaaaatctagttacgtgcatggaaatntgaacccaaaaccaaagatttgagaataattcgtttctttgatttgattttggttgaatttctgtcatggtgtgaataatgcat

SEQ ID NO: 5335 - DNA, 382 bp, Glycine max
gtggaaaattttggcacggaatcatcagaggtggctaagtcttaagatggtcgcgttgttggagtctccaaaatgatatcctcatctttttcacggtcagctgagagagctccttcctttaacaacgagacacaaatagtgttatgccttgtggacgggtgccactctgatctcagtaactgcaaagactatcatagacgccataaggtccgtgaagtccattccaagactacacaggtcacaattggaggtcagaaacaaaggttctgccagcagtgtagcaagtacatgtttcatatgaaatttctcatcatttgctctcttaattaatgttgttactatttttttaatttggataatgtataatttgatcacccggagt

SEQ ID NO: 5336 - DNA, 409 bp, Glycine max
agcttcacaaaagtttatgtggcttgaaacaatcaccgtgtcagtggtacaagaagtttaatgagtttatgagcaactcaggattcaacagatgtgacatggaccattgctgctatgttaagaaatatactaatagttatgttatccttgtcgtgtatgttgatgacatgttgattgcaggatctagtatggcataaattaacaagttgaagcagcagttggcagaaaactttgaaatgaaggatcttggtccagctaaacaaatccttggtatgagaattcttagaaacagatcagaaggaattttgaagctgtctcaggagaaatatatacacaagttgcttgacaggttttaccttggagattctaagaccaagaatacccctttaggatctcatttgaagttttt

SEQ ID NO: 5337 - DNA, 441 bp, Glycine max
agcacatgctaacgacaataacatttcactcggaagttcgattgagtcccgtaatatatcgagacgctcgaaatttaaaaccgaagctcgtagaaaattctaacgaggataacattacactcggaattccgattgagtcccgtaatatatcgagacgctctaaatttaaaaccgaagctcgtagcaaattctgacgacaataacttttcactcggaaggccgattgagtcccgtaatatatcgcgacgctcgaaattgtaagccgaagctcgcagcaaatgctaacgacaataacatttctgtcggaagtgcgattgagtcccgtaatatatcgagacgctcgaatattaaaaccgaagctctgtgcagatgctaacgacaataacattgcactcggaagttcggttgagttccgtgatatatcgagacgctcgaaattta

SEQ ID NO: 5338 - DNA, 382 bp, Glycine max
tgacaggttcaggtgtaggtgctgctactggtggaggcacttgaatttggttgccggacctcaaggtgatggcactcatatttttcggattctgcacagtttgtgaaggcaatttgtcagaattttgggactgagcttggttcaactgagtagccatatgccccatctgatttgtcagaatctgaatagaggctcttgtctcttgctgaaattgcatattctggatggtcatttgcctcactaaatcttctaaggaaggttgaggaggggcctcaattggttgttgcctttgttgttgttgttgttgctgctgctgctgctgcattggaggaggaacatatggcttgcttggaccaacaacattctggaaaggagggacatg

SEQ ID NO: 5339 - DNA, 435 bp, Glycine max
  unsure (1)..(435): unsure at all n locations
agctntcactcgcatgtccgattcaggcgcatatcgtatcgagacgctagaaatctaacaaaggaagctctcgagaaattcaaatggtcataacttttcactcgcatgtccgattcaggcgcataacatatcgagacgctcgaaattgaacaacgggttttttcgagaaattcaaatggtcataacttttcactcgcatgtccaattcaggacatcgtgtatcgagacgctagaaattggacaatggaagctcttgagaaattcaaatggtcataacttttcactcggatggccgattcaagcgtatacaatattgagacgctcgaaattgaacaacgagagctctcgagaaatctaaatgggcataacttttaactcggatttccgattcaggtgcataacatatcgagacgctacaaattgaacaacggatgc

SEQ ID NO: 5340 - DNA, 294 bp, Glycine max
  unsure (1)..(294): unsure at all n locations
tagctccaaactctntgggtggaggatgcatgaacagcgctaggcaatgacattcatggggctccgaaaaaagtggagaatggaggattggactatagggtccacactaggcaatcatgaagcataactccaaactctttgggtggatgatgcatgaacaacgctaggcaatgacattcatggggctccgaaaaaaagtggttggcaggaccgaacggtccaccgggtttttccacctaaaaggaaaacatgctttttgcaaagaaaaataaatcattcacgagagcaccatat

SEQ ID NO: 5341 - DNA, 288 bp, Glycine max
agcttcatggatatttatgtgatgacatggttcttggaaagacacttcaagcatcagcaattgtggcctctgatatagctgagcatcgaacttcaattgggaatgaggatcttctgccatctttaattatttgcccatcaactctagttgtgcactgagcctttgagatagagaagtatattgatgtttctgttatctctagtcttcaatatgttggctctgctcaagagcgaatgcttcttcgggatcatttttgcaagcataatgtcatcataacatcatatgatg

SEQ ID NO: 5342 - DNA, 421 bp, Glycine max
agcttaataagtacatctatggattgtaacatgctttcttccaatggtatctaagatttcatgaggtcatttcttcatttagctttgaagagaatgtcatggatcactgtatataccagaaggtcagtgggagtaagatttgtttccttgtattatacgtagatgatattctgctcgcaactaatgataatggtatgctatatgaggtgaaacaatttctctcaaagaactttgatatgaaggatatgggagaggcatcttatgtcataggcataaagatccatagagaaagatctcgaggcattttaggcttgtctcaagaaacctatatcaacaaagttttagagagatctaatatgaaagaatgttcaccaagtgtagctcccattgtgaagggtgacaaacttgtcttgagtcaatg

SEQ ID NO: 5343 - DNA, 430 bp, Glycine max
  unsure (1)..(430): unsure at all n locations
agctnttatccatggcctcctaggtggtgagtcttttctatactcatcttctccttgaaggggcgtctcctctctctcttccttctccattctgctgccattcatcttccaagaagcaaaggattccattgatgaagaagatcctaggcctacaagctccaatggagctaacatcaaaatatatcacatcccattagctaaaaacacagtttttcttgaaaaccagcatgcacaaggatagacatacatccccataattggttcactgaccccaactatggtatcaaaagctgtaaacaaacaataaactcccctcacttatctatatctctctgttagttccatgcggtgttgttctaagatctcttangttcacgtccgttcgtccaaacgtagagctctatataccaaatcanagataattcagtat

SEQ ID NO: 5344 - DNA, 346 bp, Glycine max
cgccagcttctgttttcaatacgagcgtctccatatattactttcctcaatccgacatcggagtaaaaagttattgtcgttagaatttgctcagagcttctgttctgaattttgagagtctcgatatactacggaacacaatcggacatctcagtaaaaagttattgtcgtttgaatttgctcagagcttctgttcttaattacgagagtctcgatatattacgggattcattcggacatccaagtaaaaagttattgccgtttgaatttgctcaaagcattcgttgtcaattacgagcgtctagatatattacgggattcattcggacatccgagtaaaaagtta

SEQ ID NO: 5345 - DNA, 315 bp, Glycine max
  unsure (1)..(315): unsure at all n locations
tccattntcaatttcgaccatctcgatatattaccggactcatccggacatccatgtataaagttattgtcaattcaatttactcaaggcttcggatcttaattttgagcgtctcgatatattacaggactcattcagacatccgagtaaaaagttattgtcgtttgaatttgatacaagcttccgttttcaatctggagcatctatcgataaattatgacactctgtcgggcatccgaataaaaagatattgtcgcttgaattctctgagagtttccgttttcaatttggagcgtctctctatattacgggact

SEQ ID NO: 5346 - DNA, 428 bp, Glycine max
agcggatgctcaaaacatatgactggagatgtatcaaattttacacatatctctccaaagaaaagcgggcacgtaacatatggtgacaacaacaaaggtagaatccttggagttggtaaaataggtacaaattcttcaaactccattgaaaatgttctacttgttgaaggccttaagcatagcctgcttagcgttagtcaattatgcgacaaaggctatctagtatcatttgattctcaaaattgtcttatagaacataagcatgacattaatataaagcatgtaggacatagagtcaataatgtttacatgatagacttaagcataaaactagaaaacaatcattgctttcttagcaaagatgatgatccatggttatggcataaaagaattgctcacataaacatggatcacttaaataaattaat

SEQ ID NO: 5347 - DNA, 275 bp, Glycine max
agcttacaaaatttatatggcttgaaacaagcaccgaggcagttgtacaagaagtttaatgagtttatgagcaactcaggattcaacagatgtgacatgggccattgctgctatgttaagaaatatactaatagttatgttatccttgtcgtgtatgttgatgacatgttgattgcaggatctagtatggcagaaattaataggttgaagcaacagttggcagaaaactttgaaatgaaggatcttggtccaactaaacaaatccttggtatgag

SEQ ID NO: 5348 - DNA, 442 bp, Glycine max
  unsure (1)..(442): unsure at all n locations
agcttatcatgatcatcataattattggctatatgaaggtagacaaaagatgcaacagtggaatctgtaactgctttacttttcagcattttcccataacaatgatcagaattctgactgaaattattaaactgagcattaagaggaaagtcactaggaagaagccaggaagaatctggaaatggctcacaaaagagatcaaccatatccgctccagggtcaaccagtagaacacggttagtgaggagagcatagagaaaagcagaagctagggtcaaaatcctattccctaagccactaaacgaaatccatacaacatatttacactctgnaggactcagtaaatgaccaccagacctaagttgttcaactgttttgttataggaatcagcgtaaggtccacattgtttgtgctgagcttcatattttcttaacctagaaa

SEQ ID NO: 5349 - DNA, 448 bp, Glycine max
  unsure (1)..(448): unsure at all n locations
agcttcctcgtggcttctttgagaagctntctcaagaggcttctttgagaagctagatccttatctatccacacccctcttttagctgaattaacctccttaaaaataattacggatgaaaataacgcaacaaataatcaaacatcaaacataattactaataatatatagatatatatatatcagggttttacaactctcccacccttttagaaatttcgtactcaaaatttaccttactcaaacaaggatgggtgagcttctcgcatctgactttctaattcccacgtggcatcttctcctgatgcacctccccagatcaccttgaccaacgaaatctctttccctcttaagtgttttgttcgcctatccttgatcctcanaggcaatgtttcatatgtcaaattctccttcacttgtacatcatccaattcaatcacatgggatg

SEQ ID NO: 5350 - DNA, 619 bp, Glycine max
  unsure (1)..(619): unsure at all n locations
tctntgagaaaaagtcctatggaagcgagagcttagctacacacacccctctcataactaagctcacctccttgagaagcttgcttcggaagattcctaaagaagctagagcttaactacacacacctttctaatagctaagctcacctccttgagatgagaaactagagcttagctacacaccccctataatagctaagctcacccccatgacaaaatacatgaaaaaacaaaaaaaagtccctactacaaagactactcaaaatgcctcgaaatacaaggctaaaaccctatactactagaatggccaaaatacaaggcctaaacgaaggaaaaacctattctaatatttacaaagataagtgggctcatacttagcccctgggctcgaaatctaccctaaggctcatgagaatcctagggccttcccttggatctctagcccaatctacttggagtcttttatccaatgcccttgcggggtaggattgcatcacaaagggaaacaacatgttttaattctgttatnttctaattaaaaattgcttgctgtttaaattacaaaaacaaaccccccccccccaatttggtactattttataactatctattatgaacg

SEQ ID NO: 5351 - DNA, 482 bp, Glycine max
  unsure (1)..(482): unsure at all n locations
tttgtgttgatttaatctcaacagttccatttcgtgttcctgtaactttccaattaatgtagcaagagacatgttagttaaatatcgcaactcagtaatggctgttaccttaagttgtcattctctgcttaaacatctcaatactttatttatgagatcttcatttggaaaaattttccctaaagatgcaagatgatttattatatgtgtaaaccttttttgcatgtcttgtatactttcatttgaattcattctaaataattcatactcatgagttaatgtatttatcctagatcttttcacatctgttgtgccctcatgtgttacttgtagggtattccacatttcttttgcacttttancaattgataccctaaagtactcatccattcttaaggcagatgtaattatatttttggcttttaagttgtattgcactaatctcttttcttcgtcactccattcttccctangcttttcta

SEQ ID NO: 5352 - DNA, 528 bp, Glycine max
agcttcaagccttgatcaaactgaagatccttggttccttacaatattttctgggcctggaagttgcaaagtccagcaagggcattgttttgactcagagaaaatatgccctttctcttttagaggatactggttttcttggctgcaaaccatcctctcttccaatggatccaaatttaaagctcgacatgctcagtggtgatttgctgcccgatccctcaatgtacaggtgcttacttggtcgtctcatgtacctcactatttcaatgccggatattacattttctgttaacaagctaagccaatacatgcagcatccaagaatacctcatctaaatgctgtgcatcatctcctacaatatatcaagggcactccgggtcagggtcttcattttccagccagtaactccttcaacttatctgcatatgcacatgctgattgaggaggatgttttgacacacgcaggtcgacatctggttcatgtgtgtttctacgagatgctttattatcaagggacatcaaaaaag

SEQ ID NO: 5353 - DNA, 567 bp, Glycine max
cttgatctttcctcagttctttaacaagctttgtacaatatacttggccttcatttaactgtctttgggcttggcggccacgctcaacaaagtactttcgacacctactgtacgttgatttcaccaatgccgttatgggaatgttgcgacaatcctttaaaaccttattgatacattctgagaggttcgttgtcatgtggccatatcgacgtccttctctatcgtaagccatcgtccatttttcttttgagatgcgatcaatccatgttgctatggctggactcacttcacgaaatttttctaaatttttatcaaaaatgtgcttgcaaggagtataggctgcataaaattagttatgaataacaatttacagtataaatgaaagtaaaataaacgtgaccatcaaatatgaaattttacccaatttcttcaacatttctttttgtttggcattattgaattttcgattgaagttgcttgctatgtgtcgcacgcagtaaacatgataaccgtggggaggttgccagccaagtgctttgttagcgacagcggactttatactcgcgt

SEQ ID NO: 5354 - DNA, 373 bp, Glycine max
agcttgaaggtgtgtagcccaccatcttttcatagtagaaaactggtaatgtgtctactatcattgttatcatttttttctccgtcactgaggtgccacttgagctgccaggtctctccacctttgggcgcattctttgaaagatctgtgcccctttttgcacatgttctgtagttgcatcctatccggaaccatatcaaaattttactgatattgtctaacgaaggcaaccattacgtccttccaagaatggactcgggaaggttccaagttagcgtaccaggtaacagctaccccagtaagactttcttggaaggaatgtatcaccaattcctcatcgtttgcgtatgcccccatcttccaacaatacatc

SEQ ID NO: 5355 - DNA, 587 bp, Glycine max
  unsure (1)..(587): unsure at all n locations
tttatatatatatatatataacaatgatcttactgttagaaattattactggttgttgatgtcaataaatgatagcatcataaaatatcgtcatcaaaagtgtcatataaacaatatttgattattgtaaaattaaattttcatttttctacgtacaaaaaaaattcacttcgctttctcccattaagtttccatactttcatccattccatagaaattttctctatgttctcttaagctttcacaagtaaaattagatttcttccctctctcattcattaactctaagctctctcattctttttcttgagacatgataataattataataaattacactattttatgaaattatataaataccttttactttttttctacccctacactaacatctcttaattattgaaaaatatataccgacatgacatctttntattcattacattaactctccttaattatttgaaaaattctacaccaaactccccaaaggagaggttattataaatattaaaacaacatgaagtatttgtgtaacttcacaaaaatttatagaatattgtgttaatttactctgataatat

SEQ ID NO: 5356 - DNA, 558 bp, Glycine max
  unsure (1)..(558): unsure at all n locations
agcttcccaagtttttaagttcttcctcaaaactgtcctaagcaaagttcccaaagtcctattaacaacttccgtttgcccatcggtttgtgggtgacaagtggttgaaaataacaatttagtgcccaacttgctccacaaagtcctccaaaaatggcttaaaaacttagagtccctatcactaacaatgctccttggcagaccatggagtctcacaatctccttgaaaaacaaatcagccacatgggaagcatcatcaacttttttacatggaataaaatgagccattttagaaaacctattaacaaccacaaaaatggaatctctaccattgcttgtttttggcagccccaaaacaaaatccatggataaatcaatccaaggatactccggaattggcaatggagtatacaatccatgaggctttaccttagactnttgccttttacatacaatgcaatgttcacaaaatttctgcacatccttttttatatgaggcgccaataaaaatgttcttgtaatgtttctaaagtcttttggaccccaaaatgccccatt

SEQ ID NO: 5357 - DNA, 538 bp, Glycine max
agctcgtaacaaatcttctacacttggagtgatcacatgaagtcctcttgaacccttaccacccactctgtcatcatgccgagactcaggaagcccaacgggtttagccttctctaagtattctgaacaaaattcaatggcttcttctacaatgtacctctcaacaatagatgcttctggacgatatatattctctgtatacccttttaagatcttcatgtatcactcaaccgggtacatccaccatagataaacaggaccacaacatttgatttctctgaccagatgcacaatcaagtgaatcatgatgtcaaagaaagcagggggaaaatacatctccaactagcacagtataattgcggcctcattttccaactcatcagacttgactggatcaatgactttgctacatatagcatggaagaaaaagcacaggcgagttatcgctaaactgaccttgtttggcaagatgtcttgtttagccacgactaacaattattccatgagcacgtgaaaatcgtgagacctttaccctacc

SEQ ID NO: 5358 - DNA, 499 bp, Glycine max
tggtacttctactgaagctgagtttctaccctcctcctgtcctgacatagaatctctagtgcagctgaaggatgctatagggttcttgatccttcagattcagtctttgtttcttgtttgttctttttcttggatttatctctcattaaaaaaatatcaatgaaaaatatgatggattaactggttttcctttttctggtatcggagaaaagataatgattttcattggtctcattattcagtatttggatttgtacattttttattgcgtattatctattcattcattatattaggaaagtttaggtttttttaaataacaatatttgatgcaaaaataaaataaaatgattagaactaaaggtattaattaataattattatttcatttatcatttataattatttgtatgtacatgtattataatggtttaatatttattaatatgtaattttcgctaataccatatacaatacacgtcttctataataataaaaa

SEQ ID NO: 5359 - DNA, 502 bp, Glycine max
tctagatgagttatgtctgcgaatcggacatcctgtgaaaagttatgaccatttgaatttctcgagtgcttccgttgtttaatttcaagcgtctcgatattttatgtcctcaaatcagacatcggagcgaaatgttatgaccattcgaatttgtcgagagcttccgttgttcaatttcgagcgtctagatgagttatgtcaccgaatcagacatctgagtgaaatgttatgaccattcgaatttgtcgagagcttccgttgttcaatttcgagcgtctagatgagttatgtcaccgaatcggacatccgtgtaaaaagttatgaccattcggctttgtcgagagcttccgttgttcaatttcgagcgtctcgatatattatgtccccgaatcggacatccgtgtgaaaagttatgaccattggactttgtcgagagcttccggtgttcaattttgagccgtctagatgagttatgtctgcgaatcggacatcctgtgaaaag

SEQ ID NO: 5360 - DNA, 567 bp, Glycine max
tgttgacaaagctgaaaagtgtgtctttgttggtgtaagtgaaacatcaaaagcatataagttatttaatccactaacaaagaagattgtgaccagcagggatgttatttttgatgaagacaacacatgggactggaatgagcagcaacccaattcaattattgttgacaatgaagatgtaaaagaactacagctactcgtaaacattgtcttaacatctccaaatgaagctcaaatagctcctgagacagagatttcaacaccaacaaatgctggaacaacagatgcaactagacatggcaatggggcgggtcgggtacgggtattgtctccccaatcccttaccccgacgcctcgacatatccccatacccgtacccgatacccgacgggtttgagtttattgtcccatccccgtacccgtcgggtatcgggtattcccaaccccgttccacacaccatttagaaaaatattttttttttgtaaaaaatattaaaaatttgatttaaaaaaaaataaattgattgtaaacatttttttttactacttatatataataatttatta

SEQ ID NO: 5361 - DNA, 502 bp, Glycine max
  unsure (1)..(502): unsure at all n locations
agcttcgacctatgtgcatgaattgtgtgccatcacaactgccgttaagaagtggagacaataccttcttggccatcaattcatgatcttgactgatcacagaagtcttaaggagctcatgactcagattgttcaaactccagagcagcaaatgtattttgccaggcttatggggtatgactactccattcaatatcggtccgggagcactaatttggtagctgatgccttatcgcgcttgaaggagggatcagaaggaaccatgttattactatctgtaccttgcctgacatttttagatgaattgaagaagcaattaaaacaagaaccagcctttatcgaattcaggaagaatatattggcccaacccacagccttccctgaatattctattactcgtggattgattntgtaggggaatcgtatctggttactagaggatatccccttcattcagactctgttaatggagtatcattctactccaacagggggtcacatg

SEQ ID NO: 5362 - DNA, 592 bp, Glycine max
agcttcatggtgaatcaaaggtgattcaaaggtgttttgatgataacaaaagatgatgacaaaggtgatgacaaaaagctcaaagatcaatcaaagaacaactcatgtgatcaagttagaataaagaacaattcacgagttcaagatagaatcaagagaaggcttaatcaagctaagtatgaaaagtttttctcaaaaattgagtagcacatgatttttctcaaaacatgtttaccaaagagtttttactctctggtaatcgattaccagattgttgtaatcgattaccagaagcaaaattgttttgaaaaagttttcaaatcgaatttacaacgctccagttaatttcagaaagctgtaatcgattacaatgttttggtaatcgattaccagtgcctttgaacgttgaaattcatattcaaaagtgaagagtcacatcttttcacataaaagctttgggtaatctattacactgatttggtaatcgattaccagtgagtgtttctgaataaaatcaaaagatgtaactcttcaaatagtttttgactttttcaaattgtttttaggttttctaaatgcataactttctaat

SEQ ID NO: 5363 - DNA, 562 bp, Glycine max
agcttgtttaactgtcctgctgcaaagcaatgttatacccagctggaaagatgtatctcctccgatgaggaaacaatctatgctgcttctgcggcagacaatctccagtagtaccatcccaaaactgtaaatgtcaaggtttactgatactggtgcatccttctgccattcaggtgtcaagtacttgcttgtcccatcatcctcttttctcattcttgaatggtcagactttagcagccttgccaatccaaaatcagagatctttgcagtccacgctccatccataagtatattccgaggatttatgttgcaatggataatacggacctcacactcttcatgtagatacagcactcctctggcaatgtctaatgcaattttcagtgtgtctctccgagatatgtgtttctcatcgttgaagagaatacttgcaagagacccgttgctgatgtattcgtaaacaggaagcttcccagatccattgatgcaaaaaccaatgagcttaaccatattcctatgatgtgttcgagcaatgttagtaatatcattcaagaaaacactc

SEQ ID NO: 5364 - DNA, 661 bp, Glycine max
agcttaatagtaaaattaaaaaaacatacgaaaataaaaaatttacaaaagccaaaaacaaatattttttttctaatttttactaataaaaaaattagaaagacttgtaatcattggttgccacaccatattaatcaattatccatttaatgtatgatcaacataataaaaatagaagagttgttcaaagaatgtttgtatcagaaaatttgaatatacatccaaattaagatgttttaaatcaagatgaaattgagataaaatatatcccaaccaagtataattaaaaatgatgttataatattttttaatcatatgatatcaatataccattttaattacatatgttataacataaattggacacatgaaattatgattcatttttattttaaaagatataataataataataataataataataataataataataataataataataataataataataatataattatatgaactgaacacacatacttaacataaattgagcatataacaacgttagttattcatttgtccgatagatattcataagataaatttatgggatggttaatcattaatttttttatgtttaaagactcttaaatatttatatttaacattaatttatctaccaaattaataaatgatgttaaatgtt

SEQ ID NO: 5365 - DNA, 549 bp, Glycine max
  unsure (1)..(549): unsure at all n locations
tcatggtgaatcaaaggtgattcaaagatgttttgatgatttcaatgatgacaacaaaagatgatgacaaaggtgatgaacaaaaagctcaaagatcaaagaacaactcaagtgaatcaaagaacatcttaagagaatcaagaacaagtcaagagttcaagaatcaagaagaattcaagactcaagaagaaagcctagaatcaagaatcaagattcaagatctcaagaatcaagatcaagattcaagaatgaagaaaagactcaatcaagataagtattacaaagttttttcaaaactttgaatagcacatggttttttgacaaaacttttaccaaagagtttttactctcttgtaatcgattaccatattgttgtaatcgattaccagtagcaaaatgagtttgaaaaagttttcaaactgaatttacaacngtccaattattttcaaaagactataatcgattacaatgttttgtaatcgattactagtgccctcgaacgttgaaattcanatttaatgtgaagagtcacatcctttcactcaaagc

SEQ ID NO: 5366 - DNA, 552 bp, Glycine max
  unsure (1)..(552): unsure at all n locations
agcttgaaggcaaactggatgcattggttaacttggtaacccagctggccttgaatcagaaatctgtacctgttgcaagggtttgtggtttgtgctcctctgctgaccaccatacagacctttgcccttctatgcagcaacctggagcaatcgagcaacctgaagcttatgctgcaaatatttacaatagacctcctcaacctcagcagcaaaatcaaccacaatagaacaattatgacctctccagcaacagatacaaccctggatggaggaatcaccctaacctcagatggtccagccctcagcaacaacaacagcagcctgctccttccttccaaaatgctgcaggcccaagcagaccatacattcctccaccaatccaacaacagcaacaaccccaaaaataaccaacagttgaggcccctccacaaccttccctcgaagaacttgtgaggcaaatgactatgcagaacatgcagtttcagcaagagaccagagccttcattcagagcttaaccaatcagatgggacaattggctacnccaattgaat

SEQ ID NO: 5367 - DNA, 564 bp, Glycine max
tagccctagaggggatggaccttttcaggttttggagaggatcaataacaatgcctataggttggacctcccagaagagtatggagtcagcaccacttttaacatttttgatttaactccttttgcaagtggagctgatattgaggaggaggaactaacagatttgaggtcaaatcctcttcaaggggaaggggatgatgcaatcctccctaggaagggaccaatcactagaaccatgagcaagaggctccaagaagattgggctagagctgctgaagaaggccctagggttctcatgaaccttagggtagatttctgagcccatgggccaaggttgggtccaattatctttgtacatattagactaggatgtcattatatttggtccttgtatttagggctccatattgtaggtagggtaccctagaaatataggatttttcagcccttgtatttttgggcacctagactaatttttgtatttggggtagttctgtaatttcacatgcactaagtggatatttgatgtgtgtgggtggaaataaaattaattgaattggtaga

SEQ ID NO: 5368 - DNA, 443 bp, Glycine max
tcccttttcttgaagcaattctgggaactaactcccccttttttctgccatctctctttaattttatatacatatatattatatctttttcctacatagctaacttttccctcttacgcatacatatagatatttttatttcaattgagatgtttattgagcacacggattgttgaattttaatcaagtatgtgtgtgtgttatgagcagccttggcagctattggtgagaaggagtggtacttctatgtgcccagagataggaagtatcgcaacggtgatcgtcccaatcgtgttactacctctgggtattggaaggcaacaggaactgatatgatgatccgaaccgagaattttcgctctattggcctcaagaaaaccctaattttctattctgggaaagctcctaagagcatactaaccagttggataatgaacgagtat

SEQ ID NO: 5369 - DNA, 545 bp, Glycine max
  unsure (1)..(545): unsure at all n locations
agcttgatatgtggcactctatattacagaaacaagcccccacaaggaagtattttaactcccgtggctcaggttcttgtcgctgcattttccaaaagaaaccttccatcttccccatcatccatgatcagagtggaacaagttgagcaagtgaagatattgctatctgttattccgatattctcgtgcaccatcgttttcaacaccatcttagcacaacttcagacattctcagtccaacaagggagagcaatggacacccatctcaccaaatcctttaatatccctcccgcctcccttcagtccattccttacattttgctcatctttttagttcctctctatgacaccttctttgtcccatttgccagaaaattcaccggccatgagtctggaatctcacctttgcgccgaataggctttggtctttttctggctaccttttctatggttgcagctgctctgttggagaanaagagaagggacgcagctgtgaaccatcacaaaagtttgtccatcttttggataacccacaatacttgata

SEQ ID NO: 5370 - DNA, 556 bp, Glycine max
tgctaagtgtttgtgtaagtgattctagcatcttagctagcagcttgttctgtgccaatagtgcatcttgggaagaaagctctaacatgcttctttttgtggttacgtgagttttatcacgcagaatagcatgatcactagcagccatgttctctatgagttccattgcttcttcaagagtcttcaatttaatttttcctccaacagaagcatccaataactgcttgaactgcagtctcaaaccatcaatgaaaatgttcagttgaatcggctcggggaatccatgagttggtgtcttctgcagaaagctacagaatctcttaagcgcttcacttagggattcatctagaaattgatgaaatgaagaaatagttgccttgccttcagctgtctttgattctgggaagtacttcttcagaaatttctctacaacctcttcccaagtctttaagttgtttcccttgaaagaatgcagccacctcttggcttctccagccaaagaaaataagaacaagctaagccgcactacatctttcggcacccctacaattttcac

SEQ ID NO: 5371 - DNA, 533 bp, Glycine max
agctttcaattttttcaagcattgaacgattcttatgaagaattatacaataaagacaatgaagtatcttaggacaaataatgacttggaatcctgctctaatgaattcaatgaattctagagagatgaaggcatggcaagataatgtattctatgttatactccacaacataaagtagctgaaagaatgaacaaaaccttgttggaaagggccagatacatactatcgaattcaagcttgaataagagtttttgggaagaagtagtcaacaaaacatgctatattgtgtttgacatgcaatcacgtaagtgaaggtaagttagagccaaaagccaataagagattctttatgggctatgaagatggagtcaaaggattatgagtctggtctctatctaaaagaaagtcattctgagtcaagatgttgactttgatgaaccctctatgctgcattctaaatatgatgaagatttggccaaggctaaggatgtcactaagcaagttgaagttaagagctccacaatcaaaaaca

SEQ ID NO: 5372 - DNA, 275 bp, Glycine max
  unsure (1)..(275): unsure at all n locations
ctatttatgcaaggacgcatttgagtggtccctcgaatcacaagatgctttcgataccctcaaatccgctatgatcaacaccccagttctggcccttcccaatttccatgaaccatttgtcgtcgagacggatgcttcangcactgccatgggggctgtgctctctcagcaagggcacccattaccgttcttcagcaagaacttcacccttcgcctctttatgcgtaaacctatgtgaggaaactccatgctatcacatccgcagtgcgtaaatg

SEQ ID NO: 5373 - DNA, 595 bp, Glycine max
agcttgtttaccccatgttgaatttgcttacaatagagctggtcatagcaccactaattgttctccttttgaagttgtttatggttttaacccactaactcctcttgatcttttgcctatgcctaatgtttctgtttttaagcataaagaaggtcaagaaaaggtggactatgtgaagaagcttcatgagagagtcaaatatcaaattgagaggaaaaataaaagctatgctaaacaagccaacaaagggagaaagaaggttgtcttcgaacccacagattgggtttgggtgcacatgagaaaagaaaggtttccagaacaaaggaaatcaaagcttcaaccaaggggagatggaccatttcaagtgcttgaaagaatcaatgacaatgcttacaaagttgagctgcccggagagtataatgttagttccaccttcaatgtctttgatttatctcttttttgatgcagatggagaatccgatttgaggacaaattcttctcaagagggagagaatgatgaggacatgttctagacaagggcaaggatccacttgaagactttgaggacctttgacaaggctaaagcatggaaagc

SEQ ID NO: 5374 - DNA, 462 bp, Glycine max
  unsure (1)..(462): unsure at all n locations
tgagcccgcttatctttgtacatattagattaaggtttcattatttttggaccttgtatttagggctccataatataggtaaggtaccctagaaatgtaggatttttcagcccttgtattttaggacacttagactagttttttgtattaggggtagttttgtaatttcacaagcattaagtgaatatttgatgtgtgtggttggaaataaatttaattgaattggtaggagcccaatccaattaaattttagagggggaggtgagcatttgctagctacaccccattgccacatcatatagtcacactntgtgcatgtccttcatgctttacatgcctcatgacaccaaagcacacttagtggagaatcttggacttgatcttggattagtgggctgaaccataactaanattcattaatcataattagtgaaatttggctccaaaattggctcccaaaat

SEQ ID NO: 5375 - DNA, 494 bp, Glycine max
  unsure (1)..(494): unsure at all n locations
tactctaattttgaaaatattatacctatatatggtgacattactagagcaatcaatttatctaagaatctcatgcaacattcaaaggctaagcatattgaaataaaatatcatttcattcatgattatgtgcaaaaggcattttttatataaagtttgtaaacacaaatcatcaatggattggtatatttactaagcctttgtctgaagatcattttatctgtaaagcatttgaatatgatcgagctattagattaatgttgcattttcagaggcaatatcattttataacctctcattaatttgtttggactaatgtgtgttcaagtgtacacacggaagagaaagcctgttcacaaaaataaaaacccttcattttctcttaaaagggaaactaattaataaaaaaataaaaagatcaaaatcataaattaataattataggaagacanaatgtcaatttaatctaaaagtataatcacccaaacagaaat

SEQ ID NO: 5376 - DNA, 571 bp, Glycine max
tgcttagtgtctctgtgagggtctctagttgcttggctaggagcttgttttaggctagtaatgcgtcttgtgatgtgagctcgagaaggatggcatggtgtgtaggctcgatcacgaaggatggcatggtcactggctgtcatattttccatcaactccatagcttcatcaggtgttttcagtttgatcttcccaccagtggaggcatcatgtaactgcttcgaatggggccaaaagccatcaatgaagatattgagttgaactgactcgctgaaccagtgggtgggaatcttccagagtaaaccatggaagcgatcaagagcttcactcagtgattcatcagggaattggtggaatgaagagatctccacctttcccttagcggtcttgggctctagaaaatatttcttcaaaaatttctccaccaccttttcccatttctgcaagctatttcccttgaacaagtgcagccatctttttgcttcaccagccaaggagaaaaagaataggttgaggtggatggcatctttaggaacttcatctgttttcactatgttgccaattttctatg

SEQ ID NO: 5377 - DNA, 548 bp, Glycine max
  unsure (1)..(548): unsure at all n locations
agctttgtctctttactaaagcatgttcgcattgtagtgaagaaaacaccgagactattttagtctcacagttatctagaactacgtagatctgagttcctcattgaggatacgtaggagcaagagcctcgcttttgtcggccgccccacaatctctgtcatactgaccctgaggtcatgtgacatgcagagacaaattatgatcattccgcacacctttttccatccagatacgatcgtgtccgatggcacgcagagataaattatggtcattctgcgccttttgtcatccagaggcggtgagcccgatgacatgtggagacaaattatggtcattccgcaccttttgtcatccagatacgatcgtgtccgatggcacgtatagacaaattatggtcattctgcgccttttgtcatccaaaggcggcgagcctgatgacatgcanagacanattatggtcattctgcacactttttcgccatccggagacgatcatgtccgatggcacacaaagacaaaatatggtcattctgcgccttttttcatc

SEQ ID NO: 5378 - DNA, 533 bp, Glycine max
  unsure (1)..(533): unsure at all n locations
agcttcataaatccatcacttttaatattctctacacaaaaacttaaatgatgttaatttaacaattatttgctcaaaaaataaaaaattagaagagaaaaattacaaattcctctataatttaacccccaaaatatactcataattagtagttatcagcttccagatagtggtatcttaagtttaatgatactattacgtggtatggtttcctagagaacaccgttgatcggtgtatctacatgaaggttagtgggagcaaatttgtaattttagtcttatatattgatgatattttgcttcctgctaataatgttgctatgttacataatgtaaagaagtatctctctaataactttaaaatgaaagatatgggtgaggcattttatgtgatacgaatagaaatattctgtaatagatcacaaggattgttgtgattgtctcagaaaggatatatcaataaagttttagggagattcaaaatggaaaaatgcnttggagggattgttacaatacaaaaaggtgacaagttt

SEQ ID NO: 5379 - DNA, 560 bp, Glycine max
tactaagcctctaaaatccattattccaagaggagataatccaaattgatttattttttttgaagaaggtagctcaattagggtgcagggttactatttgttcacttgatataaatcaagaagcaaaaacaaagtgaagaaaatggaataagcaacatacatatatggtgtatccctaccaaacttcttttgattaaataatccagaaagaagcttgatgtaacctccaccacattcaatctcttgctcaaattttacagaatactgaaagaccaatattttgttcttgtttgtgaattctggtatttttgcagaaatggaaaagtgtttggcatcactcgatgtttgaatacctacaatatcctacaaaatgacaacatgttacaaaaccaaccaaattcctgtcactacccattttgacatattaagaaaggaaacaaatacaagttttatttttgttcatattaagaaaggaaacaaatactaccacttgtgtatatttcattttttcttgccttttatttttaaaattgatatacttttactaataattacaaaaa

SEQ ID NO: 5380 - DNA, 535 bp, Glycine max
agcttgaagaccagatggtttcaatgctttattcttcaagaaggcttggaatatcattggtgatgatatctttgaggcggttaatgaattctttacaactggaaaaattttaaagcagatcaaccatgctatttttgcgcttattcctaagcatgatcaggcctcccaagttaaccattttagacacatatcttgttgtaatttattatacaagattgtgtctaaaattctggccaaccgcatagccccagtgcttgagactattattggggaaactcaaactgccttcattaagaacagaaagatgatggacaacatcttcctcgttcaagagattttgcgcaaatatgcacggaaaagatcctctctgaaatgcctcctgaaaattgacttgcataaagcttatgattccatttcctaggaattcttgaattggatgcttcagtccattggcttcccaacccaattctgtactttgatcatgaaatgtgtttctttcacttcctttagtgtgacagtcaatggattcaattta

SEQ ID NO: 5381 - DNA, 592 bp, Glycine max
agcttatgctgcacacatctacaatagacctcctcaacctcagcagcaaaatcagccacaacagaataactatgacctctccagcaacagatacaatcctggatggaggaatcatcccaaccttagatggtcgaatccttcacaacaatagcagcaacaacaacagacttattttcaaaatgctactggcccaagcagaccatacgtacctccaccaatccagcatcaaaaacaacaacagccccagaaacaacaaacagttgaggctcctccgcaaccttcccttgaagaacttgtgaggtaaatgattatgcaaaacatgcagtttcagcaagaggccagagtctccattcaaagcttaactaatcagatgggacagttggctacatagttaaatcaacaacagtcccaaaattttgatagattaccttctcaatctgtccagaatcccaaaaatgtgagtgccattacattgaggtcaggaaagcagtgtcaatgacctcaaccagtagcatcttcctcatccgcaatgaacctgcccaacctcactctacttcaggaaaagatgatgacaaaaatttaaagagtagtt

SEQ ID NO: 5382 - DNA, 346 bp, Glycine max
ttaccatttgaatttcgggagagatttcgaagtttaaattcgagcggatcgatatattataagcctgaatcggacattcgtgtgaaaagatatgaccatttgaatttctcaagagcttgcgttgttcaattccaacctctcaacatattatgcgctccaaaccgaccttcccggggaaaggtattaaccatttgaattctcgagaagttgcgatggtttatttccaaccggtccatatattataagcctggaaccggccttccgggggaaaggtcttacccattggatttctaaagaaccttcggtggtcaaatttgaacctcttgacattttatgcgccccaaac

SEQ ID NO: 5383 - DNA, 536 bp, Glycine max
  unsure (1)..(536): unsure at all n locations
tatccttaaacaagtattagcaacatcacccaatacttgtttaatttttttctcaccatgacattggtgggagtatccaccgggtttgttgatggctaatctccaccgaaaaatttggttggtcatctatagtggaattttcccttccaaccacgtttgttccatccacaaagctaacactcaagaccttgcttactctgaccaacgacatgttagtaatacttgtttaatctagtattatgtgtacttaccaaggacgttgaaggttatccttgaaagcatgctttttgcaaacaatataattcttgagtaagagattaattctaaatttaagaattggagttaaaaattagaaccagaggatctttatcaagtagaagacacagtatatgctttgcagtttaagcaagaaacaagaggaaaatgccttggaggtaaaaattggagaagtcataccacaagtttctaagcttgactatttgattccaaaatgatgggaaaattaatgatgttacacacaaaatantaagtgggtg

SEQ ID NO: 5384 - DNA, 522 bp, Glycine max
  unsure (1)..(522): unsure at all n locations
agcttgcttctacaatctccccctttttgatgataacaactctaaaatcaagaaacacacacacacactttttcctagtcgatcactcgcataaatttccattctccccttttgtttttgagtttatgcttcatttgaaattaagttaattacttatgtgagttcttgatttattccctatttctctccccctttggcatcaacaaaaagccaaagtgcgtaacaaatataaaacatacataaatgactaatcatacaagagaatagaaaacaatcaaacaagataacttaaccattcatcaatcttagaaagataatacttcatagaatgtcatataatccagaaagtcattcataataaccaaataaaagtacataccactgatcatatattatcaaaataattaagtttaaaattcataaccataaacaaccaagagcaagtaaatataatcatcatgttcaggcatactanacaaatattaaaaaagaaataataagtgctcaaatgtcatanaaaca

SEQ ID NO: 5385 - DNA, 504 bp, Glycine max
tgtaggaaattcaaacgacaataactttttacttggatgtccgattgaatcgggtaatatatcgagacgctcaaaattgagactagaagctcttagcaaattgaaatgacaataactttatacacggatgtccggttgagtcccgtaatatatcgtgacgctccaaattgaaaacggaaactcttagaaaattcaaacgacaataactttttactcggatgcccgacagattgtcgtaatttatcgagagatgctccaaattgaaaatagaagctcgtatcatattgaaacgacaataactttttactcggatgtctgattgagtcccgtaatatatcgagacgctcaaaattttaatccgaagctctgagaaaattgaattgacaatgactttatacacggatgtccggttgagccctttaatatatcgagacgctgcaaattgaaaacagaagcttggaggaaattcaaacgacaataactttttactcggatgtccgattg

SEQ ID NO: 5386 - DNA, 544 bp, Glycine max
agcttgtaccaaattcaaacgacaataacttttttctcgaatgtccgattgtatcccataatatatagagacgctccaaattggaaacggatgctcgtaagaaattcaaacaacaacaacttgttactcgaatgtccgattgagtcccgtaatatatcgaggcactccaaattgaaaacgaaaactcgtagcaaattcaaatgacaataactttttactcggatgttcgattgagtgccgttatatatcgacacactcaaaattgagatcagaagccttgagcattttcatatgacaataactttatagtcgcatgtcctattgagtcccgtaatatatcgggatgcttgaaattgataatggaagctcgtagcaaattcaaacgagaataactttatacaaggatgaccgattgagtctcgtaatatatcgagacgctacaaaatgaaaacggaagctcgtagcaaattcaaacgacaataacttttttctcggattcccgattgagtcccatattatatcgagatgctccaaattgaaaacg

SEQ ID NO: 5387 - DNA, 530 bp, Glycine max
agcttgaaacataacatctattgcaggtaccaccgctttagcaactttgttttttatcgctttctccattccatcctaaaataaccaaaaagagaattcaccatgtaataagtattctgaatcggtaataaagaaaatggaaaacaaggacaattgaaataaaaaaatagtatgcaggatcaaaccatgaaagcatatgcagaaatggacccctaaatatatatttttatcaaaaaggtttttcctattaatagttgacagttcttgcatatagcaaacccttaagaaaattaaaaatatatatatataaaatcaaaacaccgtctaacactcattcttaggacatgaataactggacaagtaacccatggatgattgaaccatccctctgttgtcttcaagactaggacagcaaatatttgcctttctaggttctagggtctataaataaaagaaaaaaacccgagataaatcattcattcaatcataagtgaaagaaaacatgaagaatatatttctaaaaatactat

SEQ ID NO: 5388 - DNA, 489 bp, Glycine max
gaagcttgacaagcagttgggccaaaagatttctctcggtgtcctttctctcaaacgagtctgtgacccagagagaaaccatggaaggatgaaagcctgggtagttcagatctttgatgcatagaacaacttcattcacatctctagcactggattgaatagcaactgtcagaaaaatatgtaacaagacaaaataacttgaaaaaatatcatcatcgtagcactacaaaaattagaaatcaagtttctttgtgactacttaaaaagcatagttactcaacagggattcgaatcgtgaattgcccagctaattttttaatcatgaaacataatttgtatcgaattgtaagactcaaaacaattaaaaattacttcaaatatatcatataattgatatgtagtgctcaatgtaaaaatttaaaatagaaataaataaaataacttaaccataagttctatataaacaaattattaggtatatctaaatct

SEQ ID NO: 5389 - DNA, 564 bp, Glycine max
  unsure (1)..(564): unsure at all n locations
agcttcatccgtgggtcaagaatcatagcaattgaaagaatgacattatggtcactccaatacttgccaaacttttccatcatcaacactgccatattttgcaatactggatcatcacacttaagtgtttctcgcaacaaccattcaattttccatacttgcatgaagtattcattggaagttggataagatgtacctaaaaaaatttcaaataagataattaaactataaatataaatctgaaactatttattataattatgaagtttgaaaaaatataactgaaatcaaattagtcatcttataaaatggcttaaaaaattcacccactttttcagctcttttccattcctcattagatggacaacatttgtattttctatcacgaataatgaaacttgcaaaagcacaacgatacctaagagcactctcaagcatgatataagtagaattccaccgagtaggcacatccaacctcaagcccactntagtatcaatacctcttacttgagcaatacanttgataaatactatntttcttgactcagagctctcacatattta

SEQ ID NO: 5390 - DNA, 562 bp, Glycine max
tcttgttgttactatgaactttcaatatttcttccctccctctttcatctggtaatccaacagtgacctattggaacaattacaaattgtcatgtcttataattttgttgaatttttagtaactactaactagcttaaaagtcatacctaccaactgattgatcgatcgtgcaaaaagttttatactactagcatattataataaaattcattgtcttatacgttaaaatttgtttatttttatagtaattactttaaaagctatatttataataaattctgatgggttaatgatttacaatagcaatgcatggaaattaaactgataaataataattatataggcattaacaggggttaattataaaggattctaaagttgcaagtaacatacctgtctatcaaacctcccaggtctaagcaatgctgaatcaagaatttcaggtctgttggtagcagcaatgactataactccagtgttttcagtgaaaccatccatttcaatgagcaactggattagtgtttgctccctttcatcattttctccacctatacctgtacc

SEQ ID NO: 5391 - DNA, 484 bp, Glycine max
tctggaaggagatcaacttgatgttctatgcctcttgaaggtggcagtccatgaggaatctccataggaaagacatttttaaatttctgcaataagggttgaacactaggagaaatagaaatagtaaactcattagaattatcagtagaaattttactgtctttgcaatactgtagattgagtggttcatgagcaggtaacactttcctcacttcactcgcctctgcaaaataattaaattttctctcatgtgtatcactctctctcttatgtgtatcactcttttcctcgggtgtatcactcttctttttcatattcctttgtggggcctcactattttctttctcttgttctctcttttctctcattctgatttggtcatcacacacttctctaagggatagaggtttaagagtaaacgaggaagatttggctattcgtctgtaaggcttttctttgttacggttcaacaaatgttgcattt

SEQ ID NO: 5392 - DNA, 437 bp, Glycine max
agcttgaaattgatcaacagaagctctcgaggactttaaatggtcataatttgtaacacggaagtccgattcaggcgcataatatgccgagacgctcgaaattgaacaacggaatctctcgagaaactcaaatggtcataacttatcacacggaggtccgattccggcggatagtatatcgagaagctcggaattgaacaacgaaagctctcgagaaattcaaatggtcataacttttaaaacggaagtaagattcaggtgcataatatatcaagaagctcgaaattgaacaacggaagctgtcgatatattcaaatggtcataacttatcacacgaaagatcgattcatgcgcatgatatatcgagacgctcgaaattgaacaacggaagctctcgagaaattcaaatggtcataacttatcacacaagcgggctg

SEQ ID NO: 5393 - DNA, 473 bp, Glycine max
agcttcttcaaaaatattgggttatactcatgtgctccaagatcttcaagactttgaatcagttcaggaatgtcatcataaagaaaatactcatgaattatagttacagattcctttttgtacttcctcaccttctcatcttcttggatttccccatcttcagatgcaggtttggaaagtgaagcatcaagccatccttcagatattgccttggggacaaatgactgaaacaatgccttagctgatggaatatcaagagcaagatcatctagggattctgccaaacgagaaaaccctttcaccatttggctggaactaaccagtccttcttctgctgcttcttttaatagcttcaacattggaggttctgcggaacgtatctccatggcaagtatcacagccctcttaacaacctcatgatggaagaatgaaacccccaactccgtatacacctacaggctttcaatgtggca

SEQ ID NO: 5394 - DNA, 635 bp, Glycine max
  unsure (1)..(635): unsure at all n locations
agcttaccaggctctcaaattgctcaacttcgatgaagccgcatatggagaaaggagaaaattatagttgctggaattaaaggaaatgagactgaatgcctatgagtcctctagaatttacaagcagaaaatgaaggcgtatcatgacaagaaattgcataaacagaacttccagccaggccaacaggactctttaactctaggcttagattgttcctaggtaagttgaaatcgaagttgttaggaccgtttgtcattaaagaagtgagaccccatggagcaattgagttggaggatcctacaagaagcaatcttgaaaaaaatggatactcaatggacaacacttgaagatctacaatggcagacaattagagaggctcacaagcattgtctatttaaatgacccgtgaagaaaacacaacgtctagttaaagacgataaactaagcgctagttgggaggcaacccagcacatatgtacaaaatccatctttctggactttttcaaaaaaaaaaaagcccaacaagtgtatacagtagaaacaggggtgcaagaaagcaaaatcagatgngctcacgaagactcgtgctaagcacgctacttggcgctaagcgtgcaggatgtcacatgcgctt

SEQ ID NO: 5395 - DNA, 390 bp, Glycine max
  unsure (1)..(390): unsure at all n locations
tgcagttagctgtacttgtgaatttatgaagatgacctctttgttcaccttcccagagggagtctctgatgccgacttagttctcttggtgactacaagacctacaactggaaatacacttgcttgggctgtggcatgtgaacgggaccaatggggccgtgctatagctggtacattatcctataattgtgttggtttaaatggtggtctttatcttgcatttgggatgctttgtaactgaaagtgcctttttgtttgtgtgcaggacatgttaatgttgctcctcgtcatttgacagctgaggcaaagactntgctttcagcgactctgatacatgaggtttgattatttttttgtgtctagaagagattatatttgaagcatggctga

SEQ ID NO: 5396 - DNA, 478 bp, Glycine max
tctaaactttatacaagaatgaagctctgataccacttgtttataagtgacctcagtatcttaagaagagaggttgaattaagataccaaactatccccaactaaaaattatctctctctttaactaataatgaaaccctaattatgaattatttcaagaacaattcaaaataaacttctttaaagcgaaatataaactgcaataaaataaaacaagtttaagggaagagagaatgtaaactcagattttatactggttcgaccatgtcctgtgccttcgtccagtccccaagaaacctgcttgagatttccactatcttgtaaaatccttttacaaaattctgaaccacacagggacaaccattcccttgtgttcagataaccttacaacttaagagaccctcggtctcttaatcagatttctttgaataataagaagaagcattttctctgtttacacaaagatgtacaatgaaag

SEQ ID NO: 5397 - DNA, 457 bp, Glycine max
tcagagactgcagcaggatatgagaaggtttagcaaacccctgtgtaatctaaagcagaatctgatcaaagccagagaagatcttcaatttgctcacgaaaaccttagaaacaataacatgaatggagatagaattgatagagtgaggcagctgacagaagaggttattaatcttaatgaattggaggaaaagatgcttatgcagagagcaaaagtggattggataaggaaaggtgatgggaataactcctttttccatgatattataaaaagcagaaataatagaagaagtatatacatgctgtagaaaactgatggaaccttgcttgaaaaccagtctgagatagaggatgagatcatggatttctacaagaaactcatggggactgatgatagccagctgcaccatattgacatagatgctatgagaaatggcaaacaagttaatatggagcaa

SEQ ID NO: 5398 - DNA, 431 bp, Glycine max
tatatatcaaagatatgacaacttataagttgttagctacttatacttagattttgttggttgcattgactctcggaagtctcaacatctggatacatcttcatgatggctaatggagcaatatcttggacaagtgcaaaacaatcattagtttctacttctaccatgaaggttgagtttatttcataatttgaagcaacatcatagggtatttggttaaaaagtttcatggccgatctacaagtgattgattacattcctagactggtaaaggtgtattgtgataatccagctgttgtttttctggctaaaagcaataaaagagaaagtcaaacattgacattaagtgtttagccatgagggaacatgtcaaagtgaatgaaatcattatttaacacatcactattgaactaatgattgtagacccattg

SEQ ID NO: 5399 - DNA, 665 bp, Glycine max
agcttgtcaatcttttgagcaaggaccgcccccaatgcataattggatgcatcacacatcaactcaaatggggctgtccagtcagatgcctgaatgatagaggtggtagtcaatgcatgcttgtggcaatcaaaagcctctttgcactggtcatcaaaatcaaactccacctccttttgcagcagattggatagtggaagggccactttgctaaagtccttgataaagcgcctataaaaccctgcatggccgagaaaggaacgaacctctcacacacaagaggggtaaggcaattgtgaaataacagttatctttgcagggtctacctctatgcccttattggaaattatatgccctaaaactataccttgttctaccattaagtgacattttttaaaattcagcacaaggttagtttcaatgcgtctattaagaactctatccaaactatccaaacatgcatcaagagaggatccataaacagtaaaatcatccataaacacctcaatgcaactctctaaaaagtcactgaaaatgctaagcatacaccgctaaaaggtaccaggggcgttgcataagccaaagggcatctttctataagaaaaagtgcaaaggacaggtgaatggggctttttctgaccctaggagcatatgaattgtaaata

SEQ ID NO: 5400 - DNA, 552 bp, Glycine max
agcttggatcaactcatattactttttattattttactttggtcaaaaaattagacaagcgctaaatattgaaatttctgatatttatgaaccacaagcagacattgttacagcttctttgtcaacatgtaattggactttgcaactatccaatcaatcatagttataaattagtaatcatatcacaaattatagatgaaaattacttatccattcatttaaagattaaccattggttaaaagaaaaacttatacgatatcaattaattacatatataatatctatatctagaactataatgatctaattgtctaattgacaagattacaaacgtctcgtttaatatctttccgtcaagattaccttagcttagggtatatatatttcgcaacgacttcgttgacattaatggtgaagtagttggcgtgcatttgtcacgaagaagcaaagaagaacccttactcggggtcactaacaaggcgtgcgtgctcgttatgctacttgtctacacttcaaaattaaaataaaataaataccagggctttaaaaca

SEQ ID NO: 5401 - DNA, 190 bp, Glycine max
tgctacaattaacacctgaagctctcagatactaccctggatgtaggaattaccacacactcacatggtggaaccctcatctataaaaacagtagcctgctacttacttacaaaatgctgaaagcccaatcggaccatacattcctacagcggtccaacttcggcaacgaccacagaaacatgctacaga

SEQ ID NO: 5402 - DNA, 579 bp, Glycine max
agcttgaatcggacctcagtgtgaaaagttatgaccatttgaatttctcgagagctttcgttgttcaatgtcgagcatctcgacatattatgcgctcgaatcgaacatccgtgtgaaaagttatgaccatttgagtttctcgagagcttccgtggttcaattccgagtatctagacctattatgtgcccgaatctgaccttcgtgtgaaaagttatgaccatttgaatttctcgagagcttccgatgtttaatttcgagcgtctcaatatattgtgagcctgaatcggagctcagtgtgaaaagttatgaccatttgtatttctcgaaagcttccttggttcaattccgagcgtctcgacatattatgtgcccgaatctgaccttcgtgtgaaaagttatgaccatttgaatttctcgagagcttccgatgttcaatttcgagcgtctcaatatattgtgcccctgaatcggacctcactgtgaaaagtatgaccattggaatttctcgagagctttcttggttaaattcgagcgtctcgattattatgggcctgatcggaccttcggggaaaagttat

SEQ ID NO: 5403 - DNA, 520 bp, Glycine max
tatgctgcaaatatttacaatagacctgctcaacctcagcatttaaatcaaccacagcagagcaattatgacctttccagcaacagatacaaccctggatggaggaatcaccctaccctcagatggtccagccctcagcaacaacaacagcagcctgctccttccttccaaaatgctgctggcccaagcagaccatacattcctccaccaatccaacaacagcaacaaccccagaaacagccaacagttgaggcccctccacaaccttccctcgaagaacttgtgaggcaaatgactatgcagaacatgcagtttcagcaagagactagagcctccattcagagcttaaccaatcagatgggacaattagctactcaattgaatcaacaacaggcccagaattctgacaagctgccctctcaagctgtccaaaaccccaaaaatgccagtgccatttcattgaggtcgggatagcagtgtcaaggacctcaacccgtagcacctttcttatctgcaaatg

SEQ ID NO: 5404 - DNA, 625 bp, Glycine max
agcttttgagtgaaaccatgtgactcttcacttttaaatttgaatttcaacattcaaggacactggtaatcgattaccaaaacattgtaatcgattacagccttttgaaaatatttggaacgttgtaaattcagtttgaaaactttttcaaactcattttactactggtaatcgattacaacaatatgataatcgattaccagagagtaaaaactctttggtaaaggttttgtcaaaaactcatgtgctattcaaatttttgaaaaactttttaatacttatcttgattgagtcctttctttattcttgaatcttgagtcttgaatcttgatcttgattattgagatctttaatcttgaatcttgattcttgattgtaggctttcttcttgagtcttgaattcttcttgattcttgaactcttgacttgttcttgattcacttgagttgttctttgatcttttgagctttttggtcatcacctttgtcatcatcttttgtgtcatcattgttatcatcaaaacacctttgaatcattggtgattcatcatgaatctttgctttcacaatattgcctaccctgaataccctaacctaacctgtaccctgtatgcatgtgacctact

SEQ ID NO: 5405 - DNA, 353 bp, Glycine max
tagaacaaatattttgaattctaggtccccttagagattttgttaagatgtctgctagttgatcattagaactaacaaatttagtaataactttgttggatcaagtggcctatgaataattaagaaggggggttgaattaattattgctaaacctttactaattaaaaatttctcttctgagacttttactaaattgttaagagaatgaggagtgaaagataaacttaacagatagtcaaagcgaaaattaaatgcacagcggaaagttaaagagtatggaagaaggagacaaacacacaagagtttttatactggttcgacaacaacccgtgcctacatgcagtccccaagc

SEQ ID NO: 5406 - DNA, 509 bp, Glycine max
tctaaactttatacaagaatgaagctctgataccacttgttttaaagtggcctcaaatgtcttaagaagggggggttgaattaagatattataaactatttccccaattaaaattttatttcactttctattcaagttacaaattcccttaacaatgaacttcttaaatattgattcaaatagaacaatctgaatatgaatataaaacaataataaataaatgagtttaagggaagagaaagtacaaacttggatttatactggttcggccacacccttgtgcctacgtccagctcccaagcaacccgcttgagagttccactatcttgtaaaatccttttacaagttctgaacacacaaggacaatccttcctttgtgttcagaattcttttacaacaagagaccgtcggtctcttaatcccttagagaatttgaaagaagagaagaatgaatctctcttgaaagagatagattttacaatctgagcactctaatgattccttaatga

SEQ ID NO: 5407 - DNA, 553 bp, Glycine max
agcttgacaagtttataaggtcttcctcatagctgttctaagcaaaggtcccaaactgcctatctgcgacattacgttagcccattcacaatgtgcggacacaagtacgatgaaaataacattttattgcccacactgtggtccactaaggagctacctaatggataataaacttatagcgcttactgctaactatgctccttggaaaaccgtggagcctcacgctttacttgaaaaacaaatgcgacccctgtgaagcatcatcaacttttttacatggaataaaatgagccattttataaaacctatctgcaaccacaaaagtggaatctctaccattgcttgtttttggcagccccaaaacaaaatccatggattaatcaatgcaaggatactccggaattggcaatggagtatacaatgcatgaggctttaccttatactttgtctttttacatacaatgcaatgttcacaaaatttctgcgcatcctttttcatatgaagccaataaaaatgctcttgtaatgtttctagagtcttttggaccccaaa

SEQ ID NO: 5408 - DNA, 593 bp, Glycine max
agcttcttatccaaggctcatcttggtggtgaagctcctccttccatggcttattccttactacaaagactactcagaatgccccgaaatacaaggctaaaaccctatactactggaatgaccaaaatacaaggcccagacgaaggaaatacctattctaatatttacaaagataagcgggctcatacttagcccatgggctcgaaatctaccctaaggctcatgagaaccctagggccttcccttggatctctagcccaatctacttggtgtcttctacccaatgcccttgcggggtaggattgcatcacttcatattattctccatgtatatcctccattttcttgtggtttggtgctgtttagagtagattcaaaaaaataaaccgattaaatcttagatctacacttgttcttgcatttctatggttcaaattttgtagatctactcttgaatcatgtttttgtgttgagtttacgttctatcatttttcattcataatattcttgtgctgaaccttagatctaatttttctttcaaatattgattagaaaaaaaaacacaaaatctaagtgtaatcacttaatccatg

SEQ ID NO: 5409 - DNA, 580 bp, Glycine max
agcttgatgaaaaacagtgcttttctctttgtcttgtcatgtgttaacatttttgtgatctaattgaaaagcctgttattattattattattattaccacttgtttgtcttttcacaggtctgtgattttggtctgtcacgaatgaagcaccatacatatttgtcatccaaatcctgtgctggaacggtaacttttcagaacttggatataagcttttggaaattctgtttttactccttattcaccattgatataaattatcaccatagttggtttcattgtaggatctacaatttttacaataaaaaaaactaaatatatcttttgcctgcagccggagtggatggcgccagaagtcttgagaaatgaaccagccaatgagaaagaagttaattctgcgtctgtgtcagcttcatggaaatatgattttgaagttcgcaatgtgatagttaaagtttgcatgcacgtgtgatgtgtattagtttggtgtgatcttgtgggagttaactaccacaagaattccctggcaagggtttgaacccatgcaggttgttggagctgttggatttaaaataaacg

SEQ ID NO: 5410 - DNA, 485 bp, Glycine max
ttgagtgaaacttggtggtttgtcaagaacaggacgtattctctgtgagacaaaccaatataaatttcttgtgtctcattcttattattttctcttctactatttaaactaacccatggtttgaatttgatcttttgtgtttgaaaaattccgtttgttttacaaagatttgaaactatcgtctgatttgctttgcaaaagtctgatatttgttttcttaaggcttgctcatctgatgataactttgttatttacgaaaagaatttaaattttctcaaaatcccaacctttttatgatatttgtctctacacatgtttaactctattttgacctgtcatgggcctaacatgtttctacctccctaaatgcgtatttcataataaaaaaattatatagggctatttccatatttaaacctttgagttatatttatatttaaataagaatccatactttttgtccttttaaatatacctttttttgt

SEQ ID NO: 5411 - DNA, 548 bp, Glycine max
agctttgcataccccaaggatccattattattttacttgtgaaagagagccatgagggtgggctcatgggccactttgggatagaccagacccttgtcttactcaaagaaaagttttattggccccatatgaagaaagatgtccataagcattgcactaggtgtgtggcttgtttacaagccaagtctagggtgatgcctcatgggctatacacacccttacctatcccatctgcaccttgggtagacattagtatggactttgtccttgggcttcctagaacccaaagaggtgtagactctatctttgtggtggtggataggtttagcaagatggcacactttataccatgccacaaggtggatgatgcttaccacatctcaaaactctttttcagggaagttgtgagactccatggtttgcctaggaccattgtgtcagatagagatgctaagttccttaaccacttctggaaaaccttatgggctaagttaggaactaaacttttttctctaccacttgtcatccacaaactgatgggcaaacag

SEQ ID NO: 5412 - DNA, 565 bp, Glycine max
tgcactgcccaaagtggacaaccttccagaaaacgttgaagccaccattgatgtcccttatgatgtcgttcagtatctcaaaaaagcctacgatgatttggaagaacccttgacctgttttctcaaatcttccaaagttgattggcatttctatgacccatatatgttacagttaccaaaaaggttcaaagagaaaaccaaatggtgtggaatagtaagccccggttgggcaccatagttgaaggtattgagccacaaggcagttggtggggttttgactcactctggttggacctctgtggtggaggttgtttagaatgaaaaacctctagttttgttaatgtttcttgcagaccacggattgaactcgagggtgttggaagtgaagaatatggggtattcaattcctaaggatgaacaagatggatcattcacgagtgatgcggtcgctaacttaataaggttggttatggttgtggaaaaaggaaggatttacagagaaaaggtttaaaaggtgaaggatttatgtctgaatattgttagacaagaaaaatatattaacaaa

SEQ ID NO: 5413 - DNA, 691 bp, Glycine max
  unsure (1)..(691): unsure at all n locations
agctttaaaagttagggtcacttataatttaactcattgatttgccgagaaaactaatgaaaaaacgagagtgtgtaatgatttttttttttgtcttgtatgaacatcctttagtaaaatgaacatttctctctatatgattaactttggattttgagtcataccttatccaaaactagacatacatgactttttatacaggtaaagtttataaaattttgttatctaataagtataagttatgcaatagttttataaatactctataaaaggaaaaaaaatgaaaacttgagtattaatataaatttataatccgataaatatatttatgtataaatttggtttgggttggattagattgaattttaaaatcaaatccaaaatctgattttatccaaaacaaatgggtttattaaattttaatttgttcgactattggtttatttgattttcagttntttgcttgatttattcataaagttatttgataaaattagtttatgaacattcctaagaaaaccgataaagtaaagacatcanatgtacaattaagtctattaactagtaaagtacgcctttgttgacanatctacagtgttaaacattcgtagattaatatgtatagnacattctttgcctattgattcttaatggacatctctcgtactaattttttcagtttaaggaaaag

SEQ ID NO: 5414 - DNA, 562 bp, Glycine max
agcttcattggaaagaaactaactttttggttttatttaaaaaatttgataattatatcaattataattatatttctgtcattaattgtatttattaatggataatattgtttattaaacttgttatattacaacatatttaatttggttttatttttaacattgattattgtatgttatgagtattgagtaatgagtaatggcatttataagtgaaatttaaattttaatattatcagatcatgaatattaagagggcgtgccctggtgcaacagtaaagttgccctttgtgaccagttgatttcaggttctggaaatagccataaatactatgttttgttttgcttaatatcgcttgacatattatattaaaaattaaaataaaatgtgttaactattacaggttccttggttatatcattaaaccttaaagttgccttcaccagtttaataaccagtcctattttaaaaccttgcacttgcttataatataagggactgaagtaagatgctgcttgccatttagtagataatatttatgactgaaaaccctaacacgtt

SEQ ID NO: 5415 - DNA, 602 bp, Glycine max
  unsure (1)..(602): unsure at all n locations
agcttgcttctacaatctccccctttttgatgatgacttctttcgaaatcaagaaacacacacacacattttttcctagtcgatcactcacataaatttccattctccccctttgtttttgaatttatgcttcacttaaaattaagtttattactcatctgagttcttgatttaatccctatttctctccccctttggcatcaacaaaaagccaaagtgcataacaagtatgaaacatacaaatacaactaatcattcacacatcaatcatggaaaaatataaactaatcatgaagcaagaaacatgactagatcaaatatatagaaaaatcacatagtcatataacataattcataattgttcaaacaaaccatgcaaataaagaaatactaaattgttcaaatgtcataataatatagccaaatacacggctggaaatcaaagtactagtaatattaaaataagagaaaaactaaaataatggtggcgacggtggtggtagatcaaagcttgaacgaatataagagacatcttcttcgactntggtgattcttgactccatctcattgaagcgcatgtccacttgtaactccaaagtatg

SEQ ID NO: 5416 - DNA, 540 bp, Glycine max
agcttgtagggttaaagtctcacgattgtctcgtgctcatgcaacaattgttagacgtggctatacgagacatcttgccaaacaaagtcaggttcacgataactcgcctgtgctttttcttccatgctatatgtagcaaagtgatttatccagtaatgtttgatgagttggaaaatgaggccgcaattatactgtgccagttggagatgtattttccccctgctttctttgacatcatgattcacttgattgtgcatctggtcagagaaatcaaatgttgtggtcctgtttatctacggtggatgtgcccggttgagcgatacatgaagatcttaaaagggtatacaaaaaatctatatcgtccggaagcatctattgttgagaggtacattgcagaagaagccattgaattttgtttagaatacttagaaaaggctaaagctgttgggcttcctgagtgtcagcatgatgacaaagtgggggtaaggggtcaagaggactgcacgtgatcacttcaagtgtagaagatttgttacaagc

SEQ ID NO: 5417 - DNA, 524 bp, Glycine max
aactctgctttccaccaatcttcgatctctttcaggatcagaatagggttgtttatgaccgggaatcgattggtgatttggatccctacgagtatcaactggtgctacaatgtgacataccagactctttaaatatgtctaagcgcatacttccttagtctaaaactgactaaagaaatgtacttttagttgagcaatgtatccttggtcatttcttatgaagactatatcatctatatagaccaccgagtaagaacatctactctatgacgtatgacaataaaaaactgaatggactgcttcacttcggtatatcccaaaagcctgaacagctgagctgaattttccacaccaagcacgtggggattgtttgagtccataaagagacctccaaaatctgcaaaccaagctatactccccctgagcaacaaatcccggggttgctacatataaatcggctattctaaattcacatgtagaaatgcatttttaatatccaactgatacagcggctaaagacagat

SEQ ID NO: 5418 - DNA, 521 bp, Glycine max
agcttttatttaaaataattccatacctctttatctttatcaaaaataaaaactatctcatatctgttattttaagaagcattctaatataggacaaagataattcataattagccgcatgatcacatgatctgatcctattatgtaacaatagaatattattgttattttatggacaactttgacatttataaaataatactcccttggcagtattaattatattcttggtgctagcgaaaaatataataatattccactagaatatttatgtggttagatgaaattctgtaatttaattatcaaataaattattttgttttgcaaagattataacactcatttgtatgtgacctcatatgttcaatactacacggataatagtacattaatcatcattaatttactagtcaaggtgagcatctaacaacactccttaacgtccggatggtatgaagtaacatcttgtacttttcaagaaccaatgaaagaataatataacgttttcttccatcatttat

SEQ ID NO: 5419 - DNA, 570 bp, Glycine max
gacacttgaaactcagcttccaaccaatcttcgatatctttcaggatcagaataaggctccccatgattgggtagcaatttttgatttggatccataggagtatcaattggtctacaatctgacataccagtttctttaagtatgtctaacgcatacttccttagtctaaaaatgactaaataaatgttcttatagttgagcaatttttccttggtcatttcttatgatgactatatcatctatatagaccaccaagtaaaaacatctactcgatgaggtatgacaataaaaaactgaatggtctgcttcacttcgttttatcccaaaagcctgaacaactgagctgaattttccaaaccaagcacgtggggattgtttgagtccataaagagacctccaaaatttgcaaaccaagctagactccccctgagcaacaaatcccggtggttgctccatataaatctcctattctaattccccatgtacagatgcatttttaatatccaactgatacagtggctaatgacagatggcagctatggcaagaaagagtcaaacaaaagtaattt

SEQ ID NO: 5420 - DNA, 548 bp, Glycine max
  unsure (1)..(548): unsure at all n locations
agcttgtcacttgatgtcaaccagtctgctacttgttctcttgtcatcttccattatatttagcaatttggaaatttattgcttttacaccaagtgatgtttcatagtttagttattaacatctacgatcaaactttatggttagcataaactggaacgctgaacaacagtaggtgttggctttgggttcatgctttctgatagaacaagtactttgaagacatgttttaataatatttttcataattttgaaactgttttatttaagcttcagcagttgttgcttgctagtactcatgctatgttggttactctctagtctacttactactaatgttggagctttttcccatctatgctctctatatccagtatttgaagntaagagctctttaaaggcaatcctatacacattacttctatgaagcaactgtcggagctggtctttcaattggtagcactctacgtggcctccttgaaactggagacaaaatattacaaatcgaaggcatctttagggttgctttgatggggtatatctctttttt

SEQ ID NO: 5421 - DNA, 619 bp, Glycine max
agcttgcggtaaagtaataacaaaactagacattttcaataactcacaatacaaagctttgtttgattctaccaagagaaataatcaaggatgtgcttaaaagacccacgtcaggaatgctggacctctttctacacaccaatctccctgtggcctcactgtaatgggttagcacagaaaatatactgtccatggcagtaacagcacttcgcttctcatcatcactcgcctcacacggctcttctctctccacttctgcatcccacaaagctaaaaaatcagtagaacccaaacactaggacaattactgggagaccaaaaggaactattacaattctgcatcaaatatcaagtttaaaatacattttaactttttttctttatttagcataacctaacatgatcaaaaagcacatgtatctacgttttgtcctaaaattatttttaattatgcgactaatttaattattatggttggtgaagcaacgcttgagtacgaagcactcacttgacatgcatgaataaggaaagaaaaggaagaaaaaaaaaactaaaccaagaaataaacctctgacatcaggttcgagcacttgctccaatgaacaaacgcgatcaatct

SEQ ID NO: 5422 - DNA, 598 bp, Glycine max
agcttgcttctacacttaagtgtttggggtgattatagagaaaatgttggggggagttaaaacaaaatgggcttttcaaataaaaatccgacccactttaagtgactcagtacaaaaacattgcatttcattaagcttgcgtttagtgatcacaatccatatgttggatgcatgtgtatagtgcacaagacttactaagctcattggacgatagggcctttggatgcatatcaatgtgttgagaccttccacataaatttgaaacttcattccacaagaagcatgccaagcaaactcttagcgagattaacctatcctcagtaaagggttttgtaaataaataaacaagttgatctcctgtagatacaaaatgtaattccatagtacccttctaagtgtgatcccttatgaaatggtgttttatttctatatgtttggctcatgaatgcatgataggatttttagaaagatcaatagcaacaatattatcacaaaggatagtaatgttactctcaaataggttatagtcggcaagctgatgttaatccacaggagttgaaaacaaagacatgcaggtgatatatactctatttatgct

SEQ ID NO: 5423 - DNA, 514 bp, Glycine max
tgcatgatttacattctctccctttctcaagaaaattcttatttcttcttgacatcatcaaaatcttcatgatatacattttctgtatacacacgcattaaaaactctttctctttgtatcaacacggtttatataaaaactctattcctgttcaaagatttcttttccgtttttcaacaaacactcgtggtttatacaaaaatttatttatatacactcattactcacacacaagaatttctttttacacattattttcacacacaaaatgtctccatacactttttacatataaaaactcttttcttttctttatatatagacatgacatttgttcacaacgcctctttcttttttctattcttagcgttatcatgattattttgttgggtttatttttacgacgacgttcctaaaggagaactctacaaggtttcggaattctcacaaacattatctacgataactaacacaacagtccacacaaaatgtatgctcaaaacaaaatatgat

SEQ ID NO: 5424 - DNA, 609 bp, Glycine max
gcatgcaagcttcgaacgatcatcgcttcattcttgtttcgatagattatttcaccaaatgggtagaagcggcttcttataccaatgtcatgaagagtgtggtggtcagattcataaagaaggaacttatttgttgatacggactccctaggaagatcattactgacaatggcaccaatcttaataacaaaatgatgcaagaaatgtgcggggatttcaagatccagcatcataactccaccccctatcggccaaagatgaatggggttgtggaggctgcaaataaaaatatttagaagattattcagaagatgacagtgtcatacaaagattggcatgagatgttcccttttgccctgcatggatatcaaacctcggtacgaacttctactggggcaacgccgtattccttggtttatgggatggaagcggcgctcccatttgaggtagaggtcccttcccagaagatactagcggaattgggcctaaaagaatcagagtgggctcaaacatgctacgaccaactcaaccttattgaaaggaagcgtttgacagccgtgagccatgggcgccagtattaacaaaggataaagaacgcgttcgacaaga

SEQ ID NO: 5425 - DNA, 508 bp, Glycine max
  unsure (1)..(508): unsure at all n locations
agctttgagcaaattcaaacgacaataactctttactcggatgtctgattgagtcctgtaatatatcgagacgctcgaaatggaataccgaagctcagagcaaatttaaacgacaataacctttttactcggatgtctgattgagtcccgtaatatatcgagatgctcgaaattgaatgttgaagctctgatcaaattgaaacgacaataaatttttactcggatgactgattgagtcccgtaatatatcgaaacgctcgaaattgaatgccgaagctctgagcaaattcaaacgacaataactttttactcggatgtctgattgagtcccgtaatatatcgagacgctcgaaatggaataccgaagcgctgagcaaattcanacgacaataacttattactcggatgtctgattgagtccccgaatatatcgaaaagctcgaaattgaatgttgaagctctgagcaaattcaaacgacaaaaactctttacttggatgtctgattga

SEQ ID NO: 5426 - DNA, 510 bp, Glycine max
agctttcagctgtctacttggatgattctgatccatctagcatgtttgatgatgtgctgctgtgtaaggatggtaagagtccatctattttttatgctggccgtgaaccgtcaccatcgcagattgctgactcaggaggatctaatgggaagaaaacacgatcgaagaaaggttccaacaagaggacaagtgcaagcgcaacggtggatttatggactttgctaactcaatgtgcacaggctgtggctagctttgaccaaaggactgcaaatgaaacactcaagcagattaggcagcactcttcaccttatggcgatggacttcagcgtttggctcattactttgccgatggccttgagaaacggttagctgctgggacaccaaagttcatttcctttcaatcagcatctgccgcagatatgttgaaagcctacagagtgtatatctcagcatcaccatttctcaagatgtcaaatttcttggctaacagcactattctgaagctagcac

SEQ ID NO: 5427 - DNA, 376 bp, Glycine max
ttatatatcgagccgatgtataataattacttatcaacttatttctctcattagtgacgagcacagagtatattaaaaagaatgtgttaaacatggtattttcaggtgactattaagtatatggatttgacttgggatgcgtgaacaagctctcattcaatggcgaaaaagctcgtgaacgagtcaccttcccctgtccacctctggcactccaaccactgagtgctgtattggacctgtaaaatgcccactcactcatgctggccttgcctaaaatgatagccccagcttctcttaatctggaaactacacctgcatctctaggcaccacagagcccagaagagcaaaagagcctgcagtggtgttcatcttatc

SEQ ID NO: 5428 - DNA, 561 bp, Glycine max
  unsure (1)..(561): unsure at all n locations
agcttttaactgaatttgcagcgttccaattgatttttaaatggtgtaatcgattacaacatattggtaatcggttaccagtgtatctaaacgttgaaattcaaattcaattgtgaagagtcatatcttttcagaaatgttttgtgtaatcgattacatggttatggtaatcgattaccagtgacaagttttgaatgaaaagtcaagagatgtaactcttccaatggttttcaggtttttctcaacgttataactcttccaatggttttcttgactggacatgaagagtctataaaagcaagaccttgacttgcatttcaataactttttataacaactttttagaatttcttgaacaacttttgagaaatcttgaaacccttactacttatncttcttcttcttcctttgccaaaagctttctaagttttctggtttccaaaccttgttctttcacagaaaacaaaagngngctatatctttttattctctcctcccttgccaaaagagttcaacaaggactaatcacctgaatctttttttggctctcttctctttttc

SEQ ID NO: 5429 - DNA, 440 bp, Glycine max
tgaaattgaacaacggaagctctcgagaaattcaaatgctcatttcatttcacacggatgtccgattcagatgcataacgtatctagatgctcaaaattgaaaaacagaagctctcgagaaattcaaatggtcataacttttaacatggatgtctgattccgaagcataacatatcgtgacgctcaaaattgaataagagaagctctcgagaaattcaaattgtcataaattttcacacggatgttcgattcggggataaaatatgttgagatgcttgaaattgagagataaaagctcttgtgaaattccaatggtcataacttttcactcggatttccgattcaagacatttgaaattgaccaacctgagctctttaaaaattccaactggtcgtaacttttcacacggatgtccgaatccgggaaatattatatcgag

SEQ ID NO: 5430 - DNA, 487 bp, Glycine max
tcttagtctcacctgatgaagatgaattcgtggctacttcattctctcctctaatgacaatagcatcatttctggcattgaattgctgggagttggaagccatcttctcaattaaatttctggcttcagcaggggtcatgtctccaagggctccaccactggcagcatctatcatacttctctccatgttactaagtccttcataaaaatattgggggagaagctgctcataaatctggtggtgagagcaactggcacatagtttcttgaatctctcccagtattcatataattaagctctctccactgagttgcctaattcctgaaatatcttttctgatggtcgtggtcctggaagcagggaaatttttttctaagaatactctcttgaggtcatcccaactcgtgatggaccgtggagcaaggtaatatagccagtcctttgccactccctctaaagaatgatgaaaggcgttcagaaatatgt

SEQ ID NO: 5431 - DNA, 598 bp, Glycine max
agctttgagcaaattcaaacgacaataaatttttactcggatgtccgattgagtctcgtaatatatcgagaagctcgaaatggaataccaaagctctgagcaaattcaaacgacaataactttttactcggatgtcttattgagtcccataatttatcggaacgctcgaaatagaataccgaagctttgagcaaattcaaacgacaataacctttttactcggaagtcggattgagtcccgttatatatccagacgctcgaaattgaatgttgaagctctgagcaaattcaaacgacaataacctttttactcagatgtcggatagagtcccgtaatatattgagacgctcgaaatggaataccgaagctctgagcaaattcaaacgacaataactttttactcggatgtgcgattgagtcccgtaatatatcgaaacgctcgaaattgaatgttgaagctctgagcaaattcaaacgacaataaatttttactcggatgtccgattgagtcccgtaatatatcgagacgctcgaaatggataaccaaagctctgagcaaatacaaacgacaataactttttacttggatgtcttatt

SEQ ID NO: 5432 - DNA, 625 bp, Glycine max
ttgagccaactcaaacgataataactttttactcggatgtttgattgagtcccgtaacatatcgagacgctcgaaattgaatgttgaacctctgagccaattcaaacgacaataacttttttcacggatgtctgattgagtcccgtaacatattgagacgctcgaaattgaatgttgaacctctgagcaaattcaaatgacaataactttttactcggatgtctgattgagtcccgtaacatatcgagacgctcgaaattgaatgttgaagctctgagccaatacaaacgaccataactttttactcggatgtctgattgagtcccgtaacatatcgagacgctcgaaattgaatgttgaagctctgagccaatacaaacgaccataactttttactcggatgtctgattgagtcccgtaacatatcgagacgctcgaaattgaatgttgaagctctgagccaatacaaacgaccataacttttttctcggatgtctgattgagtcccggaacatatcgagacgctcgaaattgaatgttgagctctgagccaactcaaacgacaaataacttttactcggatgtctgattgagtcccgtaacatatcgagacgctcgaaattga

SEQ ID NO: 5433 - DNA, 557 bp, Glycine max
agcttcaacattcaatttcgaccgtcttgatatgttaagggactcaatcagacatccgagaaaaaagttattgtcgtttgagttggctcagagcttcaacattcaatttcgaccgtctcgatatgttaagggactcaatcagacatccgagtaaaaagttatggtcctttgtattggctcagagcttcaacattcaatttcgagcgtctcgatatgttacgggactcaatcagatatccgagaaaaaagttatcgtcgtttgagttggctcagagcttcaacattcaatttcgagcgtctcgatatgttacgggactcaatcagacatccgagtaaaaagttatggtcctttgtattggctcagagcttcaacattcaatttcgagcgtctcgatatgttacgggactcaatcagatatccgagaaaaaagttatcgtcgtttgagttggctcagagattcaacattcaatttcgagcgtctcgatatattacgggactcaatcagacatccgagtaaaaagttattgtcgtttgatttgctcagagctcaacattc

SEQ ID NO: 5434 - DNA, 645 bp, Glycine max
ttggctgcgcagcagctctgatttcgcgagtatttatagtttatgacgcattgtaatcgattacaggtatgggtaatcgattacatgcccaataagccttctggtaatcgattacaggatgttgtaatcgattacaggctgcctgttcatgtgtaatcgattacactggatggtaatcgattaccagagcctatcctaggctagtttctaagagaatatctatatttatgctcaaatacatcctatatgactaattttcactactaatacactaaattcaatcattcaattactatgtacacaagaaattataaattctatcataaaaacaagaattcaaacaagatcaaacaaaacaatctacaatcaaaagataaaaagttaatcaacctatcaatcaaccaatcaatcaaccaatcaattcctatttgtctaaatctcttacatctaaaagacctaattctcttctaatagagaaaaacactttcttggggagaggtttagtgaaaatatcagcaagttgattcttagtatcaacaaattctaatacacaatctccctttaagacatgatctctaaaaaagggtgtctaatctctaatatgttagttcttgaatggtgaactgggtgtttggatagaattat

SEQ ID NO: 5435 - DNA, 561 bp, Glycine max
agcttgtagcaaattcgaacggcaataacattttactcggaagtccgattgagtcccgtaatatatcgaaacgctcaaaatttaaaatcgaaggtcgcagcaaattttaacgacaataacatttcactcggaactccgattgagtcccgtaatatatcgagacgctcgaaatttaaaaccgaagctcgcagcaaatgctaacgacaataacatttcactcggaagtccgattgagtcccgtaatatatcgagacgctcaaaatttaaaaccgaagctcgcagcaaatgctaacgacaataacatttcactcggaagttcgattgagtcccgtaatatatcgagacgctcgaaatttaaaaccgaagctcgcagcaaatgctaacgacaataacatttcactcggaagtccgattgagtcccgtaatatatcgagacgctcaaaatttaaaaccgaagctcgcagcaaattctaacgacaataacatttcactcggaagtccgattgagtcccgtaatatattcgagacgctcgaaatttaaaaccaaagctcgtagcaaat

SEQ ID NO: 5436 - DNA, 598 bp, Glycine max
tttgctcatttgatgttgtgaagttgttgataatttgcatttctagatgaaataagccatgttctcttgtgtcaggatgaggtctgttaggagaacacaaacctttaacatcaatcggactatacctttctcttcaaatccagcgatcaactgtgtaggcagaaatttggagaagtatcaacttggtggggtcatatttggttgcaagaatagtactttaaaagaatgtcaatcaaaacaactctttggttagtatttctttcttttgctttcttttattgtaacatttgtaatagattaacagtaattagtatgagtttaaaggattaatgaatcaatgatttgtgttttaacaggcttaccaacaaaccacttttcctatgtgaagaatattgatcctggtctgcctatattcttattcaactatagtgacaggaagctccatggaatatttgaggcatctagcaaggggaaaatgtacatagacccttatgcatggattgatgataattcagatttggatagaacacagtatcctgcacaggtatcacttgttatatcttcttatcaactctatctcacaagggtcataatgata

SEQ ID NO: 5437 - DNA, 514 bp, Glycine max
  unsure (1)..(514): unsure at all n locations
agcttagagaaatatgtcaaatatcgatcttaaagaaaactaacaagaaagaaaaaaagttaaaagcattgagcaaaaaaacaaacaataaatttaaacaaaatgccagaaatgtgattgaaaactgagagaaaagatataacgtggattgataagaagaatagcaacaaagtaagacatttagaaaatagggaaataaaaataaaggaaacaataaaggcaaggaattaaataaataattaccattactgggaatgtaaagcttatgacatgtaagaaagaactgtatatcggcaagtaaataaatggatagaaaataacttanggtgtgtttggtagagaggaatgaaaagggatgaaagtgtgaggaatgaaaagagatgaaagagagtgtaaagtgaagttgtttgattgagatgaaagagagtgtaaaagagatgaaagatttaaattaaagttgtaggcaaataataaaagtaactaaactagagatggagcacttattaaaaaatag

SEQ ID NO: 5438 - DNA, 496 bp, Glycine max
agctttatagtgatccttttcaaaagctttgtcttgaaattgatcactcacactaatcaagtcattctcaagaaattttgtatttcttgattccacaatcctagtgctatgtgatggacaataaaatctataccctttggacttttcagcatatccaatgaaatactcactaatagtcctagggtctagtttcttctcttgtgggttataaacactcacttcagatgggcatccccaaacacgtatatgtcacaaactcagtttctaaccttttaacttgaaaggtgtctttaagacaaccttgattggaactcgatttaatgtatacatagtcatctttaatgcttcaatccacaagaattaaggaggttttctattacttctcatacttcttaccatgtccattaaagttcggtttcttctttttgccacaccattctgatccggagaaccaggcatagtgtactgggcaaaaatctcatgtttttgaagaaac

SEQ ID NO: 5439 - DNA, 574 bp, Glycine max
  unsure (1)..(574): unsure at all n locations
ttctaagcatttttttgggccattccagatcctcgagcgaatctgacccgtagcctatcggctcctccttgcaccggagtcactgatacaccccgtgtttcactgctttctcctccgccctcatcacggttccccacccgccaccacgtacacatggcccttacaggttcgagatgaccagcccctcaggcgtccgctgtgtttccttgactataaagacgacaccgcgaccaccccaccaacacgaatggtccttacccaatgggaaggcgagccaccggaggacacctcgtgggaaaaatggtctgacctatgccaggcctaccaccttgaggacaaggtggttttcggggaggacggtagtgttagcaatgccggcaactacaactccgatagcgagcatctccgtcacgacaccaacccaagaccagtacgtatcaggggagcgccagcacgtctgcgagattatcacgtgcaatacctaccaggaacaaaaggataggctcgtacatacgataatagcaggtgcatgtacagaatcanggaaatgcacacgtgatctaatacacacgtg

SEQ ID NO: 5440 - DNA, 441 bp, Glycine max
tcaagatgtagttaagacccctgacaacttctgttcgtgttttaggcttgatagaaacacagatgttagatataataatatgaggaaggttgcttctcgtgcagattccagggacaactatttatactgtcctagggctgtcgatctacaggatgaggatttaaggcattttcagcggcattgggaaaagggggagcctgtcattgtcagcaacgtgcttgcaaaaacatctggtttaagctgggaaccacttgtcatgtggccgtgcattccgtcagatgactaagaccaagcatgaacaacatttggatgtgaaagcaatcgattgcttacattggtgcgaggtttgcgtaacatctcaatcttgaactgtgagggatatttgcacaaattccattgctcacatacatatatgtgaagcttatgttgataatgtttaat

SEQ ID NO: 5441 - DNA, 655 bp, Glycine max
agctttacattcttccaagttctaccttctttacaagatccttcaattgctttcttccttgaagcatgcgcaaaccaggggtattgggtgatgaaacattaatcacctagaaaaggatattaaaaacattaaacagaatagattaccaaacatttgtcttacaaatttgtagtaagctgcacagatgcttgattaaaaaaaattggaatccctatgtcagttgttttttgccatccatttctcacttttctaaaccagggaattggcaatggaggtgacaacacccttgaaagaaacacatttgttgaacatcaaggacaacctaaaaacataatccttcaaattggatgatcaatcatactactcacatcatgttctggtgaaaggtttgggtgggaaatttggaggatgtaaaaccgttcccattgctgagtttccatcctttcatttctccataatgaacttaaaaaaaatgaccggtgattttaagctggcagtaaaggcaatgatcctgggtataaatcttagatctctttagtcattatacaccacaacacttctgttccttagtaaaccaacattttatatagaagatgtatctttcaatatgttaacttttgtatgcaattacacataataccgataatgaatgatg

SEQ ID NO: 5442 - DNA, 616 bp, Glycine max
tgtattcaagttcaaaagacggaaagcatagtgcattgttctgtttgaataattttaaatagtactacttgctttaccactagtttataataatggttttgtatgttggatatcttttgttgtttttcacttttgattggtaagtaatgtttttcctcctcttggttttgacaaaaagctacactgttcgttcctttgggattagaagaaatgagaagattgcatgctatgtcactatcagaggtaacaaggcgatgcaacttttggagagtggtttgcaagtgaaggaatatgaacttctcaaaaggaactttagtgatactggttgctttggctttggtgttcatgagcatattgatttgggaatcaagtaagttgaagaaatctttgattttttctattttttttactttttcctgaggtaaacattttacgacagacgtgaagttgaagatttgatatatgttgtggtgtgcacaatgcatattcactttatactgcattccacttttgacttaaaccaaatgctaactggtgtattaatataggagtttcaaaattttctttcgttgttttggactttggtgcttatataaatttttttttttttgatatt

SEQ ID NO: 5443 - DNA, 454 bp, Glycine max
agctttaaggactgaaaacagagaattttttgttaaaaaattcattattctttctgcaaaaattcttttataaatccttgtaaagttaaaaaaaatctcaaaataccttgaacatattgagagaaaaggactaagcacttatttgtatattcgtctataagacatttctacactactacaatttatagatttaacatcgcaaggttaacatcggttattcacaaaaccgatgttaacaaaagcacggtgacatttttgtaaataagtagacttagttaacatcggttttggaaaaaccgatgttagtatctcgttaacatcagtttgggaaaaaccgatgttatcgagttgatgttaacattcgattttttacctagttgatggtaacatcggttattttaaaaaaaatgaatgttctatcattatatattaaaaatctggaattgcacaaccc

SEQ ID NO: 5444 - DNA, 439 bp, Glycine max
ttgaataccccaaggatcaattaggaaattacttgtgaaagtattattctcatgaggatgggctcatgggccactttgggatagacaagatgtccataagcattgcactaggtgtgtggcttgtttacaagccaagtctagggtgattccttatgggctatacacacccttacccatcccctctgcaccttgggtagacattagtatggactttgtccttgggcttcctagaacccaaagaggtgtagactctatctttgtggtggtggataggtttagcaagatggcacactttataccatgccacaaggtatatgatgcttcccacatctcaaaaatcttttttagggaaagtgtgagactccatggtttgtctaggaccattgtgtcagatagagatgctaagttccttagccatttttggaaaaccttatgggct

SEQ ID NO: 5445 - DNA, 622 bp, Glycine max
  unsure (1)..(622): unsure at all n locations
agctttgttactgttgcatcaaacttgttatttgatcttgaaataactatgtttcctagacatttaattaccttttgttgattcctgtgcaaacatgtttacttgtgttgttatcctttccatttacttggataagactttgatatttaattgttaattttactaaggatgtcctcctctacaagtgcttatattttgaaactatttctatgtgatggttgtgctggaaatggttttggtaatttatgcttaattattatttagaaggagtaagtttgtaaattataactataaatttttataaaatacatttgtttgtaacttactaaatttttccttttaaagagtaagtgtatgctagtaagtgtgtataatacttgttaacttacactcaatttttcaaagaagtaagttaacaagttattattattaaattttcttaaagtacggtcaggtacaacttattaaattacaccttcaaaataatgattactaatgtagatggtgttattcgttcgtattttttaactagataatttcattntcagcaatattttattttacaaatatttaaattcattatttaggtaaaataaaaaaatttacataaatatcatgaact

SEQ ID NO: 5446 - DNA, 586 bp, Glycine max
  unsure (1)..(586): unsure at all n locations
agcttgcccagagaatgagtccacggaggatatgcttaccacctcaaaagactggaaagcagtttctaatgactcctctgctgcctccacataaggcatagaggatgggcaactcaccaagatatcttccttgcctgatacgatgaccaaatgtccttgcactacgaatttcaacttttggtggagtgtagagggaacaactcccactgagtggatccacgggcgccccaacagacagctttagggggggttaatgtccattatttggaaggtgacttgacaggtgtgagggcctatctgtactgggagatcgatctctcccctaacctctcggcgggtgccgtcgaaagcacgaactaccattgaacttggctttaagtgggaggctttgaatggtaatttgtccaaagtgctcttaggcatcacgtttaaactggaaccattatcgatgagcactttggctacgatatggtccatacacttgactgatacgtgcaaagccttattatgccctctcccctcggcggngatttcttctttggcgaaagcgagatagtntgtgggcatgatattgttgatcaaccct

SEQ ID NO: 5447 - DNA, 533 bp, Glycine max
  unsure (1)..(533): unsure at all n locations
tcttagtctcagatgatgcaactgagtttgtagctacctcatgaactcctctaataactatggcatcatttctggcgctaaactgctgaaagttggaagccatcttctcaattaaatttctagcttcagcaggagtcatgtctccaagggctccaccactggcagcatctatcatacttctctccatattactgagtccttcataaaaatattggagaagaagctgctctgaaatctgatggtgagggcaactggcgcatagttatttaaattgctcccagtactcatacaggctctctccactgagttgtctaatacctgagatatccttcctgatggctgtggtcctggaagcagggaaatttttttctaagaatactctcttaaggtcgtcccagctcgtgatggaccttggagcaaggtaatacagccagtcctttgccactccctctaatgaatgaggaaaagccttcagaaatatgtgatcctcttggacatctggnggtttcatggtggagcagacaatatgaaat

SEQ ID NO: 5448 - DNA, 581 bp, Glycine max
  unsure (1)..(581): unsure at all n locations
agctttcataaaaaatgagtgatattttattatttattttcacaataaatcaaggttataaaaagaacttagcaattgatacatttaaaaaggttgtatgtttcttataattaaaagaataaaatatcatcattggttcttatacaaaggacatttataatgttttaattattttttctctcctttggttgtatatttcatacactatttctctaaccagccaaaagaaattctctctcaatcatttcaaattgtcttaattaatttcttttatcatttaaaaatggtaggactagtatgagaaataaagttatttttttagtatttaacgtaactacgtatttaaaagttgagactattggttaagctgaaatgatatcatgtcagttgatttatgcacccgatgatataatttattctttttaatctaccatattttatctttatctttaaattgaaattaaataatnttttaaaagaatatgtcaacagttaaaaataaattcatattacaatttaaattattcattgagtacaaaataatttatatattgaaatatatttattattaaaaaatttaa

SEQ ID NO: 5449 - DNA, 609 bp, Glycine max
  unsure (1)..(609): unsure at all n locations
agcttgatgattcgactttccttttatggctttaacacattgagtcagtcatcaaatcacatcaccttcaacgtttcattgtcaatcctcaaattcctctctgttttctttctgcagaagaatgtgaagctggactggttgccaaaggttttaatcaagttaaaggctttgatttttcagaaactttttctccagttgtgaagcctattactattaggcttattttaactctagcaatcacaaatcaatgggtgcttgctcagctagatgcaaataatgcctttcttaatggcttgcttaaatgagactgtctacatgtctcaactccctggtttccaacaatcaaatccttctctggtctgtaaactaaataaagccttgtatgggttcaaacaagccccaagacaatggttngagaggctgcaatctgctctaacttagtttggttttgtggctagtaagtgtgatccctctctctttgttttcaagacttcatctcactgtgtatcttttagtttatgtggatgatatcatccttactagcaagtccactcaatttgatcagcacctgacatctaacctaattcaaagtttttcttaaacaactcg

SEQ ID NO: 5450 - DNA, 450 bp, Glycine max
tcccttgttcaattttgagcgtctcaatatattatgcgcttgtttcagacatctgagttgaatgttatgtccatttgaatttctcgagagcttccgttgttcaatgtggagcgtctcgagttattatgcgcctgagtcggaccttcgagtgaaaagttatgaccatttgaattgctcaagagctgccattgaccaatttctgagcgtctctatatattatgcgcctgacccggacctgcgtgtgaaaagttatgaccatttgaattgctcaagagctgacattgttctatttacagcgtctcgatgtataatgcgcctgaatcggacctccgagtgtaaagttgtgaccatttgaatttctcgataggtttcattgctcagtttcgagcgtctagatatattatgcgcctgaatctgacctccgtgtgaaaagttatgaccatttgaatt

SEQ ID NO: 5451 - DNA, 509 bp, Glycine max
agctttcattgttcaatttcgagcatcttgttatattatgcgcctgaatcggaccttcgagttgaaagttatgaccatttgaatttcacgagagcttccgtggttcaatttcaagcgtatcgatatattatgcgcctgaatcggacctccgagtgaaaagttatgaccatttgaatttctcgagagctttcgttgttcaatatcgagcgtctcgatatagtatgcgcctgaatcggacctctgagtgaaaagtaatgaccatttgaattgctcaagagctttcattgttcaatttcgagcgtcttgatatattacgcgcctgaatcggacctcctagttgaaagatatgaccatttcaatttctcgagagctttcgttgttcaatatcgagcgtctcgatatattatgcgcctgaatcggacctctgagtgaaaagtaatgaccatttgaatttctcgagagcttccgatggtcaatttcgagcgtctcgatatattatgcgcctgaat

SEQ ID NO: 5452 - DNA, 589 bp, Glycine max
  unsure (1)..(589): unsure at all n locations
ttaacagcatagccttgtaataggacttccaaagctgtcatatcaagatgattctctctgtgaagcttgctagaaagggaaacaagtaaaaagttctttcaaagtcaaaaatgttgtttccacttattggccgttagagctcctccaccttgacctatttggaccaaccaatactacatccctcactggacatagacatggtctagtcataatgaatgattacaccagatggacatgggtcatgttcctaacccacaaggatgaatcttttgatgccttctataaattttataaaagaattcaaaattaaaaagtttttttatatttgtatctcttcaatcagaaacgaccataggggagagtttgaaaataatctttattgaaaacttttatgaagagaatgatattcaccataactattccactccaagaacaccacaacaaaatggagttattgagaaaaaaaatagacctcttcaataaatggctagaaccatgcttaacgactactctacccctaaacgcttctaggctgaagcaatanacattacctattacatatagaaaaaatttatatatgtcaatctta

SEQ ID NO: 5453 - DNA, 463 bp, Glycine max
agcttgcattgttaattgtagtatttgtgtttcttgcttttctcattgaaattcatgtgtttcatcatattgggtgctaagatattgtttactttaggggtaggccttggccagattagtagaagaaatagctcaatgtggtattccagaaggttcaaggaagatcaatggaaagtacattcattctcaccttgttgctagattagaaggtatattggtatttgctctaactattactcacgattagagcctaccctatatgattaacaagagtacttcctagttctggataactatgtgttaatgtttgtgtggaatatgctaataaagcttctcaacaatgtcttttttttccaactttgccctatttgtgcccttatcagtgcaaatgcattgttttttcctacatagttgtaaatgaacaactgaaggaaaaaatataggatgtcggtacgacataatc

SEQ ID NO: 5454 - DNA, 562 bp, Glycine max
taagctccttcaactgcacaaggctcttaatatttgaagagtatccttgtggaaccttcacccgacgaaaacttatcttctccttcttggacaaagtatggcaggctgggggcaagtaaattttcttcccatcagaccttggatgcaactgtgatcttatacccatattagctagatcttgacgggtattcaagccatccttcgtcttgccttgaatgttaaggagcgccccaatcacactatcacaaacatttttctccacatgcataacatcaatacaatgtctaacgtcaagatcacaccagtacggaagatcaaagaaaatggacctcttcttccatatgcaactttgacttttatccttcttttgggtcttcccaaatacagtattcaggtgttcaacccgctgatatacctgctcaccagtcaacggtatcggtgcaatatcatgctcttgacttccattaaaaagcttttctcagtcgtctataaggatgattgggtgttagaaagcggtgatgcctactgtagaactatttttctccatgtttaagttgtatgt

SEQ ID NO: 5455 - DNA, 487 bp, Glycine max
  unsure (1)..(487): unsure at all n locations
agcttcatatttgaatacaagaatgtgctttcttgctcttctcacatcctttgtgcctttatgagtgacttcaagcatttttcatatttcctttacacttttccaccttgtagtatgaaagaattcatcagaagataaaccagaagttaaaatgtttttagcttttttatcatcttgcccttttcttttctcatcatctttcatctcttcccattttttaggtaccaattcaccatttacttctttagttggtgtaaaagtacctttaacaatagcattccatgcatcggggtcaattgactgaataaagatttccattctcttttgccaaaaagaaaaatgttccgcctcaaacaaaggatgtcgatttaaagatgcaccctctttgaaaatgatttgttttgagcccactnttagaaaanttgtgatcttgagtaacttacaatatgtagctctgataccaattgaaaaagatgatggaactcac

SEQ ID NO: 5456 - DNA, 261 bp, Glycine max
  unsure (1)..(261): unsure at all n locations
ctcggatgtctgatcgagccctgttatatatcaagacgctcgatatngagaatggaagcactaagaatagtcaaacgacaataacctttgactcggatgtccgattgagtcccgtaggatatcgagacgctcgtaattganaacggaagctctgagaanaatcaaacgacaataactnttaactcggatgtccgatcgagccctgtaatatatcgagacgctcgaaagtgaaaacggaagctctaagaatagtcaaacgac

SEQ ID NO: 5457 - DNA, 334 bp, Glycine max
ctcgtcttcttctatagtccagtcttcttctggcttcaattcttcagtgggctatccttctgtgtccagcatcttgtgatgttcccagactttgatgacagctctacaggttctgatatccaaagatttgaggaaggccaccattcttgctgtacaatatatatagttgcttccatcgagaattggtggactgatcactggaccgccttctttcttcatgttcatcagaatttatctgcctagatctcactctgtgatttcgagtgttggctctgataccaattgaaattctgataccagcggacagatgtcgtaccggatgtcacgacatcac

SEQ ID NO: 5458 - DNA, 212 bp, Glycine max
  unsure (1)..(212): unsure at all n locations
acatgcacagtggccaaagatgcatgggagatcctgaaaaccactcatgaaggaacctccaaagtgaagatgtccacatggcaactatnggctaccaaattccaaaatctgaagatgaatgaggaagagtgtattcatgacttccacatgaacattcttgaaattgccaatgctagcactggcttgggagaaagaatgatagatgaaaagct

SEQ ID NO: 5459 - DNA, 350 bp, Glycine max
cgcatagtatatcaagatgcgtcgaaataaacatcaaagtgcaaggcaaattcaaacggtcataactttcgactcggaagttcgattcaggtaaataatatatcgagtcgctcgataattaaacaacggaaagtcacaagacatttaaatgggtgtaacttttcacctggatgcccgattcaggcgcatagtatatcgagatgctagaaattaaacatcagagtgcaaggcagaatcaaacggcccataactttgagtcggatgtccgattcaggccaataatatatcgagtcgctcgaaaatgaacaacggaagctctcagctatctcatatggcataacttttcactc

SEQ ID NO: 5460 - DNA, 295 bp, Glycine max
  unsure (1)..(295): unsure at all n locations
gtgtctcgatatattatgctcttgaatcggacctccgagtgaaaagttatgaccatatgaatgtctcgagagctagctctgttcactttcgagcgtctcgatatattatgcgcatgagtctcgaccccgagtganaagatatgtccatttgaatntctcgagagcttccgttgttcaatgtttagagtctcgatatattatgcgcatgaatctgacatntgagttaatagttatgaccaggtgaattgtttgagagctatcgatgtcaattttgagcgttcgattattatgcgcg

SEQ ID NO: 5461 - DNA, 298 bp, Glycine max
  unsure (1)..(298): unsure at all n locations
ctgcagctcttctgttctccccattgaaacaatnntttttaatatacctcattcaaaggtgcttccaatgtactaaaatccttcacaaatcgcctataaaaacttgctaggccatgaaaacttctcacctcggtcacacttttaggtgaggccactcttggatagccttaaccttttcttcatncaactngtaccccttggaagtcactacaaaaccaagaaacacaacatggtctttcaaaaataatgcatntttcaaggttagcatacaatngttcccttctaagcacacacaaca

SEQ ID NO: 5462 - DNA, 154 bp, Glycine max
  unsure (1)..(154): unsure at all n locations
cagtttcgagcctctcgaaatattatgcgcctgaatcggacatccgtgtganaagttatgaccatntgaatntctcgagagcttccgatgtttaatttcgagcgactcgatatattatgagcctgaatcggagcctcgtgtggaaagttatgac

SEQ ID NO: 5463 - DNA, 327 bp, Glycine max
  unsure (1)..(327): unsure at all n locations
tttggacccatgagctaagtatgagcccacttatctttgtacatattagattanggtttcattatttctgggccttgtatttagggcttcataatgtatggagggtaccctagtaatgtangatgtttcagcccttgtatttagggcacctagaactagttttgtattaaggatagttttgtaatttcacatgcattaagtgtgaatatatgatgtccttcatgctttacatgtctcatgacacctaagcacacttagtggagaatcttggactcgatcttggattagtgggctgaaccatagctganattcactaatcgtaattag

SEQ ID NO: 5464 - DNA, 365 bp, Glycine max
  unsure (1)..(365): unsure at all n locations
acaagttgtcccacagagaatgcaaaatatgcggcattgaagtacgtngagagcttctttaactgctttgggtcgttttgctcgaactggtctgctncataagcaagcatgtttggcttcacacacccactccctaatgccaccaagtagagtgctacatagaatatcatggccttcatgctcttggcttctacgcactgttctccatcagtcacattgcatggangtggcttcaattgaggaacatgagcttggactgatagcagtatgaaaccgtggaatcgtattatatatacatgactaanggctctcgatcaatggcaataatatattntgttagagagagagagagagagagaagagat

SEQ ID NO: 5465 - DNA, 483 bp, Glycine max
  unsure (1)..(483): unsure at all n locations
ttgaattctagtcccccttatagactctgtgaagatgttngctagttggtcattagaacctatcaaatttgtaatgagttctcttggaaaaaccttttcctgaatgaaatgacnaataaatttaatatgcatagttcatccatgaaacatcatattggtggctatatgaagagctntgcttgattgtcacaacataatttcacctattggatgtctctaaacttcaattcttgaaggagatatttaatccaaacgtgtgcacaagtagctgtacacatatncttatactctacttctgcacggtgcagtaacattgtgcttttactcttcaagagacatattcctccataggtcacaatccccaaaacacattgtcatggcgactgcccactatatacaaatcttgcttgaggaatcctgcctgtgctntatttatatacttaaggcgtgttaagatctatgatccaaaatcatctatatata

SEQ ID NO: 5466 - DNA, 251 bp, Glycine max
  unsure (1)..(251): unsure at all n locations
tctctctaaccttactctngaatntacatctcatagtggtgattacttcagagactaagagaacgttgtcaagaatagaacgatcttcaacataagtttattggtattgggaaatgcatttggtaaggatgtgtttaagcccattggctaggaccttgaaaatgaatttatagataacattgcaaaggaataagagcccaaagtttttcatagtagtgggactacattttttggggataaggacaatggat

SEQ ID NO: 5467 - DNA, 266 bp, Glycine max
  unsure (1)..(266): unsure at all n locations
atatctcaccatgaccaggcgtgaaatatctntctgacagttagtttcttaattctccttgtgtgagtcattggcttgtagtntgtagaatccttagatacatcanagggtcacctagaaagggacgttgttacactgacaggggacatagtaacattattggatactcacatgaagactcggctggagatgcangagatagacaatccacttcaagcaattgtatttttgtgggttgaaatcttatctcatggaagtgtaaaaag

SEQ ID NO: 5468 - DNA, 310 bp, Glycine max
  unsure (1)..(310): unsure at all n locations
ccttcacccgacgaagacactgacaaagacttatctcttccttcttggacanagtatggcaggctgggggcaagtaaattatcttcccatcagaccttggatgcaactgagatcgtatacccatatcagctagatcttgacaggtattcaagccatccttcgtcttgccttgaatgttaaggagcgtcccaatcacactgtcacaaacattnttctccacatgcataacatcaatacaatgtctaacgtcaagaacacaccagtacggaagatcagagagnatggacctcttcttacatatgcaactctg

SEQ ID NO: 5469 - DNA, 523 bp, Glycine max
agcttaacaacacttaaggttcaatgccccttctaaactatgtgttcaactaagcaatgcattaaagacatgttaatttaattgaataataaatgcgagtctttattaggaggtgtgattaattcatttaatataataaatgggcggattattcagggagtagttgaagatttgatttattctagactattactttttgttgaacaactgacctcaataacttaagagggggtgaattaattaaattttaaaattttcccgctaacaaattttaacccccttttaaatgatacatgatagactcagaatgcagaagaagaagaagaaacaatcaatttaataatgttcttttaaatgcgcaagacaaagtaaactgcaataaaataactgagataagggaagagagaattgcaaaatcattttatactggtttggccactccccgtgcctacgtccagtccttaaacaacccacttgagattttcactatctttgtaaactctgtacaacttctgaacacatc

SEQ ID NO: 5470 - DNA, 510 bp, Glycine max
agcttgaaattcagaaccgaagctctgagcaaaatcaaatgacaataactttttactcggatggccgattgtgtcgcgtagtgtatcgagacgcttgaaattcagaacaaaagctctgagcaaaatcaaacaacaataactttttacacggatgtccgaatgaatgccgtaatatatcgagacgctcgatcttgaaaacggaagctctgagcaaattcaaaagacaataactttttactaggatgtctgattgagtcccgtagtatatcgagatgctcgacattcataacagaagctctgagcaaaatgaaacgacaacaactttttactcggatgtctgattgtgtcccgtagtatatcgagactctcgaaattcagaacagacgctctgagcaaaatcaaacgacaataacgttgtactcggatggtccgatggatcccgtagtgtatcgagacgcttgaaattcagaacagaagctctgagcagaatcaaacgacaataacttttta

SEQ ID NO: 5471 - DNA, 638 bp, Glycine max
  unsure (1)..(638): unsure at all n locations
taagggacgtgaggtcttgaaggaactacctctttaggttgtaaaactctatgaggagatagaaaccttgagagataaactaggaaaatttattggtggtcatgaagcccttaacaaaattattaaggtgcaaagaaaccctaaagacaaatttagccatgctttcaaaggcaaaaagattgtacatggtgaagaagttattgtttgctatttttgtggaaaaatgggtcacaaaactcataagtgcaaggatctccctacaaagggaaacccatcaaagggtttgtccagtgcttaccaacatccacaagcaaacaaggaaaaaggacccaaaaagatttgggtagctaagaataaaataattcctattacagacctncttgatagtaggaaagaaacaccattgatggtacctggacagtggctgctcgcaacacatgatagtcaaaaagtctatgttctgatccctaagccctatgtctagtggggttgccacttttggagggaataaaaaaggtccgataactggtgtaggtaaaagttgcattcctccctatccttctatagataantgtttactttgttaaagggtgaagcataatttgctaagcataaatcaattatgtgacagtggatat

SEQ ID NO: 5472 - DNA, 634 bp, Glycine max
agcttcctgtcgccagtgatccacacattataccaatgatctcttaagttgataccattaggatattcaaacaataccctctcataagttgataccacatcaccatcatattacataatagcaacgactccctccatcttcaacccaatatggtgaaatatcaaaacaatgcaatgaatcagaccacttgtatttattagcatcttatattgtgagtcaattatcaacaacaaccaagattgcacgacaaaatataagattcaaattacattgagctctacaaggacattgttggcttgtcagactgtcataaatatgattgctaaatcacaatataaaacattaagttttactttttaaaaattaaaacacttaaaaaaacacaatgaaatcataattcctttgtattaatcaatacaacggaatcatgatttcattccctagtcagggtaaaaataaaataaccaaacaaaatcatactcttgttacaaatttgtgaatgttatcaataatacaacaaaatcatgattccattatgttatttaacaatataaaaaaataacaataaaaatatgattatggtgtacaagcatttaacaaaaacatattttcattattaatttttttcacccca

SEQ ID NO: 5473 - DNA, 559 bp, Glycine max
tttggcacaaagaagaagaagttcatagagattgccggctcgtaaaggattgtattggattgattggatttgagaaagattgattagaaaagtgtatattgaaaagcaaatcaaagccttgctgttatagactcttcatgtatggccaaaaggaccatttacagaaggtatcacttttagaaaaacttaaaacaaatttgaaaaagtcacaaaccttttgaagagttacatcttttgatttattcagaaacaatcactggtaatcgattaccaaattagtgtaatcgattacacaaggcttttatgcgaaaggatgtgactcttcacatttgaatttgaatttcaacgttcaagggcactagtaatcgattacgaaaacattgtaatcgattacaactttttgaaattaattggaatgttgtaaattcagtttgaaaactttttgaaatccattttgctactggtaatcaattacaataatctggtaatcgattaccaaagagtaaaaactatttggtaaacatgttttgagaaaaatccatgtgctactcagtttttt

SEQ ID NO: 5474 - DNA, 507 bp, Glycine max
ttaacatttattttacaggtattcataatgttgatatttttattcaagaatttgatctacttttaaccccagttgatgagatataagatgaatctaactgtagttcttttatcactgtttttcaataaactttgcctcaaaaaataaaatacaaggatcacctaattacaagctttctaaattctaattactgatttttaggtttatttacctttttttaatctaaattaaaaatgttaatctctattttttataattaaaaaaactttgagatccctttcactgatgttatctatgactctatgtgttgatgctatcacttggcaaaggaagaaattaagagtaatcgaatacacagaagagtttatgaggtgctatctaaggctgctagctcaaatccaaaacacgctggcttgaatgaacgcgagctctattttgtcttcttttgtaagccaaatagttttcaagagatgaaaagagcttggcatgtgtctgatgtgcactttg

SEQ ID NO: 5475 - DNA, 489 bp, Glycine max
agctttaacaacaattcccttctttttcttatcattttcttcgtgttgatttaatctcaacagttccatttcgtgttcctgtaactttccaaatagtgtagcaagagacatgttagttaaatctcgtgactcagtaatggctgttaccttaggtgtccattctctgcttaaacatctcaatactttatttatgagatcttcatttggaaaatttttccctaaagatgcaagatgatttattatatgtgtaaacctttttttgcatgtcttgtatactttcatttgaattcattctaaataattcatactcatgagttaatgtatttattctagatcttttcacatctgttgcgccctcatgtgttacttgtagggtatcccacattttttttgcacttttacaatttgataccctaaagtactcatccattcctaaggcagatgtaattatatttttgacttttaagtttgattgcactaatctctttt

SEQ ID NO: 5476 - DNA, 588 bp, Glycine max
agcttatgctgcaaatatttacaatagacctcctcaacctcagcagcaaaatcaaccacagcagaacaattatgacctctccagcaacagatacaaccctggatggaggaatcaccctaatctcagatggtctagccctcagcaacaacaatagcagcctgctcctttcttccaaaatgttgttggcccaagcagaccgtacattcctccaccaatccaacaacagcaacagccccagaaacagccaacagttgaggcccctccacaaccttccctcgaagaacttgtgaggcaaatgactatgcagaacatgcagtttcaacaagagaccagagcttccatttagagcttgactaatcagataggacaattagctacacaattgaatcaacaaaagtcccagaattctgacaagctaccttctcaagctgtccaaaatcccaaaaatgtcagtgccatttcattgacgtcgggaaagcagtgtcaaggacctcaacccgtagcaccttcctcatctgcaaatgaacctgccaaacttcactctacttcaaaaaaggtgaagacaaaatttacctacaatttctgaca

SEQ ID NO: 5477 - DNA, 520 bp, Glycine max
agcttgacaagctagcttgtttaactaatattaataataatgatgataataataactttattttatcaaatcttatcttatccagattttattctatctagattttatttcatctcatctcatcttatcttatctaaattttattttatttcatttatgggttgggacttaaaatagatttgtaagctttggggctgaggacttatatatcaacacaaaggttttagtttagggagcttttttcagagaggagaataattctaggatgttagaatttcagtttttattactgttcatgcacattgttcacgtagaataaaattcattttttgcaaatcatctttgatccatacatttgttcatattatgctgtttttattttctttggatatactttgcgctttaacgacttggaatcaatatgattttggttatcaattatttttggatttgtcattacttatacgaaattttataagtttcttttttaggtaggatttcactaggtgttaaaataatg

SEQ ID NO: 5478 - DNA, 508 bp, Glycine max
tatagaatatataataaaagaacaatgacaattgaagagtctatacatgtttcctttgatgagtctaatgccattcttccaaggaaggattttttagatgatatttcagattccttagaagatacacatattcatggaaataactctaaagaaaaagatgaaggaagcaatgaagattctcaagataatggggctagaggaaataatgaacttccaagagaatggaaagcctcaagagatcatcccctcgacaacattattggtgatatatcaaaaggggtaacaactagacattctcttaaagatttatgcaataatatggcttttgtatctatgattgaacctaaaaatataaaagaagccatattagatgataactggataattaccatgcaagaagaactgaatcaatttgaaagacataatgtgtgaaaactagtacaaaaacctgaaaattatcctgtcataggaacaaaaagggtttttagaaataaattagatgaacatg

SEQ ID NO: 5479 - DNA, 433 bp, Glycine max
ttagactagccttgataggaatttggtgactcactcttgttgtcattgctcagggcttgttgtcatcatctttgaatgtatcaaaactgcttgaatcaaccttgattcatcatcatgaagcttgcttctacaatagatagcatggctcattggtgtagccatgtgcttagcattttccatgccgaatctatgaataaactgtttgcggtacttatattgattgacaaaaattctagtcttggtatgtttaatttgtctatcaagacaaaaattatatactcgcataatggacatatcaaactgactttgcatgtcatgagagaagtccttgcacaataattcatgagtaaatctacaaataatatcatcacacatatatatgaaccaagaaaacatcatgtaatgttctctttatgaaaagagtaatatctac

SEQ ID NO: 5480 - DNA, 544 bp, Glycine max
tattaccttataaatgtttgatggatatttcagatatccactttggtaatgatactcattgccgacattggaggttttggcttaaccatgttaatcaccacctttgctgtgaagggcattaaccgtgtccatgctgtgggatggatttgtgccatttttaacattgcagtgtttgctgctcccttaagcataatggtacattctatattcaattattcacataatatagatcttgcatagtttgatatgcaatctgaaatatgtaaaatctgtacattaattgcagaggagggtcataaaaaccaaaagtgtagagttcatgccattttcattgtccttatttcttacgctctgcgccaccatgtggtttttctatggtttcttcgacaaggatgacttcattatggtgaggaataacacttctatatctattactcattctactcattttctcttgaaagcaaactgattagtgttttgttttgtggattatcagtttcccatgtgttaagatttatttttggcatctctcaaatgattttat

SEQ ID NO: 5481 - DNA, 639 bp, Glycine max
tagaagaaatctcaaacgatagatttcacaaaatcttttctaaatcttttaaaatattattctactttttcacgtgagataaggttttttataacatcagtttgataatttttaatgattttaaaaaattgatctgtatttttatagtttgaaaattatttttaatcctgtattttgtaattaaaataattttaaaaaatcaaaatcaaaattcatacaaaatatgaaataagcaatgatttacgaaatatctaacgtatgctggaaaacatcggcgacagaaaaaatctgaaaaataaataacaaggataacattttttccccgcaaaaaagcactttatagtcagatgtagtttcaatattttaaataataacattctcacatttaaaaataaaataaaaattagagaatctcgtatcttttcgtagttatttatccaaatagttttactttagaatatataaaataatcttatagctatttttatactaccctcctatcatatatacatgcatatctaagtatatttattaattttaataataatcttaaaaatcacttatcaataattttataaattaattagtacagggatgtttacattagtaatttttaatattagattaaaattttaaaaa

SEQ ID NO: 5482 - DNA, 477 bp, Glycine max
agctttacagcagatgcccctttactccatgttcttgaaggatatgttaacaaggaaacataagtatattcaccaggaaaaaattgtagtggaaggaaattgtaatgttgtgattcaaaagatccttccacccaagcataaagaccttgggagtgtaactattccttgttcaattagagaagtcactgtgggaaaagctctgattgacttgggagccagcattaatttaatgtcattctccatgtgcagaaggttgggagagttggagaccatgcccactaagatgactttacaactgggtgaccgctccattaccagaccatatggagtaattaaagatgtgctggtcagagtgaaacattttatcttcccgacagactgtgtggcaatggatatctgtgaagatactgacattcctgtcatattgggaaggccattcatgttaactgcaaactgcatatttgatatgggtagaaa

SEQ ID NO: 5483 - DNA, 434 bp, Glycine max
tatcaacatcaaacttggagaaagagttcttggggtcaagacatgagaagcaatcaagtataatgttacttccttcactaaagcggcgatccatctccacacatattttatcaatagcaacataaaaaatctctgcacggtaatgatgaagattagtgatagtcctcccttctgctcttgaacgaccccgaactggtatttcgtcatccatatttggtactagaatacttttagcaacacaaaatccttggacatcggcaaaaaaattattccagccactctctctcattgtgcccaaccgagctttgacaacatcaactaattccatggcattcacaatattaagatcttttctttgcaatatatttgaaagctcgtttgtgataccaaacaactttaacattaacctcaaaataaaagcaaatttaaagctc

SEQ ID NO: 5484 - DNA, 489 bp, Glycine max
  unsure (1)..(489): unsure at all n locations
cagcttgtatagaaggtgcgttcctaatttctctacaattgcatcacctctcaatgagctggtgaaaaataatgtggcatttacctagggtgaaaaacaagagcaagcctttgctttgctcaaagaaaagcttactaaggcacctgttctaactcttcctgacttttctaaaacttttgagctagaatgtgatgcctctggagtgggagttggagctgtattgttacaaggtgggcaccctattgcttattttagtgaaaaacttcatagtgccaccctcaactaccccacctatgataaagagctctatgccttaataagagccctccaaacttgggaacattaccttgtttccaaggaatttgtcattcatagtgatcatcaatcacttaagtacattagagggcaaagcaagttaaacaaaaggcatgcaacatgggtagagtacctanagcaatttccctatgttattaaatacaaaaagggaaa

SEQ ID NO: 5485 - DNA, 546 bp, Glycine max
caggaccttaaaactcagcttcctgggaatatgtctaagaagttgagcttagctctcacacctctctaatagctaagctcacctccttgagataagaagctagagcttagctacacaccccctataatagttaagctcactcttatgcccaaaaacatgaaaatacaaaaaagtccctactacaaagactactaaaaatgccccgaaatacaagactaaaaccctatactactagaatggccaaaatacaaggcccaaacaaaggaaaaaactattctaatatttacaaagataagcgagctcatacttagcccatgagcttgaaatctaccctaaggctcatgagaaccctaagaccttcccttggatctctggcccaatctacttggagtcttctatccaatgcccttgcggtgtaagattgcatcatgataaaccaacttcttaaagcatttatgtgagtcaagtggagttttaaaatgtttcacaaagaaatgcccaagttatattggacaaagaatatatagagtatctctcaacagaaca

SEQ ID NO: 5486 - DNA, 532 bp, Glycine max
  unsure (1)..(532): unsure at all n locations
agcttgtagcctttatatccttgagagtagccaaggaacacaatagccctaggtgagaatttgtgtttgctggatatcanagtggaggcataacataatgttccaaaagtcctgaaatcagcatagttaggaagtttagcatgtaaaatcacaaatggtgacttggctttcagaatggggctatgggtcctgttcatcaagaaaactgcagttttgacacattcaccccaaaattttaatggtaaataagattgaaacagcaaggcacgaacaacatttaaaatatgaagtgtttcctttctacaacattgnttttctgtgggcgctccacacaggaaaattggtgtaggacacatttcttcaaaaagaaatctgaaaaggcaagctcttttgcattgtcagatctgaatcttttgatggtggttttaaattgagtttccacatatgaaaaaatttgtggtacaataaggagacaatcagattatttataaaaaagtatatccaatgaacctacttttatcatctactaaag

SEQ ID NO: 5487 - DNA, 469 bp, Glycine max
ttgagaaatatactaccccatgaagttcatcaattagttcatcaacagtgggaataggaaagttatctttgattgtgatggcattcaaggccctgtaatctgtgcaaaatctccaagtgccatccttcttcttgacaagaatgattggaggtgaaaaatggcttctgctaggggcaataatcccttccttgagcatgtcagctatcattaattacttcaatctgatccttccggctgtgaggatacctatatggcttgacttttactggtccagcaccttcaaccaatgggattgaatgattgtgagttcttctagggggtaatcctgatggcacatcaaagactgttctataagtgtaaagtaaacagttccgcaatggcatgcgtatgctgcattcttctcaggtgattaaattgagcctgttgtcatagagagggtatctcaccatgcaaggtgataaattgatta

SEQ ID NO: 5488 - DNA, 503 bp, Glycine max
  unsure (1)..(503): unsure at all n locations
agcttgtaattttcagaaaaacaaatacctattcaaccatatcaacatactaagacaattcaaggtgaaatcaagagacatagagagcaatttaaaataggttacgtgcactacacaacatcattcaatgctagatccatctaagatgcctagatcattccttataaagaagaacctatctctagcaagtggtttagtgaatatatttgctagttgatgctcactatcaatgaaatcaatgcaacaatcaccttttgaaacatgatctctaagaaaatgatgtcttatctcaatatgtttggttttagaatgcatgacaagatttttggttaaattgatcgcacttgtgttgtcacattgtaagggaatgtgatcaaggattacattcccttagaatgcatgacaagaggcctttatgagttctccattctctagggacatccataggaggtatggttgagatctttntggttagttcatgttctttcactttggtttttatc

SEQ ID NO: 5489 - DNA, 438 bp, Glycine max
tccatttgtatactgcaaccataataagaaaaaagctttttgtttcccctcctgtggatgtagccttgatcaaggtgaaccacgtaattctgtgtgtgttctttctctattttcttctctttcaccttgctgcaaaactctgtgtgtatgacatagctttctgctgtttttgttgttgttgttcttgcttgttcttcatcacttccataatagataactttctacctgtttcatttgtcgatgaggagttggataaactgttttcaactgatttatcatcacgtgcacaaaacaagaaaactgagatatacaccagaattctttccatccttaataatggtgtagttattggtgataagaagtttgaatttctagcattctcatcaagtcagttgcgggaaaactctctctgaattgttgctcctacaacaactggat

SEQ ID NO: 5490 - DNA, 630 bp, Glycine max
agcttaacaaaaggcatgcgaagtggttggaattcctagagcaatttccttatgttatcaaacataaaaagggaaaaggtaatattgtagccgatgctctttctcggcgtcatgcattactttctatgcttgaaacaaaattgattggtcttgaatgtttgaaaagcatgtatgaaaatgatgaaacttttggagaaatttttaaaaattgtgaaaaattttcagaaaatggtttctttagacatgaaggctttcttttcaaagaaaacaaattgtgtgtgcctaaatgttctactagaaatttgcttgtttgtgaagcacatgaaggaggtttaatggggcattttggggtccaaaagactctagaaacattacaagaacatttttattggcctcatatgaaaaaggatgtgcagaaattttgtgaacattgcattgtatgtaaaaaggcaaagtctaaggtaaaacctcatggattgtatactccattgccaattccggagtattcttggatgaattattcaatgaattttgtttggggctgccaaaaacaaccaagggtaaaaattccatttttgtggtgctgaaaaggttttctaaaaagcttaatttatttcatgtaaaaaaaat

SEQ ID NO: 5491 - DNA, 440 bp, Glycine max
  unsure (1)..(440): unsure at all n locations
tatcatttttttccttaaattttctttctcattttttctgtcaaatttgttaatttaatcaagttctccaattatttaaaaacattacaattaaactaacggaaataatggaaaatgataccatcgtaatagttttaaataattgacgattcaattaaatatttttaaacaaactttttaattgaatttttaattataattaaaaaatcaattgtatagttaaacttttttctatcaccttagatatcatatttgtcactcttataatatttataatatttatgcagatgcttgagtaattatgatgttggttttcaattaaaattaaaatttgactaanatatgtttgtgataactgatgaaatctaaatttgtgggtattccttaatattttttctttgttttgctctatgaggatatcactaataatttttatttta

SEQ ID NO: 5492 - DNA, 563 bp, Glycine max
agcttgcttgaatcaacatttttcaattgatccaaattaacttcaggtagtcttttgtcaactatgcacatgataatatctttctcaaactcttcttaagccaaaactgagaactctttgttattggtctcttctgagatttcaaagttcctccttgcacacactatctctagcaaaacaaccataactgtaaacatcagattttgaagttactgaaagatttgggagccattctggagctacataccctttggttcctctcatatttaacacggtttggtacctgtcatccttgggagttatgagctttacaaggttgaaatacgagagtttggcctcgaaatcctagtccaagagaacattttcaggttttatgttgacatatgcagttatgacactcttcatgaatatacatgatagttgacacccccttgcgacgtggtgagggggcgtggtcgagtcccacatcgaataaaaatagtgccgagatacactatattagtggggagtaattctcaccttacaagttgggtttgtaggattaagctaaactcatgaaaaat

SEQ ID NO: 5493 - DNA, 515 bp, Glycine max
agcttcaattggagtcttgtctcttacagacttagttggacatatgttgagtatgtaaacagcagtgtacactgcttcagtccagaatgtgttaggtagtcccttctccttgagcatcgatctagctatttccataactgtgcgattctttctctcggacactccattttgttgaggagaatatgcgactataagttgtcgctctatgccttcatcctcacaaaatatttcaaactcgcgagaggtgtactctttgccgcgatcacttcttagtacttttatctattttccactttgattttcagcaacggccttcaactttttgaatactccaaagacttctgatttttcttttagaaaatatacccatgttattctaaagaagtcattattgaagagtatgaagtaccagttgttctcatgtgatggcagccttattggtccacagacgttcgtatgtatcagctgccatagatctttcgctctccatgctccgcttgttgaaaaaggaaatc

SEQ ID NO: 5494 - DNA, 485 bp, Glycine max
cagctttgacatgttggatattggcaacaatttctatatgggcaagctcgacattgaagcagataggacaaaggtaatggaggaaggcccctagatgatctttgatcactacctaacaattcatacttgggcccaggattttatctccgcggcgacaaagattgatgaaaccctagtgtgggttcgatttcctggccttgaccttttactatgatgaaagcattctcttggctctggcaacgaccattggcaatccaattagtgttaattcaaataccctacacataagacatggaagggttgcgagagtttgtgtgcaaattgatttggacaaacctgttgtggggaaaaattggctaaagggtcactggcatagagtagaatatgaaagtttataccacagctgtgcctcatgtggtcggaatggtcatttggctcgaaactgccctacttcattacatgtagacacccatcattcttcttcg

SEQ ID NO: 5495 - DNA, 527 bp, Glycine max
agctttttggtggggagcaataaggtgcctgttgatgttctccaatatgctgatgatacgatatttttcggagaagcatctatggcaaatgtcaaaactgtgaaggttattctcaggagttttgagctggtttctggattgagaattaattttgctaaaagcaaatttggagttgttggtcaatctgaggagtggtgtcttcatgctgcaaactatcttaactgtgctttggttcaatttcctttatgttatttaggaattctgattgttgtcaatcccaaaagaagggtggtgtgggatcctgtaattaggaaatttgaagataggctgaataggtggaataagagaaacatatccatggctggcagactcactcttattaaggctgtcttaacagcactacctttgttttacttaacttttttcagggcccctaaaacagtcattaataaggttatcttccattcaaagacaatttttgtggggaggttaaccagaagagaagaagattgcctgggtatcttgga

SEQ ID NO: 5496 - DNA, 345 bp, Glycine max
gctgcatgctgccatcttatgctgcgaacatgtacaatttactttctcaacctctgcagcataatctacctcagtgcaactattatgactctctccagcaacagatactgccctggatggaggaatcatcctaccctgcgagggaccctctatccactgcatcaacgggtgtctgttacttacatacaaaatgctggaggcccaagcttaccatacattccttcaccgaaacagcgctacaacaaccccataaacaaccaacagttgaagcctctccacacccttctatggaataacttgcgaggccaatgactatgcacaacatgtaattttagcacagagacc

SEQ ID NO: 5497 - DNA, 487 bp, Glycine max
tgaagtagaggagaccttcaatcctagaacgtaacgtggcatacaaaagtgggcagttaacttgaatgaccattattttcaatgcggaaagtattatgttcttcactatccatgttcacacattattgctgcttgtggttacgtgaacatgaattacttccaatatgtagatgttgtttacacaaatgagcacatcctaaaagcttattccgcgcaatggtggcctcttgggaatgaagcggttattcctccttctgatgagcaatggacacttatccctgatccaagtacaattcgtgcgaaaggtcggccaaaatcaacaaggataaggaatgagatggattggctggaaccatctgagcaccgacaaaaatgtagtagatgtggaagagaaggacacaacagacgtcgatgtccaatgcaatctgaatgtggaagttgtaaaataattgaattatgtattttggttgcctacttgaatgaaatg

SEQ ID NO: 5498 - DNA, 535 bp, Glycine max
agcttttggtaaaagaagaagaaaaagttcatagagattcaaggcttgtaaaggattgattggaaaagtaaaagtgtgaaagaattaattgattgaaaatgcaaaacaaagccttgcttttatagactcttcatgtctggtcaagaagaccatttagaagaggtataacttttagaaaaactttaaaaccaatttgaaaaagtcaaaaaccttttgaagagttacatcttttgatttattcagaaacagtcgctggtaatcaattaccaaataagtgtaatcgattacacaaagcttttatgtgataagatgtgactcttcacatttgaatttgaatttcaacgttcaaaggtactggtaatcgattaccaaaacattgtaatcgattacaactttttgaaaataattggaacgttgtaaattcaatttgaaaactttttcaaaacaattttgctactggtaatcgattacaacaatctggtaatcgattactagagagtaaaaactctttggtaaaggtttttgttagacaagt

SEQ ID NO: 5499 - DNA, 313 bp, Glycine max
gccttgtttgaaagaggtatgcctatgttgctgcggaagattttattatatttacctgggtcaactttatcagagagaaatcagacacctttgaagtattcaaagagttgagtctaagacttcaaagagaaaaagactgtcgtcccaagagaaccacgagtgaccatggcagatagttcgaaaaccgcaagtttactgaactctgcacatctgaaggcatcactcatgagttctttgcagccattacaccacaacaaaatggcataggtgaaaggaaaaacaggactttgcaggaagctgctagggtcatgct

SEQ ID NO: 5500 - DNA, 545 bp, Glycine max
  unsure (1)..(545): unsure at all n locations
agcttcaagaataatggcctcagcaaacttcttattcccagaaggaaactctataaataggcctcctatttttaatggggagggttaccactactggaaaactcgaatgcaaattttcattgaggcaatagacttaaacatttgagaagccatagaagttggaccttatgtacccaccatggtggctggtaatacaacaatagagaaacatagagaagagtggtctgaagaagaaagaagattagtacaatacaatttaaaggctaaaaacatcattacttctgccttaggaatggatgaatattttagggtgtcaaattgtaagagtgctaaggatatgtgggacactctacaagttacacatgagggaacaactgatgtcaaaagatctaggataaatactctaactcatgagtatgaattatttaggatgaagacaaatganagtttacaagatatacaaaaaagattcacacatatagttaaccatcttgattcattangaagaacttttcaaaatgaagatcttataaataaagtatttt

SEQ ID NO: 5501 - DNA, 559 bp, Glycine max
  unsure (1)..(559): unsure at all n locations
tcaacatcagaccacttccagggtgctggaactacttcacatggacttgatggggcccatgcaagttgaaagccttggaggaaagaggtatgcctatgttgctgtggatgatttctccagatttacctgngtcaactttatcagagagaaatcagacacctttgaagtattcaaagagttgagtctaagacttcaaagagaaaaagactgtgtcatcaagagaattaggagtgaccatggcagagagtttgaaaacagcaagtttactgaattctgcacatctgaaggcatcactcatgagttctttgcagccattacaccacaacaaaatggcatagttgaaaggaaaaacaggactttgcaggaagctgctatggtcatgcttcatgccaaagaacttccctataatctctgggctgaagccatgaacacaacatgctatatccacaacagagtcacacttataagagggactccgaccacactgtatgaaatctggaaagggaggaagccaactgtcaagcacttccacatcttttgaagtccatgttacattttg

SEQ ID NO: 5502 - DNA, 385 bp, Glycine max
tgagcgttataccagctgcggtgggctgcagctacgtcacatggacgtggcggagcccgcgcatgtgctcatccttggaggagagatgtctgcctatgttgctctggatgatttctgattagtgacctgactcgactatctcttagataagctttacgcctttgtcatatgcttcgagttgcatatctaactcaaattagaaatatactgtgtcatcgctagaattacagagtgaccatggcagacagctcgaacacacttaggacactgaatcctgcacatgtagtgcatcactcatgagctcgctgcctccttggcagatcaagagcctgtttttggctatctgcataacactactgtgccagactgtgcttcggtggtacgg

SEQ ID NO: 5503 - DNA, 568 bp, Glycine max
tgaccgaggataggaattcctacccttaccctaggaagaaagatcagaagaatctccacagaagaaaaggaaagaaaagagaaagagagaatcacacaatctaagattggaggaaagcatacgaaaaatagaaaaagaaataacgaacaatatgaaaagattctttggatcagacactgtctgaacaatgtgcagaattgtcaaaatgaataagaaaagcggggcttacaaaaatttgtttgaaacctgagggatgcctgaagtattcacctccatgcttgttccatgctgaaccaaagagaaaagagagatagaccgacaagggaaaggccagaacacccaaaagcccaaatttcccaccaaagttcaacttgctaaaaagtcccattgatccatgttttcacatgttatctttgatttgataggaaatgatttgcaaagtcaagtcatgacatatttgtggttcggaattatgatgaaacactttcttgtgtgagatttatacactctgagtggttctcctctatttcagttggacccagagtttcttctaaatgctcattttgaa

SEQ ID NO: 5504 - DNA, 507 bp, Glycine max
agcttcaagatgctcaattgctccaggttgctgcatggaagggcaaaggtctgtatggtggtcagcagaggagcacaaaccacaaacccttgctacaagtacaaatttctgattcaaggccagctgggttaccaagttaaccaatgcatccagtttgccttcaagcttcttagtttcatatgatgcagatgggtttgtagctacctcatgcactcctctaatgactatggcatcatttctggcgctaaactgctgggagttggaagccatcttctcaattaaatttctggctttagcaggagtcatgtctccaagggctccaccactggcagcatctatcatacttctctccatattactgagtccttcataaaaatattggagaagaagctgttctgaaatctgatggtgggggcaactggcacatagtttcttaaatctctcccaatactcatacaggctctctccactgagttgtctaatacctgagatatccttcctgatggc

SEQ ID NO: 5505 - DNA, 475 bp, Glycine max
agcttctggtaggacatcttgacttgctttccaatctgacattcaccacagattctgccttcttctattttcagattgggaatgcctctaacagcacctttgtcaatgattttcttcatgcctcttaagtgcagatgtccaaatctttgatgccatatttcgacttcatcttctttggaggatagacatgtggaggagtaactggtttcttgaggtgtccataggtaacagttgtcctttgatctgctgcccttcattagaacttcactcttctcatttgtcaccaagcattctgactttgtgaagcttacattgaatccttcatcacacaactgactgatgctgatcaagtttgcagtccgtcccttcaccagcagtactttgttcagactaagaagtccatcatggactagctttcccattccagagatcttttctttagagccatctccaaatgtcacataactagtggagc

SEQ ID NO: 5506 - DNA, 498 bp, Glycine max
agcttgaatcggacatccgtgtgaaaagttatgatcatttgaatttctcaagagcttccattgttcaatttcgagcatctcgatatattataagcctaaatcggacattcgtgtgaaaagttatgaccatttgaatttctcaagagcttccgttgttcaatttcgagcctctcgacatcttatatgcccgaatcgaacatccgtgtgaaaagttatgaccatttgaatttctcgagagcttccgatgtttaatttcgagcgtatcgatatattataagccttaatcgaacctcaatgtaaaaagttatgaccattttaatttcccgggagcctccgttgttcattttcgagcgtctgtatatatgatgcgccttaatctaacatccgtgtgaaaagttatgaccatttgaatattctcaagagcttccattgttcaattgcaagcctctttacatattatgcgccggaatcgggacctccgagtgaaaaattatgacc

SEQ ID NO: 5507 - DNA, 565 bp, Glycine max
tgtaatatttataaatcactttttttataaaccttgattaattcaagttaaatcaattaggtagaaccaattaacttgggttatgggtgtaattttgattgcattgaccgtatgttttagtgtaacaatttattccataccatgggacttaatattatgtattgggtacgtagtaaaaattatatatatatgcaaattgttgtattacatcttattaatagttactatgttagtgataattaacactaacaagtatttatctttaaaaaaaaagtctaattaaatcacgcacagacagtacatgtacagtcaagtcaaggtgcttttcaaattaacctgccaacttgaattatttatttatgatctagttaaaagtaatatatttatttatgctgagaataaaagattatttaaaaaatgagtagccgctactagtctagtcaaaattttcaagttattgccacctgaatgcagtcaaacatcatgatgttacactcgactaattaataagaaagagagtgataatgtcaattagtaaaacaattaacaaggttgttttaaattc

SEQ ID NO: 5508 - DNA, 480 bp, Glycine max
agcttcgtgccataggaatggcttagtttccggagtagctggtagaatggctttgccttctctgcgagccttaaaaagaacctagacagaggcattagtctaccattcaacttctgaacttctctgacgttagtaagactatgcatttctagtatcgttgcgcacttggcagggttagcttctatttcgcgatgggtaatgatgaagcccaaaaaattttcgtggccaaccctaaaggtgcattttttgaggttaagggtcttgacatacttgttaatctctatgaacacctcttccaagtctgccacatgttgtgctacactgtgagacttaacgaccatgtcatccacatatacctcgacattttgtcctaagggcatgaccctataacagacgtgagtgagttgagaatgaatacttaccgagatttggagtacactgatgtagtgaagatggactccacaatcttcccccttggat

SEQ ID NO: 5509 - DNA, 525 bp, Glycine max
tcgccggcccgggacatcctccaggggaaagttacactggggtcaccacctcgagctgtgctctctctcttctgtcaaatcaaacatggggttctagaaacccagcaccaagtcttgggttgaataacatggtaaatttccacgggacgcccatgacacagcctgctgcatcatctcatggtgcatcaatccatcaacttccaaataccccgtggtgtttcaagggcattgattctggtaactgttcgcccgagggggtccctgatctaggtctcggtcagatttcgcagcctctcagtagccaacttcacggtgagctggacctgtcccaacaaggcaggagacattatatggatctagaacagtccagggcatatgaatctgctcattggtcactttaatgcacttgtttttgtttttgtttttttgtcaggtttgtaataaaatgtagcacaaacctgtgcctacttggttactgaccagattgatgataactatttcttgttttggtttgttcaaactgat

SEQ ID NO: 5510 - DNA, 539 bp, Glycine max
agctttagcataggatccaatggagtaagagctagcttaaagtgtgtcatctcaacattttcaagtaagtcaagaatctaatttcgtctattaagaaagagacctttattagaaactgccatttcaattcccataaagtagtttaagcggccaaggtccttgataggaaaacagatagcaaagcgtgtttgagttgagaaataacatgattactatttccaacaataataaggtcatcatcgtaaacgagaactaccacttgtttcatttaagacatcacaaacaaataaagaagaatctgcattacttcttaagaaatcacctcttgaagaataatacttaatttcacatgccaagcacattaagattgtttcaaaccataaattgatttgtatagttggcaaacgcaggaagaatttgaactttttggatgtcctgggggtcattccatatagacttcttcttcaagatccccgtgtaagaaagcatttttacatccatttggctcattgaccatccataattaacaacaatatatg

SEQ ID NO: 5511 - DNA, 495 bp, Glycine max
tccattttcaattacaagtgtctagatatattacgggacacaatcggacatccgagaaaatagatattgtcgcttgaatttactacgagcatactgttgtcaataacgagcgtctcgatatactacgagacacaatcggacattcaagtaaaaagttattcctgtgtgaatttgctacaagcttccattttcaatttcaagcgtctagttatattacgggacacaatcggacatccgagtagaaagttattgacgattgagtttgcttatagcatgtgttgtcaattctgagcgtctctatatatgacgggactcgatccgacgtccgagataaaagttattgtcgctagaatttgctccagagcttctattttcaatttctagcgtctcgaaatattagagcactcaatcggacatcttagttaaaagatattgacggtttaatttgctacgagctactattttccagtatgagcgatttgatatattacggga

SEQ ID NO: 5512 - DNA, 502 bp, Glycine max
agcttgtagcaaattcaaaccgcaataactttttactcggatgtctgattgtgtcccgtagtatatagagacgctcgtatttgaaaacagaaactcgtagcaaatacaaacgacaataactttttactcggatgtccgattgtgtcttgtagtatatcgagacgctcgtaattgaaaacagatgctcgtagcaaattcaaatgacaataactatttactcggatgtctgattgtgtcccgtattatatcgagacgctcgtaattgaaaacagaaggttgttgcaaattcaagcgacaataactttttactccaatgttcgattgtgtcccgtagtgtatcgggacgctcgtacttgaaaacagaggctcgtagcaaatctctacgacaataactttttactcagatgtccgattgagtgctctaatatatcgagacactcgaaattgaaaacagaagctctgagcaaaatccaacggacattacttttatctctgatggccg

SEQ ID NO: 5513 - DNA, 396 bp, Glycine max
aatatgtacaaattctaaggcagagagcacttacatccaagtccaacaaattttatgtaagctacagttcactataattgcgccatactgcacgaaattcttcacggaatgtgtttagacgagctttcaagttaggtgttctaaagcttgcatgcaggatggtagctgaaaatagcaagaaaaattaactcaaaagcaaattcatagttgctaaaaatatttaaaagattaaaatttctcagtatgcaacgtaccaagaagaccaatagcaagagcccataaaactgtcaggagaccagcagaaacaaaccaaagaaagaaacttgctgcagaaaaatggggaaagaatcactggaatcaaaaaatattggactgggtagcagggatgacagaaca

SEQ ID NO: 5514 - DNA, 407 bp, Glycine max
  unsure (1)..(407): unsure at all n locations
agctngtaggccacctcttcgacttatgatttatattgaaacggcccaaaatagcgggatgagagtttgggattaatacgtcgggccaccgtgagctgtctatgagggtgcaacttaatgaacacccaatccccctccgcaaaagacacagcacgacgatgtttgtctactgccttcttcatggattgttgggcacggtgcagatgagctttcaattggcgaatagcctcgtctctatcgaacaataccaaggctactaaatccacggatgtctcacctgtcaaaaaacgacgcacagatggaggagctcgtccataaacgaccttgaagggagtcttttcagtagccaaatagaaagacgtattgtaccattattcaacccatgaaagccaaagatgccatttatt

SEQ ID NO: 5515 - DNA, 351 bp, Glycine max
agctctgcgtctacaaacggcatgtcctccttttggcctttcaccatgtgggggatagatgtcataagtgccatcgaacccaaggctttgaacgatcatcgcttcattctcgtggcaatagattatttcaccaaatgggttgaagcggcttcctacaccaatgtcatgaggagtgtagtggtcagattcataaagagggagctgatttgtcggtatggactccctatgaagatcattactaacaatggcaccaatctgaataacaagatgacgtaggaaatgtgtgcggatttcaaaatccaacatcacaattccacgccctaccgaccaaagatgaacggagccatggag

SEQ ID NO: 5516 - DNA, 436 bp, Glycine max
agcttcatgacatgcctaagttgattgtcaatgattgttatcgtgtatttaacaaccgcttttggtgagatctctttcatttacaaggcataacactcgcttttagtagcacctatcatccttattccaatggagagactggggtgaccaatcatatcctacaaagttaaaagctttctacgaaactccttcaactactccaccttcattaacgacccacgtcactgaaactattatgcctttggtgccttctgccatcctagagagccacatgcttcgtcttggccgtggctacattgatcaagtgttgattcaatgggaagggctttcacctacgacagctacttgagaggacaagaaggctttttgcgacaactatccttactttaaccttgaggacaaggttgttgaaaaaggagggggtattgatatgggt

SEQ ID NO: 5517 - DNA, 404 bp, Glycine max
agcttataatatattattacactcgaaattttcatcatattctctcgagaaattcaaatggtcataacttttcacccggatgtccgattatggcgaatcacatatcgagacgctcaaaattgaacaacggaagctcttgagaaattctaatggtcataactttcaactcggatgtccgattcaagcgcatcacatatagaggcgctcgaaaagtgacaacggaagctcttgagaaattcaaatggtcataactttccacactgatgtccgattaaggattataatatatcaagacgctcgacattaaacatcgtaagctctcgagaaattcaattggacattacttttcacacggatgtccgattcgggcgcttaatttgacgacacgctcgatattgaacaac

SEQ ID NO: 5518 - DNA, 452 bp, Glycine max
  unsure (1)..(452): unsure at all n locations
gacactatgaatctcagcttggaaaccagccatcanatgctatacgaaattagattggaatagagtacaatggcngcatgacggaccgtgcagaaccgggttgtggagtaaactcaatgtcctcccttcaaggtagaagtgatccagatgcctacctggactgggaaatgaagactgagcacgtatttgcctgcaatgactacactgatgcgcagaaagtcaagctagcagcagctgaattctccgactatgcccttgtttggtggcataaataccaaagagaaatgttgagagaggaacggcgagaggtagatacatggactgagatgaaaagggtgatgagaaacaagtatgtgcccactagctataacagaaccatgcgacagaaactcctatggctgtcccaagggaatttaaccgtggaagaatattataaagagatggaaatggcg

SEQ ID NO: 5519 - DNA, 208 bp, Glycine max
agcttgtaggccttggatcttcttcatcaatggagtcatttgattcttgaagatcaatggcaacagaatggagaaggaggaaaggtgattggaaacgccacttcaaggagaagatgagtcaagaacaagctcaccatcataggaagtcatggataagagtttgaaggtaggagaaaatgagtggatggaaagagagaggcggggggtt

SEQ ID NO: 5520 - DNA, 428 bp, Glycine max
agctaaatgttgacatcctgcccctcattatttgtaacatatgaaaatgacttttggcatgagtatattgtttctctaaaatatggtgctctcgtgaatgatttatttttccttgctaaagcatgttcgcctttttaggtgaaaaaaccaggtggaccattcggtcctgccaacaaatcttatccggagtcccatgaattgattgtcattcatgcgacctccaccatcaagtctggagccccacgaattgattgcctagcgctgttcgtctatcctccaccctcaaatcttattcggagacccatgaattgattgtcattcatgcaccctccaccatcgagtctggagccccatgaattgattgcctagcgatgttcgtctatcctccaccctcaaatcttattcggagccccatgacatgattgtca

SEQ ID NO: 5521 - DNA, 428 bp, Glycine max
agcttgtagggttaaagtctcattattgttatgtgctcatgcaacaattgttagccgtggctatacgagacatcttgccaaacaaagtcaggttaacgataactcacctatgctttttcttccattctatatgtagcaaagtcattgatccagtcatatttgatgagttggaaaatgaggccgcaattatactgtgccagttggagatgtatttcccccttgctttctttgacatcatgattcacttgattgttcatctggtcagagaagcagaagaagccattgaattttgttcagaatacttagagaaggctaaacctgttgggcttcctgagtctcggcatgatgacagagtgggtggtaagggttcaagaggactgcaggtgatcactccaagtgtagaagaattgtacaagctcacttgtatg

SEQ ID NO: 5522 - DNA, 402 bp, Glycine max
  unsure (1)..(402): unsure at all n locations
aagtctcacgattgtcacgtgttgatgcaacatattgttagccatgtgttttgcgagacatcttgccaaacaaagtcaggttagccataactcacctgtgctttntcttccatgccatatgtagcaaagtcgttgatcctgtcaagtttgatgagctggaaaataaggccacaattatactgtgccagttggagatatatattccccctgctttctttgacatcatgactcacttgattgtgcatctggtcaaagaaatcgaatgttgtggtcttgtttatctgcggtggatgtacccggttgagtgatacatgaagatcttaaaagggtatacaaagaatctatatcgtctagaagcatctattgttgagaggtacattgcagaaaagccattgaattttg

SEQ ID NO: 5523 - DNA, 397 bp, Glycine max
agcttgaatatcttcatttgagtattgcaattctatccaaagcatttcattggctacacactctccaatctcttccttctttgacccgcctatatttgtcaaactgcacactccctcactataatgaaccatccttgctcaacttctcatctctgcaaactctccatctttccgttactagttattcccctgccatttcttttgtccccaagtggatattcaaattgaagaaacttgtttctcttcaattaccgggtaatgaaatccaaggtccgattcctggtggtattcgaaacctcacacttcttcaaaatcttgacttgtctgaaaattcattctcatcttctatacctgattgcttatacggtcttcatcgtctcaagtctttggacctaag

SEQ ID NO: 5524 - DNA, 332 bp, Glycine max
ggacctatagaatctaagcttcgttttaattacgagcatttatatataggggggttattgacatccgagtaaaaagttattgtcgttagaatttgctcagaccttccgctttcaatttcaagcgtctcgatactttacggaattcattcggacatccgagttaaaagatattgtggtttgcatttgctttgagcttccattttcaatttcaagtgtctcgatttattacaggactcaatcagacatttgagtttaaagttaatgtcgctgaattttttacgagttttccgtttaattacatgcattctgatatataactggactcattggga

SEQ ID NO: 5525 - DNA, 426 bp, Glycine max
agcttgtagcaaattcaaatattaataactttttactcggatgtccgattgtgtctcgtagtatatcgagacgctcgttattgaaaacagatgctcttagacaattcatacgacaataaatttttactcaaatgttcgattgtgtcttgtaatatatcgagacgctcaaaattgaaaacgaaagctcgtagcaaaatgcaaccacattaacttttaactcggatttccgattaagtcccgtaatatatcgtgacgctcgaaattgaaaacataagctcttagaaaattttaacgacgataactttttactcggatgtccgattggaacccgtaatatatcgagactcttcaaattgaaaacagaagctcctatcaaattcaaactacaataactttttactccgatgtccgattgtgttccgaagt

SEQ ID NO: 5526 - DNA, 419 bp, Glycine max
  unsure (1)..(419): unsure at all n locations
agctaccattgatcaatttcgagcgtcttgttatgttatgcgcctgaatcagaactccgagtgaaaagttatgaccatttgaattgctcaagagcttacagtggtcaattactagcgagtagatatattatgcgccagaatcggacctcctagtgaaaagttatgaccatttgaatttcttgagagctttcgttgttcaatttcgagcgtttcgatatattatgcgcctgaatcggatctccgagtgaaaagctatgaccatttgaatttctcgagagcttctgttgttcaatttcgagcgtctggatataatatgcgaatgaatcggatctctgagtgaaaagatatgaccatntgaatttctcgagaagcttcgttgctgaattttaagcgtcttgatataatatgcgcctgaatca

SEQ ID NO: 5527 - DNA, 461 bp, Glycine max
tctgagtcacctgcggcatgcaagcttcaagaaaaagatggcctcagcaaatttcttatttccagaagggaattctatcaatagacctccaatctttaatggagagggttaccactactggaaaacccaaatgtaaatttttattgaggcaatagatctaaatatctgggaagccatagaaatagggccttatatacccaccacagtaaaaagagttacaatagatggtagatcatcaagtgaaagcataactatagaaaaacctagagacagatggtctgaagaggatagaaaacgagtacaatacaacttaaaagccaaaaacataataacatctgccctgtgaatggatgaatatttcagggtttcaaattgtaagagtgctaaggaaatgtgggacactcttcgattaacacatgaaggaactacagatgttaaaagatctaggataaatgcactaa

SEQ ID NO: 5528 - DNA, 373 bp, Glycine max
agcttgccttgccccttgatatacttgtggttacttatggccactatgaatgacaaaatccttgggataaaggtagtgttgtcatgttttcaaagaccgtactaaggcatacaaatccttatcataagatgaatagataaaggcaggaccacttaacttttcactaatataaccaaattggatggccgttttgcaacaacacaaccctcatcccaacattggaagcatcacactcatatttcaaagatttgggaaagtttggcaacgcaacgtatgggggcattagttagcatttgcttaagaacattgaaagctccttcttggatctcttcccatgtgaaaccaacatttttcttgagcacttcattgagag

SEQ ID NO: 5529 - DNA, 429 bp, Glycine max
agcttctcacgcccttgacattcatgggatgtatgaagtttctcaatcacatcaatctttgccttgtccacctctatttcccttattgaaatcttatgccccaacactattccttcttgaaccatgaaatggcatttcacccaattgagaactagattggactcttcacatcactgtaatactctttcaagattggataagcacccttcaaaagatggcccaaaaatagggaaatcgtccatgaaaacttcaatgcatttttccaccatataaaaaaaaatagccatcatacatctctgaaatgtagctagggcattgcacagaccaaaaggcatgcgccgatatgcaaatacaccaaaaaggcaggtgaaagcagtcttctcttgatctttgggatctacaacaatctaattatagccagaatatcca

SEQ ID NO: 5530 - DNA, 422 bp, Glycine max
  unsure (1)..(422): unsure at all n locations
ggttctatatccatagaagttgggcgcaatagcttgctgctaacatgtatnttgcttcagtagtggataatacagttgatccctgcttcttgcatatccatgtgactaagtttccttctatcaaaaggcaacttccacttgtactttttctttctactttatcactaacatagtccgcatcacaatagcttatgagcctgaaactttcccttcttttgaacaaatgaccaagggtaggagttccaattaaatatctaaatatacatgtaactgcaattaaatgaacttcccttggttcctcttagaatatagcacataagcaaactntgaacgttatatcatgcctaaacgtagtaagatactgtagtgagccgatcattgctctgtactgggtcccgtccaccttcgttgattcctcgttc

SEQ ID NO: 5531 - DNA, 441 bp, Glycine max
gcgctcgagaaacattaatagaattatatttgtctatatttcaagtacacatttaacatttttttctctaaaattaaacttaatgggcttctagagcaaaagagagtttttcaacttcaaccaaataaagaaacttcaaagcattgttctttgtttgtggtaactttaattacaaagcatacacatatataattaattttcaattaagaaaaatcaaattacctcttcaaacaatgtaacataaaagataaaacaaaccacaaaaaataatcatgaaaggaagagataaatttatttccaaccacacatatcaaatattcatttaatgaatgtgaaattacaaaactacccctaatacaaaaactagtctaggtgccctaaaatacaagggctgaaaaatcctacatttctagggtaccttacctatattatggatcccta

SEQ ID NO: 5532 - DNA, 428 bp, Glycine max
  unsure (1)..(428): unsure at all n locations
agctngaaggtaaactagatgtcttggttaacttggcttattaactggccatgaatcaaaaatctgcacctgtcaccagactctgtggtttatgctcctctgccgaccaccacacagacctttgcccttctgtgcaacaatctgaagcaattgaacaacctgaagcttatgttgcaaacatctacaatagacctcttcaacctcagcagcagaatcaaccacaacagaacaattatgacctctccagcaacaggtacaatcccgggtggaggaatcatcccaaccttagatggtcgaatccttcacaacagcagcaacaacaaaaacagccttattttcagaatgctgctggcccaagcaaaccatacgttcctccaccaatccagcagcaacaacaacaacaacaatagccccggaaacatcaaaca

SEQ ID NO: 5533 - DNA, 434 bp, Glycine max
agcttgagctcggctggagttgaatacgtttagcttgagttgacatagggcttttttaaggctctgctcgacttacataaaagtctgacttacgagcctatttaaaagcttgcttaaagacgtcttttattaattaattattttaaaacctagtgaaatactaactaaaaaaagaaacttataaaatttcgtataaataatgtacaaatctaaaaataattgataaacaaaattatattgaattcaagtcgttaaagcacaaagtatataaaaaaaataaaaatagcataatattaaaaaatgtatggattagagatgatttacactaatatagccaaacaaaaattattattagttaaattaacaatttttaatccaatttttttaatatataactatattatatagttttaaaaaaaatatatccacaataa

SEQ ID NO: 5534 - DNA, 451 bp, Glycine max
  unsure (1)..(451): unsure at all n locations
ctagcttcttaaggaagttttctcaaagtaagcttctcaaggtagttttcttaagaaagcttctcaaggaagttacctagtctataaataaaagcatgtgtaacacttgttataactttgatgaatgagagtcttgtaagacacaactcacagttcaacttctctccctttgtcttccttcaatttcgtgctccctcctctctttcttttagcaaatgctcacccccccctctaaaatttaattggattgggcttctcccaattcaattaaatttattttcaaccacacacatcaaatattcacttaatgcatgccaaattagaaaactacccctaatacaaaagactagtctatgtgccctaaaatacaagagatganaaatcttacatctctagggtaccttaactatattgtggagcccaaatacaatgcccaaaataatgaaacctt

SEQ ID NO: 5535 - DNA, 257 bp, Glycine max
  unsure (1)..(257): unsure at all n locations
agcttctgttatcaattgtgagcgtctntnatattattggactaaatcggacatccgagtaaaaagttattgccgttcgaatttgcaacgagtttgttttttcaatttggagcatctttttatattacgggactcaataggacatccgagtataaagttattgttgtttgaatttgctcagagctatggaacttactttccagtgtctccatatattaccgaatttaatcaaacattcnactataaaaccattgccc

SEQ ID NO: 5536 - DNA, 436 bp, Glycine max
agcttgaaggcatgtaacccaccatcttctcttagtatatcataggtaacgtgcccattatcattgttatcatttccctttccatcattgtgggtgctacttgagctgccagatccctctacctttgggcgtattctttgaaagattcatgtgccctcttacacatggtctgaaactgcattcttttcggagccatatctgaatagtgctgatattgcctaacaaaggcagccattaggtccttccacgaatggactcgggaaggttccagattactatactaggtgatggctgccccagctagactatcctggaagaaatgcatagaaaagtgttgatctttttcgtatgccttcattttcctgtagtacatcttcaagtgattcttggcgcaagtagtccctttgtacttattgaaatctggcaccttgaactt

SEQ ID NO: 5537 - DNA, 398 bp, Glycine max
tatcggatttgtaatctccatctgattcaacctatccatgttaggaaagcaggggtggaacttgattaataacccacatactacaatgtataaaattctcaaaaataaatattatccagatgtcggattctatgatgcaaaactagggcatgaaccaagctatacgtcgtatagcatttttgcttcacatatattggtcgaggaaagcatatagtgcaaaaaaagtgatggtagctctataaacgtttggactcaaccttgggttcgagcatcaacaagcccatatatcacgtgatcaaccctgctcgatcttgatgatctcatagtcagttcactcatcgacaaccaacaacgatgttggcgtcaagatgtgctacaacaatatttcaatgacaacg

SEQ ID NO: 5538 - DNA, 411 bp, Glycine max
agcttatcacccttaccggcgattgttataatcttttaatggaagtcaagggcatgatagtgcaccgatatcgttaactggtcaacaggttcttgagcgagttgagggcatcaatgttgtatttggaaagacccaaaaaggaaaaaagtaaaacttctatatagaagaaaaggtcgatattgtttgatcttccatattggtccgatctagatgtcagacattgtatttatgttatgcatgtcgagaaaaatgtttgtgatagtgtcatcgacacacttgttaacattcaaggaaagacaaaggatggtttgaatactcaccaagatctagttgagataggtatatgagaccaattacattcaaggtatgatggtaacaaaatatacttgcctccaacttgtcatactttgt

SEQ ID NO: 5539 - DNA, 440 bp, Glycine max
  unsure (1)..(440): unsure at all n locations
ctagctactntctctgtntgttggatgaaaggcactgctacttctaaactctggttaatctataatatttacatgtcttatgttaatattggataaccatgggttgttagaattgtgaactgactaatacgtggcatattatctgactttgggcatccatatctgtacttatataatacagatctctttgctcattaaaaaacaaaatactaatctattaaatttttctgcatattcgaataataaattcaattttttcatttttcacaaactaatttattagtgtctcatatttccaggaagtaaaataaagatttatcttatgagcaaatatttgattttagtaaaattagtaagatttaaattttaattctattgcatctgcacgttataattattactactcttctactaattttaccaccataagtttttgttta

SEQ ID NO: 5540 - DNA, 410 bp, Glycine max
  unsure (1)..(410): unsure at all n locations
cttgcaagctggaatcatttatcctatcttcacagccaattgtgagtcccatccaggtagtttcaaagaaaaccggcctcaccgtgataaaaatatgagaaggaggagctaattcctactcgagtgcagaacagttggagagtatgcatcgactataggaggctgaaccaggttaccaaaaatgaccattgtgcactgtcattcattgaccaaatgcttgaacacctggcagataaatctcactattgcntccatgatgggttttctggttatatgcaaatcactattgcttctgaggatcaggaaaagaccacattcaccggccccttcggcgctattgcctataagatgatgcctttcggcctgtgtaatgtccctggttccttccagcgatgcatgatgagtatttt

SEQ ID NO: 5541 - DNA, 415 bp, Glycine max
  unsure (1)..(415): unsure at all n locations
ntgatatatacaattgcactattcataaaatatgagccatgttcagcaatctcaaccttggtgaatatttagcctcgtggaagataaataacaaatccacctcagtctcctgtgttaagggtcctgtcacatctatcatgagcaacattcaacaagtccaagcaaagtttgcacttgttagtttcgactatcatagtcaagatattaactgcatcttctgtagtgtgaaccttccatagcaaaacctggctagatgtgagtaactccctgatcttgtgaaacatcacatcaatatgattggttctcgaatgatacaactgagtctttgtagatcaatagtattctatctattgcaatgcaactgaacaacaactggctcaatgcccaactcattcactaaccctttctaaccaca

SEQ ID NO: 5542 - DNA, 248 bp, Glycine max
tctggcttcaattattcagtgggctctccttccgtgtccaccatgttgcgatgtacccagcctgtgaggaccgctttacaggttctgctatccagggattcgaggaatgccaccatactcgctttccaatattcacagatgcttccatcgagaagagcgggtctgctcactggaccgacttctatctccaggctcagcagagattgactccctatatatcactctgggaatccgagtggtggctctga

SEQ ID NO: 5543 - DNA, 299 bp, Glycine max
tccgttgttcaatttcgagcgtctcgatatatgatatcccttaatctgtcttctgtgtgaaaagtttgaaccattcgaatttctggacagcttccgttgttcaatttcgagcgtctcgatgtattatgtaccaaaatcggacatttgtgtgaaaagttatgaccattcaaatatgttgagagcttccattgttcaatttcgagcgtctagatgagttatgtccgcgaatcggacatcctatgaaaaggtatgaccattccaatttctcgagaaccttctttggtcaatttcgaacctct

SEQ ID NO: 5544 - DNA, 460 bp, Glycine max
gagcttggagtttccaagtgccaattcgtcttcttctttagtccagtcttcttctggcttcaattcttcagtgggctttccttctgtgtccagcatcttgggatgttcccagcctttgatgacagctttccaggttctgctatccagtgatttgaggaaggccaccattcttgctttccaatattcatagttgcttccatcgagaattggtggtctgttcactggtccgccttctttctccatgttcatcagaatttatctccctagatctcactctgtgatttcgagtgttggctctgataccaattgaaattctgataccaggggacagatgtcgtacaggatgtcacgacatcacgcttcagaacatgcagattatatgtgtccgtatgaacagattaaacaagtaaataacacaagagaattgtttacccagttcggtgctacctcacctacatct

SEQ ID NO: 5545 - DNA, 446 bp, Glycine max
  unsure (1)..(446): unsure at all n locations
tctatggaaaatgtgaaagttctcaaagctatccttagaacttttgaagtggtttctggtttaaaaataaattttgccaaaagctcttttggtggctttggtagggatgaccagtggaggcaaatggcagctacctatcttaattgcagtcagttagctctccctttttttttatcttggtatacccattggggccaacccgaggcaagctcatgtgtgggaacctattatccaaaaatatgagaggagataagctaggtggaagaagagatatatctcttttggggggagtgtggttcctatccaatcagtccttacttctcttcctatntattatttntctttnttcagggttccccgtatggtggctaacaaattaatcagaattcagagaagctntctttggggaggaggtcatgacaacaacaagaatgcttggatatcat

SEQ ID NO: 5546 - DNA, 453 bp, Glycine max
  unsure (1)..(453): unsure at all n locations
agcttgtaagaccacagtaagagtagtgttgtatcagtggagaacatccaaccccttattgtagccccactgtatgaattattgcatgaataagaacgaaacttatagtgagatttaaggctttcaaaatatgaattactatatatgaaaagaagttaaaatatctttgtattcaataacaatttgattgtttgaaaattgatgactgcaataccatgcatgactacggaataatttctccaaaataagaaataaaataactaaaaaaaaggctgaaaaggtcttcattaaaggctntgcacaatgcacattaattaatgaaataataatagaatacggtaagagtgaggactctacctggaggattgttaaggtatttagagtaccacttgatacaggacttctactttggcacanatactttatcccgctcaagagaaaccagtgtggagt

SEQ ID NO: 5547 - DNA, 463 bp, Glycine max
  unsure (1)..(463): unsure at all n locations
agcttgagcttagctacacatacctctctaatagctaagctcacctccttgagatgagaagctagagcttagctacacaccccctataatagctaagctcacccccatgacaaaaaacatgaaaatacaaaaaaaagtccttactacaaagactactcaaaatgccccgaaatacaaggctaaaaccctatactactagaatggccaaaatacaaggcccagacgaaggaaatacctattctaatatttacaaagataagtgggctcatacttagcccatgggcttgaaatctaccctaaggctcatgagaaccctagggtcttcccttggatctctagccaatctacttggagtcttctacccaatgcccttgcggggtaggatngcatcaganagggcacccttcaaagacggtcctccaaccgatgtcggtattcaacgacactggtgtaccaccacacg

SEQ ID NO: 5548 - DNA, 465 bp, Glycine max
  unsure (1)..(465): unsure at all n locations
agcttgtacccactacagggcagtagattatgtttgcttcacttgatttgtaatgctgttgtacggccagtttatgttttaactattaacagcattaacagcttcacttgatatttaacagtttcacttgataaaatttaaatatttaatttttaactaatgttttgctactcgtgtaaaccttgcagtgatcctaacttgcactttgtggagtctcctgcatcggctccaccagaagtttaaattgattttgctgcacaacaacagtaagctatcttccttgacctaaattaattctttctatagtaggataaaaacatagattgtagaaattcatagttgcatttgaagataaaaagtaaacataaatccttcttcacaaacataaacccttctttagtatattcataaatcatnatataacaaatttgatttctcattttttaaaaagaaattatttctaca

SEQ ID NO: 5549 - DNA, 463 bp, Glycine max
  unsure (1)..(463): unsure at all n locations
agcttctggtgggacatcttgacttgctttccaatctgacattcaccacaaattctgccttcttctattttcagattgggaatgcctctaacagcacctttgtcaatgattttcttcatgcctcttaagtgcagatgtccaaatctttgatgccatattctgacttcatcttctttggaggatagacatgtggaggagtaactggtttcttgaggtgtccataggtaacagttgtcctttgatctgctgcccttcattagaacttcactcttctcatttgtcaccaagcattctgactttgtgaagtttacattgaatccttcatcacacagctgactgatgctgatcaagtttgcagtcagtcccttcaccagcagtactttgtccagtctaggaagtccatcatgaactagctttcccattccagtgatctttcctttagaaccatctncanatgtcacat

SEQ ID NO: 5550 - DNA, 436 bp, Glycine max
  unsure (1)..(436): unsure at all n locations
ggatattaatgatataaggggacaattgtttgatattggatctaacaagaagggtaaaattaagaagtgcaaaaaagattattagttataaattctacaaaattttatacgtcatttggatgttattatttagatttagtcttatatgcctaatttatctcctggagctatttcttttttttttttagagttctacaacacatttattctctatttacttcatacactaaacaatggaaatttttgcaagataatgtatgaaaattttctattaaatcattatctcanacttgatgggagagtagaattgaaagtgtcaaaccaatataactttaagcaccatagataagagatgtttgcttcattatcaaatatagtgaagatcctaatanaaagtgaagcctatgttaacaactatagaataaaatttgaattt

SEQ ID NO: 5551 - DNA, 413 bp, Glycine max
tcctacaattggacaatagtggtgagcctttcaacatcacttcccaagtagtgtttgattctgctgccattcacagtctctgtcctctttgtggctggatccttcaataccacaactccatgtggaatgacttcatttaagatgaatgatctggaccacttagattttagcttccctggaaacaatctcaatctagaattaaataacaaaacctgttgtccaagcagaaattttttatcaaaagctttttatcatgacaaactttaactctttgcatataaagcttggaattctcataatcttgaaaccttaattcctccaattcatgaagttggagcttcctatgttcaccagctctgtttagataaaaattcaaaaacttcgatgccgagtaggttgtgtgctccaacaca

SEQ ID NO: 5552 - DNA, 465 bp, Glycine max
  unsure (1)..(465): unsure at all n locations
agcttagaccgctgaaggaactttcttatttattgggaaaacagtaaacttaatcaactccgtatacgaatagaaacaaaagagagacaaaacagtcaatgttgagttgagccatcgacaactctcgtgcaagcacaaggaggagtagcccgatgcttgtgagtgacacggataagtgcacttattatttataaaataatagagaaaaataaaaagttcggcgaatagaccgatttgaatcgaacactcaacaccggcgtggcgtttccgtatgtttttgatcaatagaacaggaagaggaggaaaaaaaagcttatgatgagcatctatttgagtcgatcatttccaagatctaattccagtttattcttatgtagtggaaaggccttacaatctgaagttntacgcttaggggaagaaatgttcttggtggatgcaggacctgngacccccagaatttgtatg

SEQ ID NO: 5553 - DNA, 432 bp, Glycine max
ctttcttagacatatttagatggctgcaaacaatttattatgtctcaacatatgctaaattcatgaaggatttgcttacaaacaatagaataattatggatgatgaaacattggagctagaggcaggttgtagtgcaattattcataaatccattctatagaaatctcgagatcctagtagtttcacaattcctgtgactattagaagattattaataggaaaggcagttctttatttaggtgcaagtatcaacctaatgcccttgtccatgatcaagcggataggagaagtagacattataccaacaaggatgactctgcagtttgctaacagaactatcaagcattcttatggcattattgaagatgtattggtaaaagttgaccaaattctctttctagtcaactctatggtgatggatatgaagacaa

SEQ ID NO: 5554 - DNA, 447 bp, Glycine max
  unsure (1)..(447): unsure at all n locations
agcttgttactaaggaagaagtttatatgttgtttcctctatgaaatcgtataaggcacctgaacctgatgggtattagaaaatattttttaagatattttgggaaaaggttggagatgatgtttggagatttgttagagaagcgattcagaaggtatgtttgatgtgtaggctgctaagactattattgtcctaattcctaaaggtgattctcaaaaaacatttagagtgtgtttggatagagaattttaacaaaggaaagtaatttatcagagaatctaaatttttctaatctagaattcattgtttggatgttttttttatgaagaatttaaattnttggaattttaaaacggaatttcaaacaactaanaatgtgaaatttcaattctcttctaaaaagtgagaaattaagattatcttcttatagaagaatcttctaaaatg

SEQ ID NO: 5555 - DNA, 465 bp, Glycine max
  unsure (1)..(465): unsure at all n locations
agcttaccacccagcttttgaggttatgctttgtctcatgctgcatatctgatcaactgcatacccactccctttttgcataacatatcgccttatgagaaacttcatggacacccacgtgacatatctaatcttcgcgtgtttggctgcttgtgttatatcaacactcttaaagcacattgtcaaaagctcgatcccagagcgcatccatgcatcttcattggttttaaaacgcatactaagggatatttagtctacgattttcattcgcatagcatcaattgttcacgaaacgtcgtattttatgagaatcatttcccacatttccctgaaacatcatctttgaaatccacttttactattccaactccggagtcattctccagcgaccaatatgaaccaccagttgatattatcattactatacgcagaacccanaacggtcctactcaagatgagccttct

SEQ ID NO: 5556 - DNA, 466 bp, Glycine max
  unsure (1)..(466): unsure at all n locations
agcttaagggaagagaggaatgcattcttgatttatactatttcggtcacttcctgtgcctacgtccagtccttaagcaacccacttgagattttccactctctttgtaaaactccttttacaaagtctgaaccacacagggacaacccttcccttgtgttcaggaatcctctacaacaagagacccatggtctcttaatcccttttcagaaataagaagaagagaagaagaaatctctcttaaaagagatagattgtacaatgaagatcaatcaaaaattccttattgaatatgcaagtggttgaccaaggaatctttttgagaggataagacattttagttcagaanaactcttaatctttggagaggataaaactttttgggcaataaaaactctctttaaattcgagtttccgagtcacatataaatagacccttgatggccattcataaaccatttgaata

SEQ ID NO: 5557 - DNA, 484 bp, Glycine max
  unsure (1)..(484): unsure at all n locations
gacactataaatctaagcttaacaagttagtaagttttctacttataattctagatatattatgtttatatatatgatgttataattgtgcatgatctgtcaaagaaaatatgatgtttctacttgcatgatgtgttataatatatgatgtttatatatatttcgaattttgttgttaataaaactgtttaattagaaactgtataatttttttgtttaataaaactgtttaattttgcatgatctgtttaataaaactgtttataaaactgtttatatataatatatgatgttaacattnttaaaactgtttataaaacagtttagttagaaaaaatgttaaaactagagaaaaaaaatgtataataaaactgttatatttaaaactgtttcattagagtaaaacattttttctttgtttttatttcgaaatttaatacatatgttatatagaatgatatatgttgatgatgatgttggatgt

SEQ ID NO: 5558 - DNA, 470 bp, Glycine max
  unsure (1)..(470): unsure at all n locations
agcttataacatatttaagacacactaagatgaatgttaagaatatatttgaggtcaaattagtcaattgcttaggcatgagtattttattgcccagaaaatttagagaagattaattagtaatatatagtcaggaatataaattaaaatgttacaactatcttcactaccttaacttcaagagcaccagctaggccttactatattcaaaagaaaaggttaaaactgtgaaaggcaatctaatcacaaactaacctgtctgatgacatcattaagaccagggcagagccctccacaagtaacaattgctgcctttacttcttctggcttaaagtatatcttttcacgaggcccagctcgatgaaccctaaaaggatttcagaactacttagcatatatgttaatattaggaaacagcattctatacaacacaaagatgtactanaaatattgaaaccataaactagaag

SEQ ID NO: 5559 - DNA, 383 bp, Glycine max
  unsure (1)..(383): unsure at all n locations
agcttctaaactntatacaagaatgaagctctgataccacttgttggacaagtggcctcagatatcttaagaagggggagggggggttgaattaaaatattacaaattatttccccaattaaaaattctatttaactttctattcaagttacaaattcccttaataatgaatttcttaaataatgattcaaatagaacaatttgaatatgaatataaaacaataataaataaatgagtttaagggaagagaaaatgcaaactcatatttatactggttcggccacacccttgagcctacgtccagtccacaagcaacccgcttgtgagtgccactatctagtaaatntcctttacaagttctaaacacacaaggacaatcctt

SEQ ID NO: 5560 - DNA, 441 bp, Glycine max
  unsure (1)..(441): unsure at all n locations
agctttggcaaattcaaacgaccattacttttgactcgaatgtatgatcgatgccgattatatatcgagacactcaaaattgaaaaacagaagctcacgagaaattcaaatgggtataacttttcactcggatgtctgattcacgcgcataatatatcgagaccctcgaaattgaacagggaagctctcggcaaatccaaacgaccataacatttgactcgaatgtatcatcgacgcccacgatatttcgagacgctcaaaattgaaaaacggaagctcttgagaaattcaaatggctataacttttcactcgaatgtccgattcacacgcataagatatcgagacccttgaaattgagcatggaagctcttggcaaattcaaacgaatataacttntgactcgaatgtatgatcgatgccgattatatatcgngacgctc

SEQ ID NO: 5561 - DNA, 429 bp, Glycine max
  unsure (1)..(429): unsure at all n locations
cttcaacattcaatttgagcgtctcgtaatattactggactctttcagacatccgagtaaaaatttattgtcgtttggattggctcaaagattcaacattcaatttcgagcgtctcaatatattacgggactcattcagacatccgagtaaaaagttattgtcgtgtgaattagcttagagcttcaacaatcaatttcgagcgtctcgttatatcacgggactcaatcagacatccgagtaaaaagttattgtcgtttgaattggctcagagcttccacattcaatttcgagcgtctcaatatattacgggcctcaatcagacatccgagtaaaaagatattgtcgtttgaattggcttagagcttcaacattcaatttcgagcgtctcgatttgtgacnagagtcaatcagacatccgagtaaaaagt

SEQ ID NO: 5562 - DNA, 440 bp, Glycine max
  unsure (1)..(440): unsure at all n locations
agctntgagccaattcaaacaacaataactttttactctgatgtctgattgagtcccgtcatatatcgagacgctcgaaattgaatgttgaagatctgagccaattcaggcgacaatatctttttactcggatgtctgattgagtcctttaatataacgagacgctcgaaattgaatgttgaacctctgagcaaattcaaacgacaataactttttactcggatgtctgattgagtcccgtaatatatcgagacgctcgaaattgaatgttgaatctctgagccaatccaaacgacaataaatttttactcggatgtctgattgagtcccgcaatattacgagacgctcaaaattgaatgttgaagctctgagccaattcatacgacaatatacttttactcggatgtctgattgagtcccgtcatatatcgagacgctc

SEQ ID NO: 5563 - DNA, 331 bp, Glycine max
ggtgatcgattacacagtaagggaattttcaaaataactcttatgagttacaactgttcaggaagtttttgaatggccatcataggcctttaaagactttggatacgaaattccttagaggttttctgaataacattttcttatcctctcaaaaccaaattgtcttatcattctcaaaatattccttggtcaaaacacttgcaaattcaataaggaatcttgatcgatcttcaattgcaatatccttctcttaaagagagaaaattcttcttcttcttattcaaacagatctgtttaagagaccgagagtctcctcatatgtaacgatatt

SEQ ID NO: 5564 - DNA, 463 bp, Glycine max
  unsure (1)..(463): unsure at all n locations
agcttttcaatttctatccaaacaataccatattgtaattaaaaaaaaacataagaaattagttacatgatattctcaattcccaactacttccgttgatatgatttttttttttaatatgatatatctaattgaagcctaacatttcaaaattaaaatatatcaccacagttaacaaatttgttattaattntaatttcatgtcattaaattaagatatgatctcatattngatcataaacccagttagattgatatttttttccagtatgatgtaccggattgcaagttataaaattaaagtaacattccgttaaatatattgattttatatgtattattatttggagggatttcatatttatntaataattcaaggttataacaataataaattttatccancatcattcaactgattgaggtaactcttgttaaaaaattgatttatatatttattatt

SEQ ID NO: 5565 - DNA, 466 bp, Glycine max
agcttcctcaatttttatggattgatgctcttaagactgctgcgtatatattaaatcaagttccaaccaagactgtctcaaagacaccttttgagttattcaagggttggaaaccaagtttgcaacatatacgcgtttggggatgcccgtctgaagtaagaatttataatccacaagagaagaaactagaccctaagactattactgggtatttcattggatatgctaaaaggtctaaagggtataggttctattgtccatcccacaacactaggattgtggaatcaaggaatgcaaagtttcttgaaaatgacttgatcagtgggagtgatcaatttcagaacatttcttctgaaagggatcactatgaagctgaaccttctgggacaagtaataggttggtagtcattcccacccctcaagttaaaatgggtggtagacaaccagtgattgaagttcacaagct

SEQ ID NO: 5566 - DNA, 421 bp, Glycine max
taagtgtttaggcttattccatcataaacaactaacacattgttggaccttgtggcctcaataacttacgaaggggtgaattaattttccactaacaaaattttaacacccttttaaaagagataggctcaaaatgtagaagaagcaacaatgaatttaataatgttctttaaacatgaaagacacaattgattgcaacaaaataaataagataagggaagagagaatgcaaacacagttttatactggtttggcaaaatctgtgcctacgtctagtactcaagcaactcacttgagattttcctttctctttgtaaattcctttacaactgttgaaccacacacgaacaacccatcccttgtgttcaggaatgcttacaacttaagagaccctctgtcccttaatgaatctctttgtata

SEQ ID NO: 5567 - DNA, 434 bp, Glycine max
  unsure (1)..(434): unsure at all n locations
agctttacccacaacatctctcgccaatggaacactgtatagtgacacttccaggatctttgtgctttgggggaaggattcattgaatgactgcactacaatttccttccacaactatcgtatcattgtggatataccggttcttctttgtcagcatgtcttttaaaaatttggcatagagtggcatctgttgaagagcttctccaaaaggcaaagtgatctctagcttcttgaagatgtcaagaaatctggctaagtgtcgctctttatccttcttggaagttaccattggatatggtacttcctttctttcagctaaattaatctctctctntgtgtctctcgaaacctcactctggctcttctttttctgctcatcaaccttctctntntcttntcaattttctgaattttttctttttctacttcttctt

SEQ ID NO: 5568 - DNA, 356 bp, Glycine max
tccattgttcaatttcgagcgtctcgatatcttatgcgcctgaatctgacctccgtgtgaaaagttatgaccatctgaatttctcgagagcttccgttgttcaattttgagcgtcttgatatattatacgcctgaatcggacctccgagtgaaacattatgaccatttgaattgctcaagagcttccattgttcaatatcgagcgactcgatttattatgcgccggaatcggaccttctagtgaaaagttatgaccatgtgaatttctcgagagcttccgttgttcaatttcgagtgtctcgatatattatgcgcctgaatctgacttccgcgtgaaaacgtttgaccatatgaat

SEQ ID NO: 5569 - DNA, 409 bp, Glycine max
agctttgagcaattcaaatggtcattgcttttcactcggatgtccgattcaggcgcataatatatcgagacgttcgaaattgaacaatggaagctcttgagcaattcaaatgatcataacttttcactaggatgttcgattcaggcacataatatatcgagacgctcgaaattgaacaacggaagctctcgagaaattcaaatggtcataacttttcacacggaggtcagattcaggcgcacaatatatcgagacgttcgaaattgaacaatggaagctcttcagcaatttaaatggtcataacttttcactcggatgtccgattcaggcgcataatatatcgagacgctcgaaattgaacaacggaagctctcgagaaattcaaatggtcataacttttcactcggat

SEQ ID NO: 5570 - DNA, 433 bp, Glycine max
  unsure (1)..(433): unsure at all n locations
tctatagatggttcgttcctaatttctctactattgcattttctctcaatgagctagtgaagaagaatgttgcatttacctgnggtgaaaaacaatagcaagcctttgctttgctcaaagaaaagcttactaaggcacatgttctagctcttcctgacttttctaaaacttttgagctagaatgtgatgcctctggagtgggagttggagctatattgttaaaaggtgggcaccctattgcttattttagtgaaaaacttcatagtgccaccctcaactaccccacctatgataaagagctttatgccttaataagagccctccaaacttgggaacattaccttgnttccaaggaatttgtcatttatagtgatcatcaatcacttaagtacattaggtggaaaaacaagttaaacaagtggcatgcaaaatg

SEQ ID NO: 5571 - DNA, 437 bp, Glycine max
  unsure (1)..(437): unsure at all n locations
agcttcaatacagtgacaccagtgtttcattttangagctgacaaagtcttttggatgggatacatatgattctttcatgcagcatgatgttcaagaactaaatcgggttctttgtgaaaaacttgaagacaaaatgaaggtatggcaagagttttggaatatttgttcatgattattcttgatgggtgaccatatcaaatggttgttttgtgttatttgtcttcagggaactgttgttgagggaaccatacaaaaattatttgaagggcaccatatgaattacatagaatgcatcaatgtagactacaaatcaactagaaaggagtcattttatggtacttccttatgcattttgaattcaattatatgttttgttcttccttgttatgtatttctaatttagttttgcatatgcatgttagaccttcagcttgat

SEQ ID NO: 5572 - DNA, 459 bp, Glycine max
agcttatcaccacactccttcaaaccactggccacaccaccaacaacttcagcttcgtgaatctcacttgcgactcccaatttggcgtcatctcgatcctcttccccgcaccgtactctccctctaatgccaccatcctcttcttcataaagaagcgtgatggcactagaaaaccactgagcgccactacgctgaactttctcctcatcggtagggacacatcgttggtggcgctaagctggttcttctgactcttcatgaaccaccccatcgtggaagaaaagatcctcgcagagctaacgttggtgcttacttccactcatggcggcgaccgacgacactggatggaggaggcaatggacttcgaagaagcagagaaacttgtttagttaaaagcagtgttagccgaaacgctacgtgataataagttttatgttaaataataaaataattttaaaa

SEQ ID NO: 5573 - DNA, 422 bp, Glycine max
  unsure (1)..(422): unsure at all n locations
tcaacattcaatntcgagcgtctcgatatattacgagactctatcagacatcagagaaaaacgttattgtcgtctgaatttgctcagagcttcaacattcaatttcgagcatctcgatatgttacgggactcaatcagacatccgagaaaaaagttattgtcgattgaattagctcagaagttcaacattcaatttcgagcgtctcgatatgttacgggactcaatcatacattcgagaaaaaattattgccgttgaatttgacacaggttaacattcaatttccagcgctcgatatgtacggggctcaatagacatccgagtaaaagtattgtcgttgattgctcaagattcacattaatacgagcgttcgatatgtacggactcatcgacatcgagaaaaagtatgcgttgaatggctca

SEQ ID NO: 5574 - DNA, 434 bp, Glycine max
  unsure (1)..(434): unsure at all n locations
agcttccattntcaattacaagcgtttcgatatattactggactcaatcggacattcgagtaaaaagttattgttatttgaatttgttcacagcttctgtattcaattttgagcgtcttgatatattttgggactcaatcggacatccgtgttaaaagttattgtcgtttgcatttgctacgagcttccgttttcaattacgagcgtctcgatatattacgaaactcaatccaacctccgagttaaaagttattgtcgttagcatttgctacgagcttccgttttcaattacgagcgtctctatatattacgggacttaatccaacctccgagataaaagttattgtcattagaatttgctacgagctttcgttttcaggttctagtgtcttgatatattacgggacttaatcgaacattcgagttaaaagata

SEQ ID NO: 5575 - DNA, 403 bp, Glycine max
  unsure (1)..(403): unsure at all n locations
nganacagggcttgataaagagctattggtattccaatatgataagccagatatgcaaggcaatctctttaactccacaaagctatntctgaaatatgctgaagatgaaattgtacggatgaaagcagatgagagataagccttgtaccttcgaaaagaagttactgaatactttcatgggaatgccacaaaggaagaagcccaccctctcataattttcatgattagaacagactttttgaatatctcggatctagtgtgcaaagaagtggaaaagatgcatgatagaattgttggtggttctggcagatccttccaaatacctcctaatgcatcattacctgttgctaacatgtacaatcatcgacagcaagatagaagctcatatgacgaaagctcatct

SEQ ID NO: 5576 - DNA, 305 bp, Glycine max
  unsure (1)..(305): unsure at all n locations
tactcgaatgtctgattgagtccccgaacatatcgagacgctcgaaattgaatgttgaacttttgagctaattcaatcgacaataaaatttttctcggatgtctggttgagtcccgtagcatatctagacgctcgaaattgaatgttgaacctcttagctaattcaaacgacaataactcttttcacggatgtctgattgagtcccgtaacatatcgagacgctcgaaattgaatgtngaagctctgagccaattcaaacaaccataacttttntctcggatgtctgattgagttccgtaatata

SEQ ID NO: 5577 - DNA, 434 bp, Glycine max
agcttaaacattcaatttcgagcgtctcgattatttttggactcaatcaaacatccgagaaaaaagttattgtcgtttgaatttgcacagaggttaaacattcaatttcgagcgtctcgttatataacgggaatcaatcagatatccgagtaaaaagttattgtcgtttgaattggctgagagcttcaacattcactttcgagcgtctcgatatgttacgggactcaatcagacatccgagtaaaaacttattgtcgtttgaattggctcagagattccacattcaatttcgagcgtctcgatatgttacgggactcaattagacatccgagtaaaaagttattgtcgtttgaattggctcaaagcttctacattcaatttcgagcgtctcgatatgttacgggactcaatgagacatcccagtaaaaagttat

SEQ ID NO: 5578 - DNA, 431 bp, Glycine max
ctggccaccacggagtttccgactatggtcttgtgtggtggaacaagctacaaaaggagagagcaagaaatgaagagccaatggttgatacatggacggagatgaataagatcatgaggaagcggtatgtgccggctagttactcaattgacttgaaattcaagctccaaaaactaacccaaggcaacaagggggttgaggagtatttcaaggaaatggatgtgctcatgattcaagcaaatattgaagaagatgaggaggtaactatggctcgatttcttaatggtttgactaatgatatccgtgatattgttgagctgcaggagtttgttgaaatggatgatttgcttcacaaagcaatccaagtggagcaacaattaaaaaggaagggagtggtaaaaggagtttaccaactttggtcttctagtgga

SEQ ID NO: 5579 - DNA, 420 bp, Glycine max
agcttctatggataatgttagtgttatcattgctattcttagaagctttgaaatagcttctggcctgagaatcaattctgccaagagccaactgggagcaattggtcaatctgatcagtggatcagatgtgctgctgatctcttgaattgtggtccactgcagcttcctttctgctacctagggctgcctataggtgtcaatccgagaaggaaggtggtgtgggaacctattatcaacaaatttgaggctaaactgaacaaatggaggcagagaagtatatccatggctggtagaatcaccctaactaatgctgtcttaacagctctgccattgttttacatgtcttttttcagggctccttcagcagtgattaacaagctcatttccatccaaagaaagtttctttggggtggtaacca

SEQ ID NO: 5580 - DNA, 395 bp, Glycine max
agcttgaaattgaacaacggaagctctcgatatattcaaatggtcttaacttttcactcggatgtccgattcaggctatatcgagacgctcgaaattcaacaatggaagctctcgagaaattcaaatggtcttaacttatcactcggatgtccgattcaggtgcataatatatcgagacgctcgaaattgagcaacggaagctcttgagtaattcaaatggtcataacttttaacccggatgaccgatttaggacatcacatatagagaatctcgaaattgaacaacggaagctctcgagagtttcaaatggtcataacttttcactcggaggtcagattcaggcgcattatatatctagacgctcgaaattgaacaacggaagctctcgtgaaa

SEQ ID NO: 5581 - DNA, 438 bp, Glycine max
  unsure (1)..(438): unsure at all n locations
cttaagcaccgcagctgcagctctataaaccacacttttttatatggcttgancagngcgaacttacgtttgaatactctatacatgcagacacatgcaacacattatgttttcactgataataaaaagagaaatgtttagaaacacggtgactcgctctatcgaatatatcccctttcatttggtcgaaaatttttaaaatgaaaaaagtttgcgaatcctactcaataattaacgacgttttccttctaactttatgcacaaaaaacttgtttaatagagcgtgttcttatggcttatcaaataaaaaaataaaacatacatgcacgtcaataagtcactactcggtctatgctgacaggttagaaagtaatctacattgggaagtgtgatgctaacattctattttgttcgattgaaaaaactgcgtactttctt

SEQ ID NO: 5582 - DNA, 397 bp, Glycine max
  unsure (1)..(397): unsure at all n locations
ggccgccacggagttntccgactatgctcttgtgtggtggtacaagctacaaaaggagagagcaagaaatgaagagccaatggttgatacatggacggagatgaaaaagatcatgaggaagcggtatgtgccggctagttactcaagggactngaaattcaagctccaaaaactaacccaaggcaacaagggggttgaggagtatttcaaggaaatggatgtgctcatgattcaagcaaagattgaagaagatgaggaggtgactatggctcgatttcttaatggtttggctaatgatatccgtgatattgttgagctgcacgagtttgttgaaatggatgatttgcttcacaaagcaatccaagtagagcaacaattataaaggaagggagtgact

SEQ ID NO: 5583 - DNA, 387 bp, Glycine max
  unsure (1)..(387): unsure at all n locations
agcttaaataggtgggtttgtccgttctcgctagcttagngcaaatttgaatcgcttagcacacataagtggattttggtttagcgtgcttctctcgcttagtggatgagctgaagcggttcgcttgatgacctggagcagtgcgctcagtgaacctgacaactcatcttcttctagattcttcctcacgcttaaatagcaagttctcatctacctccatggcttcctatggtggtgagcttgttcttgactcatcttctccttgaagtggcatctacaatcagctttcttccttctccattcaactaccattgatcttcaagaagcaaaagactccattgatgaagaagattcaaggcccacgagctctacatggagcttcattag

SEQ ID NO: 5584 - DNA, 271 bp, Glycine max
  unsure (1)..(271): unsure at all n locations
agcttacaccagtatcggatgtatattacttttggagacatattggtacaacttctaactggaagaccccttttggggctagttagagatatgaaatgtgcattggaaaaggaaaaccttaaagcagtcttggactcttcagctggtgaatggccgttttttcaaactgaacagctggcatatttagcattgaggtgttgtgaaaagacttggttgaaccggccagaccttgtgtctgaaatctggagtgttcttgaaccattcanagcaa

SEQ ID NO: 5585 - DNA, 370 bp, Glycine max
  unsure (1)..(370): unsure at all n locations
agcttcggaaaggtctggagggagttatagatgtatgattcttagacngcacgggacaaggcgatgatgctattccggtacttgcgagaaaaagacatgtttgagaagtattacaatctgcatatggcaaagcggcttttgtcgggaaaaacagtttctgatgatgcagaaagaagtctcatagtcaggctcaagaccgaatgcggttatcaattcacctctaaattagagggcatgcttaccgacatgaaaacctctctagaaacaatgcagggcttttatgccagccaccctgagttaagtgacagtcctacacttaccgtgcaggatttgacctcagggttttggcctactcaatctactgctatat

SEQ ID NO: 5586 - DNA, 384 bp, Glycine max
agcttgtgaaggaataccttgaagattattccttaccagtagtaattgaccgtaactttgtgattgatgcgctaccttcgggaaaaatcaatgaccttcgcaaaaatataaagctggtaatgggcgttgggtttgcaaaggagtgctacgaggtgtactgtaactggaggagggaaagcttaaaggagtgcttaataaatttattaggcttgccagagattaatgtggaggagaaaagtagattgttggaatttgaaaattacattcttagaagacgtattgaggctatccaggtcgctcttggaacactaattcccagtgagcgacgactctgtgatagcgtcttccaggggttctcttatgtggctgatctttgtttcactg

SEQ ID NO: 5587 - DNA, 410 bp, Glycine max
tgaggcatgcaagcttgtgcatccaataccctgatgtggatgttttatattttcttaaaactggactgatgcatttgcttccaaagtttcatggccttgcacgtgaagacccgcacaaacatctgaaagaattccatattgtctgctccaccatgaaacccccagatgtccagaaggatcacatatttctgaaggcctttcctcattctttagagggagtgacaaaggactggctttattaccttgctccacagtccatcacgagttgggatgacgtcaaaagagtattcttagaaaaaattttccctgcttcgagaaccacgaccatcaaaaaggatatttcaggcattagacaactcagtggagagagcttatatgaatattgggagagatttaagaaactatgtgcc

SEQ ID NO: 5588 - DNA, 387 bp, Glycine max
  unsure (1)..(387): unsure at all n locations
agctttgaaaaaggaaggtggtgtatantctttataacaagctcgggaatattttgagagcgtgtgcgcaaaatattaattaataccatgtgtcagaatggtatattttgttttaccgcatgttaaagtgacatatttaatcatttttcatatattttactaagttttatcaacctaacaattgaataatgttatttaaacttgttattcagaagaaaaaaacatgttatttaaatttgatgattatgcatattaaattntaaataacccagggattcataaatcataaatatgtaatttaatagtattgcttattggaaatagcatattatacattaaaataaaacaatttatttagaattaaatagatctttaattaagactatg

SEQ ID NO: 5589 - DNA, 377 bp, Glycine max
  unsure (1)..(377): unsure at all n locations
agcttcaagaataanggttctagcttatttcttattcccagaaggaaattcaataaataggcctcctatttttaatggagagggttaccactactggaaaacccgaatgcaaattttcattgaggcaatagacttaaacatttgggatgccatataagttggaccttatgtacccaccatggtggctggaaatacaatagagaaacctagagaagagtggtctgaagatgaaagaagattagtgcagtataatttaaaggctaaaaatattattacttctgccctaggaatggatgaatattctatggtttcaaattgtaagagtgctaacgatatgtgggacactctacaagttacacatgagggaacaactgatg

SEQ ID NO: 5590 - DNA, 388 bp, Glycine max
  unsure (1)..(388): unsure at all n locations
agcttttcaagcccnatttacngcgtttactaccttngccggcnggggaattgcgaactttgatcaaacatttgaggttactaccgacgcgtcaaattctgttgttggagcagttttatctcagcaatcccatcccattgcttttttcagtcgcaagatatgtcccaaaatgcgggctgcatctgcttatgagagggaaatgtttgctgttacggctgcagtcaaaaagtggcgacattatctcttgggaaggcattttttcatttatacggatcatcgcagtttaaaggaattgataacgcagacgattcagacgccgacacaacatatgtggttaactaagctattgggtttaactatgagattgatacaccccggaaagaccaac

SEQ ID NO: 5591 - DNA, 395 bp, Glycine max
  unsure (1)..(395): unsure at all n locations
agcttgccaccacgaagttttccgattatgcttttgtgtggnggaacaagctacaaaaagagagagcaagaaatgaagagccaattgttgatacatgggcggagatgaaaaggatcatgaggaagcggtatgtgccggctagttactcaagggatttgaaattcaagctccaaaaactaacccaaggcaacaagggggttgaggagtatttcaaggaaatggatgtgctcatgattcaagcaaagattgaaaaagatgaggaggtaactatggctcaatttcttaatgttttgactaatgatattcgtgatattgttgagctgcacgagtttgttgaaatggatgatttgcttcacaaagcaatccaagtagagcaacaattaaaaaggaaagga

SEQ ID NO: 5592 - DNA, 332 bp, Glycine max
  unsure (1)..(332): unsure at all n locations
agcttcttagttgcagattattctttttattttgnggctacctcatgcactgctctaatgactatagcatcatttctggcgctaaactgcttgggccaacaacattttgaaaataatgctgttgatgttgccgctgttgtggaggactccatcatctaaggttgggatgattcctccacccgagatggttcctgttgctggagaggtcataattgctctgccgtggctgattttgctgttgaggttgaggaagtctattgtatatgacggcagcatatgcttcaagctgtccaattgctgcacagaaaggcgaaggtctgtatggtggtcaa

SEQ ID NO: 5593 - DNA, 365 bp, Glycine max
agcttcttggtttctccgttgaatgtgaagaaaaaatgtggatttatgagggcatgcccaaccaaagcttgaactactgtgtttttggttggaccccttacaatttattctaaacatcagctgaaatcttctttaaagaattgtggagacagaaactgctattcctaatatgtgtgtatttgactagctgaaaccaaaaggaagttgcattgcgaggggacttctttatcttcaccaagacttcaggctgaggattattcacagggatctaaaaactagccatattttgctggatgcaaatttggatccaaaaatatcagactttcgcttggctcgatcattttgggagaccaagtgagggaaac

SEQ ID NO: 5594 - DNA, 397 bp, Glycine max
agctttgaaccatacaaggacaacctttttctttgtgttcagattgctttacaacaagagacccttggtctcttaatcccttttcagaaataagatgaagagaagaagaaatctctcttgaaagagatagattgaacaatggagcactcaaataattccttattgaattgcaagtgtattggccaaggaatttttaagaggataagacaattttggttttgagaggataagacctttttgttctaaaaaactctaagcaaatttgtgttccaagtcacatataaatagacccttgatggccattcaaaaaccatttgaacagatgtgactcttggaaattattttttgaaaatctcctctggtaatcgattacaagatttgggtaatcgactatagg

SEQ ID NO: 5595 - DNA, 391 bp, Glycine max
agcttcaacattcaattttgagcggttcgtattattacgggactcaatcagacatccgagtaaaaatttattgtcgtttggattggctcagagattcaacattcaatttcgagcgtctccatatattacgggactcattcagacatccgagtaaaaagttattgtagtttgaattagcttagagcttcaacaatcaatttcgagtgtctcgttatatcacgagactcaatcagacatccgagtaaaaagttattgtcgtttgaattggctcagagcttccacattcaatttcgagcgtctcaatatattacgggcctcaatcagacatccgagtaaaaagttattgtcgtttgaattggctcagagcttcaacattcaatttcgagcgtct

SEQ ID NO: 5596 - DNA, 355 bp, Glycine max
agcttatccgtagaggtgttggactttttcaggtcttggagaggagcaataacaatgtctataggttggacctcccataagagtatgcagttagaactttataggtggagctaatactgaggagcatgaaccaacagatttgaggtcaaatcctcttcaaaggggagtgggtgatgcaatcctccctaggaagggactagtcaccaaagccatgaacaagaggctccaagaggattgggctagagctgttgtagaaggccctaggattctcatgaaccttacggtagatttctgagcccatgggccatgttgtgtccacttatctgtgtacatattagattaggatttcattatt

SEQ ID NO: 5597 - DNA, 390 bp, Glycine max
agcttgaactctaaaggtatacttttataaactaagagttttcatttaagtaagagtaagacagaataaaagttaaattgggagaagatgtcatatcacaggttttctaagtttggatatctaggattcatcatataaaaggatggagaaattaatgaggatgtataggatacatgtgggatggcttaaatggtgaaaagcatcgagggttatttgtgattgccaagtgtctaccaagctcaaaggcaaattttattggacaactatacgtccaactatactatatgatagtgaatgttgggttttaaagggacaacatgagagaaaagtgagatttgcagaaatgacgatgttaagatggatgtgtggtgatataagacaagataaaaa

SEQ ID NO: 5598 - DNA, 392 bp, Glycine max
agctttgctaatgtcgattttcaaattctttttattgtctttcctttttgtgggcatcccatatggtgaatatatttagtggcacacattctctctgctctccctaaatatttttttaaaaaaatttaagaatgagtgggagagagaaataaatgagttttaaaatataaacattaaattaccttattatccgtaaataaatttattatcataaaataagtagttaagttttttgtccaaataatttggtatgttaacatacccctttatatttatatcttttttatttcttaaaacataattttgaactatactttctaaaacaacatatatcaattccataaagtaatttttaggactatgttttaataaaatacacataattatggaat

SEQ ID NO: 5599 - DNA, 398 bp, Glycine max
  unsure (1)..(398): unsure at all n locations
agcttggatttcctttntggagggattctatctttcctaagatggagccaaacccagtcaccctcattaagaactagctcttttcttcctctattgcctatagttgaatacacctttgtttggttctctatttggttcttaaccctctcatgcaacttctttacaaattctgacctagattccccttctttatgtataaaagaagtgtctagtgggatgggaatgaggtctaacggtgttaggggattgaacccatagacaacctcaaaaggggactgcttggtggttctatgaacccccctgttgtaggcaaattctacatgaggaagatactcatcccaagtcttatggttgcctttcagaagagcccttaaaagggtggataaagacctattcac

SEQ ID NO: 5600 - DNA, 405 bp, Glycine max
gacctgcagcatgcaagctggattgaagaaatggaagtactatataattcgaaataggatcaatgaagatcaacaaagtatggactttagttgaagtttcaaaggatataaaaccaattggttggaaatgagtttacaagaaaaggattggagcagattggaagattgaaacctacaaaacgcatcttgttgccaagggatattgtcaaaaggaaggtatagattatgatgaaacttctctcgtggaaatgctcaaattaattcggattatttttgctatagtagcatactatgatcatgaaatatgaaatggatgtgggaaatgtctttccttaacggtgagctaaaaaaaggtgtgtatatgacacaactcaagggattcacatccttgtttgatcataataa

SEQ ID NO: 5601 - DNA, 388 bp, Glycine max
agctttgcttctacacactcattctatgaaatatcttgcggacatgggaagaggtggtgtagaagttcttgaataaatattttccagtgtccaagaccactgaggggaaggtggaaatctcatcattccatcaattccctaatgaatcaatgagtaaagctcttgaccacttccatggtttactctagaagacctctactcatggatttagtgagcctattcaactaaatatattcattgatggcctgtgaccccatttgaagcagcttcttgatgcatctgctagtggaaagatcaaattgaaaacacatgatgaaactatggagttgattgaaaacatggcagacagtgaccatgccatcctttgtgaccgagcttacacatcgac

SEQ ID NO: 5602 - DNA, 382 bp, Glycine max
  unsure (1)..(382): unsure at all n locations
gcagcttagcttctgtgcccngacttttggttattatctataacggacagagaaggatacttctttctggctccattcactaccccagaagcacccctgaggtattacactcaaatgtatttcaggtttctttccattttggcctttttttttttttatcaaatgggcaccttaaagtatcttccttttttcagatgaggccagatcttattcaaaaggcaaacgaaggaggtttggatgtcattcaaacttatgttttctggaatggacatgaaccttcacctggcaaagtaatgaataatgtttgcttgcagtgnttgaaaaaaatgcatttttttgtcgctattatctattntaacaagtttagctgtttttgttggta

SEQ ID NO: 5603 - DNA, 354 bp, Glycine max
agctttgagcaaaatcattcgatattttctttttactcggatctctgaatgagtcgcgtaatatatcgagatcctcgtaattgctaacggaggctctgagaaatttctaacgacattaactttgtactcggatgttcgattgtgtcccgtaatatatcgagacgctcgaaattcaaaatagaagctttgagcaaaatcgaacgacaattacttttgactcggatgtccgatggagtcctgtaatatatcgagacactaaaaattgaaaaccgaggcgctgagaaaattcaaacgacaataactttttacacaatcatgatgcttaaaattcacaacagaagctctgacataaat

SEQ ID NO: 5604 - DNA, 335 bp, Glycine max
  unsure (1)..(335): unsure at all n locations
agctngtacactttattttattncataattnnganngcagaactcgagcacagtttatctggtccaaataccgctaaggaacagngggagcaggaacaatttgcaattttctgcgaacatcttccaagtcttcatgaaaatgttgctcataatatacacacataagatcagtcgattgcatgccagcacgaatggcccaagggaagtagtgctgataaaacaattttctctgcttttcattgaatctagccgtgccccctataacggacagcagacacataggaaggcccatctgctcaaattcaatgagcttcagtgcttgctccccaatcaag

SEQ ID NO: 5605 - DNA, 395 bp, Glycine max
agcttcaagtagagggaatatgatgtataagattaatatgactatggctatgatcactacaaacaatacccaagtttcaggagaatcctgcagtccatatgccctattgagggaagggacaataaatttgcacccttggattttcaaaccccaaaaagatttgacaatcactacttcataaacattcttgaagggaaaggcttgttagattctaacaatgttcttatcaaccatgacttagatggaaagattacagagcagatgtgggcttatgcctctaatgaaaaacttttgtttgcttcatttgctaaatctatgattaagatgggaaacatcaatgttcttacaggaaatgagggggaaattaggaggaattataggtttgtcaatgctta

SEQ ID NO: 5606 - DNA, 343 bp, Glycine max
  unsure (1)..(343): unsure at all n locations
agctagattggctgattttatattttattgcaaccagacctgacattgngtttgtagtaagtatactttcaaggttcatgtattgtgctagtgaagttcatcttcaagctgccaaacgagttattagatatgttaaaggcactttagactatggtataatgtactctcattctcataattttaagctccatgaatattctgatagtgactgggcatgttgtattgatgacatgagaagcacctctggatattgattttcctttgggtctggagtcttttcttggtgttctaaaaagcaagaaagtgtatctcaatcaactgcaaaagcaaagtatgtaactgc

SEQ ID NO: 5607 - DNA, 315 bp, Glycine max
tgtcctcggtgacgaagacaattgaattagccccttctagctttgcacaggcgtcaacgattctcaaaatgaagggtctgtgtttggaagtggcgatgaggtggagaacaacctctgtgtatgaggtggtgttgaagatggacccgctgtactcaatgtttgttcacagggtacagtaaattataaagttgccgttgtgggccacgccgacggagccgaagctgtatccggcgactaaaggtagcacgtttattagcatggattggccggcggtggagtatctgtcttggccgatggcgaggctgcctgggagct

SEQ ID NO: 5608 - DNA, 361 bp, Glycine max
agctttgatctaacaccgccacttctaccatcatcttagatttctattatgttaatattattagtactttaatctccagccgtgtatttggctatattatgatgatatttgaacaatttaatatttctttatttgcatggtatgtttgaacaaatattaattacgttatttgactatgtggattttatatttgatctattcatggttcttgcttcatggttcttgctttatgatttggtttatatttttcatgaatgttgtgtgaatgcttagttgatatttgtatgttacgcactttggctttttgttgatgccaaagggggagagaaatagggatgaaatcaacaagaaataaggatta

SEQ ID NO: 5609 - DNA, 316 bp, Glycine max
ttttattgttgtttagatggatattttggctatttgcaaattccaattgctaggagggaccaagaaaaaactacttttacatgtccctatggaacttttgcatatagacggatgtcatttgaactttgtaatactcctgctacttttcaaagatgcatgatgtctattttatttatttatttaattgagtcttgcattgaaatactcatggatgatgtttctatttttggaacttgttttgacacatggttgcataacttgaatgtggtcttgaaaaggtgtagggatacaaggttagtcttgaacttggaaaact

SEQ ID NO: 5610 - DNA, 357 bp, Glycine max
agcttactcctcattttatcagttcttaccaaatcgtaaaaagagtcaacggagttgcctattaaattgccttgtcaccatccctctcaaatctcaatagtgtcttccatgtctcccaactcagaaaatatatctatgatccattaccaatgaggattgaggaaaaaatggtgaaacaactaagagagaaggatattcctttgatcaagtttgtgagcggaggagctactaaagatagtgctacatgggagttggaaagccacatgggagaatcatatcttggtttgttcttttcagctaaatttcaaggacaaaatttcttttaaggaggggggaattgtaacatccttctatttt

SEQ ID NO: 5611 - DNA, 317 bp, Glycine max
agctttactatgcagagaatattcaaggaaaataccttcatctgacttagcatcaaattttcctaagttatcttttccattattcaatacaaaacatttacaaccaaagatatgaagatgagagatgtttggttttctgccattgaccaattcatatggagttttctttaaaatgggtcttattaaagccctatttaaactgtagcatgcagtgttaacggcttcagcccaaaagtattttggaagaggagtatcatttaataaagttctagcaatctcttccaaagatctatttttcctttcaacaacaccatttt

SEQ ID NO: 5612 - DNA, 305 bp, Glycine max
tttacctttcattttaacccttaaaacttccctgccaaaattgtcatagataaagcaatgttgatgttcaaaggacactttaaatccctttttaatcaactgacctacacttagcaagttttggtcaatgttaggtacataaagaacatctgatattaatttggtacctgaacacgttgaaattgcaacagttccttttccttttactggaatatagccaccattcccaattctgacctttgagacattagttggcttcaaatccttgaatagagtcttatcatttgtcatgtggttcgtacaac

SEQ ID NO: 5613 - DNA, 325 bp, Glycine max
  unsure (1)..(325): unsure at all n locations
agctttagtgngtagtgtcaagttttagggtttactgtgtagggtctaatccttatggtttaggatttagggtgtaggggttatggtttaaaatttaaaggtaatggtttagggtcaagtcttagcgtttagggtttaggttttacggtttagggttgaaataaaattactccaaactcatatgcatctaatgaaataaaattacatttagaagttgaaataaatggagtggatcaagccaggttgagtgactttagttatccataagtaaaccttaataaactgaataccatacattacgtgtgaaattcaaatgagaaattta

SEQ ID NO: 5614 - DNA, 360 bp, Glycine max
agcttcaaagactaattcaaggatataagagtgtggacgagtattacaaagggattgagatttccttgattagggctcaaattgaagagtatcaagaggctaccatggcaaggtttttgcatggtctcaataaggtaatccaagacattatagagttacgccactatgcctctttttggaggatctcattcatgaaactatcaaggtggagcaacaattaaaagggaaacaaatatacaagaagtccccctatgtgtcttcaacataggaggataaggagacattcaagaagaagggaggatcttcattcaaatctcatgagaaagatgctgcacttagtaaaaataatttaaaccctac

SEQ ID NO: 5615 - DNA, 313 bp, Glycine max
tttatataacaaagtgaagatattaaaatcacacagaagtaggcttgaaaaaatgacataaagttttttattatgaaaaacaattgattaaatatttgttgtatataaaatattatcaaatcaatcataagagttgatattatcaaaaccaataacttaaaacataatattaacattaattttcaattacttcaaattatcaataattaaaaacaaataatttaaaacaatatttcaaaatgcatggtataagagacatatctagtggaggactgtttctatatgagaatgggaggtgaaatattgtgaactt

SEQ ID NO: 5616 - DNA, 283 bp, Glycine max
tctggtcggtgctgattcttggtataccccttttacaccttcatgtacctttcaattggatacgtccagcgtaaaaatataggaccacacaactggatctccctgactagatgaacaattatgtgaaccattatgtcgaaaaatgatggaggaaagtacatctccatttgacaaaggaaaatggcgacctcgttctccaattcatccaatcttgcagggtcaataactttgctacatatagcattaaaaacaaagccttgaccagttatggcttccccaaaat

SEQ ID NO: 5617 - DNA, 351 bp, Glycine max
  unsure (1)..(351): unsure at all n locations
ggagaggggatgaaatttttccaactctcctaatgtctatcgaggagtccgaggtttcggtgatcttcttgtccataaactacatatgccacttctaagtggtgcttggaagagctcgtgaaaattatggaatgcaaaaaaacaaagggtcaaatcgtgatacccattttttatcatgtagatccggcagatgtgcggaaccagaccggaagttatgcagatgcttttgtgaaacatgaacaacnnctnanaaacaacnnncaaaangnnnaaccccngaaagacacnncgagagaagcagccaacctctctggattggattgcttggtcaacangtttttttccaattaa

SEQ ID NO: 5618 - DNA, 325 bp, Glycine max
tcttcttgactcatctactccttgaagtggtgtctccaatcatctttcttctccattccgctaccatgatcttcaagaagcaaaggactccattgatgaagaagatccaaggactacaagctccacatggaagctcgacaatggacacaaaagccataacatttgactcaaatgtttgatttacgaaagctcagagaaaattcagactgtcataacttttgacttgaatgtctgattgcgtactataatatatcgagatagtcgaagttgaacacggaagctcctagcaaactcaaactaccataactttttattcaaatgtctg

SEQ ID NO: 5619 - DNA, 318 bp, Glycine max
tgacaattattatttattacatttaactttctctcccaaaaatgctgtgtttagggaacattaccaaatggacaagaggtcgctgttaagaggctttcacaaacatctagacaaggattaaaagaatttaagaatgaggttatgttatgtgccgaactccaacatcgaaatcttgttaaagttcttggatgttgcatacaagatgatgagaaattgctcatatacgaatatatggctaacaaaagcttagacgtctttctttttggttagtgtctctaaatttaattgttaattgaatgttggatctattatttcctt

SEQ ID NO: 5620 - DNA, 320 bp, Glycine max
tcaacatcagaccacttccagggtgctggaactacttcacatggacttgatggggcctatgcaagttgaaagccttggaggaaagaggtatgcctatgttgttgtggatgatttctccagatttacctgggtcaactttatcagagagaaatcagaaacctttgaagtattcaaagagttgagtctaagacttcaaagagaaaaagactgtgtcatcaagagaatcaggagtgaccatggcagagaatttgaaaacagcaggttcactgaattctgcacatctgaaggcatcactcatgagttctctgcagccattacac

SEQ ID NO: 5621 - DNA, 378 bp, Glycine max
atccctaagcgaccgcagctgcagcttgcataccctttgatcttttatgaaattacttgtgaaagatagccatgagggtgggctcatgggccactttgggatagacaaaacccttgtcttactcaaagaaaagttttattggccccatatgaagaaagatgtccataagcattgcactaggtgtgtggcttgtttacaagccaagtctagggtgatgcctcatgggctatacacacccttacccatcccatctgcaccttgggtagacattagtatggactttgtccttgggcttcctagaacccaaagaggtgtagactctatctttgtggtggtggataggtttagcaagatggcacactttataccattccacaa

SEQ ID NO: 5622 - DNA, 313 bp, Glycine max
ttgatgcaacatttggagaggttaatgaaactacgagatgatgcactccatgagaggttggatcaaatggagaatagagatcataatgaagaagaaaggaggagaagagggaatgatggtgttcctagacaaaaccgaattgatggtattaaactcaacattcctccatttaaaggaaagaatgatccggaggcctacttggagtgggagacgaaaatagagcatgttttctcatgcaacaactatgaggaggaccagaaggtgaagcttgccgccacggagttttccgactatgctcttgtgtggtggaaca

SEQ ID NO: 5623 - DNA, 356 bp, Glycine max
agcttgaaattgaacttcggatgttcttcagattctcaaaaggacatagctgatcacacggaggtccaattgaggcgcataatatatcgagacgctcgaaattaaacaacgaatactctcgagaaattcaaatggtcgtaacttatcacacggaagtccgattcaggtgcataatacatggagacgctcaaaattgaaccacgaatgctctcgagaaattccaatggtcataacttttcaaacggaagtccgatttaggcgcataatacatcgagaatcttgaaattgaacaacggaagctatccagaaattcaaatgggcgttacttgtcacacggaagtccgattcaagcgcat

SEQ ID NO: 5624 - DNA, 309 bp, Glycine max
tgaaggcaaactggatgcgttggtcaacttggtaacccagttggccttgaatcagaaatttttacctgtcgcaagggtttgtggtttgtgctcctctgctgaccaccatacagacctttgcccttccatgcagcaacctggagcaattgagcagcctgaagcttatgctgcaaatatttacaatagacctcctcaacctcagcagcaaaatcaaccacaaaagagcaattatgacctttccagcaacagatacaaccctggatggaggaatcaccctaacctcagatggtccagccctcagcaacaaca

SEQ ID NO: 5625 - DNA, 341 bp, Glycine max
agcttaccattaattgtacatcttttgtggagaatattttccctttgggtgtcattcagtggctgcatttgactttccaagagccttctcaccattagtatatcaccctgcatagcttcctcttcaagctcatcctttgcttcttcttcttcactaatttcagattcactagtgatttctccatctgccttcatgatcatggttttcttggttggacagtcagaagcaatatgtcctctgcctaagcatttgaagcattttatgtttctggtactggtgttggatgatgaagcaaaattatgcttggttttagcactgaaaactgttgactttccatgggg

SEQ ID NO: 5626 - DNA, 357 bp, Glycine max
  unsure (1)..(357): unsure at all n locations
agcttatggagactttctcntntttacaacaaggcctgcttgaccttctgactgctgagagctagagacttttctttcttaggtgcttcgtcttgttaaagttcatgttcatgaacttaagagtaccaattaattctttaaaggaaattgagtcaagattctttaaaacccttagtgttgttacttgttaatgtggctccttgtagagcttgtaggccttggatcttcttcatcaatgaagtccttcgcttcttgaagatcaatggcagcggaatggagaaaaaggaaaggttattggagatgccactttaaggagaagatgagtcaagaacaagctcaccaccataggaagccatg

SEQ ID NO: 5627 - DNA, 354 bp, Glycine max
  unsure (1)..(354): unsure at all n locations
agcttgcccaaggtcttctaacttttcatcaatggtaggcatgggaaatgtgtccttcatcgtgatggagttcaaagccctataatccatgcaacaacgccatgaaccatttttttttcttaacgaggaggatgggtgaagaaaatgggctatggctgggttggatcaggccggccgcaagcatggaggagatttgggattcaatctcggctttttggaagtggggataatggtagggtcggacattcacaggantgaaattgggaaaaaggggaatatggggctgaatattgcggggcggaggtagggtggttgggtcaaggaagatggcggagtaacggtcaaggagggtgg

SEQ ID NO: 5628 - DNA, 316 bp, Glycine max
ttgcaaagaaaaatgcagaaaccaaaaaatacccctggttttcatacagccgttgtccatcgaggtactgaacaaaaccatcaatgagatatggaccaacataagaagccaaagtgtttaacaatacaagaaaagctgtgataagaatctccttccatgctgaaattattaacgacttcaccaacttcagtgtggtgacactattaattccaccacaatcagcctcaactttctctctgaaagttggaaaagtaccaattacactatctctgctgtctagttgaggaacatcctcaaggtccagggtcttctgatt

SEQ ID NO: 5629 - DNA, 347 bp, Glycine max
agcttatcaacatcaaacttggttaaagagggcttggggtcaagacatgagaagcaatcaagtataatgttacttccttcactaaagcggtgatctatctccacacatattttatcaatagcaacataaaaaatctttgcacggtaatgatgaagattagtgatagtcatcccttctgctcttgaacgaccccgaaccggtatttcgtcatccatatttggtaccggaatacttttagctacacaaaatccttggacatcggcaaaaaaattattccagccactctctctcattgtgcccaaccgagctttgacaacatcaactaattccatggcaatcacaatatt

SEQ ID NO: 5630 - DNA, 321 bp, Glycine max
ttggagtttccaagtgccaattcgtcttctttttttgtccagtcttcttctggcttcaattcatcagtgggctttccttctgtgtcccgcatcttgggatgttcccagcctttgatgacagctttccaggttctgctatccagcgatttgaggaaggccaccatccttgctttccagtattcatagttggttccatccagaattggtggtctgttcactggtcctccttctttctccatgttcatcagaatttatctccctagatctcactcagtgatttcgagtgcctgctctgataccaattgaaattctgatatcaat

SEQ ID NO: 5631 - DNA, 311 bp, Glycine max
tataatatatcgatacgctcgaaattaaacatcgggaactctcgagaaattcaatttgtcatcatttttcacacggatgtccgattcgggcgcataatatgtcgagaggctcgaaattgaacaacggaagctcttgagaaattcaactggtataacttttcacacggatgttcgatttaggcaaatcacatatcgagacgctcaaaattgaacaacggaagctcctaagaaattcaaatggtcataacttttcactcgaatgtccaatacaggcgtatcacctatagtgacactcgaaattgaacaacgga

SEQ ID NO: 5632 - DNA, 354 bp, Glycine max
agcttcaatcggacattcgtgtgtttaagttatgaccatttgaatttctgaagagcttccgttgttcaattttgagcctctcgacatattatgcgcccgaatcggacatccgtgtgaaaagttatgaccatttgaatttctcaagagttttcgatgtttaatttcgagcgtatcgatatattataagcccggatcggaactcagtgtgaaaagttatgaccatttgaatttcacgagagcttccgttgtgcatttacgagcgtctctatatgtgatacgcctgaatcggacatccgagtgaaaagttatgaccatttgaatgtctcgagagctttcgttgtcaattttgagcgt

SEQ ID NO: 5633 - DNA, 281 bp, Glycine max
tggcttagaactttctgcttttattaggaggtttttttgcatttgtattttggggtaatgcagacatggagtaacttctaaaatggctgccaaaggaaaataattgagagccaagtgatgctgaataattggacctctgagaagtgttaccgatacctgaattcaaagaaaattgaggaggagataaccggcgggttacatgggggagagcgttatctaatggaagtatccatttaataatgctccacatggatcctgatttgtgtgaaactgaatgttct

SEQ ID NO: 5634 - DNA, 363 bp, Glycine max
agcttctaaactttgtacaagaattaagctctgataccacttgttagacaagtggcctcagatatcttaagaaggggggggttgaattaagatattcgaaactttttcccctaattaaaaatctatcttactttttacttaagttatgaattcccttaatgacaatcttcttaaatattaattcaaatgaagcaacttgaatataaatataaagcaataataaataaaggagattaagggaagagaaaatgcaaactcagttttatactggttcggccacatccttgtgcctacgtccagtccccaagcaacccgcttgagagttccactaacttgtaaattccttttacaagttctaaacac

SEQ ID NO: 5635 - DNA, 316 bp, Glycine max
ttggaaaatgatttctatacaaaagttagtcgtataaagtgactaacacttatctatgaaagttttttagagagttttttagaatcttattgtcttattctctcaaaagcaaatcattggccaaacacttgcaagtcaattaacgattcttctaagaacttcaacttgtatcattcttctctaaaagagagaaaaacttttgtacttctaaaacaaaattgttgtgatcaagaggctgtgtgtctcttgaattgtgagtttcctgaacacaagggaatggatccctcagttgttcaaaagtttgaaatggatttta

SEQ ID NO: 5636 - DNA, 324 bp, Glycine max
tgtagggttaaagtctcacgattgtcacgtgctcatgcaacaattgttagccgtggctatacgagacatcttgccaaacaaagtcaggttaacgataactcgtctatgctttttcttccattctatatgtagcaaagtcattgatccagtcatgtttgatgagttggaaaatgaggccgcaattatactgggccagttggagatggattttccccctggcttcgttgacctcatgaatcacttgaatgggcctctggtccgagaaaataaatgatggggtcctgtttattaacggtggatgtacccagttgagcgatacatgaa

SEQ ID NO: 5637 - DNA, 369 bp, Glycine max
  unsure (1)..(369): unsure at all n locations
cttgaagccaaaaggaaaaattatcttgtttttgttcaatgtactctgcataatagagtgtgttcaatgcaaagttaccactccattccatcgaaccttgaggattgataaagccatcaagataagtcttcattaaaattgatcttgaatattgcttccatggtcttcgaagataaatcctaaccgggttttgaaacaacaatattccaaaaagttcctcgcatatcgcgatggatgcttcatagaatcaaaanccnctnnannnaanctcnccggaaaatcacttgaagagggcctaangacncngcatccatcgctttatattacagttgaatttccaatcaaaagtatgacccattgtgtcaaaca

SEQ ID NO: 5638 - DNA, 316 bp, Glycine max
tgtaatcgattacacacatactgtaatcgattaccataggagattttcagaaaatattctcaacagtcacatctttttgtgtggttcttgaatggctatcaaaggcctatatatatgtgacttgagacacgaatttgacaagagtttttcagaacaaaaaggtcttatgctcttagaaagaaaaataattttatcctcttacaaattccttggccaaaactcttgtgattcaataaggaattatttgagtgctcaaattgttcaatctatctttttatagagagatttcttcttctcttcttcttcattctgaaaa

SEQ ID NO: 5639 - DNA, 314 bp, Glycine max
tatagttattggagggagaataaaacaattcaaaatcaattgtacctttcaagtaacgaagaattctttttgcggcttttagatgaggagaggtaggagcctccgtaaagcgacacacaactcccaccgaatatagaatattgggccttgtattggttagataccttaaactccccacaagactcttgaagaccgtggagtctaccttctctccttcatcaaactttgataacttcaagccaccttccataggtgtgttcacgggattgcaatcaagcatattaaatttcttcaacacttcttttgtgtagctt

SEQ ID NO: 5640 - DNA, 305 bp, Glycine max
tggacaatggcagtgcaatcttactaaaatcctggatgaatctcctataaaaacctacatgtccaagaaaagaacgcatttcctgcatagaagcgaggtaaggtagagaagtaataacatcaatcttggccttatcgacctcaatacctctaatagataccaaatgccctaagattatatgtaaccacatggtacaaaaactattgttaagagtaaagacccttcccgtggcctttggacgtctagtttggtcattcagacccccaccattctgcttcttcttgggatataggcaatctctttga

SEQ ID NO: 5641 - DNA, 312 bp, Glycine max
tcaacattcaatttcgagcgtctcgatatattatcaggactcaatcagacatccgagtaaaaagttattgccgtttgaattggctcagagcttcaacattcaatttcgagcgtctcgatatatgacaggactcaatcagacatccgagtaaaaagttattgtcgtttgaatttgctcagagcttcaacattcaatttcgagcgtgtcgatatattacgggcctcaatcagacatccgagtaaaaagatattgtcgtttgaattggctcagagcttccacattcaatttcgagcgtctcgatatattacgggc

SEQ ID NO: 5642 - DNA, 363 bp, Glycine max
  unsure (1)..(363): unsure at all n locations
agctntaaggaaattcaaacgactataactttttactcggatgtctgatggagtctcgtaatatatcgagacgctcgaaattgaatgttgaagctctgagccaattcaaacgacaataactttttactcggatgtctgattgactctcgtcacacatcgagacgctcgaaattgaatgttgaagctctgagccaattcaaacgacaataactttttactcggacgtctgattgagtcctgtcatatatcgagacactcgaaattgaatgttgatgctgtgagcaaattcaaacgacaataactttttactcggatgtctgattgagtcctgtcatatatcgagacgctcgaaattgaatgttg

SEQ ID NO: 5643 - DNA, 324 bp, Glycine max
tctctgcatgatgaattgccaaaatggatggatccatgcttattgatttcttttctgtgtatgtgacagggggggaaaaggagtgatgggcgaacacctgacggaatacgtccaattaactcgagatgtggcctattacctagagcacatggaagtactctttttacaagaggcgagacacaggtctgagccaactttatttgttttccagtttatgcttttgatgatatctgttggtgtctatatatgcttatgcaagtcacattatctcttttctgtgtttgttagttttattagaagggagatagaatgatcaaacacaaa

SEQ ID NO: 5644 - DNA, 314 bp, Glycine max
tagcacctggaattcggatgctccatcaacctacctatcgatgatgggtagagggtatgtgtctttggggcacgccctgtttagatcagtgtagttggtgcacattcgccatttttcgttggctagctaggtggaaaacctgacctctcttatgaaatttgcatggaggagcttgtcgacttcttctttgatgactttatgccgctcttcacccatcttcattttcttttgtgatataggtttgtctttagaaggttttcctatacaagatgtaaacaaaactgccttggttgatgaggaccctagacaccatg

SEQ ID NO: 5645 - DNA, 314 bp, Glycine max
tagcacctggaattcggatgcttcatcaaccttcctatcgatgatgggtagagggtatgtgtctttggggcacgccctgtttagatcagtgtagttggtgcacattcgccatttttcgttggctagctaggtggaaaacctgacctctcttatgaaatttgcatggaggagcttgtcgacttcttctttgatgactttatgccgctcttcacccatcttcattttcttttgtgatataggtttgtctttagaaggttttcctatacaagatgtaaacaaaactgccttggttgatgaggaccctagacaccatg

SEQ ID NO: 5646 - DNA, 311 bp, Glycine max
tgtcagccgcgattgacgaaggatgcagaagacgacgttagtctctgcgtgctatcaggcttttcatcttacagacagcaaaagaaagtttatacggataaccactcgggtatttccacccgtcaacgtgactcaaatgtcagtatgacagatcttgtgaaggtggccgacaaaagcgaggctcttgctcctacgtatcctccaatgaggaactcagacctacgtagttcttgataacttgtgagacttgaaaaagtctccaccggaagatgctgacatctccggaaagggcgcagatgaccacattggcc

SEQ ID NO: 5647 - DNA, 352 bp, Glycine max
  unsure (1)..(352): unsure at all n locations
agcttgtaagagtgcatttgttttttcttgcaggccattgataggattgggtggttgctttctaaaaggagaatttggtgggcaattgttgactgctgtaggtaaagatggaaacaatcaaatgtttcctattgcctatggtatagtggaatctgaaaattattcatcttggaagtggtttattgatctattgatagctgacctagatggtattcaggagggatcttaggctttcatttctaaccancanaagggaaanacttattggaactaacatgaactatggctttcattcaattggtccactattttttgcagggtttggttgaagtaatcaaagagcatggtgaaa

SEQ ID NO: 5648 - DNA, 347 bp, Glycine max
  unsure (1)..(347): unsure at all n locations
catatgaataatactccaatggttgggtttagcaaaaatgattaatttttcatagataaaataaggtttgaatatttgtttcgaaagatgttaatattaatttagtgtgagaataagattatgtttgataaaactagttaaaaagataattagaaatagtaaaaactaattgatagttgaaaaatgaatntttttttattcgtgaaaagttatcttattgaatcatatacaaatgtttggtaaaattatatgttgaaatagctaacaaatataaaaatatataaatgaacatgtttatataatgtttttatacatatttntaattcgatttgttgataaaaaaatat

SEQ ID NO: 5649 - DNA, 368 bp, Glycine max
acatagacacctagttagacttttgggttactgtgtggttttagacgaaatgatgctaccatatgaatatatgcctaatagaagcttggatgctttcatatttggtaagactatttcttgcatttgaaatattctgttggctaagcacttttttgtacactcaaaatcctattttgaagtagactaatgtaatgtgtcatgcccctaatgaactacaagaccggaagctgtgtgttctattagactgcgatgtgcgcttcaagaatattatggggattgctcgatggcttctttatctacatgaagaatctacgttgaggattattcattgggacttgaatacaagcaacattctaccttatgtatag

SEQ ID NO: 5650 - DNA, 358 bp, Glycine max
  unsure (1)..(358): unsure at all n locations
ctaagctgaatcgacctcagtgtgnaagnatgacttctgatattcgttagctcncgngatcaatntctagcgtctgtatatgtgatacgcctgaatcgaacatccgtgggaaaagttatgaccatttgaatntctcgaaagctttcttggtacaatttcgagcatctcgacatattgtgtgcccgaatctgaccatcggtgaaaagttatgaccatttgaatatctccagagcattcattgtgaagtttcgagcgactcgatatattataagcatgaatcggaccttagctgaaaacgttctgaccattagaatttctcagagctctcgttgtaaaatttgagcgcctctatatatta

SEQ ID NO: 5651 - DNA, 437 bp, Glycine max
aatcctgactcaccataaacgttgacccaaggttttattgcctattcttatcctcggaagcaagaaaagatgtgaagaaaattttcaatcaaaggaaaaaggagaagaaaatttccaatcaaagaacaagagaatgataattctcaatcaaaggaaaaaaaggaagcaaagaaattcccaatcaaagagtgggagaaagaataaatgaaaagaaaggaaattcccaaccaaataatgggagaaatgtaaaaagaagaatgctcctgatcgaaagataacagaagacatgtgcagagaggtctttggaccggacaatatctgaacaatacagaattgtcaccaaatgaacgaaaaatgaaggaaatgaaaccactacctaatatggtcttctccacttaattaccaaccaaaatcccgtgcgctagctaccctttttt

SEQ ID NO: 5652 - DNA, 401 bp, Glycine max
  unsure (1)..(401): unsure at all n locations
tcgcacttgataacggagaacacatgaacatgttgctggcattttcattcatggcgctccggacaaacgtggagtatggatgattgcctagagggaccgcacttatgctatcatgaagctcatctccaaacttgaaagtggacgacacatgaacaaccctaagcaataaactttcatgtggctccgaaagaagatgagaatggacgatngccttgagggtccactcttaggcaatcatgaaactcatctccaaactcgaaagtggaggacacatgaacagtcctaagcatatacattcatgttgctcctgaaaaggataaaatggacgattgtcttgagggtcctcttataggcaatcatgaaactcatctcccaacttcaaagtggaggacacatgaaca

SEQ ID NO: 5653 - DNA, 446 bp, Glycine max
  unsure (1)..(446): unsure at all n locations
tcaagctggtatctccttcttcactacatctagtaataccgggttgtgtcttctctgtggctgtcttactggtttagctctgttagtgcttagctntactgagttttaaaagattggctaaaattttgttaaaacataagcacttagacaatgaaggaaagctggagttgctgcacatgatgtctaacattatgtcaaggaatcagatcgggctgcacaatgcacaaggcaagataaaatgtcaaatgaagaattgaagctgcaggatccacgatgtcggatacaatgtccaggacattctgcccgaaaatactggacacataaatctgttatacctttaacagcttaatgtgcagtcagcaacagattatgcgatctatctntaggaacgaattaaaagataattaaagttcgaattacaaacttgaatagttcgttcacggatt

SEQ ID NO: 5654 - DNA, 476 bp, Glycine max
tgcagtagatgccactctactctaaattcttgaaagatatgttaacaaggaagcataaatatattcatcaggaaaacatcatagtggaaggaaactacagtgctatgatccaaaagatccttccacccaagcataaagatcctgggagtgtaactattccttattcaattggagaagtcaatgtgggaaaagctcttattgacctgtgagccagtgtcaatttgatgccactctccatgtgcagaagattgtgggagttggaaataatgcccactcgaatgactttacaattagctgactgttccattaccaggccatatggagtaattgaagatgtgttggtcatagaaaaacattttatcttcctgacagactttgtggtaatggatatctttgaagatactgacatccctgtaatattgtgaaggccattcatgttgactgcaagctgcatagatgatatggggaagaggaag

SEQ ID NO: 5655 - DNA, 417 bp, Glycine max
  unsure (1)..(417): unsure at all n locations
atcggacatccgtgtgaaaagttatggccatttgaatnttacgatagttattgatgtataatttcgagcgtatcgatatattataagcctgaatcggacatccgtgtgaaaagttatgaccatttaaatttcacgagagcttccgttgttcaatttcgagcgtcactatatgtgatgcgcctaaattggacattcgagttaaatgttatgaccatatgaatttctcaagagctttcgttgttcaattctgagcgtctagatatgtgatgtgctcgaattggacactcgtgtgaaaagctatgaccattataatctctcaagagctttccgtgttcaatttcgagcctctcgacatattatgcgcccgaatctgacatacgtgttgaaagtttgaccatttgaatttcatgagagctt

SEQ ID NO: 5656 - DNA, 458 bp, Glycine max
cacgtttcaaactcaaagtatattacatttacaaacttaaataagaaagatcttcacatctataaaaagacttaatgaacattaacagaaataaaacctaccagaacctgtaagtgaaagaaaatatacagacccatgtaaactatagaacatagatctaaccttttaagtggaaaataacataaacgtagaagtatgcaaatgaagatttaccaaatgaattcagtaatagcaactttacctgaaagtgtaaactgttaatgcagcacccaatccgccaaaacaatgggaccatgatcctctggaactctaccatgttaataacttccaaaatatcttccagttcacccagaaacatcacctctttctgactatttgttgctggccaatatttcaacaagccgcttatcacaatgctcgctaactttggctccttctctataaactgcataacacag

SEQ ID NO: 5657 - DNA, 468 bp, Glycine max
  unsure (1)..(468): unsure at all n locations
tactcaagctcgagcacctncttccttacctcttncttcattgttgggtnctttcttctctggggttgtcggactggtctgtagtcttcttccatcattatcttgtgcatgcagtaggcagggctaatacctttaagatccgatatatgccacccaattgcttccttgtgtttcttcaaaatttctactacactcgtttcttcatcggatgtgagtgtattgctgatcaccatatgcttactctcattcttctttaagaacacatgcttcagatggttgggacatatcttcaattctaccttcttcttcttagatggagtcttgctctttagtttctcaaaactggccttctcctcatggatgttatcttgtcgatccaagtcttctaagcaagccttgagatcttcttctttctcattgggtaggcaatctatccgatcaccatggctctttcagctaagtctgtgc

SEQ ID NO: 5658 - DNA, 256 bp, Glycine max
tgaacaacgataactctcgagagattaaatggtcatcataactagtcacactgaagtacgattcacgcgcatactatatcgagacgctcgaaatctaaccacggacgctctcgagaaatccaatggtcataacttttagcacgaaagtccgactcagttgcatgttatatcgagacactctaaatcaaacaccgagagctctcgagaaattcaaatgatcataacctataacacgtaggtcatattccgacctata

SEQ ID NO: 5659 - DNA, 464 bp, Glycine max
acttcctgtgtttgggaacctctcctgcctcaggtgtttctaaacccaatcacctggttcaagcacgactttctttctgcttttgttggcttgccgtgcatagctcgcatttttcttttcaatttgaaccttcacttgctcatgcaacttcttcacatattcagctttagcctgtgcatccttatgcttaaacatagcaatgttaggcataggcaacaaatcaagaggagtcaaaggattaaatccatacactatctcaaatggtgaacaattagttgtgctatggacagcccgattataagcaaactcaacatgaggcaaacaggcttcccaagatttaagatttttctttaaaacagtcctaagcagtgtgcctaaagtcctattgactacctcagtttgaccatcagtttgtgggtgacaagtagtagataacatacaattagtaccaatcttaccccaca

SEQ ID NO: 5660 - DNA, 462 bp, Glycine max
  unsure (1)..(462): unsure at all n locations
gaatgaagctctgataccacttgttagacaagtggcctcagatatcttaagaaggggggttgaaaaatgcaagttacaagttcccttaaaaaatgaattcttaaataatgattcaaataaaacaatctgaatataaatccaaagcaataataaataaaagagtttaagggaagagaaagtgcaaactcaaatttatactggttcagccacacccttgtgcctacgtccagtccccaagcaacccgcttgagagtttcactatcttgtaaaatccctttacaagttctgaacacacaaggacaatccttcctttgtgttcagatatctttacaacaagagactctcggtctctcaatcccttttgagaatttagaaagaagagaagaataaatctttcttgaaatagatagattgtacaatctgagcactcacataatnccttattgaattgcaagtgtattg

SEQ ID NO: 5661 - DNA, 388 bp, Glycine max
  unsure (1)..(388): unsure at all n locations
acatgcctcatgacacctaagtatacttagtggagaatcttggacatgatattggattagtgggttgaaccatagctaaaattcactaatcataattagtgaaaatttggctccacaaattcaatttcaaattcaagtgaaatttggataaaaattcaaatttccctctaattatgtgtgacacttataaatagaggtcatgcgtgttgtatttttcaactctgatcatttgagaattacgctncaaagtttagacctcatttgaggcataaaattatgtgctccttctccctccactcatcttctcctaccttcaaactcttatccatggcttcctatggaggtgagattgttcttgactcatcttctccttgaagtgacgtctcca

SEQ ID NO: 5662 - DNA, 429 bp, Glycine max
tggcctcagcaaatacctgatttccagaatgtaattctatctatatacctccaatcttgaatggagagggttaccactactggaaaacccgaatgcatattttcatcgaggcaatagatctaaatatctgggaagccatagaaatagggccttatatacccaccacagtagaaagagtatcaatagatggtagttcatcgagtgaaagcataaccatagaaaaacctacagatagatggtctgtagaggatagaaaacgagtacaatacaacctattagccaaaaacataataacatctgtcctatgaatggatgaatatttcagagtttcaaattgttagagtgctaaagaaatgtgggacactcttcgattaacacatgaaggaactacagatgtctaaatatcttcgataaatgcacttactcatg

SEQ ID NO: 5663 - DNA, 468 bp, Glycine max
taagctccttcaactgcacaaggctcttatatattgatgagtatccttgtagaaccttcacccgacgaagacactgacaaaaacttatcttctccttcttggacaaagtatggcaggctgggggcaagtaaattatcttcccatcagaccttggatgcaactatgatctgatacccatatcagttagatcttgacgggtattcaagccatccttcgtcttgccttgaatgttaaggagcgtcccaatcacactgtcacaaacatttttctccacatgcataacatcaatacaatgtctaacgtcaagatcacaccagtacgaaagatcaaagaatatggacctcttcttccatatgcaactctgacttttatccttcttttgggtcttcccaaatacagtgttcatgtgttgaacccgctgatataccagctcaccagtcaacggtatcggcgcaatatcatgctctt

SEQ ID NO: 5664 - DNA, 465 bp, Glycine max
gctatccctattgaactgccatcatcaagcatgcttttattcgagtttcttcatcactcacagtataaaacacctccaacagtgaagggagtttttccttattcaatatttgaacccgaacccgaatatgatcgtactcatgattcaagcccgagagaaacttaaagattctctcttgctcaataaactgagccaatgcaacggagtcagcattgcatttgcatgtcatcttcaaattctgatattggtcgaactccatccacaagccactcaaggtttcataatattctgtcaccgagaggcttccttgcttagtcataaagatctggctttggatctcatgacagacaatgatatcattctttacatagtatatgctggcaaggttgtcacaaatttctcgagcaccggataaatattgaatgacaatataccatgtatatagtaaatacttcaaaaatgatg

SEQ ID NO: 5665 - DNA, 479 bp, Glycine max
  unsure (1)..(479): unsure at all n locations
tcaatctaagcttatcccttttcactcatgtgtccaagtctttgatgccacatggttgacttattgacaacctcagtaactgctaccatatcctcatctgcaatcatgtaaagagatcctcgcttctttccacgagccacaatgagattggcctttgttaccttccaagcttcatctccaaaagtggtgtgatgtccctcatcatccaactgccctttagatattaaatatctctttaaggcatgaatatgtctgacattgcgcaatgtccatagggatccactggaggtcttgatgttgatatcacctcttccgacaatgtcaagagaatttccatctgcaaggtaaactntcccaaaccttccagaaatatagttagacaataaatctttagagggagtagtgtggaacgacacacctgagtccatgatccatgaatcaacaggactatccannactgcaaataatgcatcatcaag

SEQ ID NO: 5666 - DNA, 463 bp, Glycine max
  unsure (1)..(463): unsure at all n locations
cataagtaagaagaaatattactaccaattaatagggttctattaacctccaaaaggtgtctattgtttctctcggctactccattttgctaaaggaaattaggacatgatgtttgatgaagaataccaacaaatttcataaanaatttcaactcatttttgtattatccccttcattattagacctgactatctttattggagtattaaattgtgtggttatcattttgtgaaaaacttgaaaaacattacacacatcatttttgcgtttaagaaggtataaccaagtcattcttgtacaatcacccacaaatgtcacaaatcatcgcatttcattatgtgtggaaagagggacaagtcctcanacatcatagtgaataatatagaagggagcataaactttattgttatttatagaaaaagtaacgcgatgacgttttgtcattacacaagantcacattt

SEQ ID NO: 5667 - DNA, 392 bp, Glycine max
  unsure (1)..(392): unsure at all n locations
agcttagactgagttcagcctaccatcctcttactgatgaccaaactgaacggaccattcagtcattgggggaccttttaagagcatgtgtcttagaacaaaaaggaagctgggagagttntcttcaattgatagagttcacttataacaatagttttcattctaccattggtatggctccctatgaagctttgtgtggttgaaggtatagaacacccctatgttggttagatctcggagaaggcctcacctcaggaccagaagtggtacaacaaaccactgagaaagttaagttaattcaggaaaggatgagaactgctcagagtaggcaaaaatgttatcatgataagaggaggaaagatctggaattcgaagttggtgatcatgtattc

SEQ ID NO: 5668 - DNA, 384 bp, Glycine max
  unsure (1)..(384): unsure at all n locations
ntgatgcaacagttggagaggttaatggaagaaggagatgatgcgctccatgagaggttggatcaaatggagaatagagatcataatgaagaagaaaggaggagaagagggaatgatgatgttcctagacaaaaccgaattgatggtattaaactcaacattcctctctttaaaggaaagaatgatccagaggcctacttggaatgggagatgaaaatagagcatgttttctcatgcaaaaactatgaggaggaccaaaaggtcacgcttgccgccacggagttttccgactatgctcttgtgtggtggaacaagctacaaaaggagagaacaagaaatgaagagtcaatggttgatacatgggcggagatgaaaaggatcatg

SEQ ID NO: 5669 - DNA, 395 bp, Glycine max
  unsure (1)..(395): unsure at all n locations
agctatgaccaggaattattggatgggttggtatgtgaattcaagttgttcctggtgcggagatgatggtacagcgggtgaaccagaagctgcagtttcttttggtgaggtagccatggaaaagcagagcgtttggaatgatttcgtaaatctcagaaaactattgngaaatgctggagataacacgaatgccaagcagatattaaattgaatgaagaatgtagaggggtgtgtgaagcaacggtcgaatttgctttgtagtgaacgtgctattaatgttaagtgattcgtttgggcacgttcagatagcagtagctgctataattcctctagcagacaaatgcccagcttgccctcagttttcaactgatttgcatcaagcctttggaaatatc

SEQ ID NO: 5670 - DNA, 326 bp, Glycine max
  unsure (1)..(326): unsure at all n locations
tgtcaaaaagggaagcaagttaaaaactcttttgaaagtaaattaaatgtttctacttcaaaaccccttgaactacttcacattgatctatttggtccctctagaacaatgagtttgggtggtaattactatggcttagttatagtagatgattactcaaggctcatatggactttgttttaaccaaaaatgaagcttttggtgctttttaaaaacttgccaaggtgattcaaaatgaaaaaggtctcaacattgtttcacttaaaagtgatcatagaggtgaatttcanaatgagtctttttgaaacttttgtggagaaaatgga

SEQ ID NO: 5671 - DNA, 387 bp, Glycine max
agcttatgttgcaaacattttacaatatatccctctcaacctcagtagcaaaatcagccacaacatagtaattatgacctttccagcatcaggtacaatcccgagtggaggaatcatcccaaccttaaataggtgaatccttaacaacagcaacaacaacaaccttattgtaaaaatgttgttggcctaagcagaccatacgtgcctccaccaatctatcagcaacaacaacaacagccccagaaacaacaaacagttgaggcttcttcgcaaccttcccttgaagaacttgtgaggcaaatgactatgcaaaacatgcagtttcaacaagagaccaaagcctacattcagagcttaactaatcagatgggacaattggctacacag

SEQ ID NO: 5672 - DNA, 454 bp, Glycine max
  unsure (1)..(454): unsure at all n locations
ctaagctngaaaggattatgnacttgaccttgagtccaagacatttactaaaatttagctataaatcaactaatgaaagtgctcaaaagggtatatacaaccctccaaacttgagcctaaggataaatgaagtttaaagctaaataactcagaaagatatacatgtctccaaccttgagacttaaagtaaataaagcttaaaattgagctacaagtaagctaaagtacttaaaaagatatatagtaaaaaaaaatgtaagaaaattaaatgagctataatacaattaaaatgaataatcaaaccataatttaagtctagttatgcttttgttattaaaaagtantaattntagcanttttatatttattaaataaattatacgagtctcattaaaataattaaagcatatttcctagtctctattaacaagatcaaataaacttttacaatatt

SEQ ID NO: 5673 - DNA, 395 bp, Glycine max
  unsure (1)..(395): unsure at all n locations
agcttggagacaaaatcatgaaatttgggtgtcgccaattcnttggtgagaaaatctgccacttgatcacttgttgaaactggtagtagctttagagtgcccttcaaaagcttctctcgcacaagatggcaatcaatttccaagtgttttgtgcgttcgtgaaaaaccggatttgaggcaatgtggactgcgctttggttgtcacagtaaagagttggagttctggtaagctgaactctcaaatctgcaaaaagatacaacagccattgcaactcacaagcagctgaagacagagccctgtactctgcttctgaagatgatctggacacagttgcttgctttttagcacgccatgacactaaagatttgcctatgaagaaacaatatccagatat

SEQ ID NO: 5674 - DNA, 373 bp, Glycine max
  unsure (1)..(373): unsure at all n locations
agcttccatcaagtgcggaccctcaaggatatccaccattctccccatttttcggagccccataaatgttattgcctagcgctattcatgtgtcctccaccttcgagtttggagctatgtntcatgattgcctaagtgcggaccctcaaggaaatcctccattctccccctttttcggagccccatgaatgttattgcctaacgctgttcatgtgtcctccaccttcgagtttggagctatgtttcatgattgcctaagtgcggaccctcaaggcaatcctccatcctccccctttttcggagccccatgaatgttattgcctagcgctgttcatgtgtcctccaccttcgagtttggagctatgtttcatga

SEQ ID NO: 5675 - DNA, 329 bp, Glycine max
  unsure (1)..(329): unsure at all n locations
ttgaataggagtggtgcgcggngtatatgttccatatacacatctttattgagatttccatgaaggaatacattataaatgtcaagttgttgcaaggaccattgatttgctgcagcaatggtcaaaagtaacttaattgtgtttacctttccaattggtgaaatagtggcaaaagtagttgataccttgggtttgagtgaatccacgaagcatagctttgagccaatacctttattntatgttagactatttattttaactattatgataattaacataataaaattataatgtctacttaaatatatgtttcttactttattttaaac

SEQ ID NO: 5676 - DNA, 267 bp, Glycine max
  unsure (1)..(267): unsure at all n locations
agcttgaaattgaacaacttatgctctctactatntcgaaagggcatagctttttactctgatgtcctattcggagacatgactcatttatacacttgaaattgacaacggaaactctctgaaaattctgatgtgcataacactttcctctcatgttctgatcgaggacataactttattaaacgctcgaatttgaacaactgaatctctcgagacatctgaatggcataacatttcactcagatgttcgattcggggatattattt

SEQ ID NO: 5677 - DNA, 379 bp, Glycine max
  unsure (1)..(379): unsure at all n locations
gcttgttagcatactctntaattgtttcgaactccttcattttctgcatctcaaattctctaactaaattcagggcttgcattcccttaatcctttcatctccttcgtattcattcttaaggaaactccagatttcatatgcctgattgatggtcattattctagtgaaaatttcttttgagatagcagcaaataaagaagctcttgcctttgactntcttgttttcctctccttttaattntttatctgagtcattgttggattggttggtaaaggaagaacttcgtagtcttcctcaaccgcttcccagagatcatttgcctccaaatgtgcctccatttttgctgcccagatttcatgattatcaccatcaaacat

SEQ ID NO: 5678 - DNA, 372 bp, Glycine max
tactcaagcttctggtgggacatcttgacttgctttttatctgacattctttatagattctgccctcttctattttcagattgggaatgcctctaacagcacctttgtcaatgattatcttcatgcctcttaagtgcagatgtccaaatctttgatgccatattttgacttcatcttctttggagaatagacatgtggaggagtaactggtttcttgaggtgtccataggtaacagttgtcctttgatctgctgcccttcattaagacttcactcttctcatttgtcaccaagcattctgactttgtgaagtttacattgaatccttcatcacacaactgactgatgctgatcaagttcgcagtcagtccct

SEQ ID NO: 5679 - DNA, 400 bp, Glycine max
  unsure (1)..(400): unsure at all n locations
agcttcttccccctttccctaatgtctaattttttcacatagnttatgagcttatgcaaatataataattgcatcctttaactataaacaggacaaaagtatccttttacatttgacaaggtattaaatcatgaggcatctcagcaagatgtttcactgagatatcacaattggtacaaagtgcgcttgatgggtacaaggcgattattaatttgtgtcttctttgttcaagttaccttttgcaggtcaaaaatctcttacattggatacaactattggtatgtgacaattattattttctgagaagcagtggctactggttgatcattggcgccaattcttgtatgtaatatactagagtattaatattaatatacacatctttaactttctcgattat

SEQ ID NO: 5680 - DNA, 399 bp, Glycine max
  unsure (1)..(399): unsure at all n locations
tcgaaagagacattccaagtggttggaattcatttagatgttttcttatatgatcaagtacaagaatggtaaggaaaacatagtggttgatgctttatctagaaggtatgtttttcttacttctttgcaaactaaattgcttggttttgagtttatgaaggacttgtatgctaatgattctgaatttggcaaagtatgggattcttgctctaaacatgtttttaggaactattatagatgttcatgtttcaaaaaaaaaagttgtgtgtgtctgtgttccttgcatgaaatgttagtttgagaaatcatggtggtggaatgatgggacattntggtgtgaaaaagactttataaattctggataagccattttattagcctagcatgaagcatgatgtg

SEQ ID NO: 5681 - DNA, 412 bp, Glycine max
  unsure (1)..(412): unsure at all n locations
agcttagactgagttcagcctactatcctctaactgatggccaaactgaacggaccattcagtcgttggaggaccttttaagagcatgtgtcttagagcagaagggaagttgggagagttctcttccattgatagagttcacttataacaacaattttcattccaccattggcatggctccctatgaagctttgtatggtagaagatgtanaacacccctatgttggttagagctcggagaaggcctcaccttatgaccagaagtggtacaacaaaccactgagaaagttaagttaattcaggaaaggatgagaactgcttaaagttggcaggaaagttatcatgataagaggaggaaagatctggaattcgaagttggtgatcatgtattcttgagagtcacttcatggac

SEQ ID NO: 5682 - DNA, 385 bp, Glycine max
  unsure (1)..(385): unsure at all n locations
cactctgaaactcagctattcagatgctactgacaaaggcagtggttttggttttttcagcggnccattctgctgccccaggataacaagggctaatagctacaacagtaggactaacatgcttaacagtaaacagaacacagccaggtgatgttggagcacaagagaaggccacaatctggtatgtcatctcacatcttggcagtttgatcagctcccgagtaaagggataaagaagaatactcggtgagttctgggccggtatagcaataaccaaccatcttttgtataacaaactctagatccattcaactctggcgactcgaaggtgagtgtcttatgctgcacagggtcatagaattcataacaggcaccgaattttgga

SEQ ID NO: 5683 - DNA, 375 bp, Glycine max
  unsure (1)..(375): unsure at all n locations
agcttaagctccttcaactgtacaaggctcttattatttgaagagtatccttgnggaaccttcacccgacaaagacactgacaaaaacttatcttctcctttttggacaaagtatgacaagctgggggcgaataaattttcttcccatctgaccttggatgcaactgtgatcatatgcccatctcagctagatcatgacgggtattcgagccatccttcgtcttgccttgaatgttaacgagcgtaccaatgacactgtcacatacatttttctccacatgcataacatcaatacaatgtctaacgtctagatgataccagtgcggaagatcaaagacaatggacttcttcttccatatgcaagtcgtactttta

SEQ ID NO: 5684 - DNA, 285 bp, Glycine max
  unsure (1)..(285): unsure at all n locations
attgttcaatttcgagcgtctcttatatnacgcgcctgaatcggacgtccgagngaaaagttatgaccatttgaattcctcaagagcttccattgttcaatttcgcgcgtctcgatatattatgcgcctgaatcggacctccgagtgaaaagttatgaccatttaaattgctcaagaggttccattgttcaatttcgagcgtctcgatatattatgcacctgaatcggacctccgagtggaaggttatgaccatttgaattgcttaagagcttacattgttcaat

SEQ ID NO: 5685 - DNA, 387 bp, Glycine max
tctcctcattgtagcattatttactttcggctctttagcattctcaataaattggctccgatagcccatagaaactatacaacccaatgcaattgctctggcctctagcaattcgctatttgcactcctcctaattatatatatcccgtaatttctatcactattcattattttattttatatttaattacatgttttaatatatcaagagagagaatgataatttattaaattaaaaatatttttagtgatgttatgttaaatagactacataatattacattttttcatcataagagatgaaggataatataatatttgtatctttcacagataaaacaagtgtaatttattttgtttactataaaagaatatagtatgactact

SEQ ID NO: 5686 - DNA, 381 bp, Glycine max
  unsure (1)..(381): unsure at all n locations
agcttatcattgataaaagtttatgatttactatttgatactattagggggttgntcgaagaacctgcccataatntaagattccagcagaagggttaatctctaagtttccatagggaaagatggatccttgtgaaaacttatctccctctgcacatttcatgacatacatgtaatctgttggaactagactaaatccaagctcatcccaattaatgtcagcatagntttccccagcagtactgattttcagacaaaagagggtaatcaaagttcagattcanaatcaccaataaaaccaagttcatacattattatctactagtacaataacattgtcgtactcatcaaaaattaaataccataacattttcgtattca

SEQ ID NO: 5687 - DNA, 437 bp, Glycine max
agcttgctgatacaattattaggggattgtttaagtactggcttataacaaatagtccaaaggaggttatgttcctgggtgagttggaagaagtcttggaagcaactcaacccccagaatttcagcgttgtatggagccattgtttcgtcgcattgcacgttgtttgaatagccctcattttcaggtttgaatttttcaatactttcctctggctccttttctgtttctcctcttatttcatgatgaaaatacacctgaatttcaaattaattctctctggcaacttccttcatactgattacctgaatcctatatctcaattcacttcctctagttgataagttggtttaattagcaagaaaaggactaacctttttgcatcatcctatagctaaatgcatattggcttatggctttgaagtgacataatatcaat

SEQ ID NO: 5688 - DNA, 411 bp, Glycine max
agcttgaaggtaaactagatgccttggttattctggttatcccaactggccatgaatcaaaaatctgcacctatcaccagactctgaggtttatgctcctttgccgaccaccacacagacctttgcccttttgggcaacaatctgaagcaattgaacagcctgaagcttatgttgcaaacatctacaacagacctcctcaacctcaacagcaaaatcagccacaacagaataactatgacctttccagcaacaggtacaatcccggatggaggaatcatcccaaccttatatggtcgaatccttcacaacagcagcagcaacaacaatagacttattctcaaaatgctgctggcccaagcagaccatacattccttcaccaatccagcatcaacaacaacaacaacaaccc

SEQ ID NO: 5689 - DNA, 447 bp, Glycine max
agcttccatcaactgcagctgcccaaacttttctagtattcaattacaacatattataatcgattacagaggcttgttctatggtaatcgattacagggagtagtaatcgattaccagaccctaaaacatggatttttcattaaaactaactatttttcacccacaaaaacatacacatttagtataaataatgaaaatatacaataataaaaaaacaagtatcaaaagcaatcaataatcatcataactctcaaacacattcatcaaagacaatccaaatttcaagatcaaacaacaattaacaatcatcataactctcaaacacattcatcaaagcaatcaaaatttcaagaacaaacaacaatcaacaatcatcataactatcaaacataattatcaaagacaatcgaaactcaagcgaaaacaatcattaaacctcaatcaac

SEQ ID NO: 5690 - DNA, 399 bp, Glycine max
agcttggttatctccttcttcactacatcattattcaccgggttgagtcttctttgtggctgtcttactggtttagctccatcctctaaatttattcgatgcatacatgtggatgggctaataccaggaatgtccgccagggtccagcctatagccttcttatgcttcttgagaactgacaacaacttctcctcttgctcatcagcaagggaggcagatataatcactggaaaactcttgctatcatccaagtaagcatattttaaatttgatggcagaggcttcaattctggtgtggtcggctggacagtggttgaaggagatggtttctcagcctttacctcataaagaaagtcagaggtatgtgtacttcctgaaacattggtagtcctatctgac

SEQ ID NO: 5691 - DNA, 393 bp, Glycine max
  unsure (1)..(393): unsure at all n locations
ngccgccacggagttttcctactatgctcttgtgtggtggttcaagctacaatttgagagagcaagaaatgaagagccaatggttgatacatggacggagatgaaaaagatcatgaggaagcggtatgtgccggctagttactcaagggacttgaaattcaagctccaaaaactaacccaaggcaacaagggggttgaggagtatttcaaggaaatggatgtgctcatgattcaagcaaatattgaagaagatgaggaggtaactatggctcgatttcttaatggtttgactaatgatatccgtgatattgttgagctgcaggagtttgttgaaatggatgaattgcttcacaaagcaatccaagtggagcaacaattaaaaaggaagggagt

SEQ ID NO: 5692 - DNA, 345 bp, Glycine max
  unsure (1)..(345): unsure at all n locations
atagaagactccaagaagaatgggtcagagatgcaagagaaggccctatggttctcatgagccttagggtagatttcgggcccatgggctaagtatgagcctgcttatctttgtacatattatattaaggtttcattattttttggccatgtatttagggctccataatatagataagataccctagaaatgtaggatttttcagcccttgtattntanggcacctcaactagattttgtattaagggtagttntttaatttcacatgcattaagtgattatttgatgtgntgtggtggaaaataaattaaatgaattgggagaagtccaatccaattaaatttt

SEQ ID NO: 5693 - DNA, 391 bp, Glycine max
agcttgaaggtaaactagatgccttggttattctggtaacccagctggccttgaatcagaaatttgtacctgtcgcaagagtctgtggtttatgctcccctaccgaccaccatacagacctttgcccttctatgtagcaacctggagcaattgagcagcctgaagcttatgctgcaaacatttacaatagacctcctcaacctcagcagcagaatcaggcacaacacaacaattatgacaactccagcaacaggtacaatcccaggtggaggaatcatcccaaccttatgtggtcgagtccttcacaacagcagcagtagcaacaacgacaaccttatgttcagagatgtgctggcccaagcagaccatgcgttcctccaccaatccagca

SEQ ID NO: 5694 - DNA, 384 bp, Glycine max
  unsure (1)..(384): unsure at all n locations
ntgatgcaacattnggagaggttaatgtttcaacaagatgttgcgctccatgagaggttggatcaaatggagaatagagatcataatgaagaagaaaggaggagaagagggaatgatggtgttcctagacaaaaccgaattgatggtattaaactcaacattcctccatttaaaggaaagaatgatccggaggcctacttggagtgggagatganaatagagcatgttntctcatgcaacaactatgaggaggaccagaaggtgaagcttgccgccacggagttttccgactatgctcttgtgtggtggaacaagctacaaaaggagagagcaagaaatgaagagccaatggttgatacatggacagagatgaaaaagatcatg

SEQ ID NO: 5695 - DNA, 343 bp, Glycine max
agcttgacaaggagccataccaatacaggcctggtagcttttgtccgaagcaaactcaagcaatggcgaacaatccatccagctaccttgttgctctataatacacgcccgaagtagatcctctagagtctgaatagttcgctcagtctgaccatctgtttgaggatgataagctgaactaagcttcagctttgtccccaaggcttcatgtagacttgtccaaaatcgcgaagtgaaccttggatccctgtcagatacaatactagaaggaattccatgcaaccttactacttccttgatatacaactccactaactgttccattctatacctcatattcact

SEQ ID NO: 5696 - DNA, 341 bp, Glycine max
  unsure (1)..(341): unsure at all n locations
tctacattcaatttcgagcttttcgattattacgggacttaatcggacatccgagtaaaaagttattgtagtttgaatttgctcanggcttcggtattccatttcgagcgtctcgatatattacgggactcaatcggacatccgagtaaaaagctattgtcgtgtgaatattctcagagcttctgaattccatttcgagcatctcgatatattacgggactcaatcagacatccgagtagaaagttattgtcgtttgaatttgctcacagcttcagtattccatttcgagcgtctcgatgtattacgggactcaatcagacatccgagtaaaaagttattg

SEQ ID NO: 5697 - DNA, 350 bp, Glycine max
  unsure (1)..(350): unsure at all n locations
tagctatatgcaagtcaatttcatgatgcttctcggagaggatcttcttcggacatatttgcgcaaaatctctagaactacgaagaagttgtccatcatctttttgctcttaatgaaagcagcttgactgtccctaattatcgtctcaagcactgtggctatgtggttagccagaatnttaaatacaatcctgtataacaaattaccgcctgatattggtctaaaatggttaacctgtgaggcctgatcatgcttaagaataagcccactaatagcatggttgaactgctttataatttatccagttgtaaacatttcattaaccgctgcatagatattaccaccaatga

SEQ ID NO: 5698 - DNA, 380 bp, Glycine max
  unsure (1)..(380): unsure at all n locations
tgttgctcgatatctntagctctttgagtccnctngagaattgngttnctcttcttcttcttcttcttatatgggatccctctagccttttgctgacacttcttgacctcacgcaggtacacccgaatggctcctcctccaaagggattagtctctggcgatccgccatgctcctcatangcagcgcgaaaccggcctatgagggcatcgaggctaccccatgcttgcctgagagggcangcacanggtgcangaggggtgggctggccaaagaagatgcaaccgtgcaagtggaccttggttttccaaattgatcgaggtaccgaaggaaatccaacacatggttgaagttgcactgagagagtggaactgggggactc

SEQ ID NO: 5699 - DNA, 429 bp, Glycine max
  unsure (1)..(429): unsure at all n locations
ntaagcaaattcaaatgacaataactnttgactcggatgttctattgagtcatttaataattcttgacgctaganattgaatacagaagctctcaccaaatttaaatgacaataactttttactcagaagtctgattgtgtcccgtaatatatctagatgctcaaaattgaaaacagaagctctgagcaaattcaaacgacaatagctnttgactcggatatccgattgagtcatttaataattcgagacgctcaaaattgaatacagaagctctaagcaaattcaaatgacaataacttttgactcgaatgtccgattgagtcantttataanttgagacgctcanaattgaatgcaggagctctcaccaaatttaaatgacaataaacttttactcagaagtctaattgtgtcctgtaatttatcta

SEQ ID NO: 5700 - DNA, 318 bp, Glycine max
  unsure (1)..(318): unsure at all n locations
tacaatcaagtggacataaagtcgattcctcctgaggaggtttggtattgtctcaacacggatggagctttcaaagggcaaggaggtattactggttgtggtgggctttttaggaatataaatgggaagtggatttggggtttttccagaaacttanggaaagaaagtgtctttgttgcgagctgtggggttntttttttcaaaggcctcaagttgttcttcataaagggattgataaggttactattcaagtagattctaaagttgttgttaaagctataaatggcgacaaagtggggaattttngttggtggatat

SEQ ID NO: 5701 - DNA, 444 bp, Glycine max
  unsure (1)..(444): unsure at all n locations
tgannatgaacaacggattctctcgaganaatctagtggttataaattntcacacagatgtccgattcggggaaataatatatcgagacgcacgaaattgaacaacggaagctctcgagaaatttgaatggtcataacatttcactcggatgttcgatccggggacataatttatcgagacgctcgaaattgaacaaccgaagctctcgacaaattagaatggtcgtaacttttcacgcgaatgttcgattcggggacataactcatctagacgctcgaaattgaacaacggaagctctcgagaaatttgaatggtcataagttttcacacggatgtccgattcgggaacataatatatcaagacgatcganatngaacaacggaagctctcgagaaaatcgaatggtcataacgtttcacacagatgntccgatcggggacat

SEQ ID NO: 5702 - DNA, 455 bp, Glycine max
  unsure (1)..(455): unsure at all n locations
ttccttttcaggtccattgactaataaaccagtattagtaaacttgtttctggagggtttccacgtttaccagtggcccacacttcatctccaatagcatctactaatgcttcacctcccctggttgcttcacccaggataagtgagcttcatgaacttcctagacctcctggtaatcaatctagcaagccacgagcgggtcactctgctccattagtattaaaaaatccaaaagctgccatgactaataaatttccttcagttgtatttagtgcagcatctccactctcaactccacctgtctctcggagtttctctataccttctagtggtcagagagttgtggcattaaatgtctcttatactaacgtattggatactcnccaagattcaaaggttgaataagacgtgtcaacctcactaacacccatgtcgcagagagcatctaatatatc

SEQ ID NO: 5703 - DNA, 449 bp, Glycine max
  unsure (1)..(449): unsure at all n locations
gttcttcctcaaaactgtcctaagcaaagttcccaaagtcctattaacaacttccgtttgcccatcggtttgtgggtgacaagtggttgaaaataacaatttattgcccaacttgctccacaaagtcctccaaaaatggcttaggaacttagagtccctatcactaacaatgctccttggcaaaccatggagtctcacaatctccttgaaaaacaaatcaaccacatgggaagcatcatcaactntcttacatggaataaaatgagccattttagaaaacctatcaacaaccacaaaaatggaatctctaccattgcttgtttttggcagccncacaacaaaatccatggataaatcaatccaaggatactccggaattggcaatggagtatacaatccatgaggctctaccttagacttttgccttttacatacaatgcaatgttcac

SEQ ID NO: 5704 - DNA, 435 bp, Glycine max
  unsure (1)..(435): unsure at all n locations
agcttcacaaagagaatcatctagatataacatacttggaagatctcttacgaggctatgcttttcaagctttaagattaacctcaagctagcatgaccaagcttctcatgccatgcccaatgatgctctntgactgagagtaagcatgacacttttttactggatagatcaccaagtttaatcttatagagatttccttgtctcttagcagagaagagtgaagacctatccttgtgttggactatacacatatccttaataaaggtgacattatatccactatcacataattaacttatgcttagtagattatgcttcaatcctttaacaagcaacacattttcaatatgaggatagagagggatacaaatcttactgacactagttattcaaatcttttgattccctccaaaagtgatcgccccatcagacat

SEQ ID NO: 5705 - DNA, 445 bp, Glycine max
agcttcctatgctcattggagagtctgagattcttggaccttatctcaagtgggttcatgggattaattcctcatcaactaggaaacctctcagacctgcagcaccttagtgctggatacaattatgctcttcagatagacaaccttaattggatgtcaaggctatcttccttagagtaccttgatttgagtggttcagaccttcataaacaatggaactggcttcaagtacagagtgcacttccatctctttcataactacacttggagagctgtctaatcgataacttaggaccaccaaaatgaaaagccaactctacacatctccaagtgcttgatctttcaattaacagtctcaatcaccaaaaccattcatggctatttaatctcagcacaactctctgtcaacttgatttacacagtatcctttctcagggacagtgat

SEQ ID NO: 5706 - DNA, 488 bp, Glycine max
  unsure (1)..(488): unsure at all n locations
agcttgtgcatncaataccctgatgaggatgttccatatgctcttaaaactggactgatctcattgctttcaaagtttcatggccttgcaggtgaagacccacacaagcatctgaaagaattccatattgtctgctccaccatgaaaccaccacatgtccaggaggatcacatatttctgaaggtctttcctcattctttagagggagtggcaaatgactggctatattaccttgctccaaggtccatcacgagctgngatgacctcaagagagtattcttagaaaaacaatctccctgcttccaagaccacagccatcagaanagatatttcaggcattagacaactcatgtgagagagcctatatgaatactgtgagagatataaaaaattatgtgttagttgccctcaccaccagatttcatagcaacttctcctccaatatttgtatgaatgactcaccaacatggagagaagtatgatagatg

SEQ ID NO: 5707 - DNA, 442 bp, Glycine max
  unsure (1)..(442): unsure at all n locations
taaaggaagtggaagaattagtatgggcagaaatgtctcttcactgattggtaaatctgttccccaaatccctgaaaaatgtaaagatctaggtacattcagcataccttgtattatagggaacaataagtttgacaatgccatgctagatttaggagcttctgttagtgttatgcctctgtctatttttaattctctatctcttggtcccttgcagtcaactgatgtggtaattcatttagctaatagaagtgttgtatatcctgctggtttcatagaggatgtcttagttagagttcgtgaactgattttccctgttgatttttatattttgaatatggaggagggattctctaaaggctcagttcccatcattctatgcagaccttttatgaaaatngctagaactaagatagatgtatatgcacgcacactatctatg

SEQ ID NO: 5708 - DNA, 485 bp, Glycine max
  unsure (1)..(485): unsure at all n locations
agcttattgcatgagctatatcaggttgagtacatgccatagcatacattattgaacctataatgttagcatatgtgatactctccatataagtatactcttcagctctctttggggattgacttacacttagtttgaattgatcatatataggtgtcacaataggccaacttcgaatttgacattccaaacctttcaataaatttattgaggtatgtctcttgagatagatacaaaatcttcttctttctatcccttttgatttccattcccaatattctccttgttgtcccaagtccttcatttcaaattccctttntaactcanctttgaccttggtaatttcggccttaccgntacttggtattaacatgtcatcaacatatagcagtaggattacaaaggtacctttattccttttgaatagccattttcaattgactacccttgaaccaatgggctttttgataaactcccatgtattt

SEQ ID NO: 5709 - DNA, 444 bp, Glycine max
taatgtgagttgagagatcaacacggcgtgttctacaccttacaaacgtgattcaacaatcccattgtatgagagtctttctcgatctttctatagctaactgggtgtaggtaggattatattattaaaatataattctatttttgtattatgtatagaaacttacactttaaaaacaagaacgagaatatcatatttatttgaccaatgattaaatattcattcaacttatttattatttttaaattaagtatacgattgcattaaataattagttagtttgttacttcgcgaaaataaaatacaaaaattcacaattaactataagtttcccctactatgtatcattgacacaatttcaaagttccaatttcaaatggatgaatcattaatcattatcaatgatgtattatatgggaagtagactacttcaagtcgttttaa

SEQ ID NO: 5710 - DNA, 424 bp, Glycine max
  unsure (1)..(424): unsure at all n locations
agcttctgtnttcaattatgagcgtctagatatattacgggtatcaatcggacatccgagcaaaaagttattgtcatttgaattctgtgtattcattttttagcatcaagaattattaaatgactcaatcggacatccgagtaaaaagttattgtcgtttgaatttgctgacagcttttgtattcaatttcgagagtctcgaattattaaatgactcaatcggacatccgagtaaaaagttattgtcatttgaattttcttagagcttttgatttcaatttcgagcatctagaattattaaaggactcaatcggacatccgagtaaatagttatggtcattttgaattgcttagagttactgttctcaatttcgtgcgtctcgatatactataggactcaatcggactttacagtaaaaagtta

SEQ ID NO: 5711 - DNA, 488 bp, Glycine max
  unsure (1)..(488): unsure at all n locations
catgcaagctngaaggcatgtaacccaccatcttgtcatagtagaacactagtaatgtgtccactatcattgttatcatttccctctccatcngtgggggtgctacttaagctgccagatccctccacctttggacgtattctttgaaagattcatgctcccttttgcacatgttctactactccattctatccggagccatatcagaattgtactaatactgcctaatgaaggcaaccattaggtctttccaagaacggacctgagaaggttccatattattataccaggggatggctaccccagtaagactttcctggaagaaatgcatcaacaatttttcgtctttcgcgtatgcccccattttcctacagtacatgttcaggtgattcttgnggtaagtagttcccttgtacttatcgaaatccagcaccttaaactntggagaaatgaccacgtcaggcactatgcacaactctgccatgtca

SEQ ID NO: 5712 - DNA, 443 bp, Glycine max
  unsure (1)..(443): unsure at all n locations
cttctcatttatgcataacatacaagttcgtattttaattntatgtttagtaacaagactaaacttcataataatatgaaagataaattttttatttaatacttgttagtatatattgaaaagaaaactgttgaaattagtaatttttgattatttttgcaacatataagaaaggtgttatgtgtgctttctttagtgatacgatgttacgtgttttaatagactaataatgtaatgtaacattgaaacatcaaattataaatattttgtataaaaattaatggtatatttttgttggatgtatttattcagcacaaaaatttattggatgtgttttaatttttgtgaatggccctccctgtcttctcagtctagggtgcccttgcaagacatcattatccaatggccgttttaacatgtcttaatttaattatttcttataa

SEQ ID NO: 5713 - DNA, 374 bp, Glycine max
  unsure (1)..(374): unsure at all n locations
agcttgtgcattcaatatcctgttgagggtgttccatatgttcttaagactggactaatacatttgctgcccaagtttcatggtcttgcaggtgaagatcctcttaagcatcttaaggatttccatattgtttgttccaccatgaagcccccagatgtccaggaagatcatatctttctaaaggcttttcctcattctctggagggagtgtcaaaagattggctatactaccttgctcccaggtccatttttagctgggataaccttaagagggtgttcttggagaaattcttccctacatctaagaccactgccatcagaaaagacatttcaggcatctggcaacttantggagaaagcttgtatgagtaatg

SEQ ID NO: 5714 - DNA, 456 bp, Glycine max
  unsure (1)..(456): unsure at all n locations
agcttatggtgtgttgatggtgcaatattattgtgttcaacgaatcttagcttcatttaatataattagacaatgtttcatttaaataaaattttatttttattctattctactattgtgaatttatttttcattaatgttctcactcacggaaaatatattatgacaatttgatgtgaaagtgaaactagtttgtcaagtttagtcacagttaatattgtggagctttgtagaattatattaggtaaaccactagcatatatgatacatgatattgtggcatgtatattttatatattntgacaagtaaaaagtacacaattgcttcccctaatttctattcctcanattataccctccattttcatgaaattcaaacaaggtgtattatagtatagttntaccgtactatcttctgttattnttatactntgtacaacaatagttagtacgtta

SEQ ID NO: 5715 - DNA, 469 bp, Glycine max
  unsure (1)..(469): unsure at all n locations
tatctcttcccattagtaataagattatttcttttcctttttctcttgttcatactgatgtatggcgtcctgctaatgtccttaatatctcatgtgctaaatggtttttaaccttcatagatgattgtactcgagcaacttatgttttcttattaaaataaaaatctgaagtcagctttgtttttattcagtttgtgtcaatgattanaaaccaatttggagtcaatattaaaagaattangtctgacaatgccagggactactttaatcttgtgctaaaatcttnttgtcaaaaggaaggaataatccatgagtctttaagtgttaacacaccccaacaaaatgggattgcagcaaggaaaaatgggcacttattaaaccaaactagagccttgctttctaaaantatatccctaanaaantatggngggaagccctcctttactgcacctacctaatcaatatatta

SEQ ID NO: 5716 - DNA, 484 bp, Glycine max
  unsure (1)..(484): unsure at all n locations
aagccttattcgttccctcatgaatatccatcactactaaaataaaaaagaattttttaaaatggtccaaaacaatatttaacgacggttgttgaccgtcgtagtacatatattgtaaaaagtgttaattttcaacgacggataagaaaataccctcttaaaaaattgacaactttcaacgacggataagaagatattgacttagaaaactgacaactttctaagacgatgtttacttagaaagacaacttatttttaattattgatattttttttaacaatatcccatcataaaaaatatgaataattaaaaataatctttattaccataactttaattaatattatcataatattaattaaaatcatgacaataaattaattaataattaaaaatgtatgatcataagtcttttggaaggtagtcaagagtaatatgtatccaacatacattaattaaaanatgaacctccatctaatacag

SEQ ID NO: 5717 - DNA, 428 bp, Glycine max
  unsure (1)..(428): unsure at all n locations
agaatcaattcatgtttcctttgatgagtctaatgttatttatccaagataggatattttagatgatattatagaatctttagaacaaatgcacattcatggacaagattctaaaggaaaagaagaaggaagcaataaagatcctccagtagaagtcaaagcaaataatgatcttccaagagagtggaaagcttaagagatcatccccttgacaacatntttggtgacatctcaaaaggggtaacaactagacattctcttaaagatttatgcaataatatggcttttgtgtctatgggtgaacctaaaagtataaataaagccataatatattatcattggatagttgctatgcaagaaaaactaaatcagtttgagagaaacaatgtgtgggaactattataacaacctgaatactaccccatcat

SEQ ID NO: 5718 - DNA, 439 bp, Glycine max
  unsure (1)..(439): unsure at all n locations
catgcaagcttgacatgctattgaacaagcagntatatactctgcttcacaagtagagagtgcaacaacatcctgtttcttagagcaccaggagatgggagcacctccaaacaataaaacatgccccattatgctttttctgtcaagaacatctccaccacagtctgagtctgaataagccacaagttgtggctcaaccttctctttctaatgtggaaatagaacaccaaagtctagtgtgctctcaagtatctcagtatccttttagctaccatcatatgtgaatgtcttggatcactcataaacctactgataactcccacattgaaagtgatttctggtctggaatgacaaatgaatctgagactcccaacaatttgcctatacaaggtacaatccactacagggtcagcttcacatttacccaattngcaactca

SEQ ID NO: 5719 - DNA, 466 bp, Glycine max
  unsure (1)..(466): unsure at all n locations
agcttctggttagtattgattctcggcgtattcctttaacaccttcaagtaccgcttaactggatacatccaccgtaaaaagaagaacaggaccacatatccggatctccctgactagatgaacaattaagtgatccattatgtcccacaatgatggtggacaatacatctccaattgacaaaggacagtgacaacctcattctccaaatcatctaatagtcaaggggcaatgactgtgntacagatagcattaaaaagaaagcacataccagttatggcaagcctaactttgtcaggcaggataccccgcatcgctaccactcaatattattgcattaacacgtggctatcatgatatttcaagccaaccaacttcatatcattgagggctacaacgatcttgatattagaatagtatccttgtgggactctacactccatagacattgacaaaaactcatcttc

SEQ ID NO: 5720 - DNA, 353 bp, Glycine max
  unsure (1)..(353): unsure at all n locations
tgcacacaagatactccttacctaaatgcagttttaacatctaactgccccaagtgaagattctctgcagctaccatactcagaataactctgatggtagtaatctttaccactggagagaagatctctgtgaaatcaattccttgattctgttgaaaccctttcactacaagtctcaccttgtatgactttctacgcgtcagatgcttactttagcctatagacaccccctattttgtatcgctatcttttcttataccaatataattaaacaccacgtcttattcttcgtaagggatgtcatcacatctatcattgcttgctcccactcaatatacangttcccctgcatc

SEQ ID NO: 5721 - DNA, 469 bp, Glycine max
  unsure (1)..(469): unsure at all n locations
gtcacctgcggcatgcaagcttcatgatgatgaatcaagatggattcatgttgttttgatgggttcaaagatgatgacaaanatcccaagagaatgatttcaagattgagtcaagaataattcccaagagaatgatttcaagattgagtcaagaacaattcaagaatcaagagaaatttgatttcaataatcaagaatcaaggataatcaagatcaagattcaagaatcaagagaagactcaatcaatataagtactaaaaagtttttcaaaacattgagtagcacatgaagttttcacaaaatcttttaccaaagagtttttactctctggtaatcgattacagtaaactggtaatcgattaccaatggcaaagtttgttttcaaaagctntcaactgaatttacaatgttccaattaatttcaaaatggtgtaataaattacaagatattggtaatcgattaccagt

SEQ ID NO: 5722 - DNA, 484 bp, Glycine max
  unsure (1)..(484): unsure at all n locations
agctngctaacccatggaagctcctaatatctcccacactntntggggtgggccattcttggatggccttgattttctcagggtccacttggaccccatttctaccaactacaaaacctaagaaaactatattatctacacaaaaggtacacttctctatttttgcatagagggtgtttttcctaaggactgaaagaacttgtctgagatgtcctaagtgatcatctaggctcctactatacactaaaatatcatcaaaataaacaactacaaatctacctatgaaatcccttaagacatgatgcataagcctcataaaggtgcttggtgcattaatgagcccaaaaggcatcactagccattcatacaaaccaaacttggtcttgaaagcagtattccactcatcaccctttttcatcctgatttggtgataaccacttctaagatcatattttgaaaagatattggcaccatgcaactcatc

SEQ ID NO: 5723 - DNA, 487 bp, Glycine max
  unsure (1)..(487): unsure at all n locations
tgcaagctgtttggaactttggctcagaacttagctatgcaacaaattcggttcttccacagttgaaaaaatttacccgagatatagtatctagtgaaggagttccaagcagatctgtcatcagatccaattgatgaactacatttttcccaggaaaaagtggctttcctgttagtacttcagcaaagatgcaacctatactccatatatcaattgctggtgtatactgcatcaagatttaaaaaaagttagacctacagaaagtgaatatgaaaactggaaccattttaaagtgtcactttacaaccaaataaaattaaaaagttcagtatgaaactatgaactaattttagcagaagccaatacacacgcatgaatcgacatttatcacaacactacaacattntcccttgatgctccacaagaaatacagccccacatttacaacacttaatgagtgaattcaatcttaactaccctatagact

SEQ ID NO: 5724 - DNA, 431 bp, Glycine max
  unsure (1)..(431): unsure at all n locations
agcttcaagattctttgaccctaccagtcatcttttatattaataaaattatttgctaatagttatatatttatctaacactatacaatattgattatatcattgaaataccatacgtaaaatcataatatctatgttaatggatcaatttttattgcatagaaattatattaatgaaacacgtttaactatcaatagttttttaacatgtgactgttaagttnaaatagatanaattctatngcaagggtgtccatgttgaaagaaggtctcatcatataaggtaaactaggtttaaaaattatattagatactaatacacgatgatatatatatatataatagaattatggcngatgacttacttatatttttcnntgattacccaatacaccaataaacactaattaataaacaatatgaaatatata

SEQ ID NO: 5725 - DNA, 446 bp, Glycine max
  unsure (1)..(446): unsure at all n locations
agcttgagcttagctacacatacctctctaatagctaagctcacctccttgagatgagaagctagagcttagctacacaccccctataatagctaagctcacccncatgacaaanaaacatgaaaatacaaaaaaaaagtccttactacaaagactactcaaaatgccctgaaatacaaggctaaaaccctatactactagaatggccaaaatacaaggcccggatgaaggaaatacttattctaatatttacaaagataagcgggctcatacttagcccatgggctcgaaatctaccctaaggctcatgagaaccctagggccttcccttggatctctagccctagcgctgttcgcctatcctccaccctcaactcttattcagagacccatgaatngattgcctagcgctgtttatgtgtcctccaccatcgagtctggaaccc

SEQ ID NO: 5726 - DNA, 431 bp, Glycine max
  unsure (1)..(431): unsure at all n locations
agcttgttcagaatggttnggaagtgtccaaacatggttnggatatcttctccctctttcatactaaagagttcatactaacttgttagaaggctcaacttgttacattttacctaagaggacccttcataggtaatggctaaggtgtaccacatctgtttagcacttttgaagttgtgaactttggaatattcttcttgagatagagcacacaacagagcatttcttgcacgagagttgaaaagaaatatggacatatgttgattcgtccactgtccctaggtatctcgntcttatgagcgtctaaaggaatttgattacctttctctacaacgtcccacatattgatgtgagtggattcaaagaaggcaatcattctttccttccagttgtcgtagttggctcccttgaacataagagacttgttcaca

SEQ ID NO: 5727 - DNA, 443 bp, Glycine max
  unsure (1)..(443): unsure at all n locations
ggcttctacataaagagctttgaaatctgaagtttagttttcaaatgatcaaagttgaaaaaaatgcacacacatgacctctatttatagcctaagtgtcacacaaaattggagggaaacttgaatttctattcaaatttcacttgaatttgaaattgaatttgtggagccagccaaaattcactaattatgattagtgaattttagctatggttcagcccactaatccaagatcaagtccaagattctccactaagtgtgcttaggtatcatgaagcatgcaaagcatgaaggacatgcacaaagtgcgactatatgatgtggcatggaggtgtagcaagtaaatgttcacctccctctctaaaatttaantggattgggcttctcaattcaaattaaattatttctcaacacacacatcaaatatttcacttatacatgtg

SEQ ID NO: 5728 - DNA, 430 bp, Glycine max
  unsure (1)..(430): unsure at all n locations
tcgagaagaatggcctcagcaaattccttatttccagaaggaaattctatcaatagaccaccaatctctaatggagagggttaccactactggaaaacccgaatgcaaatctttattgaggcaatagacttaagtatttgggaagccatagaaatagggccatatatacccaccacagtagaaagaattacaaaagatggtagcacatcaagtgaaagcataacaatagaaaaacctagagatagatggtctgaagaggatagaaaacgagttcaatacaatctaaaagccaataacataataacatctgccctgggaatggatgaatatatcanggtttcaaattgtaagagtgctaaagaaatgtgggacactctacagtttacacatgaaggaactacagatgttcatagatctaggataaacacac

SEQ ID NO: 5729 - DNA, 442 bp, Glycine max
  unsure (1)..(442): unsure at all n locations
catgcaagcttccatcaataatgtttcactcagaagtccgattcagtcgcataatatatcgagacgctcaaaattcaacaacggaagctctcgagaattcaagtggtcataacttttcacatagatgtccgattcaaggacataatatatcaatacactcgaaattgaataatggaagctctcgagaattcaagtggtcatcactnttatctcagaagtccgattaaggcgcataacatatcgagattctcgaaattgaacaatggaagttctcaagatattcaaatggtcataacttttcagttcgatgtccgattaaggcgcataatatatctagacgctctatattgaacaacggaagctctctagatattcaaatggtcataacttttcactcagaagttcgattaaggcgcataatatatcgagacactaaaaattg

SEQ ID NO: 5730 - DNA, 464 bp, Glycine max
  unsure (1)..(464): unsure at all n locations
agcttcttggatgtttaatggatcctcctctattgtataggccatataatcgggcccataatctgtagcaattcttgctctcttacctcttcgaggctctatatctgattctggttgtgcaagattttcattactaatagcaggaagatgactagatgaagtacccgcactattccttaatttaaaagataatcagaaaccagattctttctcatctctggagtatgcatcacatctttgagaatcaaagtctttccagaggtaaacttcagttcaacatctccagttccancacccgtnntggtgtgagaatctccaagcaacactttcttattttcaacatttgtgtatgttgtaatcatagcacgatcatagtagacatggcgagaggcgccagtgtctacccaccatacatctgatcctgcaatgatattaatcttagttatcacaacaatgggtgactc

SEQ ID NO: 5731 - DNA, 365 bp, Glycine max
  unsure (1)..(365): unsure at all n locations
atactaggctngagctcggcttgagttgaatacgtaaggcttaagcttgactcattacctgtcataagctttttttataggcttggctcgacttacataaaagtctgatttggcccatgagcttatttaaaagcttgcttaaagacgtccttgattaattaatcattttaaaatctagtgaaatactaactaaaaaaaacttataaaatttcgtataagtaatgtacaaatccaataataattgataaacaaaatcatattgaattcaagtctgtcaagcacacagtctatcaaaagacaatttaaagagcatgatcttaaaaaatgtatggattatgtgctcagccccaaagcttacaaatcta

SEQ ID NO: 5732 - DNA, 429 bp, Glycine max
  unsure (1)..(429): unsure at all n locations
agcttcaagaatcaagatcaagattcaagaatcaagacaagacttaatcaagatgagtatgaaaaggttntttcaaaaattgagtagcacatggatttttctcanaatatgtttaccaaagagtttttactctctggtaatcgattaccagattgttgtaatcgattaccagtagcaaaatgaatttgaaaaagttttcaaatgaatttacaacgttccaattgatttcaaaaaatatgtaatcgattacaatgttttggtaatcgattaccagtgcctttgaacgttgaaattcaaattcaaatgtgaagagtcacatcctttcacataaaagctttgtgtaatcgattacacntgattggtaatcgattaccagtgattggttatgaataaaccanaatatgtaactcttcaaatnggttttgactt

SEQ ID NO: 5733 - DNA, 463 bp, Glycine max
  unsure (1)..(463): unsure at all n locations
agcttctggtgggacatcttgactngctntccaatctgacattcaccacagattctgccttcttctattntcagattgnggatgcctctaacagcacctttgtcaatgattntcttcatgcctctcaagtgcagatgtccaaatctttgatgccatattctgacttcatcttctttggaggatagacatgtggaggagtagctggtttcttgaggtgtccataggtaacaattggcctttgatctgctgcccttcattagaacttcactcttctcatttgtcaccaagcattctgactntgtgaagtttacattgaatccttcatcacacaactgactgatgctgatcaagtntgcagtcagtcccttcactatcagaactttgtccagactatgaagtccatcatggactagctttcctattccaatganttttcctttagagccatctccaaatgtcacat

SEQ ID NO: 5734 - DNA, 281 bp, Glycine max
  unsure (1)..(281): unsure at all n locations
tatgggttatgcaacagaactnagcttattgttacaagacttggttcatgtgtcgttgaagcagagattattactgggcccaacataggtcatagaacatacataccaagaatgaatctttctccttctgattcaccatggccattcaagcttattagaagacaatttccattcatggtcttatttgccatgacaattaacaaatctcaaggacagtcgatggcacaagttggattgttttgcccaccccagtattgtactactgcgagtatatgttgcgc

SEQ ID NO: 5735 - DNA, 468 bp, Glycine max
agcttaccattataggaagccatggataagatcttgaaggtaggagaagatgagtggagggagaatgagcacaaaattttgtgtctcatatgaagtctgaactttgaagtgtaattctcaaatgatcaaagttgaaaaaatgcacacacaaggtttctatttatagcctaagtgtcacacaaaattggaggaaaatttgaatttctattcaaatttcactttgaattgaatttgaattggtggagcagaatttggagccaaaatttcactaattataattagtaaattttagctatggttcagcccactaatccaagatcaagtccatctccactaagtgtccttaggtgtcatgagacacgtaaaacatgaaggacatacaagtgtgactatatgaagtgacaatatggtgtagcaagcaaatgctcacctcccccttaggatgatccaaaatttaattggattggg

SEQ ID NO: 5736 - DNA, 459 bp, Glycine max
  unsure (1)..(459): unsure at all n locations
agctngatgaatcatgtatcgtagttaggaacaaggctagattgattgctaaaggatacaaccaagaggaaggcattgactatgatgagacctatgcctttggtgcaaggttggaagctattangctattgcttgcttttggttgtattatgaatttcaggttatatcaaatggatgtgaaaagtgcttttctcaatggatacattgaagaagagatatatatagaccagcctccaagttttgtagactttgaacatcctaatcatgtttacaagttgaaaaagacactgtgtggtttaaaagaagcacctaaattttggtatgaaagataaagcaatttcttaattggacagtcttttgtaagaggtcaagttgacaaaacattgtttatcaagagatcatacaacgagttcttgctttgtgcaaattatgttaatgacaattnttggtgtctctgat

SEQ ID NO: 5737 - DNA, 457 bp, Glycine max
  unsure (1)..(457): unsure at all n locations
agctngaaggtttgtacatgaccaaatctttatttattcgtctgtacctaaagcagtctttgtattcgtttaaaatgcatgaagatagatcagtaggagaacaattggatttgtttaataaaatgattctagatcttgaaaatattgatgtcactattgatgatgaggatcaagctctgttattgttgtgctctttgcctaagagttactctcatttcaaagagactttattgtttggaagagatactgtttctcttgatgaagtgtaggctgctctgaattcaaaggaattgaatgaaagaaaggaaaagaagtcctctgcaagtggtgaagggctgacagccagaggcaagaccttcaagaaagatagtaaatttgataagaagaagcaaaagccagagcatcagaagaatggtgaaggaaacatcttcaaaatcagatgttatcactataaaaa

SEQ ID NO: 5738 - DNA, 373 bp, Glycine max
  unsure (1)..(373): unsure at all n locations
gcttgagccaattcaaacgacaataactttttactcggatgtctgattgagtcccgtcatatatcgagacgctcgaaattgaatgttgaagctctgagccaattcaggcgacaatatctttttactcggatgtctgattgagtcctgtaatatatcgagacgctcgaaattgaatgttgaacctctgagcaaattcaaacgacaataacttttttctcggatgtctgattgagtcctgtcatatatcgagacgctcgaaattgaatgttgaagctctgagccaattcaaacgacaataactttctactcggatgtctgattgagtcctgtcatatatcgagacgctcnaaattgaatggtgaagctctgagcc

SEQ ID NO: 5739 - DNA, 316 bp, Glycine max
cgaaggcaaactggatgcattggttaacttggtaacccaactggccttgaacaagacatctgtacctgttgcaagggtctgtggtttgtgctcctctgctgaccaccatacagacctttgcccttccatgcagcaacctggagcaattgagcagcccaaagcttatgctgctaatatttacaatagacctcctcaacctcagcagcaaaatcaaccacagccaaacaattatgacctctccagcaacatatacaaccctggatggaggaatcaccctaatctcagatggtctagccctcagcaaacacaacagcag

SEQ ID NO: 5740 - DNA, 341 bp, Glycine max
  unsure (1)..(341): unsure at all n locations
nttgcaagagttatgactactataggaggcatgtttttctcttttcattnctttcattaggttgtcttctttcgtcctctcttattttctttctttcatcttgacttatttcttccactcttttttttcccttttcttttctttcttgtttttctttccataacttgagggaactcaactcatctaagattctagataaagggtctttatgactagtacccttgccattaacactagatgaatgatgactcgtgttggttcctaagttgtggttctttcttgttggaggtttgaaaacaaaaggtaaaagaaactatggttgaaactagccaaataaacac

SEQ ID NO: 5741 - DNA, 322 bp, Glycine max
agcttccatcagctgtcttacttgtttagcctcaccctctaaatttatccgatgcatacatgtggatgggctaataccaccaatgtccaccagggtccaacctatagccttcttatgcttcttgagaactgataacaacttctcctcttgctcatcaacaagggaggcagatataattactggaaaacttttgttatcatccaagtaagcatattttaaatttgatggcaaaggcttcaattctggtgtgagcggttggatagtggtagaaagagatggtttctcagcctgtacctcataaagaaagtaagaggtatgtgta

SEQ ID NO: 5742 - DNA, 320 bp, Glycine max
agctttaaggtcaagagggctgtatgatgatacaacttgcctcgttgtagatattattccttcagatcatcccgtgttgccaacaattccaagaaagaaacgtaacgtgctaacttcccttctctttggaaagaaatctcaaaactctacaaacaaaggcaccaataagctttcttctgttggtgttgtggaggaattatttgaagagggttctgcaatgcttacagagaggtaactgggaccataactgctaaatttatatttgcatgatgtcatttgaagtttaatttgtcaccatcatggtggaaagagagaaaaaa

SEQ ID NO: 5743 - DNA, 328 bp, Glycine max
  unsure (1)..(328): unsure at all n locations
agcttcgaagtttaaatggggctattaggtcctaataatcngngacgggtagctgttcataagagttaggggtgatgaagaaagtctcgtacacaacagcagcaatagccgagccaattaatgggccggcccagtagacccagtggttagcccatgtcccgctaacaacagcaggtccaaaagaaactgctgggttcatggatgcaccactaaaggtaccacctgccaagatgttagcacccacaatgaaaccaattgcaattggagcaattatcccaagtttacccttctttgggtccactgcagtggcatacactgtgtaaaccaa

SEQ ID NO: 5744 - DNA, 325 bp, Glycine max
agcttgcccgatggattcctattcattacccattagaaatagactagtagatagggcagcaagaccctgcctacttagcttcttagatgcatactcagggtacaaccaaatacggatgcatccacaagatgaggagaaaacaaacttcataacctagtcgtctaactattgctatcagattatgccattcggcctaaaaaaggctagctccacttaccagcacctaatggacatgatattcaaagaacaaattggaaagaaaatggaggtatatgttgacaacatggtggtaaagtctaatgatgcagaatcacacacctatgat

SEQ ID NO: 5745 - DNA, 325 bp, Glycine max
agcttgaaaggatgcttcaatgttggaatataaagagggagagaaagagagaggggggagcacgaaattgaaggaataaaagagggagagaagtggaactttgatgaatgagagtgatgcaagctccattggagcttgtaggcctaggatcttcttcatcaatggattcctttgcttcttggaagataaatggcagcggaatggagaaggaagagagagaggagacgccacttcaaggagaagataagtctagaagaagctcaccaccataggaggccatggataaaaacttggaggaagaaggagatgaatgaagggaggggga

SEQ ID NO: 5746 - DNA, 329 bp, Glycine max
  unsure (1)..(329): unsure at all n locations
tgcttaacgtttatcctttcatagtagncattttttgcattccaatttatgatgagggaatcacgaacactctctgccgttgcaaagaaagccttattgagctcaaacttctctggagaaaaagggctggtgaactcggcatggaatttgatgcttgaagcaatagatgcagaatctggtacaaattcattgaaagtgtctgcaagtgttattaaagaaagaattattaattaggtccttatttactggaaaaataaaaacaatgttgagactgtatggctaataaatctcatattattagttcaataaaaacataaagatgggacaaa

SEQ ID NO: 5747 - DNA, 318 bp, Glycine max
agctttagatacatattaatattatagactactatttgtaatcaacagaaaagatcatttgtaaaacgcttttagttaattgcatttctcctaaagttttctaattgagccattttattcttttagatttcagttatattaattgggttcttcaaaaaaaaaaaagtctagatcatcatattctatatttttcttaaatgagataatttatggtgtccacttgaggagtgtcctctatccatctaatttgatactttcttccgcttatcgcttactcttaactgtgcatttaatttatctgctaaatataatataaat

SEQ ID NO: 5748 - DNA, 304 bp, Glycine max
ttcagcaaattttaacgacaataaatttttactttgatgtctgattaaggcccgtaatacatcgagacgctcgaaattgaatgttgaagctctcagcaaattcaaacgacaataactttttactctgatgtctgattgggtcccgtaatatatcgagacgctcgaaattgaatgttgaagctctcagtaaattcaaacgacaataactttttactcggatgtctgattaagtcccgtaatacatcgagacgctcgaaattgaatgttgaagctctcagcatattcaaacgacaataacttttta

SEQ ID NO: 5749 - DNA, 316 bp, Glycine max
agcttcagaattcaatttctagtgtctcaatagattacgggactcaatcagacatccgagcaaaacgttattgtcgtttggattagttcagagcttcagaattcaatttcgatcgtctcgatatattacgggtctcaatcagacatctgaggaaaaaagttattgtcgtttgaatttgctgagaccttcaacattcaattttgagcgtctcgatgtattacgggactttatcagacatccgagttaaaagttattgttatttgaatttactgagagcttcaacattcaatttcgagcgtctcgatattttacggga

SEQ ID NO: 5750 - DNA, 324 bp, Glycine max
tatgaaatccttaattgttctccatcttagcaacttttatctttctggaaccattccaaagaaaattggatcactgcaaaagcttgaagatttggatcttggagataaccagttgagtggaacaattccaatagaagtcgtggaattacccaagttacggaatttgaatttgagcaataataaaataaatggaagtgttccctttgagtttcgccaacctcttgaatctcttgatctaagtgggaatttgttgagtggaacaataccaacacagcttggagaggtgatgggactgaaattgttgaatctgtctcgcaataatct

SEQ ID NO: 5751 - DNA, 292 bp, Glycine max
tgagccactgcttcacattattgaagctctcttcatctgtcacatcataaacaatctgccagaggaaccagttagtaaagcatgcaaggatccatctacacgggaaatcaatatccaaaagcccatgccaagaaaatcatcacccacaatgatcccatgggccccacgatagtagctactggtgattgtcctaaatcgttcttgcccggctgtgtcccactacatataaaaacagatcacaaatcaaggtaagaaaactatatgtcaacacaatcatgacctttggtgatcc

SEQ ID NO: 5752 - DNA, 334 bp, Glycine max
gcatgcaagcttggaaagcatggaaaatgtctctggtattgagccatgcaaattgttcccctcgagagtgatgctgtgaaggcgtctgaggttggaaaattcaggtggaataatgccaaataagtgactgcgaacaatctcaaggtagtgcagtccagtgagattggaaagaacgggtgaaagcagccccactagacctttatcgtacaggattagtcgtgtgacacggttatggaatttgtcacatacaacacccgtgaagttgcacacatgaacagcttcatcccagttagcaagtgaggaatgcgggtctgatatgattgtttttctgaat

SEQ ID NO: 5753 - DNA, 343 bp, Glycine max
aatacttaagcttttgcaactagccttgccttgtatctttcaatttctcccttggttttcttctttgttttgtacacccacttaacaccaatagccttgtgcccttttggaagggagacgaattcccttgtgtcattcttctcgatggatctaatttcttcatgcatcgcatctcatcatttttatcttgcatagcttcttcaaagttcactggttcataatctgcaaagagacaaaatagtattatattatccaatctctcatttcaatcacaaagatcttggagggttcttgtgcgtgacacaaccctttcactctcaatagatggcaaagtgtcttcatg

SEQ ID NO: 5754 - DNA, 319 bp, Glycine max
ttgaagaaattcaaatggtcataacttttcactttgatctccaattcagacgcatcacatattgagacgcttgaaattgaacagcggaagctcttgagaaatgtaaatggtcataacttttaactcggatgtccgattcaggcgactcacatatagagacgcacgaaatttcaatggtcataacttttcacactaaggtccgattcaagcttataatatatcgagatactcgaaattaaacatcggaagctctcaagaaattcaattggtcataatttttcaaacggatgtccgattcgagcgcataatatgtcgagac

SEQ ID NO: 5755 - DNA, 322 bp, Glycine max
  unsure (1)..(322): unsure at all n locations
agcttgtagggttaaagncccactattattacgtgttcatgcaacaattgtcagccatggctatacgagacatcttgctaaacaaagtcaggttagccataactcgcctgtgctttttcttccatgctatattgtgccatttggagatgtattttccccctgctttctttgacatcatgattcacttgatcgtgcatctagtcagagaaatcaaatgttgtggtcctgtttatctacggtggatgtacccggttgagcaagacatgaagatcttaatagggtatacaaagaatatttatcgtccagaagcatctattgttga

SEQ ID NO: 5756 - DNA, 329 bp, Glycine max
  unsure (1)..(329): unsure at all n locations
agcttgagacatcatggntaatttgtcttctcctatgtngcacaccaagaagcgacagaagtaactatgtgtctctgcacttcctttccaccactccattctgatgatgggtatgtggacagatcaacctatgttgcacaccaagttctgcaagataattggtaaatggcctatactctcccccagtcagattgtacagctttaacaggtaaattgaattgagttttaactagagtatgaaactgtttaaacagatcaagagtttcagatttacttttcaacaaataaagccaagtaaatcgagtgtgagcatcaacagaggttacata

SEQ ID NO: 5757 - DNA, 327 bp, Glycine max
  unsure (1)..(327): unsure at all n locations
agcttgtcgcatctttaactaatgcggttttataaaatcgnccttgtggtagtgtcataaaatctcacttttgcagtagttccaattgcaatctatgtttcaattgaagatccttggcccttcgaaatattttcttagcttagaaatagctaaatccagcaaaggtatctcactctcctagagaaaatacactctatctcttttagaagatacaagtttcttggcatgcaaaccttccaatcttccaatggatcccaacttgaagctcaatcttcatgatggagacatactccttgatccctcagtgtataaaaggttaattggtaa

SEQ ID NO: 5758 - DNA, 263 bp, Glycine max
taacaccttcccccgcccaacagattgtgggtgacaagtggttaaaaataacaatttattgcccaacttgctccaaaaagtcctccaaaaatggcttaggaacttttagtccctatcactaacaaagctccttggcgtaccatggaatctcacaatctccttgaaaaacaaaccagccacatgggaaacatcatcaatttttttacatggaataaaatgagccattttagaaaacctttcaacaaccacaaaattggaaactc

SEQ ID NO: 5759 - DNA, 345 bp, Glycine max
ctttggctttgaggacttgctccaatggctcatcttttcttctattgaacctttcttcataggcttgaagagaacccatcaattggtctacggtcattgagtctaaatccttagactcttcaatagcacaaaccacataatcaaatttatcgattaaggagcgaaagatcttttccaccacacgaacatcttccatattttctccataacgcttcatttggttcacaatagccaacaccttgttgccaaaatctgagatagattcagattccttcatatgcaatgattcaaactctctacgtatagtttgtaggcgcaccttttttaccttatcaacaccttcaa

SEQ ID NO: 5760 - DNA, 315 bp, Glycine max
agcttgagacatcatggttaattcttctgctcctatgttgcacaccgggaagcaacagaagtaactatgtgtctctgcacttcctttccaccactccattctgatgatgggtatgtggacagatcaacctatgttgcacaccaagttctgcaagataattggtaaatggcctatactctcccccagtcagattgtacagctttaacaggtaaattgaattgagttttaactagagtatgaaactgtttaaacagatcaagagtttcagatttacttttcaacaaataaagccaagtaaatcgagtgtgagcatca

SEQ ID NO: 5761 - DNA, 314 bp, Glycine max
  unsure (1)..(314): unsure at all n locations
agcttgngcctctcttgtnttttattgaangnagcatatagatccgaagacccttaggtgctttgctgatggcttcttcccgttccaagcttcaattggagtcttgtcttttacagacttagttggacatctgttgagtatgtaaacagcagtgtagactgcttcagcccagaatgtgttaggtaatcccttctccttgagcattgatctagccatttccataactgtgcgattctttctctcgaacactccattttgttgaggagaatatgcgactgtaagttgtcgctcaatgccttcatcctcacaaaatt

SEQ ID NO: 5762 - DNA, 325 bp, Glycine max
  unsure (1)..(325): unsure at all n locations
agcttgtgcatccaataccctgttgaggtttgtcttatgtnccnaaaactggattgatgcatttgcttccaaagtttcatggccttgcaggtgaagacccgcacaaacatttgaaagaatttcacattgtctgctccaccatgaaacccccagatgtccaagaggatcacatatttctgaaggcttttcctcattcattagagggagtggcaaaggactggttgtattaccttgctccaaggtccatcacgagctgggatgaccttaagagagtattcttagaaaaaattttccctgcttccaggaccccagccatcaggaagga

SEQ ID NO: 5763 - DNA, 336 bp, Glycine max
  unsure (1)..(336): unsure at all n locations
agccgacctgcagcatgcaagcttggttctaatttgattttcattatatgacggnacccaaggggacgtgcgagtaacaattattgccatttgaatttgttacgaaattccgttttcaacttggagcaatttaatatattaggggactcaattggacatccgagtaaaaagttattgtcgtttgaatttggtacgagcttctattttcaatttggaatgtatcgatatattacgggactcaatcggacatccgtgtataaagttattgtcatttgaaaatgctcagagcttctgatctcaattttgagcgtgtcgatatattatgggactcaatcg

SEQ ID NO: 5764 - DNA, 331 bp, Glycine max
cccagcacgggttctatgcccgattctgctgttatctgagtccgaagcaagaagccgatgcaactgcatgatggagttaaccgccacggcttcgttcggattcacctgcagcatccacggcttcacgtcttcaaggcgccacgccgccacgccacgaaatgcaaacctaacattcacggaccgcgccagctcagcgagcctgagcccaatttcgcggagcgtgtcgcggttgtcggacgagggaagcccaattcccgtgagcctcaacagcggaggcccaccgggccgaagcgccagggcctgaatcagcgcgggccactggagcccctgc

SEQ ID NO: 5765 - DNA, 318 bp, Glycine max
acctcagtgtgaaaagttatgactatttgtatttttcgggagcgtccgatgtgcattttggagcgtctgtatatgtgatgcgcctgaataggacatccgagtgaaaagttatgaccattggaatttctcaagagctggcgatgttaaatttagagcgtctcgatataatataagcctgaatcggacatcagtgtgaaaacttatgaccattttaacttctggagagcttccggagagcattttgtagcgtctatatatgtgatgcgcatgaattggacatccgagttaagagttatgaccattggaatttatcaagag

SEQ ID NO: 5766 - DNA, 317 bp, Glycine max
agcttggtttcctccttcttcactacatcaagaatcactgggttgagtcttctttgtggctgtcttactggtttagccccatcctctaaatttatttgatgcatacatgtggatgggctaataccatgaatgtccgccagggtccagcctatagccttcttatgcttcttgagaactgataacagcctctcctcttgctcatcagcaagggaggcagatataattactggaaaactttttctatcatccaagtaagcatattttaaaattgatggtagaggcatcaattctggtgtggccggctggatagtggtaaa

SEQ ID NO: 5767 - DNA, 282 bp, Glycine max
gaaatcaatcttttcacatatctgcaaactcatcaagctccaaaggattggacatctcgtgcatttacctccttgtctttgctttgaccttctatgcaaactttccggccttcttctttttctccaaagctcgaatctataagaaccagctacctatgatgatacatagttagaaagtggaaagcttgggaaattataaatatatatcgaaaatatattggtaagtacctgattcggtgacacatagagtggattctcatataaagttgggcctccaaaact

SEQ ID NO: 5768 - DNA, 320 bp, Glycine max
agcttgcatttcctccatgaatttcttggtctcgaaacgtgcgatggtaccctagttgttcaccaaatttgctttggtcattccaatgtcacggtcaataatggaaagagtcttgttggttttgtcgggcacaacacagatgaagaactatggttaagcatcaagcttgctcttgtcagaatgatcctccataatttttactgcaacaacggtataatctccctgtggcggtggcttcggaggtggtggttgatatggcggcgggcgtctacgccggtgaggaacagaacaaagctaagtcgtattagtggagagaatcc

SEQ ID NO: 5769 - DNA, 324 bp, Glycine max
gcttggagaaagaaatatggcttttttatagccgatgtctatttaagatatacataggtgtgcctccttgcatataaacatgaatttttcaagggctttgaaatattctgtaaaagggttcaaaaggaaaagggttttgcatttcttccatcaaaagtgatcatggaattgagtttgagaatgctgagttcaaatcattttgtgaaaggaatggtattttttgcaacttctcttcatcaagaacacctcaactgaatggagtaattgaaagggaaaataaaactctacaacaaatgggtaggaccatgctttgggaaaacttac

SEQ ID NO: 5770 - DNA, 304 bp, Glycine max
agctttctactgcattttagaattatggatttcggcaatcttgctctgactattccctcttcactttacggactacaactgtccatcttgtggtgctagtttacatggatgatcttattgtttcaggtaatgattctgaagctattcttcggtttaagctttatcttcatatatgctttcatatgaaggatttgggaagattgaaatattttcttggagtggaagttgctcgctcacccaaaggaatttacttgtgtcaaagaaaatacgccacggatattattcttgaaactgggttacttgg

SEQ ID NO: 5771 - DNA, 377 bp, Glycine max
  unsure (1)..(377): unsure at all n locations
tagggcctccaaaatcatctaaatattattagatgatgagagatcaactcatatcaagagtatgttatcatcaatcattttcttaaaatctaataattataataagtcaataattatatccgcttaattccaagaaaataaattgtgaggatgaatgatagctcttggttggtgtgtaagttgatccattctcttattagatattatatcttctaattaatcaacgatataattatgaagatcataaattaatgaagttaagtaaagctatattagacntttaaaaaataaacatttttttatccggaggatccagctatattataaatntaattagaatattctggccatattattcaatcaatcttgaatatata

SEQ ID NO: 5772 - DNA, 269 bp, Glycine max
cgttcctaatatctctactattgcaacacctctcaatgagctggcgaacaagattgtggcgtttacctgtggtgataaacaagagcatacctctgctttgctcatagatgaggttactaaggcacctgctctagctctctctgactttactaacacttgcgagctaaaatgtgatgcctatggagtgggagcatgagcagtgttgttacaacgtgggcaccctattgcttagtttaatgagaaactatgtagtgccttccttagctacc

SEQ ID NO: 5773 - DNA, 413 bp, Glycine max
  unsure (1)..(413): unsure at all n locations
gcttacctagaagtatggcatggattacttcagcgctgtagcgcttggtactcgaactttggctcaacgcattntatctacccttattactctgaaaaagcaggggcaccttgcgtccttgaaccgataaccatattttggctaacctagcctcctccatccctcgagtccaataaagggtagtacaagaatattcaccttttgtccatcgactacgcccttcggccggatcttatgccttgactcaccctccgtggatgaaccttacgaaggaacccttgggttttcgaggcattggattcttaccaacgttagcgttagtcaagccaacattcccgcttctgcttcgaccagcactactcgcatgggtccctccctgtaagatggtacactcccctaccgattcattttac

SEQ ID NO: 5774 - DNA, 390 bp, Glycine max
  unsure (1)..(390): unsure at all n locations
taattggaaactgaattcattttttactattgtaattgaaggtgaatatatcttaactcaaaaactcttttctacaattgaaaattttaaatctttaggatttctcaattagggcaatcattaagttcaagaatatctaaattatcataattgttgatatttattcctatagaatttccaactttgttacattatatcttaaattcaatccttatttcaatttcacagttgtcgataggaatatacgatcaacgcactataagtgaccaaatgccaatttacaaaggcactaaattaaaaaaagacaaacattcaatttaaaagacatgaatttgaattacagataagaattcaaattacatcaagttaacagnaaattgagtacacatt

SEQ ID NO: 5775 - DNA, 413 bp, Glycine max
ctgtattttcatatccaggagggtgatcaacacacactacttcttgaataaaaccattcaaaaatgcacttttaacatccatttgattttgaaatcaattatggatgcaaatgctaataagattctaatggctagtaatccaaccactggagcataagtttcttcataatctattccttcttcttggttatatcctttagctactaatatacttttatttctaataactattaactactccatgttcatccaatttgtctctaaatacccatttagttccaataattggatgatcattaagtctatcaactaattcccaaacttgatttctctcacattgatttaaatgcctcttgcatagcaactaatcaaatggtcatcaattatggtttcatttatgttatttgggtcaa

SEQ ID NO: 5776 - DNA, 458 bp, Glycine max
  unsure (1)..(458): unsure at all n locations
ggtaaactgtttcatctgtttgataatgatggttataaagggcatctactataagaaaacataaagattatactagttcagtagtataaagggtgatccttacctttatttaatgcatagtttctatggtcatgctagttcaatagaattagtgacttttgactctgttgaagtgttggttctttctggagcatcgtcagggataataaagctttgggatttggaagaagcaaagagtaagttaattagtatattttgaagtcatggactgtataatgtataatgatgttattcatanttgagaaagactgcaggtgaggaagtttgatgtctaatgtttttgggaatgatgattgatgtaggtggtcattgagttctttattggattgttgctntatttttggaccatgctgcttatcatcacaggtacaagtggttctttgtaaacttttgatgtt

SEQ ID NO: 5777 - DNA, 435 bp, Glycine max
  unsure (1)..(435): unsure at all n locations
aagctggcgatgtcgaaaatctcagctgttagctgtctagagaagaaattgtggctcacgttgagactagtgaggtttgtgaagatgatgaattgcttccctgaaaccacacctcccaatttcttcatggaaaggtctatggaagttacaattgttgagtcattgttacacttgatgccggaccaagaacatgcataggatttcccagttaattgtcctccagagggcaccacccaattgtgcaagctgttgtcatcatctacaagctccgattntatgctgagaagtgcctctgagtaagggtcaattgctagaactgctgatgataccatgaagaaggtaacaagaataagatctttgatgtagaagcatttgaaaatctccattggaacttggagagcatcacaaggtagagagggacaattgtaagtaccc

SEQ ID NO: 5778 - DNA, 453 bp, Glycine max
cttagtaaagctaaacacgtacaatctccacctctggtgaaatttgtctaaaacatacttagacactttctgagcaggtacgagcagttatgcaagtgggatcagcaactttcattatcagagtaatcaagcacagcggaaattctgcatgttgcaagtcgtttccaggatgtcaagacatctcacatgacatcagctttctgcttctgctgcccctgtctacatgcttactgcagcatcttctaacagctactagtcttttccaggatgtcaagacatctcatgtgacatcaactgctccccctgtctacatgctcttactgttgcatcttttatcagctactagtagcttacaccagtcatcatcagcagcagcagtctgcccctcaaaatcatatacatacaactccccctcaaaatcatgaagcatgcatacatcgtatcctactaatc

SEQ ID NO: 5779 - DNA, 345 bp, Glycine max
aacacacactactgtttgaataaaaccatctataaatgcacttttaacatccatttgattttgaaagcaattatggatgcaaaggctagtaagattctaatggctagtaatccaaccactggagcataagtttcttcataatctattccttcttcttggttatatcctttagctactaatatacttttatttctaataactattaactactccatgttcatccaatttgtgtctaaataacccatttagttccaataattggatgatcattacgtctatcaactaattcccaaactggagtttcttcaaattgaattaatccctcttgcatagcaataatcaaat

SEQ ID NO: 5780 - DNA, 387 bp, Glycine max
  unsure (1)..(387): unsure at all n locations
agcttgtcttgtgcagaattagggtacacattctttttttgagatntttacacataattccagagcacaccacagtgcctattttgggaaaagagctctggaggcaacaagatgagcaacttttgcagagatacctaggtcttgtaattagagagagattagaagtttatgtagacgacatgatcgtaaagagtaagcaagtggatgaacacctagccaacttgttggagttgttaatgcaactaaggaaatacaatatgagactcaaccctagaaagtgtactttcggggtacaagtaggaaagtttttgggatacatgttaaccgaaagaggaattaaggtaaatcccgacaagtgtaaagccacattggagatgaggagtccta

SEQ ID NO: 5781 - DNA, 457 bp, Glycine max
  unsure (1)..(457): unsure at all n locations
ggttcatcttgagataataggtggtcatcctcatttgaagttgatggttcatcatatttctttggcctaacagaaactccaatatttttacagcttctaatgttatgattggtttggccacaccttccacatgtaaactcagccaatttcctctttagcttatgtcctgtgacattgtcctcatctacagatctctttctattattctttggccttcctctttggacccttntatgtggtggaacaaggtgtgtatattgtgtctgggcccaatattgtggtccttggactggttaataaaatgctggtatgtcttattataaacttctattgacagccactcatgacacatgtccttaggcttccctcctttgtgagttatngttgcaatggcatgtcggcatggcatccctacatcaaagttgttaaatcagcacacatgtacgttaggaatgaa

SEQ ID NO: 5782 - DNA, 440 bp, Glycine max
  unsure (1)..(440): unsure at all n locations
tatcatccaatatagggataggatatctatactttatagttaatttattnatggctgggcagtctgtacacatgtaccatgtcccatctttctttggaaccaagatcacagggacaaaacacgggctaagactttcccttacaaatcccttntgcaagaactcatcaacttggctttgaatctcctttgcttcttctggactttacctataggctggcctatttagaaatgaagcaccaagaatgaagttaatttgatgcaatacctcttaaaagaggtaatccatatggaatttcttctaaaaaaacatcaacaaattcctgtaacaaggaaacaatctcacaaggcaaagaagagttaaaatcgttagtaaaataaacatcattgtacattagtacaagtagctgctctctggccatcaaagtactctcaacctctct

SEQ ID NO: 5783 - DNA, 374 bp, Glycine max
  unsure (1)..(374): unsure at all n locations
agcttaattnttcttttagaatgttagttgtccttccttcaacctcacttcctcccatactttntccattatttttagaagcttttctctttgaaccacccatttataactctaaacagtttagtgccttagtcaatgatgctattctttagaacaatagggcaatgatctgatacactcctattcaagacatgatgagagctcccttgccaagtgagtaacccattctttagatacaaatactctgcccaacttactctttacatggctatttggcttaaaccatgtatacatcctttgaacaataaggatgtcctctagctccatgtaaaanatgaaaccattaaactccctaatggtcccttcaccaccat

SEQ ID NO: 5784 - DNA, 262 bp, Glycine max
  unsure (1)..(262): unsure at all n locations
cattcactctgcaaatgttntgcaccgagatcttaaaccaagcaatttacttttgaacgcaaactgtgatcctaagatatgtgactttgggcatgctataacaacctctaagaccgactttatgacagaatatggtgtcactacgtggtacagagcccccgaattgctactgaattgtcagaatatactcaactattgatatttgggcggttggttgcaatttgatggagataaatagaagggagcctttaattcctggtaa

SEQ ID NO: 5785 - DNA, 446 bp, Glycine max
  unsure (1)..(446): unsure at all n locations
agctntactatgcagagaatatccaaggaaattaccttcatctgacttagcatcaaattttcctaagttatcttttccattattcaatacaaaacatttacaaccaaagatatgaagatgagagatgtttggttttctgccattgaccaattcatatggagttttctttaaaatgggtcttattaaagccctatntaaactgtagcatgcagtgttaacggcttcagcccaaaagtattttggaagaggagtatcatttaataaagttctagcaatctcttccaaagatctatttttcctttcaacaacaccattttgttgaggggctcttggtgcagaaaagttatgcttaatcccatgcttatcacaaaataattcaaattcttattttcaaactcacccncatgatcanctctaatagatataatctttagatttttctattt

SEQ ID NO: 5786 - DNA, 216 bp, Glycine max
gcttactatgcaaggaataaccaaagaatttttcttcatctgacttagcatcaaattttcccaagttatcctttccattggttaatacaaagcatttgccaccaaaaacatgtagatgtgagaaatttgggttcctacccttaaacaatattgatggagttttctttaaaataagtcctattaaagccctattcatgatataacatgcagtattaa

SEQ ID NO: 5787 - DNA, 458 bp, Glycine max
  unsure (1)..(458): unsure at all n locations
cttgtgtaatcgattacacttatttggtaatggattaccagtgactatttctgtaaaaatcaaaaggtgtaactcttcaaaaaggttctgactttttcaaatgagttttaagtttttctaaaagttataactcttcaaaaaggatttgactttttcaaatgggttttaagtttttctaaaagttataactcttctaaatgatcttcttgaccaaacatggagagtctataaaagcaagggtttgttttgcatttcaacaatcttgaatacttttacacttattcaacaatcctttacaagccttgactctctttgaatttcttcttcttctttgtaccaaaaagctttctgaagttttctggttttccaaaccttgaaaacttgtgctattcatcttttcattctcttctccatttgccaaanagaattcaccaaggactaaccgcctgaattctttt

SEQ ID NO: 5788 - DNA, 243 bp, Glycine max
aatagtagctcctagcaaattcaaaccataataactctttactcggatgtccgattgtgttccgtagtatatcgtgacgctccaaattgaaaacataaggtctgagcaaattcaaacgtcaataagcttttactcagatgtcccattgagtcccgtaatatatcgagaatgctccaaattgataatagtaggtccttccaaatttaaccataataacgttttactcggatgttcgattgagtc

SEQ ID NO: 5789 - DNA, 405 bp, Glycine max
  unsure (1)..(405): unsure at all n locations
ntcgagaatntaaaattgtcataactnttcactcggatgtccgattcaagcacatcacatatggagacgcccgaaattgaacaacggaagctctcgagaaattgaaatggtcataacttttcactcggatgtccgattcaggcacatcacatatcgagacgctcaaaattgaacaacggaagctctcgagaaattcaaatggtcataacttatcactcggatgtccgattcaggcgcatcatatatcgagacgctcgaaattgaacaacggaagctcttgagaaattcaaatgatcataacttttcactcggatgtccgattcaggcgcatcatatatcgagacgctcaaaattgaacaacggaagctctcgagagatcaaatggtcataacttttcactcggat

SEQ ID NO: 5790 - DNA, 263 bp, Glycine max
  unsure (1)..(263): unsure at all n locations
agcttccattgttcaattntgagcttctcgatatatgatgcgcctgaatcggacatcctgagtgaaaagttatgaccatttcaatttctcgagagcttccgttgctcaatttcgagcgtctcgatatgtgatgctcctgaatcggacctccgagtgataacttatgaccatttgaatttctcgagagcttccgttgttcaatttctaacgtctcaatatttgatgtgcctgaatcagacatctgagggaaaagctatgacaat

SEQ ID NO: 5791 - DNA, 447 bp, Glycine max
tcgcacttgataatggaggcacatgaacagcgctaggcaatgacattcatggtgctccaaacaaaggtggagtatggaggattgccttgagggtccgcaattaggcaatcatgaaactcatctccaaactcgaaagtggagaacacatgaacagccctaagcaataacattcacgtggctacgaaataggatgagaatggaggatcgccttgagggtcctctcttattcaatcatggaacacagctccaaactcaaaagtggagaacacatgaacagccctaagcaataacattcatgtggctccggaaaaggacgagaatggaggattgccttgagggtcctctcttaggcaatcatggaatacagctccaaactcgaaaatggagaacatgtgaatgacaacgcaattcactcacgtggctccagaaaaggatgagaatggagga

SEQ ID NO: 5792 - DNA, 323 bp, Glycine max
agctagtccaatcgatttagagaaatgccttcataagcatatctgcatattgatcaattgcacggatcatgaatgacacgattatgagcaagagaaatattgctcaaattatcaccaaaaattctaggaatagtgtgagaaactttcagcttaaacaacaaggtctgaatttgttggacctctaatgtatctggagcaaggttccagttcttatgcttcagtgctagaacgagcaacaacagattgctttttggaccaccaagagaccatgctgggtcctatatagaaaaaagcattgaatgtagaccccctgttctttggat

SEQ ID NO: 5793 - DNA, 390 bp, Glycine max
  unsure (1)..(390): unsure at all n locations
tcaatctttaatggagaaggttaccactactggaaaacccgaatgccaatttttatcgaggcaatatatctaaatatctgggaagccattgaaatagggccttatatacccaccacagtagaaagagtttcaatagatggtagttcatcaagtgaaagcataaccatagaaaaacctaaagatagatggtctgaagaggatagaaaacgagtaccatacaacctaaaagccaaaaacataataacatctgccctaggaatggatgaatatntcagagtttcaaattgcaagagtgctaaagaaatgtgggacactcttcgataacacatgaaggaactacagatgttaaaagatctangatgaatgcactaactcatgagtatgaattat

SEQ ID NO: 5794 - DNA, 309 bp, Glycine max
  unsure (1)..(309): unsure at all n locations
tcgagcgtntgacatattacgggacttattcatacattngagtaaaaagttattgttgtttgaatttgctcagagcttnggtgttnaatttcgagcatctcgacatattacgggactcaatcatacatccgagtaacaagatattgtcgtttgaatttggtcagagtttcgataatcaatttcgagcgtctcgatatattacgggactcaatcagacatccgagtaaaacgttattgtccgttgaatatgctcatagcttcngtcttcaatttcgagcgtctctacatattacgggactcaatcagaca

SEQ ID NO: 5795 - DNA, 389 bp, Glycine max
  unsure (1)..(389): unsure at all n locations
agctntgagcaacttcaaacgacaataactttttactctgatgtctgattgagtggccgaatatatcgagacgctcgaaattgaataccgaagctctgagcaaattcaaacgacaataactttttattctgatgtctgattgagtcccgtaatatatcgaaacgctcgaaattgaatgttgaagctctgagcatattcaaacgacaataacgttttactcggatgtctgattgagtcccgtaatatatcgagacgctcgaaatggaataccgatgctctgagcatatacaaacgacaataactntttactcggatgtctgattgagtcccggattatatcgagacgctcgaaattgaatgttgaagctctgagcacattcaaacgacaa

SEQ ID NO: 5796 - DNA, 430 bp, Glycine max
agtctcacgattgtcatgtgctcatgcatcaattgttagccgtggctatacgagacatcttgccaaaacaaagtcagattaacgataactcgcctgtgctttttcttccatgctatatgtagcaaagtcattgatccagtaatgtttgatgagttggaaaatgaggccgcaattatactgtgccagttggagatgtattttccccctgctttctttgacatcatgattcacttgattgtgcatctggtcagagaaatcaaatgttgtggtcctgtttatctacggtggatgtacccggttgagcaatacatgaagatcttaaaagggtatacaaagaatctatatcgtccagaagcatctattgttgagaggtacattgcagaagaagccattgaattttgtttagaatacttagagaaggctaaaccta

SEQ ID NO: 5797 - DNA, 392 bp, Glycine max
  unsure (1)..(392): unsure at all n locations
agcttaanaaggcactctatgggtttaagcttgcccctagagctaggaataaaaggatngatgcctttttggttcagcaatactntagcaagtgctatattgngcatggagtatatgtaagattgcaaaatggaggattggatcaagtaataatatgcctctatgttgatgatctattggttattgggaacaatcttaaggagattgatgatttcaaatctgacatgatgtttgaatntgaaatgatagacttgggaagactcagttatttcttaggtatagagtttacaaatgcttcaaccagaactatcttgcaccaaaagaagtatgcattagaaatattgaaaagattcaatatgactaattgcaacttagttgtgacaccaatggat

SEQ ID NO: 5798 - DNA, 413 bp, Glycine max
  unsure (1)..(413): unsure at all n locations
agctnntaattgactgagaacaagaaagatttaactgtaggtcattttatcaatcagattaactaaaagcataagttaataagtatgggccaatgaatggttattataaatatataaccttaatacccataaaccaaagctacaataaaaactgataatgtacttacacagttacacttccctagcatgaataatatcctaagttttttagaatttatttaagttgctccagtgccatgagaccatgccaaaagaaatccaattaatataacaatgttagaaactaaatactcatgacaggaatgcttacatgtgactaaaataaaattaaacaaaatacaaatatatatctttttaattaatggagatcaatatagaacaaacatatagtagtgatgatcatagcaatcaaa

SEQ ID NO: 5799 - DNA, 457 bp, Glycine max
cttgcattgcttggcagaattgcgaacaaggagctaagagattctagcccactggttcttaccatatttcataacaatcgcttttaggatttcatcttcggtgtttttccaaacattgccctttatcataatcctcatcttcacttcaactacagtcaacaaccaaacaattcaaacaaagattattagatgtgaaaaataagggaaaagaaaaataatgagacatcaggccttatgttagggagaataaaaaaccacactcttgcaattaggttttgaagtaacgtattatgcgataaggaagaagaatgatccattcaagtgagcgagagtccaaagcgagcttcatcgtgtgaggcatgaaccagagtccatagcactgttgactttgtcggagccatggcagatccacaccgaaccaccatgagtggtatgtgtccaacacttcagaatccat

SEQ ID NO: 5800 - DNA, 220 bp, Glycine max
gcgtctcaatatattattggcctgaatcaaacatccgaatcaaaggttatggctgcttaaatatgccatgtgcttcaatgatcaattgtgagcatctcgatatattatgcaactgaattgggcatctgagtgaaaagttatgccctatgagttagccgagagctctcgttgttaatttcaagcgtctcgcatattattggccagaatacgacatctgagc

SEQ ID NO: 5801 - DNA, 384 bp, Glycine max
gatccttaatcacctgcggctgcagctggagaaaataaaaataaatccgattaagcagaatgctagaaataccttggcagctctggttgtagctctagaccaacgggaaatggcagtttcatgtttctcaatgttgaagaaagatatagagctgtgcttgagttcagcaaaatctaagagcttccacctatgtattaaaacaaaaagataaaattaaaactcatggagagtctagtaaagaaggacagaggttctcattgcagtaaataaagtaccagctttgttcaataagaattgcacaatctgctagctttcttcttgtacgaaagactttgtatactttctgcagtttaagtgcagccctatatttggggttatctggat

SEQ ID NO: 5802 - DNA, 396 bp, Glycine max
actagatgccttgggtattctggtatcccaactggccatgaatcaaaaatatgcacctgtcgccagactctgtggtttatgctcctctgccgaccaccacatagacctttgcccttttgtgcaacaatctgaagcaattgaacagcctgaagcttatgttgcaaacaactacaatagacctcctcaacctcagcaacaaaatcagccacaacaaaacaattatgacctttccagcaataggtacaatcccgggtggaggaatcatcccaaccttagatggtcaaatccttcacaacagcaacaacaacaacaacaaccttattttcagaatgctgctggcccaagcagaccatacgttcctccaccaatccagcagtaacaataacaacaacaata

SEQ ID NO: 5803 - DNA, 480 bp, Glycine max
acactactagcacactcaagcttcttagtttcagatgatgcagatgggtttgtagctacctcatgcactcctctaatgactatggcatcatttctggcgctaaactgctgggagttggaggccatcttctcaattaaatttctggcttcagcaggagtcatgtctccaagggctccaccactggcagcatctatcatacttctctccatattactgagtccttcataaaaatgttggagaagaagctgttctgaaatctgatggtgagggcaactggcacatagtttcttaaatcgctcccagtactcatacaggctctctccactgagttgtctaatacctgagatatctttcctgatggctgtggtcctggaagcatggaaaaaattttctaagaatactctcttaaggtcatcccagctcgtgatggaccttggagcacggtaatacaaccagtcctttgccactccctctaatgaa

SEQ ID NO: 5804 - DNA, 403 bp, Glycine max
  unsure (1)..(403): unsure at all n locations
agcttcttcacatagtccgccttttcttgatcttctntatgcttaanaacagaaacattatgcataggcaaaaaatcaagaggagttagtgggttaaaaccataaacaacttcataaggagaacaattagtggtgctatgaacaactctattgtaagcaaattcaacacggngtaaacaagcttcccaagtttttaagatcttgctcaaaactgtcctaaccaaagttcccaaagtcctattaacaacttccatttgcccatcggtttgtgggtgacaagtggttgaaaataacaatttagtgcccaacttgctccacaaagtcctccaaaattgacttaggaacgtagagtccctatcactaacaatgctccttggcagaccatggagtctcacaatctcct

SEQ ID NO: 5805 - DNA, 269 bp, Glycine max
ctgagtcggacatccgtgtgaaaagttatgaccctttgaatttctcaagagcttctgttgtcatttccagcctctcaacatagtatgcgctcgaaactgacattcgtgtggaaaggtctgaacatttgaatttctcgagaggttccgatgttctaattcgagcggatcggtatattataagcccggatccgacattcgtgtggaaaggtatgaccatttgaatttctaaagagccttcgcgggttaattttgatcctcttacaatatat

SEQ ID NO: 5806 - DNA, 396 bp, Glycine max
  unsure (1)..(396): unsure at all n locations
tatatcgatggctcaaattatcatcggaaactctcgcgaaattcaaatgggcatagaatttcacacggatgtccgattcgggcgcataatatgtcaagagtctcgaaattgaacaacggaagctcttgagaaattcaaatgggtataaaatttcacacggatgtccgattcaggcaaatcacatatcgagacgatcagaattgaacaacggaagctcttgagatattcaaatggtcataacatttatctcgaatgtccaatttaggcgcatcacatatagtgatattcgaaattgaacaacagaagctctcgtgaaattcaaatggtcataactnttcacactgaggtncgattcacggctataatatatcgatacgctcgaaattaacatcggaa

SEQ ID NO: 5807 - DNA, 428 bp, Glycine max
tttgagcaatgcaaatggtcatagctatttactccgatgttcgaatcaggcgcataatatatcgagacgttcgaaattgaacaatggaagctcttgagcaattcaaatgatcataacttttcactaggatgttcgattcatgcacataatatatcgagacgctcgaaattgaacaacggaagctctcgagaaattcaaatggtcataactttttcacacggagggcagattcatgcgcacaatatatcgagacgctcgaaattgaacaatggaagctcttcagcaattcaaacggtcataacttttcactcggatgttcgattcatgcgcataatatatagagaccctcgatattgaacaactgaagcttttgagaaattcaaatggtcataacttttcattcggatgtccgattcaagcgcataata

SEQ ID NO: 5808 - DNA, 323 bp, Glycine max
  unsure (1)..(323): unsure at all n locations
gcttnattgttaatttaagcgatatgatattatgcgcctgaatatgacctccggtgaaaagcatgaccgtttgaatctctcgagagcttgcgttgttcaattatgagcgtcttgatatattatacgcctgaatcggagcttcgagtgaaacattatgaccatttaaatgtctcgagagcttccgttgttcaatttgaagcgtctctatatgtgatgcgcctaaatctgacgcccgagagataagatatgaccatttgaatgtctcgagagcttacgttgttcaatgtggagcgtatcagattcttatgcgcacgaatcagacc

SEQ ID NO: 5809 - DNA, 324 bp, Glycine max
agcttctcaggtccggtcatggaaagacttggcaactgccttcattaggcagtaccaatacaacacggatatggctcccgatcggaaccagctttagagcatgaccaagcgagaacatgagtccattaaagaatatgcccaaaggtggagagacctcgcagcccaagtcgttccgcccatgactgagagtgagatgatcacaattatggtagatacgttgcctacgttctactatgaaaagctgatagggtacatcccagctaactttgcggacctcgtcttcgcccgagaaaggatcgagtccggactaagaaaaggcaagtt

SEQ ID NO: 5810 - DNA, 314 bp, Glycine max
agcttgtcagatggagatgatcttgccatgactttgattctatcaatcttatccattctttcctcatgtgagaaatttctgaattgaaagccttcaaccactgctgcttgatcatcatccaattcatcatcaagaatcccacattcagaggctatggcccttgctgtgtgcgcattatctcctgtaatcatcttaatcttcactccagcattcttgcacgattcaactgctgctccaactcctggcctacaagggtctttcaacccaagtattcccaacagtgtgagttctgtctcttcaagttcaagtttttc

SEQ ID NO: 5811 - DNA, 317 bp, Glycine max
agctgtactatgcatataatattttatgaaaataccttcggctgactgagcatcaaattttcctaaactatcttttccattattcaatacaaaacatttacaaccaaagatatgaagatgtgagacgtttggttttctgccattgaacaattcatatggagttttctttaaaatgggtcttattaaagccctatttgaaatgtagcatgcagtgttaacggcttcaacccaaaagtattttggaagaggagtatcatttaataaagttctagcaatctcttccaaagatctattttttctttcaacaacaccatttt

SEQ ID NO: 5812 - DNA, 317 bp, Glycine max
agcttaaatattcaacttcgagtttctcgatatattacgagtctcaatgaaacatgcgagaaaaaaagttattgtcatttgaatttgctcaaaggttcaacattcaatttcgagcgtctcgttatattacaggactcaatcagacattcgagtaaaaagttattgtcgtttgaattagctcagagcttccacattcaatttcgagcgtctcgatatattacgggccttaatcagacatccgagtaaaacgttattgtcgtttggattggctcagagattcaacattcaatttcgagcgtctcgatatatgacgggac

SEQ ID NO: 5813 - DNA, 323 bp, Glycine max
agcttggtacatattgtctgattcttgggtcctcttaaggacttagtcaaaatatccgctggctgatcattagaaccaatgaactcagtgacaatctccttggacagaagcttctctcgaatgaaatgacaatcaatctctatatgcttggtcctctcatggaagactgggtttgaggcaatatggagagcaacctgattatcacaatacaacttcatttgcaactcttcacaaaacctcaattcttgaagaaattgtttgatccacatgagctcacatgtgaccatagccatagatcgatactcagcttttgcactagaccg

SEQ ID NO: 5814 - DNA, 331 bp, Glycine max
agcttcttcacatagtccgcctttgcttgaccttctttatgcttaaaaacagaaacattaggcataggcaaaagatcaagaggagttagtgggttaaaaccataaacaacttcaaaaggagaacaattagtggtgctatgaacaactctattgtaagcaaattcaacacggggtaaacaagcttcccaagtttttaagttcttcctcaaaactgtcctaaccaaagttcccaaagtcctattaacaacttccatttgcccatcggtttgtgggtgacaagtggttgaaaataacaatttagtgcccaacttgctccacaaagtcctccaaa

SEQ ID NO: 5815 - DNA, 331 bp, Glycine max
agctttaagaattatgggctcatcaaactacttgtttcccgagggaagttctataaatagacctcccatctttaatggagtgggttaccactactggaaaacctgcatgcaaatctttatagaggcaatagatttaaatatttgggaagccatagaacaaggaccttatgttccctctatagtggccggaagtgcaacaatagaaaaacctagagcagattggactgaggaagaaagaagattagtacaatataatttaaaggccaaaaatattattacatctgctctaggaatagatgaatactttagggtttcaaattgtaaaagtgct

SEQ ID NO: 5816 - DNA, 328 bp, Glycine max
agctttacaccgttaaagagaattttaagctcttagaaggaaaattacccggttcttccaggtgttgattttaaacagctttcatctgataggagcttttttcaaagatgagattaaatctgtatggagttgcgatgaagataaaagccccggtccggatggctttaatttccccttctttaaagcatgttgtggtgtcttgaaagatgagatatttggaattgtttaagagtttcactcatcaggtattttgctgaaggctgtaacatcctcctttattgctttgatcccgaaaaaggataatcctcaatctttgtcagattatgga

SEQ ID NO: 5817 - DNA, 319 bp, Glycine max
agctttgagccaattctaacgattataactttttactcggatgtccgagtgagtctcgtaatatatcgacacgctcgaaattgaatgttgaagctctaagcctattcaaacaacaataacgttttactcggatgtccgattcagtgacgtaatatatcgggacgctcgaaattgaaagttgaacctctgagccaactcaaacgacaataactttttacttggatgtctgattgagtaccgaaatatatcaagacgctcgaaattgaaagttgaacctatgagcctattcaaacgacaataactttttactcggatgtct

SEQ ID NO: 5818 - DNA, 322 bp, Glycine max
agcttcacaaatctggcaacagtataaatatattgtacctggtacaagggtaatagtgtgacagcaggaacatctcacacttgtagcaccacgtgtgtacattagcaatgtcgtacagcctccacaatagagttgtgacatgtccattcctgcatgggcatcatgaaattaaaggttcccccagatgtaaccattcagttaaagtacaatacgtgtgaatgaatatttaatcaagctaaatgcataatttcttttcagtttatctcgctctcaccacacacacagtatctttcaaataatatgcctatgttattaatagcta

SEQ ID NO: 5819 - DNA, 312 bp, Glycine max
  unsure (1)..(312): unsure at all n locations
agcttctataaaaggctcgnttctaatttctgtacaattgcatcacctctcaatgagctggtgaacaaaaatgtggcatttacctggggtgaaaaacaagagcaagcctttgctttgctcaaagaaaagcttactaaggcacctgttctagttcttcctgacttttctaaaacttttgagctagaatgtgatgcctctggagtgggagttggagctgtattgttacaaggtgggcaccttattgcttgttttagtgaaaaacttaatagggccaccctcaactaccccacttatgataaagagctttatgcc

SEQ ID NO: 5820 - DNA, 324 bp, Glycine max
agcttgcgcatgcttttcccttttgaggatgttccatatgctcttaagactggactgattcatttgcttccaaagtttcatggccttgcaagagaagacccgcacaaacatttgaaagaatttcacattgtgtgctccaccatgaaaccccgcagatgtccaagaggatcacatatttctgaaagcttttcctcattcattatagggagtggcaaaggactggctgaattaccttgctgcaaggtccatcacgagctgggatgacctttagagagtattcttagaaaaaatttttcctgcttgcaggaccacagtcatcaggaa

SEQ ID NO: 5821 - DNA, 320 bp, Glycine max
agctttgatgtttatagagaatttagagctctagagaatacacggagaagaagagagcgcgagcaaaataggttgcgtcaaatataatttaaaatgtaatttcaacatcggttttcaataaaaaaactgatgttaacaaattgatgttaaatgatcatacgttaacatcggttttctacaaaactgatgttaacggatacacattatttacaattatgccaccgcgtgtatgttaacatcgattttgtcaaaaaccaatgttaatctgtcgatgttaaaattgctttttgtagtagtcgacggtcgcacgaaaaacacaa

SEQ ID NO: 5822 - DNA, 329 bp, Glycine max
agcttctcgatatattatgtccttgaatcatacatctgtgggaagagttatgaccatttgaatttctcgagagctaccgtagttcaatttcgagtatctcgatatactattttcccaaatcggatatccttgtaataagttatgaccattcgaatttctcgagatcttctgttgttcaatttcaagcgtgtcgatatattatgtcctctaatcagacatccgagtgaaatagtatgagtagtcgattttctcgagagtttccgttgttcaatttcgagtgtctcgatatattatttccccgaatcggacatccatgtgaaatgttatga

SEQ ID NO: 5823 - DNA, 323 bp, Glycine max
agcttgtaattgattacactattactgtaatcgattaccagagcagattttcagaaaatattctcaacagtcacatctttttatgtggttcttgaatggctatcaaaggcctatatatatgtgacttgagacacgaatttgctaagagtttttcagaacaaaaaggtcttatcctcttataaagcaaaatcgttttatcctcttacaaattccttggccaaattacttgtgattcaataaggaattatttgagtgctcaaattgttcaatctatctctttcaagaaagatttcttcttttcttcttcttcattctgaaaaggg

SEQ ID NO: 5824 - DNA, 315 bp, Glycine max
  unsure (1)..(315): unsure at all n locations
agcttttatagaatgttcgntcctaattncggtacaattgcatcacgctgtcaatgagctggtgaagaagaatgtggcatttacctggggtgaaaaacaagagcaagcctttgctttgctcaaagaaaagcttactaaggcacctgttctagctcttcctgacttttctaaaacttttgagctagaatgtgatgcctctggagtgggagntggagctgtattgttacaaggtgggcaccctattgcttattttagtgaaaaacttcatagtgccaccctcaactaccccacctatgataaagagctttatgcctt

SEQ ID NO: 5825 - DNA, 329 bp, Glycine max
  unsure (1)..(329): unsure at all n locations
agcttatcccatgcttctttggtcgtcgtttcgtnggatatcttctcggatgtatcttcatccaccgattgataaatgagaaagagagctttcttgtctctctttcttgactccttcaacgtctcctttacaccttggcttagcgaggcttcatcttgctcctcgaagtcattctctacgatatcccacacatcttgagctcctagtagcgccttcatcttgatactccaattatcatagttgttctttgtgagcatcgacacttggaaaggaaaacctccattcgccatcttttgaggatcttgaagctctgataccactttgttgga

SEQ ID NO: 5826 - DNA, 310 bp, Glycine max
agcttttagcaaattctaacgacaataacttggtactcagatgtctgactgagtcctgtaatatatcgagacgctcagaattgattatatatatcgagaccctcagaattgattatcgaagctctgagcaaattcaaatgacaataactttttactctgatggctgattgagtcccgtaatatatcgagacgctcgaaatggagtaccgaagctctgagcaaattcaaacgacaataactttttacttggacgtcggattcagtcccggaagaaatcgagacgctccgaaatgaatagccaagatctgaa

SEQ ID NO: 5827 - DNA, 319 bp, Glycine max
agcttgcatgcagctatgaagatatccaaatacaaccatagggctcaacttttgggataaacccaaattcatgaaccattttatgaaatagtatcttcccttcttgccacaatcctgagtgactacaagcatgaagagctccaatgaatgtgatgtcattatggatgacccctagtgcttccatttcttcagagttccaatgctgcctcaccatgaccatgcattgcaaaaccagatatcatggcatttcacattgaaacatcacggtccatggccgcagcaagcagtgcatctatgtctccacacttggcatacgtgt

SEQ ID NO: 5828 - DNA, 285 bp, Glycine max
  unsure (1)..(285): unsure at all n locations
agctttaacgcatgtgctatcttctaagaaacaanccaagggttttggtaggtgttaaatatccctactgaaaggcattctaacgatgatagtcctcataccaatccaactctgaaacaggaatagacttttttagctacacctaagcgggccccataatctgcatcttaatgaatcacccgtagtttttttgtccatacaagatcaattactgcacagaaaaatgcattcttttttgggccaaaacaaccagccttgaatgtaaaattatttgcaacaaccaaa

SEQ ID NO: 5829 - DNA, 458 bp, Glycine max
cttcgagcgtctcgttatattataggactcaattagacatccgagtaaaaagttattgtcgtttgaatttgctcagagcttcaacattcaatttcgagcgtctccatatattacgggactcaatcagacatccgagtaaaacgttattgttgtttgaatttgctcaaagcttcaacattcaatttcgagcgtctagatatattacaggactcaatcaaacatccgagtaaaatgttactgtcgtttaaatttgcttagctctccagctttaaatttcgagcgtctcgatatatgacgggactatatcagacatccgagtaaaaagttattgtcatttgaatttgcttagagattcaacattcatcttcgagtgtctcgttatattacgggactcaattatacattcgagtaaaaagttattgtcgtttgaattgtctcagagcttcaacaatcaattt

SEQ ID NO: 5830 - DNA, 459 bp, Glycine max
  unsure (1)..(459): unsure at all n locations
nggaacaatggaatactgggtggtatttttcctcgtcagataacttgagcttataagcaacaggaccaattctttcaataacttggaatgggccatagaatcgtttggcaagtttggcggaagctgatgaagttcccttggtagaagactgtcgatagggtcgtaaccggagaagaacccaatcgcccacctgataattcacctcctgacgcttgtgatcagcttgcttcttcatctggtcttgtgcctttagtaatttcttgcgaatggtttgaaaagtagcgtctctatcagttaacaagtcctcaacagcttcaatgtttgacgtgccagagatgtattctagaaaattaaatggcttccgaccaaacgttacctcgtagggggttgaccctgtccctgcattccatgaagtattgtgggaccactcaatccatggaaggagcttaccccatttat

SEQ ID NO: 5831 - DNA, 439 bp, Glycine max
agcttcaacaacaggtgctcggtgacgttctaatagtctcaaataagagttttttctgattgcttttctaagaacacccacaatagactatcctttatctgaagttatccttttgattgatcatttttaccacaaaaacaaacatacaccccaatgcataagaacccccacgtaatagtacaaaaagtaaacgaacacaaccttacctccgcaagatgaataatgcatatgtatcttgattagtatcaatttataattgctttgtgtgtgtgttgatatatattaactattataaaatcaatatatttatcttaaaattattacattattaatgcataacctatttttttatattaaatatagaatagatactttctttataggaatagaatatatatacttataagttattagtatgagaatacccaacacaatctct

SEQ ID NO: 5832 - DNA, 430 bp, Glycine max
  unsure (1)..(430): unsure at all n locations
tcttggcattgaactcatgtgctacaaccaagccatgtntgggtttgcaccctatggtccttattggcgcgaactaagaaagattgtaaacttagaaatcctctccaatcgccgagtagagcaactagagaatgttcgtgtctccgaagttcaaagttcgatcaaagagctcttcaatgtttggtcaagcaacaagaataatgagtctggctatgcgttgctggagctgaagcaatggttttctcaattgacatacaacatggttcttcgaatggtcgtcggaaagcgacttttcggtgctagaactatggatgatgagaaagctcagagatgtgtgaaggctgtgaaggagttcatgcgtctgatgggggtgttcacggtggcagatgctattcctctcttgagatggtttgatcttggtggctatgag

SEQ ID NO: 5833 - DNA, 259 bp, Glycine max
agcttgtaattgataactgaagctctgagcatattcaaacgacaataacttttaactcggatgtccgattgagccctataatatatcgagacgctcgaaattgaaaacgcaagctctaagaaaagtcaaacgacaataactttaaactcggatgtccgattgagccctataatatatcgagacgcccaacaaatgaaaacggatgctctatgaaatgtcaaacgacaataactttcgactgggatgtccgaaagtgccc

SEQ ID NO: 5834 - DNA, 415 bp, Glycine max
ttcaaacgacaataactttttactcggatgtgtgattgagtcccgtcctaaatcgagacgctcaaaattgaatgttgaagctctgagccaattcaaacgacaataacgttttactcggatgattgattgagtcccgtaatataacgagacgctcgaaattgaatgttgaagctctgatccaattctaacgacaataactgtttactcggatgtctgattgagttccgtcatatatcgagacgctcgaaattgaatgttgaacctctgagccaattcaaacgacaataactttttactcggatgtctgagtgagtcccataatatatcgagacgctgcgaaatgaatgttgacctttgagccaattcaaacgacaataactttttactcggatgttctattcagtgacgtaatata

SEQ ID NO: 5835 - DNA, 464 bp, Glycine max
  unsure (1)..(464): unsure at all n locations
ntctattctataccttcccgagaaccacttatctggaaaagtacctccagaaattggcaactgcatgtctttgacagagttacatctgtattccaatcaacttgagggaaacattccaagtgaactgggaaaactaagaaaactagtggatcttgaattgttttcaaatcaattgacgggtgaaattccactcagcatctggaagattaaatctctgaagcatctccttgtgtataataacagtctttctggggaacttcctttggagatgacagagctcaagcaactgaaaaacatctcattgtttagcaaccagttctccggagtcataccgcaaagcttgggaattaacagcagtttagttcttttggattctacaaataataaattcactggcaacatcccaccaaatctgtgtgttggcaagaaattaaacatcctgaatntgggcatcaaccaacttc

SEQ ID NO: 5836 - DNA, 407 bp, Glycine max
agcttgagttaacgcataggatggatatgtacagtacagcatgcagagaagcatatatatcacatcacacagtagaatctgaatagtatatatagtccctttctatataaacgtgctattgcgatttcaattggtactactcttttgtttgctacagattatggagttgacccaccagagacttgaggaagataaaaatatagatgaggcacgagtggctcacgaagctgcaatggcaattgctgagatagagaaagcaagatgtatagcagccatggaaactgctgaagcatctaagacaattgcagaggtggaaacacatagacaagcgagtgttgaagttaaatctcttaacaagcataggaaatgacgaagctattggaaaatctaccccaaactgatgtgag

SEQ ID NO: 5837 - DNA, 465 bp, Glycine max
  unsure (1)..(465): unsure at all n locations
tattgcatgagctatatcaggttgagtacatgccatagcatacattattgaacctataatgttagcatatgtgatactctccatataagtatactcttcagctctctttggggattgacttacacttagtttgaattgatcatatataggtgtcacaataggccaacttcgaatttgacattccaaacctttcaataaatttattgaggtatgtctcttgagatagatacaaaatcttcttctttctatcccttttgatttccattcccaatattctccttgttgtcccaagtccttcatttcaaattccctttttaactcagctntgaccttggtaatttcggccttaccgttacttggtattaacatgtcatcaacatatagcagtaggattacaaaggtacctttattccttttgaatagccattttcaattgactacccttgaaccaatgggctttttgat

SEQ ID NO: 5838 - DNA, 449 bp, Glycine max
  unsure (1)..(449): unsure at all n locations
tgtaatcgattacacaaatactgtaatcgattaccagagcatattntcagaaaatattctcaacagtcacatctttttatgtggttcttgaatggctatcaaaggcctatatatatgtgacttgagacacgaatttgctaagagtttctgagaacaaaaaggtcttatcctcttaaaaagcaaaatcgctttatcctcttacaaattccttggccaaaacacttgtgattcaataaggaattatctgagtgctcaaatcgttcaatctatctctctcaagagaaattactccttctcttcttctttattctgaaaaaaggattaagagaccgagggtctctngttgtaaagaaatctgaacacaaaggaagggttgtccttgtgtggttcagatctcgttatacgctcttacaagatactggaactctcaagccggttgcttgaggact

SEQ ID NO: 5839 - DNA, 389 bp, Glycine max
agctttgaccaaaatcaaacgacaacaactttttactcggatgtcggaatgaatactgtattatatcgagacgctcgaaattgacaatatatcgagacgctcgtaattgaaaccaaatgctcgaagcaaattctaacgaccataactttttactcggatgttcgaatgaatcccataatatatcaagacgctcgtatttgaaaacataagctctaatcatattctaatgataataactgtctactcggatgtcagattgagtcccgtaatatatcgagactcccgtaattgataacggatgctcgtactaatttaaatgacaatattaatatgctctatattgagcaatggagctcttgagcaattcaaatggtcatcacttatatttt

SEQ ID NO: 5840 - DNA, 468 bp, Glycine max
  unsure (1)..(468): unsure at all n locations
ctttanatgtctntcgtagaatcttaacatcgaatcgtttctctctttccaatggaaggaactttaagttattttttatggattgtacgagaaatgagagtattggattgtcagacttgagcaccaaataacgctactaaaaaagatatgagaaaattctaagttactgattaaatataattgaattttctcttatcatattacttttaaaatgatcatatcaaacatacaataaattaaataatctttatttccattttgaaaatttacgaacatgtgacatcaaaaaggaaattttatgaacatagtattatggggatagaatacaaaanttcaattcaaaaataaattctactcaaaagtatctcatataaaaattaatcaacttatatagcaaaacaactaataaaatagttaactttcacaggttttcccctttctaaactagacaaattgtattacaataat

SEQ ID NO: 5841 - DNA, 469 bp, Glycine max
  unsure (1)..(469): unsure at all n locations
ntgatgagtgcaacataagttggccttcaaggtgtttaagatgatttgtctttgtttcaaggaagtgttgacagtggccactgtggaggatctagtaatgtaatcaggcaaagtgtggggagaatggccgtacagagctttaaacaaagacattctgatggcagagtgaaaggtggagttgaaccaatattctgcctagttgagataattgaaccaaaggcaaggatgcttactgacaaagcatctaaggtaagattccaaacttctattcaccacctatgtttgaccatcggtctctggatggtaggcaatgctgaactgtaattntgtgccttgcattttgaacaattccttccaaaaagcactgagaaagagaggatccctatcagaggtgatagttattggaagaccatgtatgtggcatctcttagtggagaagtgataagctaaatttgtagcagcatacttt

SEQ ID NO: 5842 - DNA, 468 bp, Glycine max
  unsure (1)..(468): unsure at all n locations
tcaacatcagaccacttccagggtgctggaactacttcacatggacttgatggggcctatgcaagttgaaagccttggaggaaagaggtatgcctatgttgttgtggatgatttctccagatttacctgngtcaactttatcagagagaaatcagacacctttgaagtattcaaggagttgagtctaagacttcaaagagaaaaagactgtgtcatcaagagaatcangagtgaccatggcagagagtttgaaaacagcaagtttactgaattctgcacatctgaaggcatcactcatgagttctctgcagccattacaccacaacaaaatggcatagttgaaaggaaaaataggactntgcaagaagctgctagggtcatgcttcatgccaaagaacttccctataatctctgggctgaagccatgaacacagcgtgctacatccacaacagagtcacacttagaag

SEQ ID NO: 5843 - DNA, 466 bp, Glycine max
  unsure (1)..(466): unsure at all n locations
ngaacattagcttcagccacgtaccgacaagtttcaccaacccttgggtctgtctctcccaaaatctgcttctggacttctaacccagtggtgtagcacattattgaattctcaagttggcccagcatagcataggtgtctcccagttgcatgtgaccagcaaatttagcaagggcatgttgttggctttccccaataacaggaatctcaattgagcgctcaagaatcggaattgcctcaccatattgacccaagctgcaatatattgctgctgtaacatgtaaacacataaccagctccaaacttggtttcccattaccaaacttctcaaacagttccattgcttgaagagctaagtcaagagccttctgcggattatccnctgatgaaatcagatctcttgcctgctntagcaatacaagtgcgcgctcaggtttttctaatgctgactcagccatactctcaa

SEQ ID NO: 5844 - DNA, 420 bp, Glycine max
  unsure (1)..(420): unsure at all n locations
actaagctngaggcaaactagatgcattggttaacttggtaacccagctggccttgaatcagaaatctgtaccagtcgcaagagtctgtggtttatgctcctctactgaccaccatacagacctctgcccttccatgcagcaacctggagcaattgagcagcctgaagcttatgctgcaaacatttacaatagacctccttaacctcaacaacaaaatcaaccacagcagaacaattatgacctctccagcaatagatacaaccttggatggaggaatcaccctaatctcagatggtctagccctcaacaacaacaacagcaacctgctccttccttccaaaatgttgctggcccaagcagaccatacattcctccaccaatccaacaacagcaacaaccccagaaacaacaaacagttg

SEQ ID NO: 5845 - DNA, 442 bp, Glycine max
  unsure (1)..(442): unsure at all n locations
gggtcatgctagagcatagtctcgtaagaggacttccaaagctgtcatatcaagatgactctctttgtgaagcttattagaaagggaaaaaagtaaaaagttattttaaagccaaaaatgttctttccactttgaggcctatagagccttttgcaccttgacttgcttggaccaaccaggactacatccctttttggatgcagatatggtctggtcatagtggactattacactaaatggacatgggttaggttcctagtccacaaggatgagtcttttgataccttctattaattctataaaaagattcaaaatgaaaaaggcatttgtatctcttcaatctgaagtgatcacggcagagagtctgaaaatgatctttttgaacaaaattgtgaagagaatggtattcaccataatntntccacttcaaggacaccacaac

SEQ ID NO: 5846 - DNA, 336 bp, Glycine max
agcttgaccttctacagggatatcaccaaattcgcatgcactctgaggacatcccgaaaatggcttttcgaactcaccatggccactacgagttcaaggtcatgcccttcaggttgtgcaacgccccatcctcttatcacgcgaccatgaacttaatattccgttcatacctttgccactttgtcgttgtcttcttcgacgacattctggtatacagcggttcattagaggctcatctgcttcatttggagatgactttccaggtattacttgacaaccactttgtcctgaagctctctatatgcttttttggccaaccgcatgtcgaatacttgg

SEQ ID NO: 5847 - DNA, 465 bp, Glycine max
  unsure (1)..(465): unsure at all n locations
tatccagaaaaccaattgaattgtgaactgtaattaaattatggcagtgttcaaatgaaaattcctccaaatttgggagaccagatacgtcaggaatctgtgttaaacatttgcacccgtcaaaattcaatgttcttagatttacgaacatctgccaaaaaaaacagaaacaagaaagaaataagaacagaatgattaatcttaaaagtgaatntattaaataacaagatgtggaaaatgtactctttaagcttaccttccataagccatcccactcaaatgacgaaatacaactatagggtaacttgcatatggaaagttttttcggatgaaaatcagatggtaaacaatgtgaaggatatctccaccattccagtactctcaaattgtttggaagatatttgggacctttggaaaanttaccatttctaataataagtgtcttgagggttttcatcttcttga

SEQ ID NO: 5848 - DNA, 250 bp, Glycine max
agcttcacagcggagacgacatatcacctgtactttccaaggcaattcatgagtccaggattgctattactgtgctttctcaaaactatgcttcttcctcgttttgtttagatgaacttgtaaccatccttcactgctagagggaagggttgttggttataccggtctttcataacgtaaatccttctgctgtcagacacctgaaaggtagttatggacaagcaatggctaagcatcagaagaggttcca

SEQ ID NO: 5849 - DNA, 434 bp, Glycine max
actagatgccttggttaacctggtaacccaactggccatgaataaaaaatctgcacctgtcgccagactctgtggtttatgctcctctaccgaccaccacacagacctttgcccttctgtgcaacaatctgaagcaattgaacagcttgaagcttatgctgcaaacatctacaacagaacaattatgacctctctagcaacaggtacaatcccgggtggaggaatcatcccaaccttagatggtcgaatccttcacaacaacagcaacaacaaccttattttcaaaatgctgttggcccaagcagaccatgcgttcctccactaatctagcagcaacaacagcaacagcacagccccaaaaataacaaatagttgaggcccctccgcaaccttcccttgaagaacttgtgaggaaaatggctatgcaaaacatg

SEQ ID NO: 5850 - DNA, 473 bp, Glycine max
  unsure (1)..(473): unsure at all n locations
tgcanaaagaaacaagttcaatttgcctccatcaccaccaattctacccataattggcaatcttcatcagctaggaacactaccacatcgctccttccatgcactctcacgcaaatatggccctctcatgttgctgcaattgggccaaattccaaccctagtggtctcatcagctgaagtggcaagagaaataatcaaaaaacatgatattgccttttccaaccgcccacaatctacagctgctaaaatattactttgtggatgatgcaatgatataaaaaacaaaaatattgaacatgttgaaaaccataagtaatacactcagatcaaacagggaagagaaaaaaaataattttcacaggtatctttctcttattatttccactagctcaaatctgattggtgtgttttatgtaaagggaggaatagacttagtaatcaagattgagagcactccatcttatntaaaaaac

SEQ ID NO: 5851 - DNA, 422 bp, Glycine max
  unsure (1)..(422): unsure at all n locations
tgttaacaagacgaatgttggcaaaagtccnccttgccatcacctcatcattgcctcgacgacttccataagaattgaagtccttgcgttccaccccatgctcaacaaggtatttggcagcaggactgtccttgtgaatgcttccagctggagaaatatgatcagtggttatactgtcaccaaaattcagtaggcaataagcatcttttacaccatgaggtccaggaggatccatggtcatgctcttgaagtaagggggttcatggatatatgttgagtcagggtcccatgagtatagagtgtcagcaggaacttgtagttgattccacattgggttccctttggtaatagcctcatatgtacttcgaaacatctcaggcaacacactggattggacaacctaagataaaagtcacccaaag

SEQ ID NO: 5852 - DNA, 376 bp, Glycine max
agcttgtcctattatgtgaggatactcgatgatagaaaatatgaactgatctgtgttaagtaatgtcatggtgtgggtagcttctaatcatatcttgcaaccttttccaagcttcaggtagactctcttactgccattgcacaaattttctaatgtccctaatgtactgatccatcttcatgggagagaaatactttcttaagaaggcacttgtgcactggttccatgtagtgatgccactctcaagtggtgaacacaactagtcccttgcctttccattgagagagaaaggaaaaacataaagtctaacatactttgtcagtacacagttctatctcaccgtgttggtcaactgatgaacttcctcaagtgctat

SEQ ID NO: 5853 - DNA, 454 bp, Glycine max
  unsure (1)..(454): unsure at all n locations
ctggagcnttttacaataatgacagcaggaggaggctttcttatggaagtaataacgcccaatgaagtgacttatattgctatttttgctgcttgtagtcactctgggatggaggatgaaggcctgcatttgttccatacaatgaaagctacccatggggttgaacctataggtgaccattatgcttgtcttgtggacttgcttggcacatccggtcgagtcaaagaggcctattaactgatcaatacaatgccatctcaatttgaacaaagtatatgcatggagtatcttgcttggtgcctgtacgattcaccagagtgtagaatttggtgaaattgcagcaaatcacctgtttgtcttggagccaaatgtagctaaccattatgttctaatgtccaacatatactcctcagctggactatgggaccaggcattgcgagtacctaatacaatg

SEQ ID NO: 5854 - DNA, 447 bp, Glycine max
  unsure (1)..(447): unsure at all n locations
atactaagcttgagcacatcaaacgaagataactntatattcggatgtgcgattgagtcccggtatatatcgagaggctccaaattgaaaacggaagctcatatcaaattcaaaggacaataactttttactcggatgtgcaatagagtcccgtaatatatcgaaacactccagattgaaaatggaagctcgtatcaaattcaaacgacaataactttttactcagatctccaatagagtcccgtaatatatcacaactctccaaattgaaattggaagctcgtatcaaattcaaacgacattcacttttaacttggatgtccgattgagtcccgtaatatatcgagaccgctcaaattgaaagcagaagctctaagcaaattcaaacgacaataacttcctattcggatgtccgatcaagtccgtaatatatcgagacgctctaaa

SEQ ID NO: 5855 - DNA, 397 bp, Glycine max
cgacaataacttttactcggatgtctgattcagtccccgaatatatcgagacgctcgaaattgaatgttgaacctctgagcaaatgcaaacgaaaataattttttcttggatgtctttttgagacccgtaatatatcgagacgctcgaaattgaatgttgaagctcttagcaaattcaaacgataataactttctactcggatgtctgattgagtgctgtaatatatcgagacgctcaaaattgaatgttgaacctctgagcaaatgcaaacgacaataatctttttctcggatgtgttgttgagccccgtaatataacgagacggctcaaattgaatggtgacctctgagcaaaatcaaaccggaatatcttttttcttgaatgtttgaatgagtc

SEQ ID NO: 5856 - DNA, 398 bp, Glycine max
  unsure (1)..(398): unsure at all n locations
agcttgaaggcaaactggatgcattggttaactnggtaacccagctggccttgaatcagaaatctgtacctgttgcaaaggtttgtggtttgtgctcctctgctgaccaccatacagacctttgcccttccatgcagcaacctggagcaattgagccgcctgaagcttatgctgcaaatatttacaatagacctcttcaacctcagcagcaaaatcaaccacagcagaacaattacgaacctttcagcaatagatacaaccctggatggaggaatcaccctaacctcagatggtccaaccctcagcaacaacaatagcagcctgctccttccttccaaaatgttgctggcccaagcagacctacattcctccaccaatccaacaacaagcacaacccc

SEQ ID NO: 5857 - DNA, 460 bp, Glycine max
ctaagcttaggctgctcaattgctccaggttgctgcatggaagggcataggtctgtatggtggtcagcagaggagcacaaaccacaaacccttgcgacaggtacagatttctgattcaaggccagctgggttaccaagttaaccaatgcatccagttttccttcaagcttcttagtttcagatgatgcagatgggtttgtagctacctcatgcactcctctaatgactatggcatcatttctggcgctaaactgctgggagttggaggccatcttctcaattaaatttctggcttcagcaggagtcatgtctccaagggctccaccactggcagcatctatcatacttctctccatattactgagtccttcataaaaatgttggagaagaagctgttctgaaatctgatggtgagggcaactggcacatagtttcttaaatcgcttccagtactcataca

SEQ ID NO: 5858 - DNA, 428 bp, Glycine max
agcttgtgtcacactttcaattgtcgaagctgaatacatagctgcaagaagttgttgtgctcaaagtctttggatgaagcaacaatgatgtaagctccattggagcttgtaggcctaggatcttcttcatcaatggattcctttgcttcttggaagatgaatggcagcggaatggagaaaggaagagagagaggagacgccacttcaaggagaagatgagtctagaagaagctcaccaccataggaggccatggataagagcttggaggaagaatgagatgaatgaacggagagggagagaagagcacgatattttgtgctctagatgagctttgagatctgaaagttaatatgcaaagatcaaagctgaaaaaaatgcacacacatgacctctatttatagcctaagtgcacacacaatggagggaa

SEQ ID NO: 5859 - DNA, 367 bp, Glycine max
  unsure (1)..(367): unsure at all n locations
agcttcagggcaatgccaaacactntgatgcttcgtccagctgatggtaatgaaactgctggatcatacaaagttgctgtggttaacaggaagagaccctcaattcttgcaccttctaggcaaaagttgacccaacttccaggaacttctattgagggagttgaaaagggtggctacattatttcagacaactcgtcaggtaacaagcctgatgttattttgattggaactggttctgagttggaaattgctgctgctgctgctgaggatctaaggaaggaaggaaaagctgttagagttgtttcttttgttagctgggaactntntgatgagcagtcagatgaatacaaagagaggttctccctgc

SEQ ID NO: 5860 - DNA, 345 bp, Glycine max
  unsure (1)..(345): unsure at all n locations
agctngaaggtatgtacatgaccaaatctttagttaatcgtctttacctaaagcagtctttgtattcgtttaaaatgcatgaagatagatcagtaggagaacaattggatttgtttaataaactgattctagatcttgaaaatatcgatgtcactattgatgatgaggatcaagctttgttattgttgtgctctntgcctaagagttactctcatttcaaagagactttattgtttggaagagattttgtttctcttgatgaagtgcaggctgctctgaattcacaggaattgaatgaaagaaaggaaaagaagtcctctacaagtggtgaaagggtgacagcaa

SEQ ID NO: 5861 - DNA, 364 bp, Glycine max
caagaatagcaacttcctcataaaagatgcgatggggatagggctgagcaccgggaaagatgaaacttcccctggtgtaattcacaaatctaacattgagggaaagcatttcagcaaatttcaatatgggtgggattgcaagcagtagctttgtagcaccacaggttttgatgatgatcttgtatgcataaacaaagagactggactcatacagaacataggagtcgacatgatcatttctgagagatgaaacaatggtgcaagcagccggtgtaagtatctcatccaactgggactttgcaagagcttctaaacccattccctcagggtcagcaaaaagtccggctggaaaaaggatatttcc

SEQ ID NO: 5862 - DNA, 446 bp, Glycine max
tcgtaaatctctataaggcctcaaacaatctccaagggcgtggtttgacaggctaacaatagttgtcaagcaagatggttttgctcaatgccaaacaaaccatactatgtttgttaagcattctctggatggaaagatagctttgtttattgtttatgtagatgatatcataattctaggagacgattatgatcaaataaatcatctgaagaatcttctagccgaggaatttgaagtcaaggatctacgccagctcaagtattttctagggatggaaattgctcggataaagaatggtatttttgtttctcaaagaaagtacactctagatttacttcaagaaacggggatgcttggatgcaaagcagccaatgctaccatagaaccagtcaaaaggagtgaagaggagagtgtagcagctgacaaagatagatatcacagtctag

SEQ ID NO: 5863 - DNA, 425 bp, Glycine max
tgtcataaaattgattgataaaaacaactagagaaaattaccagccattaacaacaacgggccagtaatgagctttagttggagcatctaatcgatgaacaataactggatcagccttcatactagaaattgagaaacctaacagactatgaaatgatgctcatcagaactgcataatgaatcacaaaagacaagggctgattgctaataactgtggcgacaaacctgccatataaagagaagtcataaatgaccctgtataaactctatcaacagccaatccatgttctagttgtaattctggaactgattcttcagctgtaatcattagtaccattgtacgagtgccacctaacctgcatatgaagaatcatttcactaaacattctataggaaaaatatcgtcacaaggaatcttgaacatc

SEQ ID NO: 5864 - DNA, 454 bp, Glycine max
  unsure (1)..(454): unsure at all n locations
tgtcttaagtgtttatatatcaacttgtgatatgtactatcaaaatagttagttaggagtaaaagtcttgtgtgcatgagcttggttctggtacccttgatggaatgtaatgtgccatgcaatctttttacgtattatttattcaaatttttttgagaattaattattttgaaattcaagagcttataaaaaaatccaatttttaatgtgacaaattttgatgaggcccgatcacaaaaatcatgagatttccttcttatttatttaatttttccttttatctttaaatacttttattaccgtatcaaactatcaattattttaattgccctttaattccttcttatttatttaattttcccttttgtctttaagcatattatcccctagttcctaatttcgtttaatgatcccattagctctcttggtacggtatcaacaaaactttnttctc

SEQ ID NO: 5865 - DNA, 427 bp, Glycine max
  unsure (1)..(427): unsure at all n locations
agcttgngactgccagattgggtaaaatttcagtgcagcttttaattggacaaatgcagcttgcgccacttctctccattgaaaactgtcctttttaagaagctggtgtaagggtttaacaatctttccataatcttttatgagccttctatagtaccctcttagcccttaaaatccccacaggctgttaatatctttaggtactctttagattctggtgagtggcgagaaccacggagcttctactttcttgggtcttctgacaccccttcagctgagataacatgtcccatatattccagatttggtcaacccacactgtgtgtccttttggtcatcactagcttatttcttataaatgcttgcaagttgcaacaccttcctcaaatgatgaccttgatctttactatgcgaacgtctggacagt

SEQ ID NO: 5866 - DNA, 470 bp, Glycine max
  unsure (1)..(470): unsure at all n locations
ctctccactaagttgcctgatgcctgaaatgtcttttctgatggtattggtcctagatgcagggaagaatttctccaagaacaccattttaaggtcatcccagctgacaatggacctgngagcaatagtatagccaatcttgtgccactccctccaaagaatgaggaaaagcctttagaaagatatgatcttcttggacatcagggggcttcatggtggaacaaacaatatggaactccttaagatgcttatgaggatcttcacctgcaagaccatgaaacttgggcaacaaatgtattanttcagtcttgagaacatatggaacaccctcatcaggatattgaatgcacaagctttcataagtaaaatcaggtgcatccatctccctaagagtcctcccacgaggtggaggttgagtcatgttctctntatgaaaattagtagtggaatgctcaaaatcagaatattca

SEQ ID NO: 5867 - DNA, 422 bp, Glycine max
  unsure (1)..(422): unsure at all n locations
agcttcttatccaaggctcatcttggtggtgaagctccttcttccatggcttattccctagtggatggtgcctcctctcacctcttctcctttgtcttccggtgcatctccatggtggaaaatcaccattaaaggacctcattgaagctcgaagatccagcctccatagaagccccacaagtaagcttccatcaacacatgagctcaaagggaagcttccaatctggtggttgcatgataggagaggtggttagccttttcctcaactcctcaaatgcctctttgcagggttggtcaagcacaaagcctatatgtcctttataagaagcttggacaatggcagggcaatactgctgacatctgnatgaatctcctatagaaacttgcatgtccaagaaaagaatgcacttcccaccaaaagc

SEQ ID NO: 5868 - DNA, 399 bp, Glycine max
agcttggttatctccttcttcactacatcaagaatcaccgggttgagtcttctctgtggctgtcttactggtttagctccatcctctaaatttattcgatgcatacatgtggatgggctaataccaggaatgtctgccagggtccagcctatagccttcttatgcttcttgagaacagataaaaacttctcctcttgctcaccagcaagggatgcagatataattactggaaaacttttgctatcatccaagtaagcgtattttaaatttgatggcagaggcttcagttctggtgtggccggctggataatggtacaaggagatggtttctcaccctgcacctcataaagaaagcacacgtatgtgtacttctcgaaacatggttagttctatctgact

SEQ ID NO: 5869 - DNA, 403 bp, Glycine max
agcttgtggtgcaaaagattacatctatacttaggaatctttgatggggcagcctccaagactccattaagattccttgggtgaggtgggacatagtctgcctacctaagagtaaaggtgggttatggatcaaagatttgattaaattcaacgaggctttgcttgctaaatgggggtgggagttggcaaataatcagaatcagttgtgggccacaattctattgtgtagatatggcggttggagggattcgatttctcatacgaactgcagtttatactctccttggtggagagacctcaatgttatcttcaagcagcagcaaagcaccacaattggtaaaaatagctttattttgccataggtaaggacggtccatggaatacaaaccaagtacttattggc

SEQ ID NO: 5870 - DNA, 486 bp, Glycine max
tgctattacggaactataaaactaagcttctctttgtgcaactgtctcatcctctttttcaggtgtagaatgaagcttgacaggttcaggtgcaggtgttgctactggtggaggcacttgaatttggttgctagacctcaaggtgatggcactcacatttttcggattttgcacagtttgtgaaggcaatttgtcagaattttgggactgagcttggttcatctgagtagccatctgccccatctgatttgtcagactttgaatggaggctcttatctcttgctgaaattgcatattatgcatggtcattttgcctcactaactcttctaagggaggttgaggaggagcctaagttgcttgttgtctttgtggtgactgctgctattgctgttgctgtattggaggaggaacatatggcttgcttggaccagcaacattttgaaaaggagggacagactgttgttgttgtggaggacttgtccatc

SEQ ID NO: 5871 - DNA, 451 bp, Glycine max
  unsure (1)..(451): unsure at all n locations
tgtntaccccatgttgagtntgcttacaataaagctgttcatatcactactaattgttctccttttgaagttgtttatgtttgtaacccactaacttctcttgatcttttgcctatgcctaatgtttctatttttaagcataaagaaggtcaagtaaaggcggtctatgtgaagaagcttcatgagagagtcaaagatcaaattgacaggaaaaataaaagctatgctaaacaagccaacaaagggagaaagaaggttgtcttcgaacctggagattgtgtttgggtgcacatgagaaaagaaaggtttatggaacaaaggaaatcaaagcttcaaccaaggggagatggaccattttaagtgcttgaaagaatcaatgacaatgcttacaaagttgagctacccagtgagtataatgttagttccaccttcaatgtctctgacttatctc

SEQ ID NO: 5872 - DNA, 464 bp, Glycine max
  unsure (1)..(464): unsure at all n locations
tcccaagttnttaagttcttcctgaacactggcctcatttatgttcccacagtcctattaacaacttccgtttgtccatcggtttgcgggtgacaagtggttgaccataacaatttattgcccaacttgctccacaaagtcctccaaaaatgacttaggaacttagagtccctatcactaacaatgctccttggcaaaccatggagtctcacaatctccttgaaaaacaaatcactcacatgggaagcatcatcaacttttttacatggaataaaatgagccattttagaaaacctatcaacaaccacaaaaatggaatctctaccattgcttgtttttgcgcagcccaaaacaaaatccatggataaatcaatccaaggatactccggaattggcaatggagtatacaatccatgaggctttaccttagactgtgcctttntacatacaatgcaatgttcaca

SEQ ID NO: 5873 - DNA, 229 bp, Glycine max
  unsure (1)..(229): unsure at all n locations
gctgagaatgggaatcgcactagcaatactacgcatgctccaatcttatgtggatgacacattaacgnatcacaattatggggctccgaaaaggggtgataatggagaattctctaagctatcactacgcatagctacaaactctaaggtggaggacacatgaactattactcatttcatggggctccgaatagattgagaatggataattgcactaaaaaatcactac

SEQ ID NO: 5874 - DNA, 480 bp, Glycine max
  unsure (1)..(480): unsure at all n locations
gcaagctaagctccttaactgacaaggctcttatatttgaatatatccttgtggaaccttcacccgacgaagacactgacaaaaacttatattcttcttcttggacaaagtatggcaggctgggggcaagtaaattttcttcccatcaaaccttggatgcaactgtgatcatatacccatatcagctagatcttgacagatattcaagccatccttcgtcttgccttgaatgttaaggagcgttccaatcacactgtcacaaacattnttctccacatgcataacatcaatacaatgtctaacctcaagatcacaccagtaaggaagatcaaagaanatgaacctcttcttccatatgcaactctgacttttatccttcttttgggtcttcccaaatacaatattcaggtgtngaacccgttgatataccttgctactagtcaacagtatcggcgcaatatcatgctcttgaacttcatt

SEQ ID NO: 5875 - DNA, 433 bp, Glycine max
  unsure (1)..(433): unsure at all n locations
tctcatcataccggtaatgccttctcctacaatattaaagagcaagggagctagagggtccncttgtctcaaaccccttgtaggtgtaaattccttagaggggctaccattaatcaaaactaatatagaagctgagtggaggcaagctgatatccatgatctccattttgggcagaaccccaatctaaacagcatgtagtccaaaaaagaccaagacatngaatcatatggcctttcaaaatccaccttaaatatcatcactggtttcttgtttctccttgcctcctcaaccacctcattgagtatcaagataccatggaggatatgtcttcctttaatgaaggcagactgcctttcatcaattaacccatccataacagacctcaatctattagacaacaacttggctataattntatacatacaacctatc

SEQ ID NO: 5876 - DNA, 302 bp, Glycine max
  unsure (1)..(302): unsure at all n locations
catgcaagcttaatggaggaaaagaangatagatagaattggtgggagcacganattgaaggagaaaagagagggagagaagttgaactttgaatgatgtagctccatgtggagcttgtaggccttggatgttcatcatcaatggagtcctttgcttcttaaagatcaatggtagtgaaatggagaaggaagaaagattattggagacgccacttcaaggagaagatgagtcaagaacaagctcaccaccataggaagccatggataagagcttgaaggtagaagaagatgagtggagggag

SEQ ID NO: 5877 - DNA, 389 bp, Glycine max
  unsure (1)..(389): unsure at all n locations
taagctggaggggcaactggatgcgtnggtcaacttggtaacccagctggccttgaatcatanatctgtacctgtcgcaagggtttgtggtttgtgctcctctgctgaccaccatacagacctttgcccttccatgcagcaacctgtagcaattgagcaacctgaagcttatgctgcaaatatntataatagacctcctcaacctcagcagaataatcaaccacagcagagcaattatgacctttccagcaacagatacaaccatggatggaggaatcaccctaaccttagatggtgcagcccttagcaacaacaacagcagcctgctccttccttccataatgctgctggcccaagcagaccatacattccttcaccaatccaacaac

SEQ ID NO: 5878 - DNA, 400 bp, Glycine max
agcttcaacattcaatttcaagcgttccgatattttacaggactcatatcggatagccgagcaaaaagttattgtcgtttgatattgctcagagcttcggtattcaatttcgagcgtctcgatatattaagggactgaatcagacattcgagtaaaaagttattatcgtttgaatttgcacagaacttcggtattccattttgagcaactcgatatattacgggactcaatcaaacattcgagtaacaagttattgtcgttggaatttggtcagagcttcgataatcaatttcgagcgtctcaatatattacgggacttagtcagacatccgagtaatacgttattgtcgtttgaatttactcagagcttcggtcttcaatttcgagcgtctcaacatat

SEQ ID NO: 5879 - DNA, 385 bp, Glycine max
ctcgacaagacagtcacactgtgcttcttaacaagattaacttgtgaaatctactctgaagatacatgggataatacccataattataacactccctctcaagctggagcatattaattatatgcaccatgcttggaacatataaactgaattctatgccccctcaaggatttagtcaaaatatctgctggctgatcattggaaataatgaattcagttacaatctcttttgacagtagcttctgccgaataaagtgacagtctatctctatgtgcttggttctctcatggaatactggattggaagctatatgcctagcagcctgattatcacaatacaacatcatattgcatcacttgctgaatataactctgcagaattagt

SEQ ID NO: 5880 - DNA, 444 bp, Glycine max
  unsure (1)..(444): unsure at all n locations
gctaatgtccttaactgccaagactctaatatntgaagagtatccttatggaaccttcacccgactaagacactgacaaaaacttatctntctccttttggacaaagtatggcaggctgggggcaagttaattttcttcccgtcagaccttggatgcaactgtgatcgtgtgcccatatcagctagatcttgacgggtattcaagccatccttcgtcttgccttgaatgttaagcagcgtcccaatcacactgacgcaaacatctttctccacatgcataacatcaatacaatgtctaacgtcaagatcagactattacggaagatctaagaacatagaccatctctttcatatgcaactcttacttatatccttcttttgggtctgtctaaatcaatattcatgtgtagtacacgctcatatacctgctcaccatacaacagt

SEQ ID NO: 5881 - DNA, 301 bp, Glycine max
  unsure (1)..(301): unsure at all n locations
agtcactgcagctgcagctcgcccataagctnggtaacagtgaacatatgccctcaagtagtgttctaccacgcgattcanaacttctgtctacccatcactntgtgggtgatatgaagagctcatgtgcagcaaggttccactcgcatgaaagagttcctgccaaaagcgactaatgaacagggggtctctatcggagaccaagctcctaggaatcccatggagtttgactacgatgttgacgaataaggaagcaggcatgtgtgccatatgtgcagttcgaaggattcctaagtgaatt

SEQ ID NO: 5882 - DNA, 326 bp, Glycine max
  unsure (1)..(326): unsure at all n locations
ttgagggtcctctcttaggcaatcatggttcacagctccaaactcataaatggaggacacatgaatgacaacgcaattcattcatggngctccgaaaaagggtaagaatggaggatttgcttgatggtcctctcttaggcaatcatggaacacaactccatactcgaaagtggaggacacacgaacaggcctaaccaataacattcatgttgctccaaataaggatgagaatggatgatctcgatgagggtcctatctagggcattattgaacacatctcctaacttgattttggatgtcacatgaatgacaacgcaatttattca

SEQ ID NO: 5883 - DNA, 434 bp, Glycine max
  unsure (1)..(434): unsure at all n locations
atccttaagtcacctgcggcatgcaagcttcttcagaaagatgtagaattgtgcttgaccaaccttacaaataggaaattgaggagctgaggaggaggcttaccacctctcccattatgcaaccactagattgggagcttccatttaagctcatgtgtgatgcctccaattatgcacttagggttgttttgtcacagagagttgataaattaacacatgtcattgcttacgcctcacacactctagatgcagcccaagtcaattacaccactactgaaaatgagcttttagatattgcttttgcattatantaaattagatcttatntgctntgctcccatattactgtctatgtgacaccctctacctcgacatacatataaataagaaaaacattantttattcatttagactttcagagaccaacataatc

SEQ ID NO: 5884 - DNA, 465 bp, Glycine max
  unsure (1)..(465): unsure at all n locations
taagcttgaataatctgtgaggctgtgatcaggatatctactcggctataaatgtgggtgctaatggtttggaatgagagcctagaaagaagaggtcactactctcgaaagagtagcattgtcaaaaaaactcatgcatgcttntacaaacatcctcctcaatagtctcccagaaagatntataaaaattaaagccatagtcatcagggcctgtgctttgtcctccttcacaacaccaaacaacattctttatctcttctgaggtgagagacatatatatccttgaatactcctcctctgaaagttgtttaaatcgaactccatctagaattggtctatgtatccctggctcacataacaaatattcaaagtgtgatctgattgtgggttaaacctcatcgacctcatgcacccaactctgatcagtattaatgcgctctagcttatntatactagttcttattc

SEQ ID NO: 5885 - DNA, 395 bp, Glycine max
taagctcgatcctcgctgttatgctgcaataaagcttcacgacatatacgttccttatggagctcaaggcctgaacctccgcgtcaaactcctttgacttcccagcagcgaacttattcccaagcatgggagtgctgctccacgacgactttctcctggcggtgacatcggtgttccatatatgcttcaccgctagttctttctcgttggaaagcgtgaccctgtacacgttccctgaacctgctattactatgagattctcctgcttgatggaatctagaatcttcccctccttgaaactcaacacgtggaacgatatcacgtcccacgtgattttcttcaaggaactgctcccgtatttctctgcctccttcatcctcctcttgagttgcatg

SEQ ID NO: 5886 - DNA, 244 bp, Glycine max
  unsure (1)..(244): unsure at all n locations
agaagatgagtggagggagagggagagaangagtactatatnctgtgcctcacatgaggtctgaactttgaagtgtaattctcaaatgatcaaagttgaaacaatgcacacacatggcctctatttatagcctaagtgccacacaaaattggagggaatattgaatttcaattcaaatctcacttgaatatgaaattgaatntgtggagccaaaatttcgctaactatgattagtgaattttag

SEQ ID NO: 5887 - DNA, 356 bp, Glycine max
  unsure (1)..(356): unsure at all n locations
tacatcttaatatgtattattacattntattaattcattttaaatgcatntaaatgtttcatttattattattatgtaaggtaataaatgtcttattatttattccctcctccttcaaagcaaagaacaatgttnttcattaacaacaagattcaaactcattaaactattcttatcaattaaactaactctgttgatgtcaaatgattcattctataattcttaatgtatcttctatcatacttttaagataatatctactcattagtttgttttgataatatatattctcattaattcacttggattgttcgttattttctatgccacctacatttactcgattgtgcatatat

SEQ ID NO: 5888 - DNA, 266 bp, Glycine max
  unsure (1)..(266): unsure at all n locations
agctntactagacttatttcggcttgagttgaatacccaagacttgagtttggcttattacctatantgtttttgtaaagtctcgacttgtcttacatgatagcctagcttagcctacaagcctatatagaagctcgcttaaaggtctttgatcaattaattattttaaaacctaatgaaatactaattaanaaaaaaagaaacttattaaatttcatataagtaatgtacaaattgaaaaataattgataaacaaaatcatattg

SEQ ID NO: 5889 - DNA, 165 bp, Glycine max
  unsure (1)..(165): unsure at all n locations
acttgaatctcgaatgaatcatagcgaagaaagaactccacaacgaaaagcctcgaaaccaatgtgacgaagtctntttcggcgcattgcttgttcccatgtgttggagactcagtctcaggcccattggaccacatcacgtgcttgaggagctactaccacttc

SEQ ID NO: 5890 - DNA, 451 bp, Glycine max
  unsure (1)..(451): unsure at all n locations
agcttctggnctctttagtcaatgttcaattcatacgctcagcaataccattatgttaagtgatgtaagtccatgtggagcttgtaggcctntgattttcttcatcaatggagttctttgcttcttgaagatcatggcaacaaaatggagatggaaatcatcgaagcagaatcgaaatggaagaaagatgattggagacgctacttcaaagggaagatgagtcaagtacaagttcactaccataggaagccatggataagagcttgaataagaagaagatgaggggagggagaaggaccacgaaattttgtgcatcaaatgaggtctgaactttgaagtaattctcanatgataaaagttgaaaaatgcacatacatgacctctatttatagcctaagtgtcacacanaattggagggaagattgaatntctattcanatctcacttgaat

SEQ ID NO: 5891 - DNA, 341 bp, Glycine max
tggagaacgcatgaacgaaaatgcaattcatggtgctccgaataagggttgaggatggagaatcgcactaagaaatcactacgcatggctccaaactcgtgggtggaggacgcatgaacgaaaacgcaattcatggggctccgaaaaagggttgaggatggagaatcacactaagcaatcactacgcatggctccaaactcgtgggtggaggacgcatgaacgaaaacgcaattcatggggctccgacaaagggttgagaatggagaattacactaagcaatcactacgcatggctccaaactcgtgggtggagggcgcatgaacgaaaacgcaattcatg

SEQ ID NO: 5892 - DNA, 417 bp, Glycine max
  unsure (1)..(417): unsure at all n locations
gcttcaagatcaagatctaagattcaagattcaagaatcaagagaagacttaatcaagataagtatgaaaaggttttttcaaaaactgagtagcacatggttttttctcaaaacatgtttaccaaagagtttttactctctggtaatcgattaccaaattgttgtaatcgattaccaatagcaaaaaggatttgaaaaagttttcaaatgaatttccaacgttccaattgattgcaaaaagttgtaatcgattataatgtttttggtaatcgattaccagtgcctttgaacgttgaaattcaaattcaaaagtgaagagtcacatcctttcacataaaagctttgtgtaatcgattacactgatntggtaatcgattaccagtgattgtttctgaataaatcacaagatgtaactct

SEQ ID NO: 5893 - DNA, 502 bp, Glycine max
  unsure (1)..(502): unsure at all n locations
ggatcctctaagtcacctgcggcactgcaagcttgatctgcctctatattntcaacaatcccatcctccctccagataatgagtttctggtggagagtagatggcacagccccaactccatggatccattcccttcctaatagcaagttaaaattagccttggactgtatcaccaggaataaagttggtcgaactatactgcctacagcaacatctacttgaatggctcccaaagaatagccagttttaccctcataattcgaaagcacaatgttgtgggcagatagatcagtgtcatgtttcccgatcttgtagagcatagatcgaggcattaagttaacagccgctcctccatctatgagcactntgttgattccaacattctcaacttttgccctgatgaanagaggtttgagatgacttntcatccgaanatctggcttttcgaaatagggctaatggtcttccacacagccattggtcataacatagtagcacactg

SEQ ID NO: 5894 - DNA, 400 bp, Glycine max
  unsure (1)..(400): unsure at all n locations
taaacattcaactntgtgcgtctcgatatattattggactcaatcagacatccgagataaaagttattgtcgtctgaattggcttaaagcttaaacattcaactttgagcgtctcgatatattacgggactcaatcagacatccgagtaaaaagttattgctcgttgaattggctcagaggttcaacattctatttcgagcgtctcgatatatcacgggactcgatcagacatcctagtaaaaagttatagtcgggtgaattgctcacacgtcaacattcaatatttagcgtctcgaatattataggactcaatcgcacattcgagtaaacagttattgactgttaaattggcgcatagggtcatcattcaatttcgagcgcctcgatatattacaggac

SEQ ID NO: 5895 - DNA, 451 bp, Glycine max
  unsure (1)..(451): unsure at all n locations
ctaagcttacanaattcttattcaatgcaattccagcctttgcatcataaatacttgatctagaacaataatttaaaaaaaaggttaacagaccaatcactaacaagaaaatgaataatgtcaagttgtcaacttaaaaaaggcaattgtgttcaataactttacagctgttaacataatttatacctgttatcaccaacaaagtcggtggagaccacatcatcttcagtgtaaccaagaattcccttcaacttgccctctgattcctccctgagaaagacaacattatataagacaatacaattgagaaggaccaatcccaaaatggaggcctttattaataacaagtaatgaaaatttgctttaagacccaataatacacaacatatatcattagaggagaatcanagaattctgtcattacttgatnagcattttaatttcatcatat

SEQ ID NO: 5896 - DNA, 469 bp, Glycine max
  unsure (1)..(469): unsure at all n locations
agcttgtgaaaatacaattcaacccttcaacccctttcttgtagtanttttgtcacttcacatgtaacatattctccatacttgtaaagatcttttttataaaagatttaaaatgatttaatcatttaacctttaaagattttgaataaaaacaagaatttgagagtttcaattagaaggaaagtaaggaaataactataataattaagaaattatactcacataacctattattaaaaacctaacatgacattgataataatagtgttataattaaaccataaattatctataaggaatggaataacttaatcatttcacatggttnttaatctctcatttaggttattaaaatttcttgatggattagtgtagaaaggtctaggttcgataggtgtgattaaggattgagtttaggggtaatttaagcccacctaacanaaaaaagatgggggatagataaatcaag

SEQ ID NO: 5897 - DNA, 403 bp, Glycine max
  unsure (1)..(403): unsure at all n locations
ggtgttgcttatgtcttggcatcatcaaaaccttttacacatacattcacacaaatcattggccaaacacttgtgaatcaattgagtattcttctaagatcttcaatgatgcaagcctaccccccaagggcattggatagaagactccaagaagattggaccagagatgcaagagaaggccctanggttctcatgagccttagggtagatttcaggcccatgggctaagtatgaactcacttatctttgtacgcattagattaaggtttcattatttttgggccttgtatatagggctccataatgtagataaggtaccctagaaatgtaggatttttcagcctttgtattttatggcacctagactagttcttgtattaggggtagttttgaatttcacatg

SEQ ID NO: 5898 - DNA, 472 bp, Glycine max
  unsure (1)..(472): unsure at all n locations
agcttcgatattcaacttcagtgctggaccatgccatgactntctgcttcctggaccaccaggatatcaagtttgagccaagaaagatagctgctcttgatgtggaacgtctgtcatcaatatctgatgcccaatcagcatcatagaaagcatagagtgccatatgttttgaaacagaagcaggttgaaggaataaaccatgaaatatagtacccttgagatatcttaatatccttttgaccacaacccaatgagaatccaatggattagccatatactgacaaaccttattaacaacataactaatctcaggtctagtaagggtagcatactgcagggcacccactactgacctatagagagttggatcatgaaataaatcagctccatgtttggacaatntacagtttgtaaccataggagtagagatagagtgtgcctcagccattttgagtttatgaagtagatctct

SEQ ID NO: 5899 - DNA, 403 bp, Glycine max
tcagcttctaatacaataatgtcagaatgcaatgctacagaaacatatggaacttcgttaagttcaactagacaaggcattttatatattaagaactaactagtcaaattgttccaaaaaatgaagtggatgtagaaaagaatgcatcaataactttaagttctaggagctataccttcccaagtaaattggagtgccaaggaaaatttgggacagaatgacagaaaacccaggttgaagtggatagtaaagggcaaccaaagttggccccaagatcttattgctccatataaggagtccatagtttagggcagatgtaatacttccctgaacaaataagggaatttgctttgtgaaaaatctaaatgtttataaatccatcaaaatcacccgttagaagatg

SEQ ID NO: 5900 - DNA, 387 bp, Glycine max
agcttgcaagagcgcggcccatagaatcccttgtacgatttcttattcgacgacgaggatgatggaggcggcttgcgtggctacaaagatggctcgcttggcggctaagtgagcgaacttggagtaagggcaggcgtcgttcaaggctttgcaagagagtgttaactcctcatcccaagtgctattatggcccttctcttctctgcgggagagggcctgccagaagtaaaagcccactcgctgagtggggtttccgagctgggaaacggattctcgcaaacggcttagggattccgcggcctgatccggctccgttgcagccagagaggcgcactccgccagagctttgaggaggggatgtacggaggagtccgagccggagtccac

SEQ ID NO: 5901 - DNA, 439 bp, Glycine max
  unsure (1)..(439): unsure at all n locations
agctngaacaccaggtgaggtaatatccacctgtgatgataaatagagaatgggaaacacgatttaggtggatgaaagacattacagtcttaattaaaaacaaggtggataaataaagagaaggagaatattcgaagccaggtcatgagtagtacatctggcagatctgaagcaatcaagtactcattaattgttgttgtgttttcatatatcttgtcagtaattccctctggtgcaggtccaccgttttccatattatatttaatcccaaaatcctgcaacaaggaaaccaaatgacagttacaatcattcatagttaatcttacaacccacaatgtctcagcataatatcataagggaacacccatcaactcctacatgtatgttatggaaatttcaccttactaacttaatattatgtcttgttgatatctgagag

SEQ ID NO: 5902 - DNA, 471 bp, Glycine max
agctgagcacatggacttgtgtgttgcccagtttcatcatatcttccgtaatacttatcacttctatcatatctaataattttcacatttatgtctaattgccattttacttcattgtagtaaatttctaaggcatccattgcctaagaaatctcgggcagtaagtagacataaccgtaatgtgaataatcatcaataatggtgataaaatatcattcttttccgaaagaactaacatcaaaaggtccacacatatcagtatgcacaatttcaagaagctgagtgcttcttggagctcctttctttgtatgttttgcttgttttccctcaatacaatccacacaaatatttagatccgtaaaatctagataatgaagaattcattctttattaatctttccatcctttctctaagaatgtgacctaaacgtttatgccacaagagaacagatcgttcattcactaaattat

SEQ ID NO: 5903 - DNA, 379 bp, Glycine max
  unsure (1)..(379): unsure at all n locations
tggtatctctaactagagggttnttgggagtatatctcatgttcatgttccagacgagagaagagcataaattgatgcaaaagtgacatactcatcttcattggttatgattcaagctcaaaagggtacaagttgtacaacccatactacaagaagatggtagtcagtagagatgtggtgttcggcgaagaatgacaatgggactttgagactcatgaaaattaggggtgggaataggccaggccaggccaggctttaaaaggcctgagcctatcctacaatgaattctttaggcctgagcctgtcctatagcctatcaaagacttttattttggctcggcctagccttattaaaagcctagtctggcctgatagtctt

SEQ ID NO: 5904 - DNA, 474 bp, Glycine max
  unsure (1)..(474): unsure at all n locations
agcttcccagctgatgctctctagaaaataattttcagaattgttctcattcttatgtgaccaaagcacagcttcaaatttggccactttagatgtatcacacaatcaaataaaggggcaactcccagattgttggaaatcagtaaagcaattactgttccttgatttaagcagcaataaattgtcagggaagattcctatgtccatgggcgcccttgttaatatggaagccttggttttacgaaacaatggtttaatgggtgagttgccttcttctntgaagaattgcatcagtttatttatgctggacctgagtgaaaatatgttgtcgggtccaataccatcatggattggagaaagatgcagcaattgataatcttgaacatgcgaggaaatcacctctcaggaaatgtacccattcatctcttgtatttgaaccgtattcaatagttggatctttcaaggaataacttg

SEQ ID NO: 5905 - DNA, 451 bp, Glycine max
  unsure (1)..(451): unsure at all n locations
cttgcatgggatctntaccttccacagcacattaaaagcactatcctgattttcatcaatatggtcccgcatgagcatcttgtacacattccccactgtgtatacaccagatgcatcttccttccaaatccacttgtcttctcggtccgggtgaatgcatcaaaaagttgccttctccattgaaaatcccactcccagcctgcagctgcaaaacttcccatctgctatatgtgttggggagattcgaggggtacacctgtggaccacgagccaccacataaagagacctgacaccacactctaacccaaaaccttaaggctcaggtttatgggtcttctcctcacttatatggtgctcaaccgtttcacttctacccgatgtaggacttcacctcacacttgtaacccaacacatctctccctcaagtgtgagtctcttcacatggtagtc

SEQ ID NO: 5906 - DNA, 501 bp, Glycine max
  unsure (1)..(501): unsure at all n locations
tgaaggtaggagaagatgagtggagggagagggagagaaggagtacgaaaatttgtgcctcanatgaggtctgaactttgaagtgtaattctcaaatgatcaaagttgaaaaaatgcacacacatggcctctatttatagcctaagtgccacacaaaattggagggaaatttgaatttcaattcaaatttcacttgaatttgaaattgaatttgtggagccaaaatttcactaactatgattagtgaattttagctatggctcagcccactaatccaagatcaagtccaagattctccactaagggtgcttaggtgtcatgagacatgtagagcatgaaggacatgcacaaagtgtgactatatgatgtggcaatggngtgtagcaagcaaatgctcacctccccttataanaattaattggattgggcttctcccaattcaattaaatntatttcccaacacacacatcanatattcacttaatgcgtgtgaaaatacaa

SEQ ID NO: 5907 - DNA, 424 bp, Glycine max
  unsure (1)..(424): unsure at all n locations
agcttgctntntgcaattccaagacacttgagatcttccaagtatattacatgtcctatttgtacttttctatctaatgtgaatcctacataatcagaatatgaaaaccctgttaagtttaaggaggtgcctttgggataccacaaacctacattggttgtgcccttaagatacttgataatccctttaacagcagttaagtgagattctttaggattggactggtatcttgcacataagtaaatgcttagcatgatatccggtctacttgcagttaggtagagaagtgatccaatcatacctctgtatcttgattcatccactgttatacctttctcatctaagtcaaagtaggttgatctagccaaaggagtagatgtttctttgcattttttcgtaccanacttctntatcagttctatgc

SEQ ID NO: 5908 - DNA, 392 bp, Glycine max
  unsure (1)..(392): unsure at all n locations
agcttctatggagaatgttagtgttatcaaggctattcttagaagctttgaaatagcttctggcctgagaatcaattttgctaagagccaactcggagcaattggtcagtctgaacagtggatcagatgtgctgctgatttcttgaactgtggaccactacaacttcctttntgctacctagggctgcttataggtgttaatccgagaaggaaggtggtgtgggaacctattatcaataaattcgaggctagattgaacaaatggaggcagagaagtatatcaatggctggtagaatcaccctaactaatgttgtcttaacagctctgcccttgttttacatgtctnttntcagggccccttcaggagtgattaacaagctcactaccattc

SEQ ID NO: 5909 - DNA, 480 bp, Glycine max
agcttgttgcagcggagaatatcacagtgatgcgcccaataaaaaaaaaataatgattcaaatagaatatttaagttgaaaagtttcaagcggtgaatatgtattaattaattattattttattgatagaaagagagagattaaattaaggtggatctaaaaaataaataggagagagaaaataatttctttcaagaaatcataataattagttagtgataattagttaacgaataaataattaataagacttatcctatttaaagttccacatgttaaaaaattcctaacaatatcaggaattaaagtgcaaatttactcacacaagagtgatgaactgatgattaagagaactttctcccgtatgttgtgcggacataattaatttgaatgaaattaattaatgtaagtttcctaaaatttctttaatttaaaatcaaatctagaatttataactaattttcaacataaaactaaata

SEQ ID NO: 5910 - DNA, 436 bp, Glycine max
  unsure (1)..(436): unsure at all n locations
cttctggtttcaattggagcgtttcgatatatttctggactcaatcggacatcttagtaaaacgttattgtcgttagattntgctcatagcttctgttttcaatttcgagcgtctcgatatatttcgggacttaatcggacgttcgagtaaaaagttattgtcgtttgaatttgctcagagcttcgaaaatcaattttgatcgtctcaatctattacgggactccatctgacatccgagtaaaaagttatttattgtcgtttgaatttgctcagagcttctgttttcaatttcgaccatctcgatatattacgggacttcatcgaacattcgagtaaaaagttattgttggttgaattttctcagagcttctggtttcaatttcgagggtctcgatatattacgggactccattggacattcgaggtaaaattatt

SEQ ID NO: 5911 - DNA, 364 bp, Glycine max
  unsure (1)..(364): unsure at all n locations
ntaacctcattgtctctcatagtctntagatgtgggagccaatccaatccttgtgttcggactctcagccacttatgatagccgccaatgatcccattactgcttcccctaagctctctgtcctttcttcatgccgcatcccatgccttgcgaactccttggagtaccctcgcgttgtggtcactaaaatctcgtgcgatgaaaggcgtgattgatgcaagctccattggagcttgtaggcctaggatcttcttcaccaatggattcctttgcttcttggaagataaatggcagcggaatggagaaggaagagagagaggagacgccacttcaaggagaagatgagtctagaagaagctcacca

SEQ ID NO: 5912 - DNA, 476 bp, Glycine max
  unsure (1)..(476): unsure at all n locations
agcttattcaacaatggcaaatcacataacaaatttttaagaaactcggcctcactagtagttgtgtctaaagcaataattgttgcttccatgctagaatgcgaaataatagtttgttcagtagatttccatgatactgcaccaccaactaaagtaaagacaaccacttgtcgattttgtttcattagaatcagaaatccaatttgcatcactaaacccctcaattacatcctaatctaccaactgcatatgcaatgtcagacccagagaagtttgtcaaatgcaacaaagaaccaataatttgaggatatttatgtgaaaaaattcctttactcaaacttttctttaacttaatggatgagtcataagaagtagaaacatgtttcacatcaaaataattaaacttcttcaatagcttttcaacataatgtgattgggttaaaaccatgttatcattnttctttataagcttaata

SEQ ID NO: 5913 - DNA, 458 bp, Glycine max
  unsure (1)..(458): unsure at all n locations
agcttggtgggtttgaaagtgtcatgaataanattattaaagttagtattattctttaatcaaattgatgtttctcctccataattcatgtaataaaaattggtattaaaaattctatatatgaatcgaattgttgtagttcagttgacaacaacacacaataaatttatggaagaggatgatttgagtttgattttcacataatacatgtgattaagttccagatcaaggattagtcccataatcgacccaaacaccctaagtacaattgttaaaaaaaaattagtatatattaggagagtaaaattttaatttggattgaaaattaacacacaaattacttatttttggtaaagaataaaatctgatagaattattataaatgatgaagttttcttttttaaacattcataactgattcattatgctgaaatcatatattaccattaaaaaagtag

SEQ ID NO: 5914 - DNA, 437 bp, Glycine max
  unsure (1)..(437): unsure at all n locations
agctngtaagacaagaaagtgcatctgagatattatatgccctaccactgattgagtaagcctgaagatggcacatttgtggagcaagatttcgttattaaaggacaattaggtcttgccatacaatagatttgacccatcaggcctgtttgaaattatttaacttactgcaatgaatcctagcttggtaaataattcttcaccgactcatcccatatggagaaaagtagcttatggtggtatgcaacctgtttatgatgacaatcatacagatgaatctttccttgaaggaatggtcatgaatgccagtgtttgtaaacgggacatgctaaaggtgatgctggactcggtttccatgtctgaatatttatgcattgttgctcttgttgacttggtctggacttgacacttgcatcaactattgatatatatctctc

SEQ ID NO: 5915 - DNA, 424 bp, Glycine max
  unsure (1)..(424): unsure at all n locations
tccactcattagtgcacatctccttcaagaatntagcatatcttggaattntctttatttcatccagcagaggtatgtttacctctacttttctaaatgtttccaagatctccctctccgcctcttccattnttttgttggaaattgctcttggagggaatggaagagggatatgatacttttgtaaatcagaattaccagtggaagattcacctgcatagaaattgttaggtaacttactctttaaatttttgtcatcatctttttctggagtagagtgaggttgggcaggttcatttgcggatgaggaagatgctactagttgaggtccttgacactgctttcccaacctcaatgtaatggcactcacanttttgggattctggacagatngaaaaaagtaatctatcagaattctgggact

SEQ ID NO: 5916 - DNA, 415 bp, Glycine max
  unsure (1)..(415): unsure at all n locations
gctcctgtnttagcttttacccgatttactcaactcatttgaagttgaatgtgatgctagtggagttggcattgnggctgttttgatacaaaacaaaaggcctatagcttatttctcggagaaattgggaggagccagattgaactattgcacctatgacaaagagttctatgccattgtgagagctcttgatcattggaatcattanttgcgttctaatcactttatattgcattcagatcatgagtcattgaagtatatcaatgggcagcagaagttgagtccaaggcatgctaaatgggttgaatttcttcaatcttttaatntctcttcaaaatacaaggatggtaagagtaatgtggtggctgatgcactttcaaaganggatgctttaatttcaattctttgaaactcg

SEQ ID NO: 5917 - DNA, 474 bp, Glycine max
  unsure (1)..(474): unsure at all n locations
agcttctggtgggacatcttgacttgctttccaatctgacattcaccacagattctgccttcttctattttcagattggggatgcctctaacagcacctttgtcaatgattttcttcatgcctcttaagtgcagatgtccaaatctttgatgccatattctgacttcatcttctttggaggatagacatgtggaggagtagctggtttcttgaggtgtccataggtagcagttgtcctttgatctgctgcccttcattagaacttcactcttctcatttgtcaccaagcattatgactntgtgaagtntacattgaatccttcatcacacagctgactgatgctgatcaagtttgcagtcagtcccttcaccagcagtactttgttcagactangaagtccatcatgaactagctntcccattccaatgatctttcctttagagccatctccaaatgtcacataactagtggag

SEQ ID NO: 5918 - DNA, 447 bp, Glycine max
  unsure (1)..(447): unsure at all n locations
ggtagcatagtctgatggggtggagttcacagtcagagagtgttagtgccttcaaacttcgttagcagatatttattgttttcttttgctgagtatctgaagtaaatgttttatccatggcaggtcattattgtcctgcattgtcaaaagctgttaaaaccatgaagaagggagagaaagtgcttctgacagttaagccacaatgtaagcgccgcataatgttttggcgattagctattactaacattcttcatgaaagtttctttctcgtttctctaatttggagttatgttcgtttctttgtcgggtcatagatggatntggtgagaaggggaagccacaacaaggtgatgaaggtgcagttccaccatatgcaacattgcagattactcttgaattatgttcatggacaactgtttctgaagttactgatgacaagaaggtcat

SEQ ID NO: 5919 - DNA, 470 bp, Glycine max
  unsure (1)..(470): unsure at all n locations
agctntgacgtgtcgggatcgtatcgagttgacttggaatatccaagtcgtacaaggacattcctgtgtgacaaaaacaattgaaccgcgatatttgtcgctntctcttctccttctctgatgacgagtcagaattcggtgacgagttgcaacttgatgagtttgactttagctttagcttcttcgagagatcaaaatccacaagcattatgtgacctgtttcttggatcatgatgttctctggctttaaatccctatacactactccaaagttgtgcaaatactccaatgctagaaccaattccactgcgtaaaaccttcaccatggaaaataaaaaattgtatcanatcatcataatcattcatacttcaccgntcttgagagtgaggaaaatggactaaattcgttctatttggcacatacaaatcatataaaanaaataatcacacataaatacctataataacac

SEQ ID NO: 5920 - DNA, 477 bp, Glycine max
  unsure (1)..(477): unsure at all n locations
agctntntcctcttaataatgaagagttaggtcccattnttgtgttgggcaacacacccatctttgctaaaggaaacatcaagtccactatcacataattgacttatgctaagcaaattatgtttaagccctttaacaaaaagtacattatcaatgggaggatagggatcaatacttatctttcctactcttgctatctttcccttctaatttccttcgaaagtgactattccaccatgcataggagtcaagcattgaacatatacttttctgatgtcctgtgacgtaagcaaccactatccaggtaccatgattgatgtgttctttttgtggttgaatatatctgcaacataaattattttctaattaggtacccaaattttcttaagtcctctgttgttagttcttaaagcattggacgatccagtctttggtagatgtctacacttagatgtcaggtgtccaacctttccacat

SEQ ID NO: 5921 - DNA, 414 bp, Glycine max
  unsure (1)..(414): unsure at all n locations
agctntgtgttttctcacagataggacatgcatgatgccctttcacactgtatccacttaaatttccatatgctggaaaatcattaatagtacaaaacaccattgtgcgtaacctgaacgtctgctgcacatttgcatcccacacatctaccccttcttcccacaattgtttcaagtcttcgattaatggtgtaagatacacatcaatatcattccctggctgccttggacccgcgatcatcatacacaggataatgtatttacgcaaaatgcacaaccatgggggaaggttgtaaatcatcagtaaaacaggccaggaactgtggttgctacttaagctaccataaggattcattccatcagaagcaagagcaagccttatgttccttggctcatccccaaactctggataca

SEQ ID NO: 5922 - DNA, 389 bp, Glycine max
  unsure (1)..(389): unsure at all n locations
tgtgcatccaataccctgatgaggatgtcccatatgttcttaanactggactgattcatttgcttccaaagtttcatggccttgcaggtgaagacccgcacaaacatttgaaggaatttcgtattgtctgctccaccatgaaacccccagatgtccaagaggaccacatatttctgaaggctttccctcatttnttagaaagagtggcaaaggactggctgtattaccttgctccaaggtccatcacgagctgggataacctgaagagagtattcttagaaaaattttccctgcttccaggaccacagccatcaggaaggatatctcangtattagacaactcagtggagagagcctgtgtgaatactgggagagaattaaatactatg

SEQ ID NO: 5923 - DNA, 464 bp, Glycine max
  unsure (1)..(464): unsure at all n locations
anngcttgatttcaaatcttttttcattntgaatcaaattggctagtttacgaaaaactttgaaagcatttttttcaagtataataacaaggtccatgtaaatcttgaatagtcatccataattactaaggcataatagtcccctcctatgctcatagttctagaaggaccaaacaagtctaaattcaagagttcaagtggtatagaggttgaaatcatgtttttagatttaagacctcttagaatttccactaaagaatcaagtacaaacactatgcacatacaattccctaattctactcttcccttgaaccctacaagaggaagaacaagagttgaaacccaatcaactcacacaaacccttggtaactctaaccaagatcaaaaacaagaaagaaatcagaattggattgaatgcacctttatgtgtagatcaacatcttcaagctctttgataaatgac

SEQ ID NO: 5924 - DNA, 481 bp, Glycine max
  unsure (1)..(481): unsure at all n locations
agctntattggcatgcgaccaacttccttatgaagtaagtaaaaagttgaaatctactttaaaatcattgcttaatcaggatatttatacttcattgcctcttatgaaattttaagtatgatatttcaaatacaagaaaattcagcatgtctttctcatatttaatgtagtatatatatcaaagtagaaaagttgcatgcatgcctcattgggcattgttttacatgcatagaaaacaacaacaacatttgttttattcatatttagttntaattgaatttgtcacatataaacaatgaaatataactttaattntaatattatatatttagttaaataaataactttattaaatatttgatgatccccattagaataatttattaataatttaagttnttatatnggatgtgttagggacaaaataacacaagaaattgttgtaattgcanaannaaaaaatatgatatgatatattatt

SEQ ID NO: 5925 - DNA, 380 bp, Glycine max
  unsure (1)..(380): unsure at all n locations
agtttaataattcattattgttgtcacttactccttctgttaaggattagtttttcctcatgttggacaagtggcctcaataacttaagaaggggtgaattaatttcccattaacaaagttttaacccccttctaaatgatagactcagaatgcagaagaagaagcagcaatcaattgaataatattctttaaacatgcaagacaaaattgattgcaataaaatataagagataagggaagagagaaatgcaaactcgatttatactggtttggccactccccatgcctacgtccagtcctcaagcaacccacttgagatttccactctctntgaaaactctnttacaaagtctgaaccacacgggacaacccttccctt

SEQ ID NO: 5926 - DNA, 412 bp, Glycine max
  unsure (1)..(412): unsure at all n locations
gtgacctataaatctcagcttcttagaaggttcgttcctaatttctctacaattgcatcttctctcaatgagctggtgaagaagaatgtggcatttacctgnggtgaaaaacaagagcaagtctttgctttgctcanagaaaagcttactaaggcacctgttctagctcttcctgactnttctaaaacttttgagctagaatgtgatgcctctggagtgggagttggagctgtattgttacaaggtgggcaccctattgcttattttagtgaaaaacttcatagtgccaccctcaactaccccacctatgataaagagctntatgccttaataagagccctccaaacttgggaacattaccttgtttccaaggaattngtcattcatagtgatcatcaatcacttaagtaca

SEQ ID NO: 5927 - DNA, 475 bp, Glycine max
  unsure (1)..(475): unsure at all n locations
ctgcagctggacttntatgtttgngaacctctccttcctcaggtgtacccaaacccaatcacctggttcaagcacgactttctttctgcttttgttggttntccttgcatagcttgcatttttgttttcaatttgagccttcacttgcttatgcaacttcttcacatacttagctttagcctctgcgtccttatgcttaaacatagcaatgttagtcataggcaacaaatcaagaggtgtcaaaggattaaatccatacactatctcaaatggtgaacaattagttgtgctatggacagcccgattataggcaaactaaacatgaggcaaacatgcttcccaagatttaagattnttctttaaaatagtcctaagtagtatgcctaaagtcctattgactacctcagtttgaccatcagtntgtgggtgacaagtagtagaaaacaacaatntagtaccaatcttacccctcaag

SEQ ID NO: 5928 - DNA, 446 bp, Glycine max
  unsure (1)..(446): unsure at all n locations
agctngtagaacaccccanaggataatctgttgttgatgcaaagtgggtgttaagaaacaagctggaagaaataggtaaggatgtgaggaacaagcctaggcttgtggccaaaggttactcacaacaggaaggtatagattatactaaaacttttgctcttgttgctcatctaagggcgatactcattttactatcctttgctactcatcatggtatgatgttgtatcaaatggatgtaaactgtgtgttcctcaatggacttatcaaggaagaagtctatgtgaaacaaccccctgcgtttgagagttctatctatcctcatcatgttttcaaacttaataaagctntgtgtggtttaaagcaagcttcttgagctcggtatgaaaagttaagttcgtttttaattgaaaatggctttataagaggaaaggtaaatactatgcta

SEQ ID NO: 5929 - DNA, 438 bp, Glycine max
tccttgagaaaattcctaaagaagctagagcttagctacacacacctctctaatagctaagctcacctccttgagatgagaagctagagcttagctacacaccccctataatagctaagctcacccccatgacaaaatacatgaaaatacaaaaaagtccctactacaaagactactcaaaatgcctcgaaatacaaggctaaaaccctatactactagaatggccgaaatacaaggcctaaacaaaggtaaaatctattctaatatttacaaagataagcaggctcatacttagcccatgggctcgaaatctaccttaaggctcatgagaaccctagggccttcccttggatctctggcccaatctacttggagtcttctatccaatgcccttgcgggatatgattgtatcattcctccctccttctcattctctct

SEQ ID NO: 5930 - DNA, 462 bp, Glycine max
  unsure (1)..(462): unsure at all n locations
ctcagcttaacatcagaccacttcagggtgctggaactacttcatatggacttgatggggcctatgcaagttgaaagccttggaggaaagaggtatgcctatgttgttgtggatgatttctccagatttacctgggtcaactttatcagagagaaatcagacacctttgaagtattcaaagagttgagtctaagacttcaaagagaaaaagactgtgtcatcaagagaattaggagtgaccatggcagagagnttgaaaacagcaagtttactgaattctgcacatctgaaggcatcactcatgagttctctgcagccattacaccacaacaaaatggcatagttgaaaggaanaacatgactnntgcagaagctgctanggtcatgcttcatgccaaagaacttccctataatctctgggctgaagccatgaacacagcatgctatatncacaacagagtc

SEQ ID NO: 5931 - DNA, 451 bp, Glycine max
tcactccatcactctccttgatatttaattcctgtagtaatgtgttcaaccagacagcttgacaaacactcattgcagctgcaccatacatgaatatgtaacctgttgtactctttctgtcatctctgtctcctccccaatctgcatcaatatatcccattaattcctctgagatgctattgtctttatttggaaataaaattccagcattgatggtcccttttatgaaccttagaatcctcttggcagctacgagatgaggaattctgggtcctatcgtatatctacttaccagtccaacagcaaattccatatcacgtctcgaatgacacaagtacctgagagaaccaacaatctgtgtgaactcagttgcatcgactttgtcttcctttccctcctgttcaagtacaagacctgcctccgctggtgttgctgcttgaatacattcaac

SEQ ID NO: 5932 - DNA, 442 bp, Glycine max
tagaaactgaattgcgctctcataattaccaaatcggacacttgattctgaaataatgtgtgatgcaagtgattatgcactacgagcagtttttggtcaaaggaaaaataaaattgttcatgtcatacactatgcaagtaaggttttaaatgaatctcaaattaacaatgccacaattgagaaagaatttcttgaagtagtgtatgcttaggaaaactttagattttatttgataggatctaaagttgtggtttttactgatcatgctgctataagatatatgttggttaaagctgattgtgaaccccgacttatctgttggattttattgttgcaggaatttgatttggacatttaggatgacaatggaagtgaatatactgtggctgatcatctttctaggctaactattgatgatgtgacttcacaatgaccttatatt

SEQ ID NO: 5933 - DNA, 295 bp, Glycine max
atgaggtcatttcttcattcatcttcgaagagaaagtcgaggatctctgtatattccataaggtctttgggagtaagattagtgtccttggattatacgttgatgatattctgctcgcaacttatgataatggtatgctatttgaggtgaaacaatttctctcgaataactctgctatgaaggatatgggagaggcatcttatgtcataggcatcaagatccatttatagagatctcgaggaatgctatgcttgtctcaagaaacctatttcaccaagttttagagagagttaca

SEQ ID NO: 5934 - DNA, 440 bp, Glycine max
  unsure (1)..(440): unsure at all n locations
tgtgccgaaacactctagggtggggtgctatgtatgccattttggctntagntcagtgatagaagcaatgttcaatgactgccaactggtgctgttgcctttcaagggtgaccagtttttcatggccaaggatttggaggcaagggtagaggtgaataagggtgatgaagatgggttctttcacaaagaggatatattggaggcattgaaaactatcattgtgaaggatagcaaagaaccagggaagcacacaagagaaaaccacatgaaatggtgcaagtttttgtcaaataaggaaattcagaacanattcatcacaggtcttgctgcccagttgaagtccatggcttagctaggattcggatttcttggactagaagctattatttaaaatctaaatcttcacattttcttagtgtgactcttaattccgatgggaa

SEQ ID NO: 5935 - DNA, 356 bp, Glycine max
  unsure (1)..(356): unsure at all n locations
agcttgcctgcagccaacataaaaccaaagattgctataagacaatttagaataacaaatttaactaaccaaccatattatataattccacaagtaataatcaactgctatctaaacacatactctntgggatgctgggccattgctcgaacagattttttatggtttgtaagagttgacattgttttacctgaatgaaaatgattgcatcatgtgtcagattgagcatataatcactacacagacaagcaagaagataggaaaaaataaaaccataaattaccatatctaaggtcccacatcttgatggtagtgtcatgagaaacctgtacaactaggggatcctgtaacaaaat

SEQ ID NO: 5936 - DNA, 438 bp, Glycine max
  unsure (1)..(438): unsure at all n locations
agcttgtaatcgattacacatatactgtaatttattaccagagcagattttcagaaaatattctcaacagtcacatctttttatgtggttcttgaatggctatcaaaggcctatatatatgtgacttgagacaggaatttgctaagagtttttcagaacaaaaaggtcttatcctcttataaagcaaaatcgttttatcctcttacaaattccttggccaaattacttgtgattcaataaggaattatttgagtgctcaaattgttcaatctatctctttcaagagagatttcttcttttcttcttcttcattttgaaaagggattaagagaccgagggtctcttgttgtgaaagaattctaaacacanaggagggttgtccttgtgtgtttagaacttgtaaaagggaattacaagatagtggaactctcaagcgtg

SEQ ID NO: 5937 - DNA, 407 bp, Glycine max
  unsure (1)..(407): unsure at all n locations
cgtanggttaaagtctcacaattgtcacgtgctcatgcaatatattgtttagccgggctatacgagacatcttgctaaacaaagtcaggttcacgataactcgcatgtgatttttcttccatgctatatgtagcaaagtgattgatccagtaatgtttgatgagttggaaaatgatgccacaattatactctgccaattggagatgtattttccccatgctttctttgacatcatgattcacttgattgcgcatctggtcagagaaatcaaatgtngtggtcctgtttatctacggtggatgtacccggttgagcgatacatgaagatcttaatagggtatacaaagaatctatatcgtctggaagcatctattggtgagaggtacattgcagaagaagccatagaa

SEQ ID NO: 5938 - DNA, 328 bp, Glycine max
  unsure (1)..(328): unsure at all n locations
agctntaacaatctccttcacatgcattgctttcaacctgtgatactcttgtgtctccctcgatcccatcatttgctcctgtagcaaaacgaagctcgtgttgagctctagttgcaacaacaaccctaaacacgttgtcgggagaaccaccataacttccacgctattgaacacccacacaaccctatttgcctccatattcgccatcgagtaccacttcccccttcccttacaatactccacgtcggtcgacgacacctcatctgtggcccgcctcgtccaccccgagttcagcaccatcacggagatcgaggaggtgagcaccacg

SEQ ID NO: 5939 - DNA, 249 bp, Glycine max
agcttttatttgtcatcctttcttccatgtttgcaagcattggcaatttcaagaatgttcatgtggaagtcatgaatgcattcttcctccttcatcttcagattttcgaattttgtagccaatagttgcaatctggacatcttcactttggaggttccttcatgagtggttttcataatctcccatgcatccttggcaactgtgcatgtgttgatcaatctgaagatattcttgtcaactccattgaat

SEQ ID NO: 5940 - DNA, 236 bp, Glycine max
  unsure (1)..(236): unsure at all n locations
nggttcaactgagtagccatctgccccatctaatnngnctttctcttaatgtatgctctcgtctcttgctgaaattgcatattctggatggtcatttgcctcactaactcctctaaggaaggttgagaaggggcctgacttgcttgttgtctttgtcgctattgctgcattggatgaggaacatatggcctgcttatactagcaacattctagaaatgagggacaaattgttgttg

SEQ ID NO: 5941 - DNA, 251 bp, Glycine max
cgtctcgatatatatgcgtctttatcttttatccggagtaaagggtatgacctcttgaatatctcgagagcttccgatgatcaatttcgagcggttcaatatattatgcgcctgcagcggacctatgtgtggaaagttatgaccattggaatgtccccacagctctctgtgttcagtttctaagtcctcaatatataatgcgcctgagtctgacattctacgtgtaaagtcatgatccattctaattgctc

SEQ ID NO: 5942 - DNA, 402 bp, Glycine max
  unsure (1)..(402): unsure at all n locations
ctaagctccattgtcaattcgagcgtctcngaanttatgtgcctgtttgtgacccccagnaaatgcatgaccattcgaatatctcgagagcattcgttgctcaattatcgagcgtctctatatgtgatgcgcccgaatcggacctatgagtgaaatataatgaccatttgattttcttaagagcattcgttgttcaatttccagcagctagatattttatgacgctgaatcggaccttcgagtgaaaattattgaccatttgaatttcgtaagagctttcgttgttcaattccggcgtctctttttatatgcgcctgaaccggaccttcgattaaaagtatgaccatttgattattcgcgagagcttctttgtgtaattcaagcgtctttatattgatgccc

SEQ ID NO: 5943 - DNA, 407 bp, Glycine max
ctcatagcatcacgagcctctccataaaagaactccattttacctatgtttgtgaaaacctctgcagctcctataaggaagtactgaggcacttgccataagattgacaagggaacggtttcaagatcatagttgtttgtttttctgataatatcaaggcgaacaacctctaatatgccagctacaatcatggagattatggagattacaaggccgatgcctatgcgttgaagctgtgtgaatccttgttcatggccaatgaactttcttgctaatgggacaatcatgctatcatacactggggccctaaagatgacactaagggtgtctaacagggagagggatgctgctggaatttaaattgttgaccaatgtgtggtccatttgttgctctgtgacacaacatg

SEQ ID NO: 5944 - DNA, 410 bp, Glycine max
  unsure (1)..(410): unsure at all n locations
agcttcaagaaccaaaaataaaattattatgttattaggaaattatttcaaaaataaaaatctattagaaaaaaaataaaatttaaatatttattaaagataaaaatatatttaaacctttaaaatattcttactaaaaagaacacttggctagtaatactcgagtaacaaagaaagttatgatatgggtatttagtaattataactatcttgtaaacattacttaaattttntaataatttatatacaggactntaattttttttgtcaaaataataacatttattttgaaaacatattcatatgtataacatattatatggctggtgaatataggatatacattttttaaaaaaatatgtataaacaatgataatatactccatttgaanatacttgtaataaatata

SEQ ID NO: 5945 - DNA, 401 bp, Glycine max
agcttgtaattgattacacacatactgtaatctattaccagaggattttttctgattacattctcaacagtcacatctttttatctgattcttaaatggccatcaaaggcttatatatatgtgacttgagacacgaattttacaagattttttaagaacaaaaaggtcttatcctcttaaaaagcaaaatcgttttatcctcttacaaattccttggccaatacacttgtgattcaataaggaattatttgagtgctcaaattgttcaatctatctctctcaagagagatatcttcttctcttcttctttattctgaaaagggattaatagaccgacggtctgttgttgtgaaagaattctatacacaaatgaatgattgtccttgtgtgtttataacttg

SEQ ID NO: 5946 - DNA, 426 bp, Glycine max
  unsure (1)..(426): unsure at all n locations
ggacacttaaaactaagctgtctctaattctatgaattagtcaccttcttcctttgtgttaatatccgcacgtngcatttcagtactacagtacttcaagtcaagttgttttttgctcaccttttcacgaagaaagtgaaatctcgtctctatgtgttttgatcatctgagcgctactggattcatggtccatctgatattgggtttgttggccacatacaatacaactagcctctgaatttctatctccaattcttcaagtacagagtctagccataaggcgtggtatgcaacatagcatgctgcaatgtactcagcctctcaggaagatatatgccactacacgttgttntctctgaacaccacctttgatatgaaacatgtcctcatcaagcatgttggtgcacctacgaacttgaagagata

SEQ ID NO: 5947 - DNA, 444 bp, Glycine max
  unsure (1)..(444): unsure at all n locations
tgctaacccatggaagctcctaatatctattacactctnctgtgtgggccattcttggatggccttgattatctcagggtccacttggaccccatttctaccaactacaaaacctaagaaaactatattatctacacaaaaggtacacttctctatatttgcatagagggtgtttttcctaaagactgaaagaacttgtctgagatgtcctaaatgatcatctagcctcctactatacactaaaatatcatcaaaataaacaactacaaatctacctatgaaatcccttaagacatgatgcataagcctcataaaggtgcttggtgcattagtgagcccaaaaggcatcactagccattcatacaaaccaaacttggtcttgaaagcagtttccactcatcaccctttgtatcctgattggtgataacactttaaatcaatttt

SEQ ID NO: 5948 - DNA, 399 bp, Glycine max
agcttcctatttatctccatcatgagtaactttggtcttcaatctcactaaaagtgaatcattaagtgtgattgagattggtagtcatacaaaagtgttggacaaatggcctcaaatatcttaagaagggggggttcaattaagatattacaaactatttccccaattaaaattctactttgatttcaatacaagttccaagttcccttatagatgaatttctaaataatgattcacattaaacaatctaaatataaatgtaaagcaataataaataatagagtttaaggaaagagaaagtgcatactcaaatttatactggttcggccacacccttgtgcctacgttcagtccccaagcaacccgcttgagagatttactatcttgtaaaattcttta

SEQ ID NO: 5949 - DNA, 323 bp, Glycine max
agcttccatcttaatatatataaattatcattctgtaaatcatcccgaatgggtaagtcctcatcagacacatgttcgatccgactcaaatgatcagcaactaaattttatgctctgctcctatcacggatctccaagtcaaattcttggagccaaagcatccatcagatcaacctatgctttgaatcagccttctgcaacaagtactttaaagctgcatgatcagtataaacaataatgcgagtaccaagcaaataagaatgaaatttttcaagagcaaaaactatggctagtagctctttcttagtagtagtataattcgc

SEQ ID NO: 5950 - DNA, 424 bp, Glycine max
  unsure (1)..(424): unsure at all n locations
tcaagtgactaaatatattacttctnttgttgggagacaatattaatatttaatatataactttntttacttaattactttttacctatataattagattagattatgtttttcggtaagatatttcaactaatttttaaattgtttttactagctgaacaacttaagtaatttttttaatgaattttagtattttttttaaatattagttgaattagtattttaaaaatattaatttctaaatttttttttcttttctttttgttcttgatatttttatcaaattttctaattattatttntaaataaattataattgtattgtttttatattattttacactctttaattattctaaccactaattgtatcaaatatttattaattatttagatttgtagcatcatgttactgactgttagt

SEQ ID NO: 5951 - DNA, 436 bp, Glycine max
  unsure (1)..(436): unsure at all n locations
tattgaacgtgatgatgtgctatcctgtgtgtagagtaattcttatcaaactcttgattattcatattttntttagcttgaaggctatagagaaagccatagttagctctgatcttggtatgactccaaataatgatggagaattgatacgactgagcatcccacagttgacatctgataggaggaaggtattctccagttccattgatgctgcagtgtctaagtttattttttctctgtcaattacattcttgttctcattgactgaaagtaatattcttaattggttttcatttcttatttaactattaacaaaatcgcatagaatcacctcttctacagtcatgacccatgagaaaactgatctctacagtgacttaatatgttgtttgccatgattccaatagtattagttatcaatttatcttgtctatga

SEQ ID NO: 5952 - DNA, 278 bp, Glycine max
  unsure (1)..(278): unsure at all n locations
agctnaacatcttataactgcttattcatttctgncttcgttggattcaaatagtaaaaagtctcaaaagccactagtgcactatcagtaataagtctaccaggaacgagtacactttgatttatactcactatagaaggaagaattaccttgagtctgtttgcaattgttttggcgatgagctcgaagataacattgcataggctgatcggtctaaataggcttgagtgagtaggcttctttaccttagggactagtgcaatgaatgtcttattcaa

SEQ ID NO: 5953 - DNA, 474 bp, Glycine max
  unsure (1)..(474): unsure at all n locations
ggatccttaagtcacctgcggcatgcaagcttggttatctccttctttactacatcaagaatcaccgggttgagtcttctctgtggttgtcttactggtttagctccatcctctaaatttattcgatgcatacatgtggatgggctaataccaggaatgtccgccagggtccagcctatagccttcttatgcttcttgagaactgacaacaacttctcctcttgctcatcagcaagggaggcagatataatcactggaaaactcttgatatcatccaagtaagcgtattttaaatttgatggcagaggcttcaattctggtgtggtcggctggatagcggtagaaggagatggtttctcagcctttacctcataaagaaagtcagaggtatgtgtacttcctgaaacatggntagtcctatctgactctataaaatcaatctcaagaggaaaacaccaccaccaggcatgcatg

SEQ ID NO: 5954 - DNA, 442 bp, Glycine max
agcttagcaaatggacctgtgtgttgcccagtttcatcatatcttccgtaatacttatcacctctatcatatctaataattttcacatttctttctaattgtctttttacttcattcttgtaaatttctaagacattcattgcttgagaaatctcaggcagtaagtagacataaccataatgtgaataattatcaataatggtgataaaatatcattcctttccgaaagaaataacatcaaaaggtccacaaatatagtatgcacaatttcaagaagctgagtgcttcttgtagctcttttctttgtatgttttgcttgtttttcccttaatacaacccacacaaatatttagatccataaaatctagataaggaagaatttcattctttattaatctttccatcctttctctagaaatgtgacctaaacgtttatgccaca

SEQ ID NO: 5955 - DNA, 426 bp, Glycine max
  unsure (1)..(426): unsure at all n locations
gcttgctnttatgtccttttattgctattattgttgaattatccttgaaaaattgtcttgttaaaactccattggtttagctttcatttcactttttttgtctttggttattgcttgtctctttgtttccttgtttgtgagttgccatatagggaattagaaaggaggattggtggcatcccttgaagaattagagtcaaaaagcaaggggccaaccaccttaagagctattcgactaagaagcactccaaattgagaacctttttgtaattntgcaattgacaatttacttactttcattgctttcaaattatgtaacaaaaaggtctttcattggatgtaagttaagagcctccaataggtcaccctacttccatttgtgtgtagtaattntaggtaattttcccttacgatatgagtgtttat

SEQ ID NO: 5956 - DNA, 350 bp, Glycine max
ggctgcagctatgtcgaaatgttcacaatagaccttctcaacctcagcagccatatcaaccacgacagaacaattatgacctttccagcaacagatacaaccctggatggaggaatcaccctaacctgagatgagacaaccctcaccaacaacagcagcctgctccttccttccaaatgctgctggcccaagcagaccatacattccttcaccaatcctacaacagcatcaaccccagatacaaccaacatgtgatgcccctccacaaccttccctcaaagaacttgtgaggcaaatgactatgctgaacatgcacgctcagcaagagaccagagcctccattcacagct

SEQ ID NO: 5957 - DNA, 453 bp, Glycine max
agcttaggaagatctgatgcagcattgcagttaacagctacacttaccaatggtgacacagaaaacttcatagctctaatggggtgtgcttcaatttctgtctcatttgttatagtagcattcttggtgatgaaatggtccaaaccagccaaggcaactgtgtttccacaaggaacatcctcaactgtttcatatttcttccccatccaaattgaagtcccctgaacactcttcacatacaggtctttcttctccccaggaacaaaatttggccccataattctagccttcatattagttgacaccttcccagagaagactcggccaaaagcataaaaccttcccttatcagatgtaggaatcatctttgacacataaagcattaggggcccttcagggtcacaatttctgatagcagaagcgtaagggtcatcaaggggaccctcatacaaa

SEQ ID NO: 5958 - DNA, 444 bp, Glycine max
  unsure (1)..(444): unsure at all n locations
agcttcaaggctaagtcttcatgttgctccttttatctctagcaaaattgaagccaacgggtgaagttgctaaatacaaggcatgattagtggccaaagggttactgcagaaatatgttttggattaccatgaagtctttgttctagttgcaagaattgaactaattagacttatggttgcaattgctagctaacggggttggtcattgtatcaattagatgtgaaattatcattcttaaatgggcccttagaaaaagtctatgtaagtcagccacttggatttgaagtgaaggttcaagaggacaaaatgtacaagctaaggaaggctttatatggcttgaaataaacacctcanatccggaacaagagaatagatagcttccttatgcaacaaaatttgtgagatgcacttctgaacatggtgtttgttacaaactcaacaa

SEQ ID NO: 5959 - DNA, 419 bp, Glycine max
  unsure (1)..(419): unsure at all n locations
agctttgatgcaacatttggagaggttaatgaaacaacgagatgatgcgctccatgagaggttggatcaaatggagaatagagatcataatgaagaagaaaggaggagaagagggaatgatggtgttcctagacaaaaccgaattgatggtattaaactcaacattcctccatttaaaggaaagaatgatccggaggcctacttggagtgggagatgaaaatagagcatgttttctcatgcaacaactatgaggaggaccagaaggtgaagcttgccgccacggagttttccgactatgctcttgtgtggtggaacaagctacaaaaggagagagcaagagatgaagagccaatgtgatgtgaatcttacggngcgcggatcgctngaacaggctgtatagtttttggatgacgccact

SEQ ID NO: 5960 - DNA, 447 bp, Glycine max
  unsure (1)..(447): unsure at all n locations
agcttcaagaatcaagtttcaaagaatcatgattcaagaataatcaagtttcaagattcaatcaagtttcaagaatccagattcaagaataatcaagatcaagattcaagactcaagattcaagaatcaagagaagactcaatcaagataagtactaaaaaagtttttcaaaacattgagtagcacaagaattttttataaaatcttttaccaaagagttttactctctggtaatcgattaccagaaggtagtaatcgattaccagtagccaacattgttttcaaaactgatttacaaagctgtaatcaattaccataatcttgtaattgattaagaatgttttaaaatgttagatttcaaatttcaagagtcacaactagtgataaaacatntttcaaataatttaaacttgtgtnatcgattacacaatacttgtaatcgattac

SEQ ID NO: 5961 - DNA, 443 bp, Glycine max
  unsure (1)..(443): unsure at all n locations
agcttccatcacatggagtcctcgacacagtgtgctaacgtacatgttggactatgcgagtcataggacttggtggtctgtggatgaccatatggagactatagtattcttggacgatcggcattgagtcttacacaaagagtgctgacaaccatgtcggtctgtatgatgtatctgcattgaagctcggaggccatggatcttcttcatcaatggagaccattgcttcttgaacattaatggcagaggaatggagaagaagaagaggttagaggagacgcctcttcatgaagaacatgagtctatatgaaccgtcccaccataagatgccatggataagagcttgaaggttggagatgatgagtggagggagatggagagacggggcactanatattgtgcctcacatgatgtctcatctttgaagtgtgattctcacatga

SEQ ID NO: 5962 - DNA, 442 bp, Glycine max
  unsure (1)..(442): unsure at all n locations
agctntcttgagaaaactttcttgagaagcttctttgagaaaacctccttgagaagctagagcttagctacacacacccctctaataactaagctcacctcattgagaagcttccttgaaaagattcctaaagaagctagagcttagctacacacacctctctaatagctaagctcacctccttgagatgagaagctataacttagctacacactccttataatagctaagctcaccccatgacaaaatacatgaaaatacaaaaaaagtccatactacaaagactactcaaaatgccttgaaatacaaggctaaaaccctataatactagaatggccaaaatacaaggcctaaacgaaggaaaaaacctattctaatatttacaaatataagcgggctcatacttagcccatgggctcaaaatctgccctaaggctcatga

SEQ ID NO: 5963 - DNA, 431 bp, Glycine max
agcttgagatgcaattttgatcatcttaatcgttttcattgcacgtttctcttgcatggctaaatatatctttgatatggtatcagagctcttctgatgaagagctctgctgcgcactcacctcctttttcatacttctctcaactttaatcattcatcatgaatgaaacaacactcagcaacatggaaagctacttgtacctacatccgagtgagaatccaaccattgctctcgtctctctagtcttggattcaaccaactaccattcatggagcaggtccatgatcactgcattgagcgccaagaacaaagtggaatttgtagatggaagcgtgcctgaaccattgaaaactgacagaacgtatggagcatgcgccgatgtaacaacatggtagtctcctggatcattcactcaatagctacctctatc

SEQ ID NO: 5964 - DNA, 449 bp, Glycine max
  unsure (1)..(449): unsure at all n locations
agcttagcttgagatgcctgacctttagcatacagtaagacatcatctgcgaacagtaaatgagaaacactagggccatttgaggtcaacttaactggcttccacctcacctcccatcagacactacctaagagatcatatcaccaagcctctccatacatgatacaaataaatatgggaacaatgggtctccctgacgaagccctctcacaggaataaaactattttttgttctacctccattccacatgatagaaatagaagtagatgacagagcatgtagaatcaaagacataatgttattaggaaaataaaaaaaataaaaaagagtttcccaccaaaaaaatcctagtccacacgatcatatgccttctccggatccaatttaaaaataaaatccctttcttccttttagatntatgcataaaatgaactaactcttgaagaat

SEQ ID NO: 5965 - DNA, 423 bp, Glycine max
agcttgaatcggacatccgtgtgaaaagttatgaccatttgaatttctcaagagcttccgttgttcaatttcgatcctctcgacatattatgcacccgaatcggacatctgtgtgaaaagtcatgatcatttgaatttctcgagagcttccgatgtttaatttcgagcgtatcgatatattataaccctgaatcggacctcagtgtgaaaagttatgaccatttgaatttgacgagagcttccgttgttcaatttcgaatatcactgtatgtgatgcgcctaaattggacattcgagttaaatgttatgaccatttgaatttctcaagagcttccgttgttcaattctgagcgtctcgatatgtgatttgcctgaatcggacatccgtgtgaaaagttatgaccatctgaatttctcaagagc

SEQ ID NO: 5966 - DNA, 452 bp, Glycine max
agcttccatcacatggagtcctcgacaaagggtgcaaacttctcatgtgggactttgtgtgtcattggacttgatggtctctggatgacgatatggagactaaagtagtcttggtcgataggcattgagtcttcgacaaagagtgcagacgaccatgttggtctctatgatgtagctccattggagcttgtaggccatggatcttcttcatcaatggagtccattgcttcttgaattttaatggcagtggaatggagaacaagaagagttgagaggagacgcctcttcatgaagaagatgagtctagaagaacctcaccaccatacgaagccatggattatagcttgaaggtacgagataattagtggatggagatggagagaatgggcacgaatatttgtgcctcatatgatgtctaaactttgaagtgtaattctcaaatgatcaaagtt

SEQ ID NO: 5967 - DNA, 439 bp, Glycine max
agcttggtgttaatcaccttgctgacctttctgttgaggaattcaaggcttcccgtaatggattcaagaggccccatgagtttagcacaacaacatttaagtatgaaaatgtgactgctattcctgcagccatagactggaggacaaaaggagctgttactccaatcaaagaccaaggtcaatgtggtaagataaagaacatcatataataagtactttattatgttccataaccatcattatttccttcatctcatttcaattatttccttcatctcattttatgtgacacatttaaaatattcctgcttcaattttttttatcactttaaaatataaaaaaaatactaattactttttttttttccaataacatcctgactactgcattgattagtccttctatttctactactgcaatacatttttggaaataata

SEQ ID NO: 5968 - DNA, 452 bp, Glycine max
agcttgtgtgtccctgaaattccttctctggaaggatgctccacaacccaattcatggatttcctgattgcacaaagtaatttcctcaaattcaatgatggcaacatctacaacacaatcagggaaatcgaaggtgcttacattgacttcatggatcgcatcagtggtgacgaaaacttgggcactggggtcattcaacacttcaaccattgagaagctatgaagcacggacacttcagccctttgtcgtgttcggtgtccgacacgcgtccgtgtcagtgtccgacacgcgtccgtgtcagcgtccgacaccgacacaacacccgtattacgttctatattttggacattacaggtgtccacgtgtccgtatccgtgtcgtgtccggtgtccgtgtcggtgtctgtgcttcatagttgagaagaaaaactccaaaggaaggcacatatgca

SEQ ID NO: 5969 - DNA, 437 bp, Glycine max
  unsure (1)..(437): unsure at all n locations
agcgtagtgganagaatcattgctccacttggcatgactaagaaactcttggcatctaaagttgccagtcatgaatagagtcttgtcatttaatgttttgtccatttcgctcttcagccataacccgttttgtaatttactgctgtagaatctatgctacagatggggagcaagattgacaccatcacaagcggctgaaaaagtaaaacacttcttcaaggattattctatcaatcgacacaaaatgactgtcttgacgccttcctaccatgctgaggtatgtatgtgaagacagagttgaatccttctggataactccttgattgggcttattatattctttgttggctaatgaaagttaatctttcgatcatcctgcaaagttattcaccacaggataatatgtttgatcttctccagcttctctataatgcaag

SEQ ID NO: 5970 - DNA, 431 bp, Glycine max
  unsure (1)..(431): unsure at all n locations
agcttctaaatacaataatatcataatgcattactatagaaaaggtgaaacttttataagttcaactagataagacattttattaagctttcaattcttctattttcacttcctatcaatgtactcaaccaatcagaaaccaactttggtgtaaagtcaacaaacattgaatgacggtgtaaaaaatctttataccgtcaatgtatatatattatttattcctttttttttaatgttctaccctttaaagttggtgagtagcgatcaagttagaaaataatgcatcaataacttgaagtggtaagagagctataccttccctagtaaattgtggtgccaaggaaaatttgcgacaggaaggcagacaatgcangttgaagtggattgtaaagggcaaccaaagctggccccaagatcttattgctccatgt

SEQ ID NO: 5971 - DNA, 351 bp, Glycine max
agctttgcccaaaaagttattgtctccatctttaagaaccatgtttcctgattctaacaactccgccgcaaccggcttgtttggagtgtgtgatgcacttgagaaccatatttttgctcctgtgccatccttgatactaagaatgccttgatcagtgtctacttctaagactccagagtggtctttaagtggtttttctttgttggctacccaaacaactgttcttggaaatatatttgcgtaccaaattccgatgtaacggctgtcgaagtttgctgggctgaagaatcctgcttcaaaggctccatttgttgaaaccagagtttcattctcattcttaccatctctgat

SEQ ID NO: 5972 - DNA, 416 bp, Glycine max
agctttgagcatattgaaatgacaataactttatacacggatgtccggttgagtcccgtaagatatcgagacgctcaaaatttagatccgaagctctgagaaaattgaattgacaataactttatacacggatgtccggttgagtcctgtaatatatcgagacgctgcaaattgaaaacggaagctcgtaggaaattcaaacgacaataactttttactcggatgtccgattgaatcgggtaatatatcgagacgatcaaaattgagactagaagctttgagcaaattgaaatgacaataactttatacacggatgtccggttgagtcccgtaatatatcgagacgctcaaaatttagatccgaagctctgagaaaattgaattgacaataactttatacacggatgtgcaactga

SEQ ID NO: 5973 - DNA, 467 bp, Glycine max
  unsure (1)..(467): unsure at all n locations
atcctcagagacacctgcggcatgccaagcttggtttcccccccattattgggtgtttttacttcttagttagcttataaagntatcacagcctgttaggcctggtgtttatctgtgaatgctgccattcattgatggttgtcaacttgattgtacagctgtatgactgtgatacagacattaatgatgggttctgctaattttatttcagtctgtgattaagaagaaatatggtcaagatgcactaaatgttggtgacgaaggtggctttgcccctaacatccaggtcaatattttaattcatttctttttatgcatggaactccggtacctgctcatctttttggcctgtaactgataatctctattgagtgttcatgaaaacaaagaaggtttggaattgctgaaaactgccattgccaaagctggttacacaagcaaagatagtattttccctcgtcaaaatt

SEQ ID NO: 5974 - DNA, 447 bp, Glycine max
agcttgagactggcgctaagcccaatttcactgatgcaatcctacctcccaagggcattggatagaagactgcaagaagattgggaaaaagatgcaagagaaggccctagggttctcatgagccttagggtagatttcgggcccatgggctaagtataagcccacttatctttgaacatattagattaaggtttcattaattttggtccttgtatttagggctccataatgtaggtagggtaccctagaaatataggatttttcagcccttgtattttagggcacctagactagtttttgtattaggggtagttttgtaatttcacatgcagtaagtgaatatttgatgtgtggtggtggaaataaatttaattgagtatttgcttaccacaccccattgccacatcatatactcacactttgtgcatgtccttcatgctttacatg

SEQ ID NO: 5975 - DNA, 447 bp, Glycine max
  unsure (1)..(447): unsure at all n locations
agcttcagctctttctactgcacaaggctcttaatatttgtagagtatccttgtggaaccttcacccgatgaagacactgacaaaaacttatcttctcctttttggacaaagtatgacaagttgggggcaagtaaattttcttcccatcagaccttggatgcaactgtgatcgtatccacatctctgctagattttgacgagtattcaagccatccttcgtcttgccctaaatgttaaggagcgtcccaatcacactgtcacatacatttttctcgacatgcataacatcaatacaatgtctaacatctagatcagaccactacggtagatcaaagaaagttgacctgttcttccatatgcagagctgactgttatccttctttngggtctttccaaatacagtattcaggtgttgaacccgctggtatacctgctcactagtcaac

SEQ ID NO: 5976 - DNA, 435 bp, Glycine max
agcttatgctgcaaacatctatcaatagacctcctcaaactcagcagcaaaatccaccaccagaacaattatgacctctccagcaatagatacaatcccgggtggaggaatatgatggaagcttgcttgtggggcttctatggaggctggatctttgagcttcaatgaggtcctttaatggtgattttccaccatggagatgcagtggaagacaaaggagaagaggtgagaggaggcgccatccactatggaataagccatggaagaaggagcttcaccaccgagatgagccttggataagaagcttggagaggatgcttcaatggaggaaaagaagaagggagggaaagagagaggggggagcacgatattgaaggaagaaaaaagggagagaagttgaactttgagttgtgtctcacaagactctcattcatc

SEQ ID NO: 5977 - DNA, 441 bp, Glycine max
agcttaaagaaggaatttgaaatgacagacttgggaatcctatcatattttttgggattaaagtttgcttatactgaaaagggaatctttatgcaccagaagaagtacatttcagaggtactaaagaagtttaatacaatggagtgtaatcctacagaaactccagctgaattaaatgtgaagcttgtaagaagtgagaatgaggcttcagttgatgggaccttgtttaggcagattgttggtagcctgaggtttatctgtcatagtagactagaaattgccttcaatgttggacttgtgaatgaccctagagaaccacatttgttagctgctaatagaatcttgagatatctaaagggaactctgggatatggaatcatttttccccatcaaatcaagaaggatgggagtctacaccttgaagcctattttgattctgat

SEQ ID NO: 5978 - DNA, 425 bp, Glycine max
  unsure (1)..(425): unsure at all n locations
agcttgcaaaagaaacatgttcaatttgtctccatcaccaccaaagctacccataattggcaatcttcatcagctaggaacactaccacatcgctccttccatgcactctcacgcaaatatggccctctcatgttgctgcaattgggccaaattccaaccctagtggtctcatcagctgaagtggcaagagaaataatcaaaaaacatgatattgccttttccaaccgcccacaatctacagctgctaaaatattactttgtggatgatgcaatgatataaaaaacaaaaatattgaacatgttgaaaaccataagtaatacactcagatcaaacagggaagagaaaaaaaataattttcacaggtatctttctcttattatttccactagctcanatttgattggtgtgttttatgtaaaggga

SEQ ID NO: 5979 - DNA, 334 bp, Glycine max
agcttcttctgtggaggttgttcatccttcaatggaagtttgatttcaaatcccttcggcaagaaaacattaaatccaaaaattagatctctatgccctttaagcagctccttcacttcttctatgccactaacaaggttgaatctgcagatgaacagtataattctttcacataccatctcgcaagaaatggcaactataaagtataactatatgactacatcatgatgaaacctatcagcagtgaaatttttcatgagttccaaaaatttatcaaatttttctctatcatctttaaatgcatccttgactgtggagagatatgctaaggcac

SEQ ID NO: 5980 - DNA, 341 bp, Glycine max
gcatgcaagcttggaacatataaaccgaattctagttctctcttaagacttagtcaaaatgtctgctggttgatcattagaattgatgaactcagtggtaatctccttggacaatgatttttctcaaatgaagtgacaatcaatctctatgtgcttggtcctctcatgaaagactggattggacgcaatgtggagggctacctgattgtcacaaaataactttattcgtgcaacttcacaaaacttcaattcttgaagaaggtgcttaatccatataagttcacatgtgaccaaagccatagatcggtacttagcctctgcgctggatcgagcaacaacat

SEQ ID NO: 5981 - DNA, 269 bp, Glycine max
tgcttctcccccaatattctatttattctgggagaagtgacgtacacaagggcatagccttcttgtcagtcaaacctctatccaaattcgaagcgacacataattccagcaagaaacttcaagcgtaaagcctgtcgtgccgattgcgtgaactaactcacaataattgcctaccgctcttgacagttatcgatcggtcaaacctgtcctgccacctgaacggatgaatccgtcaacgcgaagcttttacttcattctatgtactcgtg

SEQ ID NO: 5982 - DNA, 280 bp, Glycine max
agcttccattgttcaattacgtgtcgtttcgatatattaggccccggaatcggtccttcgagttaaaagttatgaccatttgaattagacgagagctttcgttgttcaatttccagcgaatcggtatattaatgcgcctgaatcggacctccaaaagtaaaattttgtccccctcttttgatgaagagctatcatcgtaccatgaataggcgttatttcacttttacacctataggggacattcgaggtaaaacccctccctatggtgaatttcttaaga

SEQ ID NO: 5983 - DNA, 326 bp, Glycine max
agcttgaagagagactcacaagtggtttcaactggaatatgaacctcgctatgtagttcatacatcctaagaagcctcagacctgcttttcggcgtgtggctcatgcatttcgaggatggccttcaccttgtctcaggccacctttaccgatttttggcttatgataaaactgaacaactttaccaacttgacgccaaaagtgcactttgcgggattcaaccttaatcgatacttacacagtctctccaacaacttctgtaagtagataaggagtaccttcttggttttggacttggcaatcatatcatccacgtagacctcaatt

SEQ ID NO: 5984 - DNA, 340 bp, Glycine max
ctgcacgcatgcaagcttgaatagagactcacacgtggttatcaactggaatatgaacctcgcaatgtagttcacacatgctgagaagcctcaaacctgcttttcggtgtgtggctccatgcatatcgaggatggacttcaccttgtctcagtcaacctctacccctttatggcttatgatgaaactgaacatcttttaccaacttgacgccgcaaagagcacttcgcgggatgcaaccttaatctgtacatacacaaactgtcgaacaactgacgtaagttgattacgtgtgcctccatgattctggacgtcgcaatcatgtcacccacctggacccca

SEQ ID NO: 5985 - DNA, 331 bp, Glycine max
agcttttgaaaaggagtttaattaaaatattaataatataaagatatgtaaatcatcatttaattataaattattatgcgtaataatatatttttattgttatttaaaagtcacatacaaaatatgcttcaattaattattagtataataattcttaaactacaacatattaaaattaaactctcttcaaaatatttgttattgatagtacatattttttatccattaaaatcaaagtagtataaaaaaaataataatataataattcatccatgttcaattaattaagttacacatttcttgataattaacgatacatataatacacact

SEQ ID NO: 5986 - DNA, 414 bp, Glycine max
  unsure (1)..(414): unsure at all n locations
gtgagacgcaatgtatctccatggggagcaccagtgttgttagtaaagaagaaagattggaccatgaggttgtgtgtagactatcgccagttgaataaggtgacgattaagaatacgtaccctttgcctaatagacgaccttatggaccagttggtagaagcttgtgtgtttatcaagatataccttaggtcaggttaccatcagattcgagtgaagtctgacgatattccgaagactacttttacgacccgttatggtcactacgagtatctagtcatgccctttggtgtgactaatgctccaggtgtgtttatggactacatgaataaagtctttcacccttactttgatnagtttgtggtagtattcatagatgatatnttggtatattcacagactagagaggaacatga

SEQ ID NO: 5987 - DNA, 413 bp, Glycine max
  unsure (1)..(413): unsure at all n locations
ataatggagacacatgaacagcgctaggcaatgacattcatggtgctccgaacaaaggtggagtatggaggattgccttgagggtccgcacttatgcaatcatgaaactcagctccaaactcgaaagtggaggacacatgaacagtcctaagcaataacattcatgtggctctggaaaaggatgagaatggaggattgccttgagagtcctctcttaggcaatcatgaaacacagctccaaactcaaaagtggaggacacatgaacagccctaagcaataacattcacgtggctccggaaaaggacgagaatggaggattgccttgagggtcctctcttatgcaatcatggaacacagctccagactcgaaaatggaggacacatgaacagccctanacaagaacattcatgt

SEQ ID NO: 5988 - DNA, 415 bp, Glycine max
  unsure (1)..(415): unsure at all n locations
cacatttgaaggatgttataagaagaaatccatttggtctatatgctcaggtacgtacaccgattatggtataatcctatcagtacctttatatgattggtttttcctacagagcttttttgaattatcaattgccaagatgaaatatgacaaggtaatctcttgcactgaataaacgtttcagagggaggagacaatttcagtgttggacagaggcaactgctaagtctagctagagcattgctacgaagatcaaaggttcttggcctggatgaagctactgctgctgtagaagttagaactgatgcccttatacagaaaactatcagacaagaattcagtcctgcacaatgctcatcattgcacacagactanatacaatcattgatctgcatcggattcagctgctcaatgc

SEQ ID NO: 5989 - DNA, 411 bp, Glycine max
atacgagaatgaagctctgataccatgtgttagacaagtggcctcagatatcttaagaaggggggtggaattaagatattgcaaactatttccccaattaaaaattctatttcaatttcaatgcaagttgcaagttaccttaaaaattaacttttaaataatgattcaaatagaacaatctgaatataaatataaatcaataataaataaacgagtttaagggaagagaaagtacaaactcagatttatactggttcggtcacacccttgtgcctacgtccagtccccaagcaactcgcttgagagttccactatcttgtaaaatccttttacaagttctgaacacacaaggacaatccttcctttgtgtttagatttctttacaacaagagatactcggtctctcaatcc

SEQ ID NO: 5990 - DNA, 436 bp, Glycine max
  unsure (1)..(436): unsure at all n locations
tcgatatatatgcgcctgaatcggacttccgtgtgacttgttatgaccatntgaatttgtcgagagcttccattgttcaatttcaagcttctcgatatattatgcgcctgaatcggatttacatttgaaaagttatgaccatttgaatttctcgagagcttccgttgttccatttcgagcatctccatatattatgcgcctgaatcggactttcgtgtgaaaagttatgaccaattgaatttctcgagagctttcgttgctcaatttcgagagtctcgatatattatgcgcctgaatcgctgttccgtgtganaagttatgaccatttgaatttctcgagagcttccgttggtcaatttcgagcgtctcggtatattatgcgcctgaatcggacctccgtgtgataagttatgaccatntgaatttctcgagagct

SEQ ID NO: 5991 - DNA, 309 bp, Glycine max
aaattaaacaatggaagcactcgagatattcaaatggtcataacttattacatggaagtccgattcaaattcataatatatcgagaagcttgaaattgaacaacggaagctctcgagaaattcaaatggtcataacttatcacacggatgtccgattccggaggatagtatatcagaagctcggaatatatcaacaatagctctcgagaaattcaaatggtcataacttatcacacggaagtccgatgtaggtgcataatatatcgagaagcatcaaattgaacaatcgaagcctctcagaaattcaaa

SEQ ID NO: 5992 - DNA, 436 bp, Glycine max
  unsure (1)..(436): unsure at all n locations
agcttcttcagaaagatgtagattcgtgcttgaccaaccttacaaataggaattcgacgagctgaggaggaggcttaccacctctcccattatgcaaccactagattgggagcttccatttaagctcatgtgtgatgcctccaattatgcacttagggttgttntgtcacagagagttgataaattaacacatgtcattgcttacgcctcacacactctagatgcagcccaagtcaattacaccactactgaaaatgagcttttacatattgcttttgcattatataaatttagatcttatttgctctgctcccatattactgtctatgtgacaccctctacctcgacatacatataaataagacaaacattaatgtattcatttagactttcagagaccaacataatcatttaatttttttacatcaccattaaa

SEQ ID NO: 5993 - DNA, 328 bp, Glycine max
ttcctaatttctctacaattgcatcatctctcaatgagctggttatgaagaatgtggcatttacctgcgatgaaaaacaagagcaagcctctgtttgatcttctcgaaggcctcttggcagccactgttccacacgaccgcctagttcttacgtaatagcttaaaaatgggttcacatgtacgggtgagttgcgagataaatctcgcgatataattcaacctgcccaaaaatccccgaacctgcttctccgtgcgtggttctggcatttcaaggatggccttcactttctcgggatctatctctatccctttctgacttacgataaat

SEQ ID NO: 5994 - DNA, 245 bp, Glycine max
gaaacacgaaacactgtttcactggcctccacagtgacaaaccctagttcaataaaaagtgaaattggaaaacattgaaaatcagaaactcacgttccgccgacgcctccggtggtttcggaggagatagtggagaaaggaagctcgcagatggcgacggaagcgccgtagttggcagcgaagcgagcggctcggacgccgccgctgccggcgccgatggtgaagaggtcgaagtcgtagtgtgc

SEQ ID NO: 5995 - DNA, 402 bp, Glycine max
  unsure (1)..(402): unsure at all n locations
tactgcctcatgaagttcatcaattagttcatcaacagtgggaataagaaagctatctttgattgtgatggcattcaaagccctgtaatttgtgccaaatctccaagngccatccttcttcttgacaagaatgattggaggtgaaanagggcttctgctangggcaataatcccttccttgagcatgtcaactatcattaattacttcaatctgatccttccggctgtgaggatacctatatggcttgactnttactggtccagcaccttcaaccaatgggattgaatgattgtgagttctgctagggggtagtcctgatggcacatcaaagactgttctatcagtgtaaagtatcatggccagttctggttccatatcaaccggtatatctaataactggt

SEQ ID NO: 5996 - DNA, 457 bp, Glycine max
ctgccgcatgcaagcttgaaggacatgcacaaagtgtgactatatgatgtggcaatggggtgtatctagcaaatgctcacctccccctctaaaatttatttggattgggcttctcccaattcaattaaatttatttcccaacacacacatcaaatattcacttaatgcatgtgaaattacaaaactacccctaatacaaaaacttgtctaggtgccctaaaatacaagggctgaaaaatcctacatttctagggtaccctacgtacattatggagccctaaatacaaggccaaaaaataatgaaaccttaatctaatatgtacaaagataagtgggctcatacttagcccatgggcctgaaatctaccctaaggtttgtgagaaccctatggccttctcttgcatctctggcccaatgttcttggagtcttctatccaatgcccttggggagtagga

SEQ ID NO: 5997 - DNA, 419 bp, Glycine max
  unsure (1)..(419): unsure at all n locations
gatgctgagttgtngttgtggcatagtactggtgagttctccattggacaatggagttcgaggatgccttcaaggagagatcatntgcttctcttttcctcccacaccatctcatttcgtgtatatatgttaataataataaattggtatgttaatccattatggtgaatatatgtattgtaatatttgtaggaagttatacaaaacaaattgtcacatgtggataaatctcaagtatgaatatgctaagactttgactatttaaatatgttactatattcatanttatttttgtttattggataatnaattatgataaatcattattatgttataataataataatattgataaaaaaatttatgatcattatntctcattaattacatgaagtatatattatgaagatagtaatgat

SEQ ID NO: 5998 - DNA, 353 bp, Glycine max
  unsure (1)..(353): unsure at all n locations
nggatttcttttagtagggatctatccttcctagatggatgccaacccagtcactgtcattaagaactagctcttttcttcctctattgcctttagttgaatacacctnttgttggntctctatttggttcttaaccctctcatgcaacttctttacaaactctgacctagattccccttctntatgtataaaagaagtgtccagtgggaagggaatgaggtctaacggtgttaggggattgaacccatagacaacctcaaaaggggattgcttggtggttctatgaacccccctgttgtaggcaaattctacatgaggaagatactcatcccaagactttatcactacctct

SEQ ID NO: 5999 - DNA, 429 bp, Glycine max
  unsure (1)..(429): unsure at all n locations
agcttatctctagaggggatggagcctttctttgtttggagaggataaataacattgcctataggttggacctcctagaagagtatagagtcaacaccacttttaacatttctgatttaattcctttcgcaggtggagttgatattgaggaggaggaactaacagatttgaggtcaaatcctcttcaaggggaaggggatgatgcaatcctccctaggaagggaccagtcactagagccatgagcaagagactccaagaggattgtgctagagctgctgaagaaggccctatggttctcatgaacctcagggtagatttctgagcccatagaccaaggttgggtccaattgtctttgtacatattagactaggatgtcattatatntgatccttgtatctagggctccataatgtatgtagggtaccct

SEQ ID NO: 6000 - DNA, 377 bp, Glycine max
  unsure (1)..(377): unsure at all n locations
gctttacttgcttggaattatccagtctatctttcttattttttcgcctacattcttcttcaagaatagcttaagcaacatcattaaagggtagacaagtgacattattatttattgttatgttgataatgaagttatcatataaatctggtagactctaaagtagaagctctacccgtttgttttcttctatgttaaaatttgatgacggaaattgggaaaataaagtattcaggttttcatgtggtatgtcacccaaatggactcactcgttcgaagagtgcagagtttcctcttcaaaaatattctagtctgaagtgactngatctcatacaatttgtggaaagtatcccaaatatccttcacgttttccattg

SEQ ID NO: 6001 - DNA, 442 bp, Glycine max
  unsure (1)..(442): unsure at all n locations
tgcaagctataggtttgatggccccaatgacgtctattcctcacatggaaaaaggcttaggggcggacataacattcagaggatgtggcagaacattgacattgtccgcgtacgcttgacatttatgacatttccttacatgggtgcagcaatcgcttttcatagtgagccagtaataaccggccctaaggatcttcctggccatagcatgcccattggcatatgtcccaaataaacactcgtggatttccttaatcatgtagttcgcctctttggcatctacgcatcgtaaaagggtcatgtcatggttttgtttgtactggatagtaccactcacaaagaaaccagtagccaatctccttaacgttcttttgtcattgtcggaaatccctggtggatattctttgttctcaacatattgttngatgtcgaagtaccatgg

SEQ ID NO: 6002 - DNA, 388 bp, Glycine max
  unsure (1)..(388): unsure at all n locations
acaaaaaagcatgtagatatatcagtgaactgagccagaccaaggaaaaatacatcaaagaaaataaataatctagtatagctaattttataatcagataaagcatctgagacctgctgccatgtggtatcaacaggaagctgccgccgagcatcgccagcatcaaaatccagtacaccataatccctcaaccgaatctacacagcaataactaaaatcagaagtctntttgaggattaaatgcatggcattatctataagacacatttntctaaatgagacaaacccgaaggaagcacggattctttgcaattccaacaccccaccaagagcagctaccattagataaaaagcagcagaaataagtgtgataacaatacaaatcatg

SEQ ID NO: 6003 - DNA, 397 bp, Glycine max
  unsure (1)..(397): unsure at all n locations
actcaagctgaagcaactggtgcgttggtcaactggaacccatctgccttgaatcagaaatctgtacctgtcgcaaggggttgtggtttgtgctcctctgctgaccaccatacagacctttgcccttccatgcagcaacctggagcaattgagcaacctgaagcttatgctgcaaatatttataatagacctcctcaacctcagcagaaaaatcaaccacagcagagcaattatgacctttccagcaacagatacaaccctggatggaggaatcaccctaacctcagatggtccagccctcagcaacaacaacagcagcctgctcttcctttcaaaatgctgctggcccaagcagaccatacattcctncaccaatccaacaacagcaacaacccca

SEQ ID NO: 6004 - DNA, 422 bp, Glycine max
  unsure (1)..(422): unsure at all n locations
agctttttctgctggaatcatttatcctatctccgacagccaatgggtgagtcccgtccaggtagttccgaagaaaatcggcctcatcgtgatcaaaaatgagaaggaggagttgattcctactcgggtgcagaacagttggagagtctgcatcgactataggaggctgaaccaggttaccaaaaaggaccattttcccttgccattcattgactagatgcttgaacgcctggcaggtaaatctcactactgtttccttgatggtttttctggttatatgcaaatcactattgctcctgaggatcaggaaaagaccacattcacctgccccttcggcacttttgcctataggaggaatgccttcggcctgtgcaatgcccctggtaccttccagcggtgcatgatcnagtattttagtgatt

SEQ ID NO: 6005 - DNA, 412 bp, Glycine max
  unsure (1)..(412): unsure at all n locations
tctatagaaggtgcgttcctaatttctctacaattgcatcatctctcaatgagctggtgaagaagaatgtggcatttacctgcggtgaaaaacaagacaagcctttgctttgctcacagaaaagcttactaaggcacctgttctagctcttcttgacttttctaaaacttttgagctagaatgtgatgcctctggagtgggagttggagctgtattgttacaaggtaggcaccctattgcttattttagtgaaaaacttcatagtgccaccctcaactaccccacctatgataaagagctntatgccttaatatgagccctccatacttgggaacatttaccttgttccaaggagattttcattcatagtaatcatcaatcacttaagtacattagaagggaaaagcaagta

SEQ ID NO: 6006 - DNA, 404 bp, Glycine max
gtgcagaactggaagctccaattcatggaaagttaattcattcctacgcgagcaagacccctgcctcgtctaatgtatttgtaaacagtgctttaatatatatgtattcaaaatgtggatatgttgctgatgcttttcaagtttttgacaacatgccggagaggaatgtggtttcttgggaatccatgatattggcttatgcaaggaatgggcatgctagagaggctctgaagctcatgcatagaatgcaagctgaaggttttgtggtggatgattatatccatacaacagttattagtgcatgtggaggcgttgagcatggagacattcatcaggatagtgagtattcttcacattacttgcattcctagtaatcttctacaagataggagcatcaatgaaca

SEQ ID NO: 6007 - DNA, 330 bp, Glycine max
  unsure (1)..(330): unsure at all n locations
cttgctctatggaactggctntgtgttcatatcagcaggattgtacagagtactattcttatgaactntgattcttctttctggtcgaatgaaatgatatctaacatttatatgcttagttctatcatgatgaacctgagccttggccaagcatatagcactaatgttgtcacagtagatgttagcatattcttgattaattgcgagatcatatattaaacctttcagccggattccttcctttgcatgttcaataagagccatgtattcagccttagtangcaagagggcaacagaacgttgaagtgttgccttccgaatcaccaagct

SEQ ID NO: 6008 - DNA, 429 bp, Glycine max
  unsure (1)..(429): unsure at all n locations
gagaaagatgtccanaanatggaaaaatatattataaaaaatcaactccctcttgttgtgtgtaacccttggccacaagcctagctttgtaactntggatggcgccattaacacaatgtttgatgtgataaacccacctataaccaattgaaacttatcttgnggaaaatcagttagatacgaagtatgatttgcttcaagagtatgtaattcatccttcatagctnttcttaatacagtttcatacttaacagcttatgcatatgttttgggttcagaaatntttgaaatggctaaggtatatanttgagatgactaggagacaaatgatgataggacagaacagtggataaggaatataaagcagtacctgaagtagaagaaaggaacctgctgagttgagaaattgcatgtagtgaaaaatgaaaa

SEQ ID NO: 6009 - DNA, 384 bp, Glycine max
tagctacattaattgtcctacatatcatgagttctgataggttgacagtataatttgttttaacagtgcatagaaattaaactctttcatcatactatgataaaacaaactttgaagttaaatttttctttcttattttgggtgatatctcacgtaggaaaattcatacaatatgtggcatgtatttttggaggtacagtcatagcattcatcaagggttggcttctaagccttgctcttatatcttctcttccacttcttggcctctctggtaccgaatgagctttgcttttgccaagatggcatcccgaggacaaacagcttattctgaagcaactactgtagtggagcggacaattggttcaattcgaactgtatgccaac

SEQ ID NO: 6010 - DNA, 436 bp, Glycine max
  unsure (1)..(436): unsure at all n locations
agcttatgttgcanacatttataatagactttctcagcagcaaaaccaacaaccgcataataattatgacctttcaagcaacagatacaatctaggttggaggaatcacccaaatcttagatggacaagtcctccacaacaacatcagcctgtccctcatttccagaatgttgttggtccaagcaagccatatgttcctcctccaatgcaacagcaacaacagcagtcacaacaaagacaacaagcaaccgaggctcctcctcaaccttccttataagagttagtgaggcaaatgaccatctagaatatgcaatttcaacanaagacaagagcctccattcagagtttgacaaatcagatggngcagatggctactcagttgaaccaagctcanacccaaaattctgacaaattgccttcacaaactatgcagaat

SEQ ID NO: 6011 - DNA, 266 bp, Glycine max
aaagctcgaaattgaatgttgaagctctgagcaaattcaaacgacaataactttttactcggatgtctgattgagtcccgtaatatatcgaaaagcttgaaattgaatgttgaagctctgatcaaattcaaacgacaataacattttactcaaatgtctgattgagtcctgtaatatatcgaaaagctccaaatggaatgtggatgttctgagcaaattcaacgacaataaccttctacttcgatgtctgattgagtcccgtaatg

SEQ ID NO: 6012 - DNA, 365 bp, Glycine max
  unsure (1)..(365): unsure at all n locations
agctttgtncncctttgtttattaattagtgatgatttgtgaactacagggactgcaagacaagatcgaattggttcctattgatcttaaaaacaggcctgcttggtataaggaaaaagtttatcccacgaataatgtaaagataccgtacgtggtcatatattaagtggtgaaagctatttgatttgcttgattgatcatatcacgttcttcttcttatgctataggtaccttcgttggagcacaatagcaatggtttaggagaaagtcttgatttgataagatatatagatgccaactttgaaggggcacctctattccccactgtaagaactatatattaatattaattattccatacatta

SEQ ID NO: 6013 - DNA, 434 bp, Glycine max
  unsure (1)..(434): unsure at all n locations
acctgcacgcatgcaagctntactatgcaaggaatatccaaggaaatattcttcatctgacttagcatcaaattttcctaagttttctttaccattgtttaatacaaagcatttgcaaccaaaaacatgaagatgtgaaatgttgggttttctaccattaaacagttcatatggagttttctttaaaataggtcttattaaagccctattcatgatataacatgcagtattaacggcttcagcccaaaaatatcttggaagaggagtatcattcaataaggttctagcaatctcttccattttgttgaggggttctaggtgcagaaaaattatgttcaatgtcatgcttttcacaaaataaatcanattctttattttcaaactcacccccatgatcactcctaatagatataaattcccaaaggaaactcaat

SEQ ID NO: 6014 - DNA, 422 bp, Glycine max
  unsure (1)..(422): unsure at all n locations
cactaagcaatcactacgcatagctctaaactcgaaggtggttgacacatgaacganaacacaattcatggngctccgaaaaaggggttgagaatggagaattacactaagcaatcactacgcatagctccaaactcgaaggtggaggacacatgaacgataacgcaattcatggggctccgaanagattgagaatggagaattgcactaagaaatcactacgcgtagctccaaactcaaaggtggaggacacatgaacgataacgcaattcatggggctacgaaaagattgagaatggagaattgcactaagcaatcactacgcatagctccaaactcgatggtggaggacacatgaacgataacgcaattcatggtgctccgaanagatagagaatggagaattgcactagcaatcacta

SEQ ID NO: 6015 - DNA, 433 bp, Glycine max
  unsure (1)..(433): unsure at all n locations
agcttcaataaaaagatggcctcagcaaattttttatttccagaagggaattctatcaatagacctccaatctttaatggagaaggttaccactactggaaaacccgaatgcaaatttttattgaggcaatagatctaaatgtctgggaagccatagaaatagggccttatatacccaccacagtagaaagaattacaatagatggtagttcatcaagtgaaagcataactatagaaaaacctagagatagatggtctgaagaggatagaaaacgagtacaatacaacttanaagccaaaaacataataacatctgccctgngaatggatgaatatttcagggtttcaaattgtaagagtgctaaggaaatgtgggacactcttcgattaacacatgaaggaactacagatgttaaaagatctaggataaatg

SEQ ID NO: 6016 - DNA, 436 bp, Glycine max
  unsure (1)..(436): unsure at all n locations
tcaacattcaacttcgagcatctttttatattatacgactcaattagacatccgagtaaaaagttattgttgtttgaatttgctcagagcttcaacattcaatttcgagcgtctcgatatatgacgggactcaatcagacatctgagtaaaaagatattgtcgtcttaattggctgagagcttctacattcaatttcgagcgtctcgatatatgacgggactcaatcaggcatccgagtaaaaagttattgtcgtttgaattggctgagagcttcaacattcaatttcgagcgtctcgatatgttacgggactcaattagacatccgagtaaaaagttattgtcgtttgagttggctcagagcttcaacattcaatntcaagcgtctcgatatatgacgagactcaatcagacatccgagtaaaaagttattgtcg

SEQ ID NO: 6017 - DNA, 406 bp, Glycine max
  unsure (1)..(406): unsure at all n locations
agcnttgtgcaaattcaaacgacaataactttttactcggatgtctgattgagtcccgtaatatatcgacacgctcgaaattgaatgtcgaagctctgaggaaattcaaacgacaataaatatttactcggatgtctgatatagtcccgtaacatatcgaggcgctcgaaattgaatgttgaagctctcacccaattcaaacgacaataactttttacacggatgcctgattgagtcccgtcatatatcgagacgctcgaaattgaatgttgaagctctgagacaattcaaacgacagtaacattttactcggatgtctgattgagtcccgtaatatatcgacacgctcgaaattgaatgttgaagctctgagctaattcaaacgacaataactttttactcggat

SEQ ID NO: 6018 - DNA, 380 bp, Glycine max
  unsure (1)..(380): unsure at all n locations
nntgatgcaacattggagaggttatcgatacaacgagatgatgcgcctcatgagagggtggatcanatggagaatagagatcataatgaagaagaaagaggagaagagggatgatgatgttcctagacaaaaccgaatngatggtattaaactcaacattctccatttaaggaaagaatgatccggaggcctacttggagtgggcgatgaaaatagagcatgtnttctcatgcaacaactatgaggaggaccagaaggtgaagcttgccgccacggangtttccgactatgctcttgtgtggtggaacaagctacaaaaggggagagcaagatatgaagagccaatggttgatacatggacggagatgaaaaagatcatg

SEQ ID NO: 6019 - DNA, 415 bp, Glycine max
  unsure (1)..(415): unsure at all n locations
gcaagctntactatacttagttcggcttgagttttatacccaagacttgagtntggcttattacctatatgttatttgtaaagtctcgactagtcttacatganagcctaacttagcctacaagcctatttagaagcttgcttaaaggtctttgatcaattaattattttaaaacctaatgaaatactaattaaaaaaaaaagaaacttataaaatttcatataagtaatgtacaaattgaaaaataattgataaacaaaatcatattgaattcaagtcgttaaaacacacagtatatataaaaatgaaaaaaaaacataatattaaaaaatacacggacatgcttaggggtgaaatgcgtataggttacaatataactttaaaagtacttgtattttctatttattattctata

SEQ ID NO: 6020 - DNA, 413 bp, Glycine max
  unsure (1)..(413): unsure at all n locations
agcttccatcacaaacactntatggttagattgttggtagaaataatatcccattgtttcttcaggataaccaatgaatctacacttatcagaccttgcctcaagtttatctgtttgcaatcttttaacataatcagggcaaccccataccttgatgtgtttaagacttggtttctttcctttccatatctcatatggagttgtagagactgcctttgtaggaactttatttagcaagttggttgttgcttctaaagcatatccccataagtttaatggaagatcggtgaaccccatcatggatcttaccatatctagtaaggttcgatttcttctttcagatacaccattgtgttgtggtgttcccgaatgtgtccactgagagagaatctcattctcctttagataatcaa

SEQ ID NO: 6021 - DNA, 403 bp, Glycine max
  unsure (1)..(403): unsure at all n locations
gccctatcatccttgtctccgtcgccttgaatgtcctcgccagattccttatcgtctntatgcacggaatcaaaagctccgaatccgctttctctattatcttcaccacttgatcaacaacggctttgcaagcaggagagttgggcttaaacgcggatttccttaattcagcatctttctctgccactgctgtaatctccatcaccgccatagccgaattgtactgcacagcctccgttcctttttcaagaagaacagcgaaacagagcagtgctcttgattcagtaatgctacgacaaattggcgagtttcctttcgctaattgccagagagccctcgctgccatttccttcatgttagccttagtcctaggatcctcatgatcccttcctttcatgttatc

SEQ ID NO: 6022 - DNA, 383 bp, Glycine max
tgctctattcaaccggagtgacaagaatatcttcttactgatcaacacttgctcatggccaaagatgcgtgggagatcctgaaaaccactcatgaaagaacctccaaggtaaagatgtccagactgcaactattggctacaaaattcgaaaatctgaagatgaaggaggaagagtgtattcatgacttccacatgaacattcttgaaattgccaatgcttgcactgccttgggagagaagatgacagatggaaagctggtgagaaagatcctcagatccttgcctaagagatttgacatgaaagtcactgcaatagaggaggcccaagacatttgcaacatgagagtggatgaactcattggttcccttcaaacctttgagct

SEQ ID NO: 6023 - DNA, 434 bp, Glycine max
  unsure (1)..(434): unsure at all n locations
agcttcataacagctntaatactctctcgtgagatngcaccctctggccagtccaacctaccccttcgaacatacttctctgcatgtcggctacatgggcagagtaaaagatacactcggttatgttcaagttcaatcatttgataaatttgataataatagaaaattcacaaggtaaatcacttactcaactctctttaacatctgctgtggtataggaccaagcaccctctccatcatagccagatgctctaaattttcatgagtctgaaacaaagcttcaccctgcaatagaagcccataagctgatttaaacaaacaaaactggataaaattggcctaaaagtatccagagagccaaacttacagtgcataattcaaccaatatacagcccacactccatatatcacatggatagctccacccaagtcct

SEQ ID NO: 6024 - DNA, 459 bp, Glycine max
  unsure (1)..(459): unsure at all n locations
tttacccatntatgtgagtgaganattatataaatgtaaaatttactcacactattgttatgattacttttagaaccattattatgattatatgctataaaactatactcatatttcttatgatttcaaagttaagttaattattttatattctactctttttacttatttaaatattaataaatatgaaatatacagattataagaaaatatatgataagctactataataaatcataatatgtgatatattctattttatgaggataaccgcatgaaaactcaatatgtttaatcttaaaagatattcataatacttactaattgtattgataatgaattatggataataaattatcaaataataacaaatntatttcataatgcacaagttgaatgaatttcaatttaaataattataaatttatatttactatactctttctaatctatacacat

SEQ ID NO: 6025 - DNA, 453 bp, Glycine max
agcttcataggccttgtatggtctgaaacatgctcccagagcttggaacaagagaatagacacctttctcttgcaaattggattcatgagatgcactattgaatatggtgtgtatgttaaaggagaaagtctttcatatatcctcatagtgtgtttatatgtggatgatttactaataacatgaaaggattgcagtgttatctcgacattcacgcaagagatgaagtctgagttcgaaatgtcagatcttggagaattatcatattttctgggcatagagttcaagatgacaaaggctggaatttctatgcaccaaagcaaatacacaattgatgtcctaaagaggtttcagatgcttgactgccactcagtttcaacttctgttgaaactagtgctgtgctggatcaatctgggcttgaacaattggtagataagactgtgttcacaccaat

SEQ ID NO: 6026 - DNA, 476 bp, Glycine max
  unsure (1)..(476): unsure at all n locations
ntgagcanattcaaacgacaataactntttactcggatgtgtgattgagtcccgtaataaatcgagacgctcaaaattgaatgttgaagctctgagccaattcaaacgacaataacgttttactcggatgattgattgagtcccgtaatataacgagacgctcgaaattgaatgttgaagctctgagccaattcaaacgacaataactttttactcggatgtctgattgagttccgtcatatatcgagacgctcgaaattgaatgttgaacctctgagccaattcaaacgacaataactttttactcggatgtctgagtgagtcccataatatatcgagacgctcgaaattgaatgttgaacctttgagccaattcaaacgacaataactntntactcggatgtcctattcagtgacgtaatatatcgggacgctgganattgaatgttgcacctctgagcaaattaaacgacaat

SEQ ID NO: 6027 - DNA, 323 bp, Glycine max
agcgttgatattccttgttccggatacctctctcttctcatgtgcacccaaacccaatctccgggttcgaagacaaccttctttctcccttcgatggcgttggtagcatagcttttactgtttctctcaatgtgagctttgactctataatgaagcttgttcacatagtccgcctctgcttgaccttctttatgcttaaaaacagacacattaggcataggcaaaagatcaagaggagttagtggattaaaaccatcaacaacttcaaggtttaagacagaagactcatacgatgacgccgatcgaacattacctaatagaca

SEQ ID NO: 6028 - DNA, 189 bp, Glycine max
ttgagctcctctgctgaccaccatacacaccttttgccttccatgccgcgaccctgagcaattaagcagcttgaaacttatgctgcaaacatttacaatagaccttctgcagctcagcagcgaaatcgaccacagcacaataattatgacctctccaaccacagatacaaccctgcatggaggaatcac

SEQ ID NO: 6029 - DNA, 437 bp, Glycine max
  unsure (1)..(437): unsure at all n locations
agcttaagctccttgaactacacaaggctcttaatatttgaagagtatccttgtggaaccttcacccgacaaagacacttgttagtgcttagctctacggagctttaaaagattggctaagattttgttaaaacatgagcacttagacaatgaaggaaagctggagttgctgcacatgatgtccaacgttatgtcaaggaataagatcgggctgcacattgtacaaggcaagataaaatgtcaaatgaagaattgaagttgcaggatccacgatgtcggatacaatgtcctgacatcctgcccgagaatactggagttgctgtacaatgcaagataaaagtcaagtaaagaagtgaagctgcaggattcacgatgtcngacacgatgtcctgacatcttngcccgatatactggacatataanatctgtatatcttt

SEQ ID NO: 6030 - DNA, 486 bp, Glycine max
ctgaatgctctattcaatggagttgacaagaatatcttcagactgatcaacacatgtacagtggccaaggatgcttgggagatcctgaaaaccactcatgaaggaacctccaaactgaagatgtccagattgcaactattggccacaaaattcgaaaatctgaagatgaaggaggaagaatgtattcatgacttccacatgaacattcttgaaattgccaatgcttgcactgccttgggagagaggatgacagatgaaaagctggtgagaaagatcctcagatccttgcctaagagatttgacatgaaagtcactgcaatagaggaggcccaagacatttgcaacatgagagtagatgaactcattggttcccttcaaacctttgagctaggactctcggatagggctgaaaagaagagcaagaatctggctttcgtgtccaatgatgaaggagaagaagatgagtatgacctggatactgatgaa

SEQ ID NO: 6031 - DNA, 442 bp, Glycine max
gtgccaattcgtcttcttctttagtccagtcttcttctggcttcaatccatcagtgggctttccttctgtgtccagcatcttgggatgttcccagcctttgatgacagctttccaggttctgctatccagtgatttgaggaaggccaccatccttgctttccagtattcatagttggttccatccagaattggtggtctgttcactggtcctccttctttctccatgttcatcagaatttatctccctaggtctcactcagtgatttcgagtgcctgctctgataccaattgaaattctgataccaatgccagatgtcgtacaggatgtcacgacatcacgcttcagaacatgcagattatctctgagtgtatgaacagattaaacaagtaaataacacaagagaattgtaacccagttcggtgcaacctcacctacatctg

SEQ ID NO: 6032 - DNA, 430 bp, Glycine max
  unsure (1)..(430): unsure at all n locations
agcttgagcanattcaaacgacaataactntttactctgatgtctgattgagtcccgtaacatatcgagacgctcgaaattgaatgctgaagctctgagcaaattcaaacgacaataacattttactcggatgtctgattgagtcccgtaatatatcgacacgctcgaaattgaatgttgaagctctgagcaaattcaaacgacaataactttttactcggatgtctgattgagtcccgtaacatatcgagacgctcgaaattgaatgctgaagctctgagcaaattcaaacgacaataactttttactcggatgtctgattgagtcccgtaatatatcgacacgcctcgaaatgaatgttgaagctctgagcanattcaaacgaacaataacttttactcgggatgtctgatgagtcccgtaacatatc

SEQ ID NO: 6033 - DNA, 470 bp, Glycine max
  unsure (1)..(470): unsure at all n locations
agcttctgcttaagtcctttgcaactggtttaccaggtggngcttgataatttcttagttcatatcgcaagcaagcatttatccaccgcagatataccaattcttcaagatctgaacatcgatcagactgaaattgctcaatttccttcatcaagcgcacattttcttgtttaagacactcactttcttgcttcacagcacctgcctgcaccccaaaagcataagataaaaatttactgttaacaagcagtgactaaactaaaggaaaagagtacgtgactataatcttcctacctctgggtcttccagaaatgcatttgcaaggatctgggtagaatccaatcttcgagctaagtcagaattntctatctgcaatcttaaaatagatttcctcaactcttctgcttcagactcaagatactttagctnttgcatctntatttgaatatcttgatcataagcagcatctt

SEQ ID NO: 6034 - DNA, 361 bp, Glycine max
  unsure (1)..(361): unsure at all n locations
agctntacagcaaatgccactctactctcaagttttaaaggatatgttaacaaggaagcacaagtatattcaccaggaaaacattgttgtggaaggaaattgtagtgctgtgattcaaaagatccttccacccaagcataaacaccctgngagtgtaaccattccttgttcaattggagaagtcactgtggaaaaggcacttatttatttgggagccagtattaatttaatgccactctccatgtgcagaaggttgggagagttggagaacatgcccactaagatgactttacaacttgctgaccactccatttccagaccatatagagtaattgaagatgtgctggtcagagtaaaacat

SEQ ID NO: 6035 - DNA, 440 bp, Glycine max
  unsure (1)..(440): unsure at all n locations
agcttgtgagatcaatggttattacatacctatcaaaagcaaggtcataatcaatgcatgggcaattggaagagatccaaatcattggagtgaagctgagagattttatcctgagaggttcattggaagttctgttgactaccaaggcaatagttttgagtacataccatttggtgctggaagaagaatatgccctggcctcacatttgggttgaccaatgttgagtttccacttgcattgctaatgtattattttgattggaaacttcccaatgaaatgaagaatgaagatttggacatgactgaggcttttggagtatcagctcgtagaaaagatgaattgtgcctcattcctatcactttccatctttagcctacacaagctctacaataattagtaaaagtaaaagagctgagaataaagaanactctatatctat

SEQ ID NO: 6036 - DNA, 473 bp, Glycine max
  unsure (1)..(473): unsure at all n locations
gctcaaacttgagatgatnggttaaagcagtacaaaacttgattttcctaaagtgattacataaattatcaaagcaatctagaaagttgtactgattacctagaaaatcatcacataatattgatactccatacaaatgaatcaagtgttgtgtattttggataaacaaaaagggttatgagccatctaaatccaacacatctcaacccatgccgtggtgaaaaataaaactaactaaacaaaaaatgctcctccggcattgagccatctaagttatcgactcagtgtgctctttgttagtaggggtgatgacggtttttcttgtgagttcttnctgccttcatagtcaatgtgcttgaaatccaagattgatttgattcagaggaatcatcatagagccaacaacatagccgaccatcttccccacccgtccaaccgagaatgccttggctaggactattagtacgtccact

SEQ ID NO: 6037 - DNA, 446 bp, Glycine max
  unsure (1)..(446): unsure at all n locations
agctntagtgaagcttatcaatacatcaattattggtgtttcccaggcaatgcagatggcagcgaatatggctgtcttggagcgtgcttgtgatttcttctttcgccatgctgcacagctttcaggtgttcccttgagaatggtggagagaagcagaaggaacttccctctaagaaaagctcgtgatgctgctgaagagatgctctctgggctactcaaagccaaagttgatggatttatgacattgatcgagaatgtaaattggatgggtgacgaggcacctcagagtggaaatgaatatgtaaacgaggtcataatttatttggaaatnttggtttcaactgctcaacagatattgccttctcaagtccttaagagagtattacaggaagtttttgctcacatatcggagaagatagttgggactttagttagtgattctgtta

SEQ ID NO: 6038 - DNA, 483 bp, Glycine max
  unsure (1)..(483): unsure at all n locations
tatcagaaggggaatggtaaaataccacctcaagctgatattaagaaggtggcaaagtgtttcttttgcaagaagaagggacacatgaaaaagaattgccccgggttccagaaatggcttgagaagaaaggtaaatcaatctcattagtatgttatgaatctaatatggttagtgttaatattaacacctggtggattgattctggatctactattcatattgcaaattctttacagggtatgcaaaacctaaggaaaccagtgggaagtgagcaaagcattttatcaggcaataagctaggctcacatgtggaggccattggaacttgcattttgactttaagtagtggctttatttcaaaattagaaaggactttntatgtaccaagtttttcccgaaacttgatttctatttcaaggcttgtaccgtttggatattcctttaatttcaaagacacatcatnntgagttatttataattct

SEQ ID NO: 6039 - DNA, 476 bp, Glycine max
  unsure (1)..(476): unsure at all n locations
agctntcatgactgtatgctcaagaagcagatctgtgacaactcattctcatgattaaatttccacagttaagaacaacctctgctttatgaatccttcaaagggggaaaaatcaccttcattggttgcatcaacttgaacaaccatgcatgctctgaagaaggaagaactgccggaatcttcattttcttccagtccatgctaactaaatcagttgatgctgaataatccctgataagcacatcaatattttgtactctattcttaacatttcttatcttctgagtttggtcaatcacttcctcctttgcattatttttcaatgtaatcctcttatcaagactcaatcgtttggccttcttattctggtttctaaccacaatatcacaattttcatcatcatgttcattaccaaccttcctcctcctccacaagactctctcgactntactatcaatatcttccatattacaggg

SEQ ID NO: 6040 - DNA, 495 bp, Glycine max
  unsure (1)..(495): unsure at all n locations
acactatgatactaagcttatataatagaagaaatataacaataaaagatataaaacaagatagatntagcttaaaagtgaacttaaataaatcataaatcaaatacaacaatacaatctcaattcatacttcaatctcatgcaattgaatcatgtaatgttatgctgactcaactccatggagatttctacaacttttgggtagtccctataggcctcatcccctatcatggtttcacttttttaccactcaaggtattccttgagctgaccctgtggacaaagtatgattntatcgaatatagacaaatatgagtattagtttacttctataaggttntaagaccttacatacaacaacaacaacaacaacaacgccttatcccactaggtggggtcggctacatggatcaacttccgccataatgttctatcaagtaccatacttctatccaaaccattaatttcgagatccttgtttataacctctcttat

SEQ ID NO: 6041 - DNA, 435 bp, Glycine max
  unsure (1)..(435): unsure at all n locations
agcttgtaagtaactctatggacttaaactagctagccgcaaatggtatgagaagttgaatttcttgcttctccaacttgggtttcaacattctatagttgatcactccttttttatccatcacacagttgattcccttactactcgtgtatgtagatgacatagtcattgttggaaattctatggatatgataacttcattcaagcagattttagataatcaatttgggcattcttaagttctttcttggtgctggtgttctcagtgccaaacctgcaagcaccccttctgaacctacctttgagacttcgccaagatgtcgctcctatacctgactntcacacgcncagatatatcccatgttgaccaacaacttagtcaattntcagccctcccaacagtgagtcattatcaataagcccaacgcgtacttt

SEQ ID NO: 6042 - DNA, 461 bp, Glycine max
  unsure (1)..(461): unsure at all n locations
agctcttcatactntgatgttatttcagctctttccaagttagcttccttcagctgctctttgagtttctccacctcagcctctaatgcttgttccctttcgggtttgttactaagtccagagttgagattagtagtatcaaattcagcaacaaaagtgttaaaagcctggttttgaaagttagttgtactctcacgtacgcgatctttatccttaaacaaatttatttcaaaatccttggagggtacagtatcaggcttgtgtaattttccatgtgtactgcttttcacggtatgagtntgtgtgttaaccactttgttaggaccaacatttntgggtaactgttcgttntcaggaagaatcctatcatgtntcggtgaaatatggtggctagatggttcttcatcaaaaattggtttactcttatcctcagcaacaagtgattcctttgcatgctgagt

SEQ ID NO: 6043 - DNA, 487 bp, Glycine max
  unsure (1)..(487): unsure at all n locations
tccttaagaagattcctaaagaagctaaagcttagctacacatacctctctaatagctaagctcacctccttgagatgagaagctagagcttagctacacaccccctataatagctaagctcacccccatgaggaaaaacatgaaaataacaaaaaaagtccttattacaaagacaactcaaaatgccccaaaatacaaggctaaaaccctatactactataatggccaaaatacaaggcctagacgaaggaaaaacctattctaatatttacaaagataagcgggctcatacttagcccatgggctcgaaatctaccctaaggctcatgagaaccctagggcctttccttggatctctagcccaatctacttggagtcttctagccaatgcccttgcggngtaggattgcatcattccctccaccttggaaaggatttgacctcaaatcccgaggttcttcatactctgngctccttccctcaaca

SEQ ID NO: 6044 - DNA, 398 bp, Glycine max
  unsure (1)..(398): unsure at all n locations
agcttctcattngatccagcagaggaggagcatacaacctatttcactcaagtcacacccacggaattcaagcacaagagacttggtcattgtcatcttgaaagaatgctaaacatgaaaaaaaggaaatatgcaaaagaaaatttgaagaagtttcaaatggaggaatgcaaatctgttagcacaccaatgaatcaaaaggtgaagttcaacaaggaagaaggtggtgataacattgatgaaggatattgtgggagcttgattggatgtctaatgtatctcacttcaacaaggtcaaacattctattttctaaaaagaacaaaactggaatttttgttgacaatcaagtagccattgctattgcaaacaatcccgtgtgtcatgggaagattaaaca

SEQ ID NO: 6045 - DNA, 427 bp, Glycine max
  unsure (1)..(427): unsure at all n locations
ngtagggttaaagtctcacgaatgtcacgtgctcatgcaacaattgttagccgtggctatacgagacatcttgccaaacaaagtcaggttagcgataactcgcttgtgctttttcttccatgctatatgtagcaaagtcattgatccagtcatgtttgatgagttggaaaatgaggcagcaattatactgtgccagtaggagatgtatcttccccctactttctttgacatcatgattcacttgattgtgcatctggtcagagaaatcaaatgttgtggtcctatttatctacggtggatgtacccggctgagcgatacatgaagatcttagaagggtatacaaagaatctatatcgtgcaatagcatctattgatgagaggtacattgctgaagaagtcattggaatttgttcagaatacttagag

SEQ ID NO: 6046 - DNA, 390 bp, Glycine max
agcttgtagggttaaagtctcacgattgtcacgtgctcatgcaacaattgttagccgtggctatacgagacagcttgccaaacaaagtcaggttaacgataactcgcctatgctttttcttccattctatatgtagcaaagtcattgatccagtcatgtttgatgagtttgaaaatgaggccgcaattatactatgccagttggagatgtattttccccctgctttctttgacatcatgattcacttgattgtgcatctggtaagagaaatcaaatgttgtggtcctgtttatctacggtggatgtacccgattgagcgatacatgaagatcttataagggtatacaaagaatctatatcgtccataagcatctattgttgagaggtaca

SEQ ID NO: 6047 - DNA, 423 bp, Glycine max
agcttagtgacataagccaaacacatggtattgtctaatgcccctatgaaagcccatccatgtcccaggttccaagcaaacacagccattccccaccaccacacctgctctccaaagtaatttggatgccgagaataataccacaaccctttgtcaagaatagggacctccttgttctttctactcacaaagttgtaaagctgagtatcagcaatgtatgccgtgacaatgccagatacacacacaactatggctaccaagtcccacatgctcagaggctggttcaccgagtggatgacatagaacggaagagacaatccaatcagaaacacctgcaaggttgtcttgatgtaaattaaaagtaaaagcaagggaaaatgatgactaagagtaaccttaattacctgctgagggacgtagatg

SEQ ID NO: 6048 - DNA, 482 bp, Glycine max
  unsure (1)..(482): unsure at all n locations
tcagtttaattntaaaaatggtctaactatcatggtgcatgcatgttgattgaggaatgttgggatccaacacctgttgtgaggccaacattttctcaggtcattgtacggttggacaaaattgttgcaaattgctcaaaacaaggatggtggaaagatacttttaaactcccttggtatggttccttgacggatatccttataaaattttagattctttggttgaattcaaaacggtgaagtgtaataccttgaaatgctaaaatcaaccatcccttgtggtttgtgtctgggatagggatgttttacctcgggccattttagtccgatttgagcaatgctagttgcaaaaagactgatattactgttctacttgttgatgaaacttctttgctgttttctaaacttggctttaccatgattcatttcaatgtgtgtaggaaataaataacaaggtacataccacgtggcaaggaagacat

SEQ ID NO: 6049 - DNA, 455 bp, Glycine max
  unsure (1)..(455): unsure at all n locations
gaatcggacatccgtgtcanaagttatgaccattcaaatatgtcgagagtttccgttgtgcaatttcgagggtctcgatatattatgtcccaaattcgaacatccgtgtgaaatgttatgaccatttgaaattctagagagcttccgttgttcaatttcgagcgtctcgatatattatgtaccaaattcggacatccgtgtgaaaagttatgaccattcgaatttctcgtgagcttccgttgttcaattntgagagtctagatgagttatatacgcgaatcgaacattcgtgtgaaaagttatgaccattcaaatatcttgagtgcttccgttgtgcaatttcgagcgtctcgatatattatgtcccccatttggacattcgcgtgagaagttatgaccacttcaatttgtcgagagcttccgttgttcaatttcgagcgtctagatgagttatg

SEQ ID NO: 6050 - DNA, 383 bp, Glycine max
  unsure (1)..(383): unsure at all n locations
agctnntgacggactataccaagctctaggaaccagggacggagaaagatctatatataggcttgctaagggtagagagaggaagactagagatttggatcaagtaaagtgtgttaaggatgaagaaggcaaagtcttagtgcatgaaaaagatatcaaggaaaggtggaaggcgtatttccacaacttatttaatgatggatatggatatgactctagcagtctagacacaagagaagaggaccggaactataagtactatcgtcggattcagaaacaggaagtaaaggaagcgttgaaaagaatgagtaatggtaaggcggtggggccagacaacatacctattgaagtgtggaaaactcttggagatagaggtcttgagt

SEQ ID NO: 6051 - DNA, 468 bp, Glycine max
gagaagcaagtcaaaaactcttttcaaagtaaaaatgttatttctacttcaaaaccccttgaactacttcacattgatttatttgatccctctagaattatgagtttgggtggtaattactatgtcttagttatagtggatgattactcaaggttcacatggacatttgtttttgaaaaccaaaaatgaagcttttgatgcttttcacaaacttgccaagatgattcaaaaatgaaaatggtctttatattgtttcacttagaagtgatcatcgaggtgaatttcaaaaatgagtcttttgaaagcttttgtgaagaaaatggaattcaccacaatttttcttccctaagaacacctcaacagaatggtgttgtgtggagaggaaaaatagatcccttgaagaaggtgcaagaacccttttaaatggaacaaagctacctaagtacttttgggctaacgttgtagaca

SEQ ID NO: 6052 - DNA, 475 bp, Glycine max
  unsure (1)..(475): unsure at all n locations
cgcatcaatataaccctntaattgtaactcagaatctctccataagtgaggaactcgtctttagttcttctcaagtacttaagaatggtctgaagtacttttcaatgttcctcaccgaggtttactggatattgactagctgcacttagtgaataagcaacattaggacgtgtacaaatcatgatatacatgatagctcccactgcgctggcatatggtactctagtcatgcattctttctcttcatgagtntaatataattntgtaagatgacccttgtgttgaatgtcttcttatgacctttgttgcttgtttgataattgggagtaatatagagatgatttatgatgaatacctatgaaaaataggcatgttaagcttcaaaaattgcggttactccttttttaattcatttcatagtttaaggaactaattaaaatagaaggacacatgtgtaggggactctgttattatt

SEQ ID NO: 6053 - DNA, 466 bp, Glycine max
  unsure (1)..(466): unsure at all n locations
gcttaagaaagagcctngagggtaatgttctcaacaatagttgaattctccaaactgtttattaatatatctccattctgatttataatttattgattcagttctcttgactttcatgtgaacaggtgattgcagagtatttgtccttagaagaagctgctggaataaaagagggattccagctgatggatacaagcaataaaggcaagattagcgtcgatgagctgcgtgtagggttgcataaactaggtcaccaaattcctgatggggatatccaaatacttatggatgctgtgagtatttttcactttatctggaaacttttcttttctgtttgttctacaattgatgtgtgaagaaataagtagtttggtctcttgtttttcaaaattntatgttcattgtaatatatcanactaattaattgcaaacttggtaggagttattagtttataaatgctaacac

SEQ ID NO: 6054 - DNA, 429 bp, Glycine max
  unsure (1)..(429): unsure at all n locations
agctnntgagcttgagcacccacgagtgtttcagcaccctagtaccaagagtgtatgtaaagtttcttcgagccacacttccaagagcagtgtagggggttctgtnggttcgagcgaggggtttccggcagtattgaaaacaatgtgggacaatgtgggtgtcgagggagcggtttctggcagatttcaggcgggaggagaaagagaacagcgactgcaaggttttcgagcgcacgggttgtgaaatgccaatgttttaacttataaacataacaacatcggttntttaaggataaccgatgttaactaaatatagttaacatcggttntggaaatcatataggttatatcggttnttaaaaaatcgatattaagatcaattccttaacatcggttttcaacatcgattttgagaaaaccgatgtttac

SEQ ID NO: 6055 - DNA, 477 bp, Glycine max
acatctaaacatccttcaatttacaccacaatatgaaatgttatcatcatatgcacagcaactaaattattaagaaaaatagaagtgcaggctaaagagatgtccaataaaagctaaataataaataaaatacattaagaatatcttaacacacgagttgttataaatcttgtagtgcatatctttgaattttaccgatgaaaaaatttattgacaaattcaaaattcttaaatttaatttagatatcatgaataattgaaggccagtcatgtctttgtatataataaatcttatttcttttatttttcttttcaaataaaaaatatatatataactttctttatccccaaataaataaaatataattattcttttacctcagaaataattttttaacttaaattccgttttcatctctataaatgtgttagtttttggtctagtgtctattagttaattatagctcggacccatat

SEQ ID NO: 6056 - DNA, 473 bp, Glycine max
  unsure (1)..(473): unsure at all n locations
ttcaaacgacaataactgtntactcggatgtctgattgagtcccgtcatatatcgagacgctcaaaattgaatattgaagctctaagccaattcaaacgacaataactttttactcggatgtctgattgagtcacgtaatatatcgagacgctcgaaattgaatgttgaagctctgagctaattcaaacgacaataacttttttctaggatgtctgattgagtcccgtaacatatcgagaccctcgaaattgaatgttgaatctctgagccaattcaaacggcaataacttttttcttagatgtttgattgagtctcgtaacatatcgagacgctcgaaattgaatgttgaagctctaagccaattcaaacgacaataactttttactcggatgtctaattgagtcctgtaacatatcgagacgctcgaaattgaatgttgaagctctgacccaattcaaacgacaataactt

SEQ ID NO: 6057 - DNA, 464 bp, Glycine max
  unsure (1)..(464): unsure at all n locations
agcttgtatcaaattcaaacgacaataacgttntactcggatgtttgattgcgtctcgtaatatatcgagacgctcgaaattgaaaacggatgctcgtagcaaatgcaaaccgcaataacttttaactcggatgtatgattgagtaccataatagatcgagacgctcgaaattgaaaaaagaagttctgagcaaattcaaacgactataactttttactcggatgtctgattgagtcccgtaatatattgaggagcacgaaattgagaacagaagctctgaccataatcaaaccaaaataactttatattcggatttgcgattgagtcccgtaatatatgaagacgctccaaattgaaaacagaagctctgaacaaattcaaacgacaataactttntactcggatgtccgattgagtcccgtaatatatcgagacgctcggaattgagaacagaagctctgag

SEQ ID NO: 6058 - DNA, 460 bp, Glycine max
ggtggaaggggtctcccatatctcattgtgtttgcaaatgattttctcttgtttggggaagcatctgtaaagcagatggatattattaatagatgcttggattcttttttgatatgtctagttagaaagtttcaatatctaaaactagaatgttggtctccaagaatgtcaattcttcttgggttgtggagttgagtgagctatctgggttatctcctatgttagacttggggaagtacctcggtgttatgtttttgcattgtaggaagagtaaggaccattattttttatctcctagaccataccaaaaagaggctttcctcttggaaagctaattctttgtcattctctggtaggcttaccttgacccaggcagtgattgagacattaccaacatacacaatgcatgtgactcttcttcctatgagtgtgtgtactaagttggaacgaatggccaaag

SEQ ID NO: 6059 - DNA, 406 bp, Glycine max
agctatcgtgacattgatatggtcataacccttcacacggatgtccgattcaggcgcataatatatcgagaagctcgaaattgaacaacggaagctctcgagaaattaaaattgtcataactttccactcggatgtccgattcaagcacatcacatatggagacgctcgaaattgaagcacggaagctcttgagaaattgaaattgtcataacttttcactcggatgtccgattcaggcacatcatatattgagatgctcgaaattgaacaacggaagctctcgagaaattgaaatggtcataacttttcactcggatgtccgattcaggcacatcacatatcgagactgctcgaaatgaacaacagaagctctccagaaattcaaatggttataacttttcacat

SEQ ID NO: 6060 - DNA, 459 bp, Glycine max
ttcgagcgtctcgatatattacgggactcaaccggacttccgaacgaaatgttattgtcgttataatttgcagagagcttcggttttaaatttcgagcgtctcgatatattacgggactcaatcggacttccgagtgaaatgttattgtcgttcaaatttgctacgagcttcgattttaaatttcgagcgtcacgatatattacgggactcaatcggacttccgagtgaaatgttattgtcgttcgaatttgctacgagctttggttttaaatttcgagcgtctcgatatattacgggactcaatcggacttccgagtgaaatgttattgtcgttagcatttgctgcgagcttcggttttaaattttgagcgtctggatatattacgggactcaatcagacttccgagtgaaatgttattgtcgttcgaatttgctacgagcttcgggtttaaatttga

SEQ ID NO: 6061 - DNA, 431 bp, Glycine max
  unsure (1)..(431): unsure at all n locations
agcttgtagcanattcgaacaacaataactnttcactcggaagtctgattgagtcgtgtaatatatcgtgacgctcgaattttaaaaccgaagctcgtagcaaattcgaacgacaataacatttcactcggaagtcctattgagtcccgtaatatatcgagacgctcgaattttaaaaccgaagctcgtagcaaattcgaacgacaataacatttcactcggaagtctgattgagtcccgtaatatatcgtgacgctcgaattttaaaaccgaagctcgtagcaaagtcgaacgacaataacatttcactcggaagtccgattgagtcccgtaatatatcgagaacgctcgaatttaaaaccgaagctcgtagcaaattcgaacgacaataacatttcactcggaagtctgattgagtccccgtatatatc

SEQ ID NO: 6062 - DNA, 462 bp, Glycine max
ctcgctctgtggaactggcattgtgaacatatcagcatgatcgggcagagtgctgatcttatgaactctgattcttctttctgaccgaatgaagtgatatctaacatctatatgcttggttctatcatgatgaacctgatccttggacaagcatataacactaaggctatcacagtagatgttagcatattcttgattaatttcgagatcatttatcagacctcttagccaaattctttcctttgcagcttcagtaagagccatatattcagtctcaatagttgagagggcaacagaaggttgaagtgttgccttccaactcaccaagcagccaccaagggtgtaagcataccctgttagggaccttcttttgacaagatcagcagcagaatctgcatcataatagccagtgaggcaacaatctgagtgagatccatatatcagacctacatctacagtccc

SEQ ID NO: 6063 - DNA, 462 bp, Glycine max
  unsure (1)..(462): unsure at all n locations
cattcttctganactaatcaactcttcttgcattgctttaacctagtactcatcagatataacatcatctatgtgttttggctcaatctctgagagtaatgtgttatgcttgagagaattccttgtctggactttgcccttaggatcaccaatgatttgagactctggatgatgttttctcaagaatcgtcctgttggttctctaacttctttaggtttatcgtccactggtgagttggacacatgtttgtcttgactggatgcaacaatagatttcacgatattttctattttcatctctccaaaagactcatctaggtctaacattgtagtgtcagacttgttgttaaattttacatgaatagccttttccatatcaaggttctagacttgtacactctatatgccttggacgattcagagtatccaagtacgattccaaaatcacatttggagtcaaac

SEQ ID NO: 6064 - DNA, 475 bp, Glycine max
  unsure (1)..(475): unsure at all n locations
agcttgagcttagctacacatacctctctaatagctaagctcacctccttgagatgagaagctagagcttagctacacaccccctataatagctaagctcacccccatgacaaaaaaacatgaaaatacaaaaaaaaaaagtccttactacaaagactacttaaaatgccccgaaatacaaggctaaaaccctatactactagaatggccaaaatacaaggcccagacgaaggaaatacctattctaatatttacaaagataatcgggctcatacttagcccatgggctcgaaatctaccctaaggctcatgagaaccctagggccttcccttggatctctagcccaatctacttggagtcttctacccaatgcccttgcggggtaggattgcatcagtaagtatcccagcattacaattatattcttgtgctnnttgcaatcaaaacattatgctctattcctagcaacgtaat

SEQ ID NO: 6065 - DNA, 477 bp, Glycine max
  unsure (1)..(477): unsure at all n locations
ctgctgttaatactgccttacgactattagtactcaccaacttgatactcttctccccaaccatatcagagagtatggtttcctgaagctctactaagccatgctttgattnttctctgatatcaccaaggaaacactgaccttcaaattgatcagcaatcaaattgtacactgcacaagcaatagcggacttccctattaccacaattccataaatccccaccatgcttactccttgattggatccaacatccaaaagtgagttcacctcttgcactctagactccaatccaattggataattagccacatgtaaagggctacgatttatctatctggacacctcttcaaaaattttctgaataacttcatgttcatacctacccaaatacaaaatacatataaagttaaatcaaatgcatcaaatccatgccccagttcattcacaaattcaaatctcattatatctttgtcatg

SEQ ID NO: 6066 - DNA, 462 bp, Glycine max
aatacagagaaaaatagaacataagcaaccataaactaaacagtatcccttgcagttacctgcagctacgtcattcttggcatttttagtgactcttacagtttcttgtagctcctccaacttatggacccttgatttgtcagccccaaagctccatctacataggtaaagacaaatgcaaacaataatatttaacattaatcataaagattaagaataagagaaacattccttgtttcactcatatccatgctattcatggtccttggctccagatccatgagcactgcccttggcacaaaatatctactggtttggatagctcaactactttagaaagtgttaattcactcaagcaatgtgttcacattcttaaaggaaccgcaaccatctcattcctacagccagcactagacacttacaatcttttttatgacattattctactctctgatagtcaca

SEQ ID NO: 6067 - DNA, 348 bp, Glycine max
  unsure (1)..(348): unsure at all n locations
caagcttttctctgtacacctacattcctatacatgaaaaacnttttttgtatacacacgtattattaaaaaccctttctctttatatcaacacggtctatataaaacatctattccttttcaaagatttctttttcctttttcaacatacactcgttgttttataaaaaaattttctttatatacactcattgctcacacaccagaatttcttttcacacattatttatacacacaaaatcttttcatacactctttatatacaaaaactcttttcttttctttatataagatatgacatttgttcacaacgcctctttctttttctattcttggtggtatcatgat

SEQ ID NO: 6068 - DNA, 343 bp, Glycine max
agcttcgacattcaatttcaagcgtctcgatatatgacgggactcaatcagacatccgagtaaaaagatattgtcgtttgaattggctcagagcttctacattcaatttcgagcgtctcgatatgttacgggactcaatcagacatccgagtaaaaagttattgttgtttgagttggctcagagcttcgacattcaatttcaagcgtctcgatatatgacgggactcaatcagacatccgagtaaaaagatattgtcgtcttaattggctcagagcttcgacattcaatttcaagcgtctcgatatatgacgggactcaatcagacatccgagtaaaaagata

SEQ ID NO: 6069 - DNA, 478 bp, Glycine max
  unsure (1)..(478): unsure at all n locations
tcagagatctgctagaatatagcttcagcctctctcttgttgttgaggttcttatcnaggtgccacttcatggctagccttcgatatgctttcttgagatcctcatctttggcgcttctatctacctgaagaatcttgtagaagtccacgcccatgctttctctgtttttttcttcactgctatgaaacaagataaaggaggaattgtgaattatctcatatctctctctctttacagcatcatgatatcacgttccttctgatacaatacaggtaccgggaggaatagatgtcgatgctgctgctagtccaatcccaaatgtggtataaatatatcatttatttataatcttatgttaatttaacctagctaatagttgaataataataatcataataataactataataataatagggtaggtatatattccttgacattcttttaacttgtagactcttatgtgatataattctt

SEQ ID NO: 6070 - DNA, 464 bp, Glycine max
  unsure (1)..(464): unsure at all n locations
ccatctatgcaatcaaggggttcacaatcacaatggaaatttaattttcatcttttattacttacttgaccaaattcactcacattctataacatactacatatatgctacatctgatctgatcatatcttactgatatttttatactagaaaattatatatatgtatatatatatatatatatggcatctttttaaatcaatacacacgagatgctggagtttttgtttccgtagtcagaactcatgcacgtagagagacagtatagtcaattaatatgttaattaggtaccctacacccacctgtttccaagaattccatgtagctntaagatggtatgtacttcttctatgctgaatttccctcgtttaatatcaggcctcaagtaatttatccaacgaagcctacaactcttgccacaccttaacaaacctaaacaatcatatcatatcatatagataag

SEQ ID NO: 6071 - DNA, 465 bp, Glycine max
agcttgtaatgttcaggaatgtgtgaaagttgcctcttctcttttgctaccatcaacaaatccaatgctgaaacttacaggttattggtgggtaaattaggggagggatctgtgaccagattcgatcaggatccattacttggtgaaaattcaaagtgctgttcttgttgtaatgagcaatgggttttaaaaggttatgatcgaaggttggtaattaccaagtcaattgggtctggcaatgctgattttgatgaatcaaacgttgttggaaacaaatttcacaagacaagaagagctaaaccatttgtatcatccagagctacacaccttagaaataaacaggcagatcctttgtctcatgtcggttacactgagctaaagattacttcggatactgagtctgaaccggatgtttccttatctgatgatgatggtacgagcataccagttcacggtacatatgac

SEQ ID NO: 6072 - DNA, 476 bp, Glycine max
  unsure (1)..(476): unsure at all n locations
tctacttgtgctgtcttcatgcgattctntntactccctccaagaatattatgtcgtaaatcacaacggttaaagtgtgcgcaattgaatttcgaacaacatatccaaatttcatgaaaatccaacggttaacgaaaccgggatcgtagttttactgagaccattttgggtttctgcgggaaaagagaaagctacggtacaaagggtattagctctgacatgtttttacaattcccaacggtgaaaatgttangaattgggttgcgaacatggtgctcaaatttcatgacgatccaacggtgaataaatccgagatcattgtttttctgagataggtttggttggctgcgggaaaaagaaaaggttttgggaggagaaggagaaaaacgaatatgagagaaataagaggtaccgtcagtgtaaaaactgacctagcgctatntatagctagggctaatctatntatgtatttatta

SEQ ID NO: 6073 - DNA, 448 bp, Glycine max
  unsure (1)..(448): unsure at all n locations
agcttgcagatggtttattcttggaatcttgtcgagaggttgctacaaagtaccctggaataaagtataacgaaattattgtggataactgctgtatgcagcttgtttcaaagcctgaacagtttgatgtcatggtatgtgtatttacattctattctggtttgctgctgtttatgcacttatgtaattttgtctaatgtatttatgcagtaagcacacacacccttgagttaataacttgtacaagagaaattagctgagaaatgagtagttgcacgaaagagagtgaaaagttataacaaaagctaagttgctctacgataaatcatgttggtccaatcaaagaatatcttaaggttaattagaacatataaaacgtaggaattgagacctttccaaatctggctgttatgttctntaagattgttagcagtgggaaaatggatag

SEQ ID NO: 6074 - DNA, 490 bp, Glycine max
actcagcttcaagaaaagatggcctcagcaaattccttgtgtccagaagggaattctataaatagacctccaatctttaatggagagggttaccactactggaaaacccgaatgcaaatttttatcgaggcgatagatctaaatatctgggaagccattgaaatagggccttatatacccaccacagtagaaagagtttcaatagatggtagttcatcaagtgaaagcataaccatagaaaaacctatagatagatggtctgaagaggatagaaaacgtgtacaatacaacctaaaagccaaaaacataataacatctgccctaggaatggatgaatatttcagagtttcaaattgcaagagtgctaaggaaatgtgggacactcttcgattaacacatgaaggaactacagatgttaaaagatcaaggataaatgcactaactcatgagtatgaattatttacaatgaatacaaatgagaatattcaga

SEQ ID NO: 6075 - DNA, 413 bp, Glycine max
tggagaagtcctctatgattcgctgatagaagcctgcatgtccaaagaaactcctgatgcctttcacattgactagtggagggagcttttcaatgacatcaatttatgctttgtccacctctatcccccgagcggagatcttgtggcctaacactattgcttccttgaccataaagtggcatttctcccagttcagcaccagatttactttaagcaatcagtagcatttattaaggccttctccaatggggagtgaatggctaggtaatgcataacgagatcgacttcttgctctattgcctgcaccttgaagcgtgtgatactatcactgggatgttattttgcttcaataagttgaagagactttctattctcccactcatttctaagttccattcctatgtcctaacaca

SEQ ID NO: 6076 - DNA, 466 bp, Glycine max
  unsure (1)..(466): unsure at all n locations
agcttgtgtcacaattcattgtgacagtcaaagtgccattcacttagcaaatcaccaaatgtaccatgagaggacaaagcacatagatgtgaaactacacttcatcagagatgtgattgaatctgagaaggtgaaggtagagaaggtttcaacagaagaaaacccgactaatatgttcacaaagtccctctctagtgtcaagttcaagcactgcttggacttgataaattttgaagatgcctaaagcagattggtagaagtgcagccttgaatcacaaggtagacacttgctgatttagagtcaaggtggagatttgtggtgtgtgactcanaatcacaaatgacacaagtgagaagactttaaagtaatgatgtcataactgttttcagttattataactgaattggttttggcaccaaagcatagctagagtgtacatatatattctngatcatgtaatgcaat

SEQ ID NO: 6077 - DNA, 464 bp, Glycine max
  unsure (1)..(464): unsure at all n locations
ctgatggtgtcgagaagaaatcacatgtttgtcatcatcaaaaagggggagaatgttaatgtatgtatacatgattntgatgatgtcaaagaagaatctaacaaggctgcttcaaatgataagtatttgcttcaagaataattcaagattgcttcaacaaacaaagccttgtttcaagattcactaaagaccaagccttgccttaaaacaaagtgctttcaagacatgcaaggctctggtaatcgattaccaggaagtgtaatcgattaccagaagacagggttgagaaatagctgttgaaaaatgttttgaatttgaattttcaacatgtaatcgattaccatatgtctgtaatcgattaccagcaatggaactttggaaattcaaattcaaaagtcataacctttcanattataactgtgaaattgattacacaaacattgtaatcgattatcagtggaaag

SEQ ID NO: 6078 - DNA, 459 bp, Glycine max
tccttattcaattcaattatctatttctaattttatatactctataaaaaggggagtggtcatgtaaaaaaatgttctcaaaatttatgtaaaaacaaaatttgtaataatatattctaattaaataaaatgacaactctaaaacaagataataaatctaaattcaaagctaagacagaacgtgtgtaatcatttaaataaattcataaatatataatctcgaagtgttgtaataaaatactaaaattacagcaataatggcatttatgtagataatgaaatttagtaaatataaaataatttttgaataacttcaaatgtaaccataatcattaggtgtgttaaataaaaaaaaaacctaatttatgtaattactctaaagaacctaatttatcatggcagtataaacactatagaaacatccaacacgttccataatctatattatgataagtattt

SEQ ID NO: 6079 - DNA, 448 bp, Glycine max
  unsure (1)..(448): unsure at all n locations
agttattacaaaaagttttaacttctggtaatcgatatagcattntatcttagatataacactttatataagaagcatggtctattatctcgaacatctacaacactgttggatcaagtgacctcataataattaagaagagagggttgaattaattatgaacgggtcttgactaattaaaaaatttatccttcttaatgttgctagattcaatttggctttactactaagttatgagaaagtaaagaacagaaacaataacttagacaaaagtaaagcagaaataaaaagtacacaacggaaagataaaaagcgtaggaaagaagaagacaaacacaagatttatactggttcggcaacaacccgtgcctacatccagtccccaagcaaccaccggttcttgagatttccaataaccttgtaaaatcctttacaagcaaagatccac

SEQ ID NO: 6080 - DNA, 457 bp, Glycine max
  unsure (1)..(457): unsure at all n locations
gatgttctcaaatgtaatattggaacatttgcttggagcttagatatcgtgctaggtatagatactaatttcctctatcacaaattggctttagacccctcggtaaagccaatcatctagaaaaggagaaagttaagggaggaaaaaatgaaaacaaatgctgacaaaacaaaaaagttgatattacatttcagagaaattcagtatccgacctagctggcgaatgtggtgatggtgaagaaatcaagagggagtggagaatgtaggtcgacttaacaaatttaaacaaagcttgccctaaggatttgtatcccctaccaaacatcaattgtctagccaatagggcctcgggttaccaattacttaatttcatggatgcctacttggggtataatcgaatcaagatgcatcccatggatgaggacaaaacaactnttcatcgtggacaatccaatta

SEQ ID NO: 6081 - DNA, 477 bp, Glycine max
  unsure (1)..(477): unsure at all n locations
gcttatatagcatagganaaatgagtgttactttaaatttaattacaatgtattttataaagattgtacattaaaaaaaatcagttatgtatattgcagtttatataaagatagagtataaaaatgatgggaatatattagacactaacttaaaagcaactcataacattaagccattataaattcaacataccgtacattgataattcaacatagtagcctctcatattttatattatcttcataatgtgctcaacattttcaaatgccgtacaatgtataggagataaattgaataaaaatagaagaatcagataggttgcagtgaaaaggtcttttcttgaagttattgttggagtattatacctagcaaattgctatacgtacaatgaatcatgaagtcaaatgtgcaatagaggataaccaccatctgtatgtagaatcatgttaaatattatatatggatttctgagagat

SEQ ID NO: 6082 - DNA, 439 bp, Glycine max
  unsure (1)..(439): unsure at all n locations
agctngagtttatgaaaatggacacaaatagtgggatgttgagttagtttttgggggatttcaatttcaaatatgaaatgtgttcattttattttgtgaaggtttttggtccttctacacagcaaatggatctttatgaacaagttgttactccaatagttaatgaagttctagagggatttaattacactatattcgcgtatggtcaaactggtacgggaaaaatctacacaatggaagggaaatgtaaaaaggccaaggtatgctttagtgttttgatgttatccacacgcagattaatgagttaggttagtgacttcatttgagtattgtactacagagtggtcctaatggaaagttgcctctaggagctggagttattcctagggttgtcaagtagattcttgacacacttgagagccagaatgttgtgtacaat

SEQ ID NO: 6083 - DNA, 411 bp, Glycine max
  unsure (1)..(411): unsure at all n locations
agctngaaggtaaactagatgccttggttaacctggtaacccaactggccatgaatcaaaaatatgcacgtgtcgctagactctgtggtttaggctcctctgccgaccaccacacagacctttgcccttctgtgcaacaatctgaagcaattgaacagcctgaagcttatgttgcaaacatctacaacagacctcctcaacctcaacagcaaaatcagccacaacaaaataattatgacctctccagcaacaggtacaatcccggatggaggaatcatcccattcttagatggtcgaatccttcacaacaacaacaacaacaacaacagacttattttcaaaattctactggcccaagcagaccatacgttccttcaccaatccagcaacaacaacaatagcaacagcccc

SEQ ID NO: 6084 - DNA, 301 bp, Glycine max
ttcacccgacggagacactagcaaaaactgatcttctgcttcttggacaaacgcttgcaggctgggggcaactaaattctctctcccatcagaccttggatgcaactgcgatcgtatacccatatcagatcgatcttgacgggcattgaaaccatgcttcgtgttgccttgagatgctaaaaagcataccaatacagtgtcacaaacatttctctccacatgcatgacatcattacaatgtgtaacgtcaagatcacaccagtgctaacgatcaaagaaaatggacctcttcttccatatg

SEQ ID NO: 6085 - DNA, 392 bp, Glycine max
  unsure (1)..(392): unsure at all n locations
agcttaataaatctatatatggtttgaaacaagccttcagatagtggtaccctaagtttcatgggataatttcttcatttggttttgacgaaaaccccatggatcaatgcatataccacaaggtcaatgagaataaaatatgtttttttgttttatatgtagatgatattttacttgcagccaatgatcagggtttgctacatgaggtgaaacaacttatctctaagaattttgacatgaaggatatgggtgatccatcttatgtcatcggcattaagattcatagagatagagttcaaggtattntaggtctatcacagganacctatattaacaaaattttatagagatttcagataanagattngtcatcaagtgttgctcccattatg

SEQ ID NO: 6086 - DNA, 179 bp, Glycine max
agcttttaaggagacagtttcgaataatgctcttctttgtaatgacaattaataagtctcaagggcaatcactatccactgttggactttacttacataaaccattgtttagccatggccaattatatgttgcaatatccagagtcatattaaatattgatgtaaacgctaatatatga

SEQ ID NO: 6087 - DNA, 385 bp, Glycine max
tcttctttcttctgctctctggagaattttcttttattctcctcattcaacagcgccccagagtactggtaatcctctggcttcataaacggcaacccaccgggtgcttccttgggaacatcaaactgctgcccgcgaatctcctcaagaatttgataaagaggagtccccaaaggcgcatgagtggcaagaagcttcctcgctggagtcctaatgggcacatatgatgcggggggatccaaaaccttatacccctcttgaggaaacatagcatcaagctcctcatcagtcaaggggcgattcctctcttcaaatccctctcccacctcaacaaattgtattgttcccgagtaatggagccttgtaaagccccaagggttggagt

SEQ ID NO: 6088 - DNA, 485 bp, Glycine max
atgaagacaatcctatttagatgtggttcttaaacaccaagtacttcctgctggacaattggcagagaacctaagcattgctactgtggattggcgtgatgttaggtctatttgcctacaaatttgcgcagtataggagaaaagctgcatatgaggtgatgggccattgtgtatgcatggccaaaggtgctgcccaaacacttaaattaaaggtgactaaaaaggaacatatgtatctactttgttctaatgtttgttgagacttagtagctttcataggtcaataaggtaatgaaagttgaagtcgtaagaacataatgagagtattttttttcagtgtatagctgtggcagtaacaattgaagttggtatacatggcatctaccatcttgcttgtgactttcctcgccttcttgatgcaagtagtgaacaatacaagctcatggaaccttttttggagaacaaccctcatgttattggttttt

SEQ ID NO: 6089 - DNA, 534 bp, Glycine max
tcatgctgaagtatgtatggcaaaacttcattactgttgttgaacacatacaagtgagcttgtaaaaaatcttctacacttggagtgataacatgcagtcctcttgtacccttaccggctactctgtcgtcatggcgatactcaggaaggccaacaggtttagccttttcaatgtagtctgaacaaaattcaatggcttcttctacaatgtatctttcaacaatagatgcttccgggcgatgtagattcttcgtatacccttttaagatcttcatgtatcgctcaaccgagtacatccacctcaaataaacaggaccacaacatttgatttctctgactagatgaacaattaagtgaattatgatgtcaaagaaagtagggggaaaatacatctccaactggcacagtattattgcggcctcatttccaggtgatcaaacttgacaggatcaaggactttgctacatatgtcatggaagaaaatgcacaagcgagttatgggtaaccttactttgtaggcaaaatgtctcgtat

SEQ ID NO: 6090 - DNA, 511 bp, Glycine max
agcttatgctgcaaacatctacaacagacctcctcaacctcagcagcaaaaacaaccacaacagaacaattatgacctctccagcaacaggtacaatcccgggtggaggaatcatcccaaccttagatggtcgaatccttcacgacagtagcaacaacaaccttattttcaaaatgttgctggcccaagcagaccatacgtccctccaccaatccagctgcaacaacagcaacagccccagaaacagcaaacagttgaggcccctccgcaaccttcccttgaagaacttgtgaggcaaatgactatgcaaaacatgcagtttcaacaagagaccagagcctccattcagagcttaaccaatcagatgggacaattggctacacagttaaatcaacaacagtcctagaattctgacagattaccttctcaatctgtccagaatcccaaaaatgtgagtgtcattacattgaggtcgggaaagcagtgtcaaggacctcaaccagtagcacct

SEQ ID NO: 6091 - DNA, 592 bp, Glycine max
gcttgattgtgtaagagtaaaaagtgattcttaacaatacttgtaacttgtgtgaagttagtgaaatttgatgattttccaagaattggacgtactctcaatggtagagatgaaccagtataaaactttttgcatttgatctttcttgctttcctttaagttttatctaaccaaagggtgtgaatttgtttttagatttaaatagatatctcgtgttttctaaaaacatttttacatcatctaatagtttttttgaaaaatctataatatgctctttacaaagttttatcagatgaaaactttgttttaagtgaaaaaagattttaaaatgtataaaatcagaattcaatccccatttgtgatagttgcctttacattaaataaaaagtatgaaaattttagatagataataaaagctgtagtttaacattttgttttcaaaattcatttaccttttaatggttataaatatgaataatagtacaattaaccatggaaccgattggtgttttttttagtaagcgtttttccatttccaattaccctcttacctttgagaactttaacccttggagaaaaaaagcccaaactt

SEQ ID NO: 6092 - DNA, 475 bp, Glycine max
tcaagaattatggcctcatcaaactacttgtttcccgagggaaattctataaatagacctcccatctttaatggagtgggttaccactactggaaaacccgcatgcaaatctttatagaggcaatagatttaaatatttgggaagccatagaacaaggaccttatgttccctctataatagccggaagtgcaacaatagaaaaacctatagcagattggactgaggaagaaagaagattagtacaatataatttaaaggccaaaaatattattacatctgccttaggaatagatgaatactttagggtttcaaattgtaaaagtgctaaggatatgtgggatacactacaggtaacacatgaaggcacaacagatgttaaaagatctaggatacacactttaactcgtgaatatgaactttttaagatgaatgtaaatgaaggtataccatacatgcaaaagaggttcacacaca

SEQ ID NO: 6093 - DNA, 496 bp, Glycine max
agcttaagctccttcaactgcacaaggctcttaatatttgaagagtatccttgtggaaccttcacccgacgaagacactgacaaaaacttatcttctccttcttggacaaagtatggcaggctgggggcaagtaaattttcttcccatcagaccttggatgcaactgtgatcgtatacccatatcagctagatcttgacgggtattcaagccatccttcatcttgccttgaatgttaaggagcgtcccaatgacactatcacagacatttttctccacatgcataacatcaatacaatgtctaacgtcaagatcacaccagtacggaagatcaaagaaaatggacctcttcttccatatgcaactttgacttttatccttcttttgggtcttcccaaatacagtattcaggtgttcaacccgctgatatacctgctcaccagtcaacggtatcggcgcaatataatgctcttgacttccattaaaagcttttctca

SEQ ID NO: 6094 - DNA, 413 bp, Glycine max
  unsure (1)..(413): unsure at all n locations
agctngtagggttaaagtctcacgattgtcatgtgctcattcaacaattgttagccgtggctatacgagacatcttgccaaacaaagtctagttcaccataactcacctgtgctttttcttccatgctatatgtagcagagtgattgatccagtaattgttgatgagttggaaaatgaggcctgaattatactgtgccagttggagatgtattttccccctgctttctttgacatcatgattcacttgattgtgcatctggtcacacaaatcaaatgttgtggtcctgtttatctacggtggatgtacccgattgagcgatacatgaagatcttaaaagggtttactacaaatttatatcgtgcggaaacatctattgtgaagaggtacatttgcaaaagaaatcattgaatt

SEQ ID NO: 6095 - DNA, 434 bp, Glycine max
agcttgtggtgcaaaagattacatctatacaaatgtttttttgatggggcagcctccaagactccattaagattccttgggtgaggtgggacatagtctgcctacctaagagtaaaggtgggttagggatcaaagatttgattaaattcaacgaggctttgcttgctaaatgggggtgggagttggcaaataatcagaatcagttgtgggccacaattctattgtgtagatatggtggttggagggatttgatttctcataggaactgcagtttatactcttcttggtggaaagacctcaacgctattttcaagcagcaacatagcaaccacaatgtgtaaaaatagctttattttgcccataggtaaagacggtccatggaatacaaaccaagttcttattggcttgacaaccaaaaaaacactcattggaaa

SEQ ID NO: 6096 - DNA, 516 bp, Glycine max
tgtgcatccaataccttgctgaggatgtcccatatgttcttaaaactggactgattcatttgcttccaaagtttcatggccttgcaggtgaagacccgcacaaacatttgaaggaatttcatattgtctgctccaccatgaaacccccagatgtccaagaggatcacatatttctgaaggcttttcctcattcattagagggagtggcaaaggactggttgtattaccttgctccaaggtccatcacgagctgggatgaccttaagagagtattcttagaaaaaaatttccctgcttccaggaccacagccatcaggaaagatatctcaggtattagacaactcagtggagagagcctgtatgagtactgggagcgatttaagaaactatgtgccagttgccctcaccatcagatttcagaacagcttcttctccaatatttttatgaaggactcagtaatatggagagaagtatgatagatgctgccagtggtgggacccttggagacatgactc

SEQ ID NO: 6097 - DNA, 527 bp, Glycine max
agcttatgagaccaaaacatgacaaagaacgtttccaacaatctaattctcacactaatctaggatatcttgtcctattctttatatagctttatgattacccaattgattcaagaactaagggcaaccctgcatattcgcgtggtaccatggactattatataaaaatatttctgatcatcatcaataagaaaaatacagatattgttgataattaattgaacaatagtatattaaaatcaaataaatatcttgtgtcacaaatatactgaaagcgcactcaattcataataataaagcaatcaaacgtacaatttattggtacaagagataagagaaagacacacattataatcatagataaatttttacagcatgaaacaagggaatagaacacatcaatttcacaatttcacatcggaatatcaattggtctggcaaaaacagggctttccaaaattaaaagccagagaacataattgaattttataaaacatccaaaaataaatccaaattgatccctatag

SEQ ID NO: 6098 - DNA, 588 bp, Glycine max
agctttagatgaggatgaattgaaaaaatattgtatttatcttgaaaagtttttaaggtttaatgaatactctgatattgatggtcttgatttattttcagaattgaaagtactaagagaagtgttaagagaagaaattagcacaccaatagaagtattgagttatattaaaactttagattcttttccaaatgtttaaattgcatatagaattttattgacaatccctgtaacaggtgctattgctgaaagaagtttttcaaaattaaaattgcttaaatcatatctaaaatcaacaatgttacaagatagattgaatgagttagctattttatctattgaaagtgaagtggtagaattgcttgattataaaactctgataaatgattttgagcttaaaaaactaaatattaatataaaaattgatattttatattatatactaagtctcttttaaaatcttataagaaaaagacccctttaacatttcttcctaggccctaaaaatttggacatggcctgtgggttcgatcgacttgaaaaattttcaattttttttttaaagaattcggttttatttatttgggt

SEQ ID NO: 6099 - DNA, 403 bp, Glycine max
agcttgagcttagctacacatacctctctaatagctaagctcacctccttgagatgagaagctagagcttagctacacaccccctataatagctaagctcacccccatgacaaaaaacatgaaaatacaaaaaaagtccttactacaaagactactcaaaatgccccaaaatacaaggctaaaaccctatactactagaatggccaaaatacaaggcccagacgaaggaaatacctattctaatatttacaaagataagcgggctcatacttagcccatgggcttgaaatctaccctaaggctcatgagaaccctagggccttcccttggatcgctagccaatctacttggagtcttctacccaatgcccttgcggggtaggattgcatcatacaccttatgc

SEQ ID NO: 6100 - DNA, 203 bp, Glycine max
agcttgtgaaacatagttgacacagaattgatatcttctctagatagaagcataatatcatctgcaaaagccaaatgagatagctgaatacttgcacagttgggatgaaatttaaaattggcatcatccttgaggctgcttatatctctggaaaagtactccaaacagagcacaaacagataatgggagagaggatccccttg

SEQ ID NO: 6101 - DNA, 384 bp, Glycine max
cctctccagcaacagatacaaatcctggatggatgaatcaccctcacctcagatggtccatcccttatcaacaacaacagcagctgctccttcttcaaaatgctgctggccccaagctgaccatactttcctccaccaatccagcaacagcaacaacctcaaaaacagacaacagttgaggcccctccacaacctttcctcgaagaacttgtgaggcaaatgactatgcagaacatgcagttttagcatgagaccagaaccttcattcagagcttaaccaatcagatgggacaattggctacccaattgaatcatcaacagtcccaaaattctgacaagcttgccttttcaagctgtccaaaattccaaaaatgtcagtggcat

SEQ ID NO: 6102 - DNA, 392 bp, Glycine max
agcttgaatctaattcacgtaatgataatcttcatttctttatacatgtctcacaagcatcacatccccaagagtcataagggtaactactctgattcttgtggagtaaaattcttgtcaatacgcataacagaaatagaccttggtccgatgatttatacataaaggacatgaaaaatagacaataccatctttaacttatatattttgattgattaatatcttacatagggaatagaaagaaaaaatagacgactttttcctggaaatccgcataggaaaaatacacacttccctttttttctatcaaaacaatcacaattccttcccttcccacattccaacacattgaacatggatcccaattcattgcatttacacagtttttaatc

SEQ ID NO: 6103 - DNA, 466 bp, Glycine max
agcttcaacatcagaccacttccagggtgctggaactacttcacatggatttgatggggcctatgcaggttgaaagccttggaggaaagaggtatgcctatgttgttgtggatgatttctccagatttacctgggtcaactttatcaaagagaaatcagaaacctttgaagtattcaaagaattgagtctaagacttcaaagagaaaaggactgtgtcatcaagagaatcaggagtgaccatggcagagaatttgaaaacagcaggttcactgaattctgcacatctgaaggcatcactcatgagttctctgcagccattacaccacaacagaatggcatagttgaaaggaaaaacaggactttgcaagaggctgctaaggtcatgcttcatgccaaagaacttccctataatctctgggctgaagccatgaacacagcatgctacatccacaacagagtcacact

SEQ ID NO: 6104 - DNA, 374 bp, Glycine max
aacttggcataatacattcagataccacttttcttgacatcataataggaagtgacctttgcccatacaagatttgattgcgctactctcacagccaaccgagccattgctttggggtctaacaccgcctttgatgggttgctcaccaatggcacaagcacctcccgtcacatcaacaaaagtgtgagctgtaacagcaacatcagcaatgtgaatctgcaaaaggccaacaaatatgccgtcgtgccactataccactaacacacctatcaacttttgatgttaataaacgcttttaacaaacagacggataactcaataccctttttatggaatctatcacaaaaatcccaaggggcaatattaagtgggtc

SEQ ID NO: 6105 - DNA, 510 bp, Glycine max
agcttgtccaattgaaataagctgaaaagagcttattctaataagcttttccatcgagtttattgaaacaagttgttcaatagactgcaaaacctttttttttttgtctttattaggattgaataatgcaccaagtttattgttattgctgatgtgcatagatgttgacagggctgatatttggtcttttgggattacggcacttgagttggctcatggccatgcaccattttcaaaatatcctccaatgaaggtatttacatcccgtggttgttcagagacaatgtctagacacatgttaacattggaccgattgaagttcatgtgatataatttgtaataaaagaaaaagagagttcactttttatttcatgtataggttcttctaatgacaatgcagaatgcccctcctggacttgatgatcgagataaaaagttctctaaggtattgctgttctttctttatgcactgttacacaagagtcatcattatgatacttatagttttat

SEQ ID NO: 6106 - DNA, 411 bp, Glycine max
agctttccttcaccaggtcgtggcagtattcttccctcatagctgcatagaaccttcatcttcattggtgtgctttcagaaacactagaagaggcagtaccatgaagtactcgggaactgtcttgattagatgaagctctaggagtggatcgagctgaaccataattacttctgtcctggtgttgagaagagctccttgtgtcaaactcttttggacccttttcaacctttgtgagcacagaaatatctgatccactctcaaatcctggatggcccaaaatgcctttcaattccatatagcctgttgaataattgggatcacccacaacatttggaaaggcatgctttgctgagattcaccctatctctcattaactcatgagcgtattcctcaccactctgtgtggagta

SEQ ID NO: 6107 - DNA, 378 bp, Glycine max
agctttcagcagggaagctaagtgtgaattattctattctgcacaggattggagctgctaactgggttcccaccaatcatacttacaatgttgccacatgctcgggtgaactatataaagactaatggaccgctttcaaagattaagcggggagatcgccgtaaacaggctatagcgcaacttgcaaccttgtgtcggaggcctgaagctacacatcaacgtaccaaattacgaacgttagaacgagtcacgaccacaattaagactatggctcgaaacgaggagaggcggtggaacacaggtaaacattgcaccatggcaaaatcacaaggtatcttctatgtcctataaaaagccctactcacaagcccacgaccc

SEQ ID NO: 6108 - DNA, 538 bp, Glycine max
agcttcaacaatttcaagggagaaattcctaatgagctagcacatcttccagaccttcgctatctatatctccatgaaaaccgtttagctggaagaataccaccggaattgggcacactgcaaaatcttcggcacttgtaattaatcaaatcattttgttaatctcctattgcagagtacactatttatcttactcaattgttcctcattataattataatactgttatgcttatagggatgctggtaacaatcatttagtgggtaccataagggaactcattcgtattgaaggttgctttcctgcactacgcaatctgtaagttattgctggtgaattattttcctccatatagttcatttgatcttaaataaaatgcattggtctctaaatattaatgagttttgttctgtaaccaggtatctaaacaataattatttactggaggaatacctgcacaacttgctaaccaaccagtcttgagatcttgggagtgtttttttttttctttccttgggaccacttatcattctcctcc

SEQ ID NO: 6109 - DNA, 497 bp, Glycine max
tctcagcttgatgttagacctcgatcggtcatctttcctggccgacgccgactgtcatttttttcgatcaatatcggtgaataatatttttttgccgaggtgggctaatgttttcctggccgaataaatgggaacatgccagtttcggccgaaacgaaacatcggttgagctcgcacgaaaaaacctagccgacctacattgtaagttttttatgcaacaccgaaaaaaacaaaatttcccctgccgtaagaaaaaacattatcggccagcgagcgcgggacttgaaattcaagctccaaaaactaacccaaggcaacaagggggttgaggagtatttcaaggaaatggatgtgctcatgattcaagcaaatattgaagaagatgaggaggttactatggctcgatttcttaatgggttgactcatgatatccatgatattgttgagctgcaggaagttgttgaaaggatgaattgcttcacaaagcaatccaagtt

SEQ ID NO: 6110 - DNA, 444 bp, Glycine max
agcttcaacatcagaccacttccagggtgctggaactacttcacatggacttgatggggcctatgcaagttgaaagccttggaggaaagaggtatgcctatgttgttgtggatgatttctccagatttacctgggtcaactttatcagagagaaatcagacacctttgaagtattcaaagagttgagtctaagacttcaaagagaaaaagactgtgtcatcaagagaattaagagtgaccatggcagagagtttgaaaacagcaagtttactgaattctgcacatctgaaggcatcactcatgagttctctgcagccattacaccacaacaaaatggcatagttgaaaggaaaaacaggactttgcaagaagctgctatggtcatgcttcatgccaaagaacttccctataatctctggggttgagccatgaacacagcatgct

SEQ ID NO: 6111 - DNA, 448 bp, Glycine max
agcttgtagaacaccaaagatgtaagacaaaattttgaaagaagtgtaaattttgaaacaataagagctaatatacaatcagatacctgaaagtgataatttatgttgctatgatccctaacaatgtataattagtccctgttagattacatttatctttacatgatcttgtatatattattacacaaaaacttatgattctgattgatatgtaattacctaataatcagtaattgattgatatgtaatcaatattgattctgatttctccattataaataaagatgagatgtggtcatctaagacacaaaattacagtaaaactaaaacactgctatatggtatcaaagcttaggttattcttgacagaggaataacaaaattcgtcctccacaacctactgttccagatggacctctctgcttgtcatcctatccagcaacctatt

SEQ ID NO: 6112 - DNA, 449 bp, Glycine max
agcttccccaagatctttcatttcaaaatttttcgttagaaatctcttggtctcctgtaagaagcctatatctatgctaggaggcagtatatcatcgatatataataccaaaaatatgtatttactcatactgaacttatgatatacacaatcttcaactacatttgccttgaaaccatatgaggtaatgacttgatggaacttgtaataccattgacgggaagcctatttgagaccatagatgaatttcttcagtttgcataccatggactttgagtcacctaacacaaatttttttggttgcaccatataaatcgtttcttcaatgtcaccatttagaaacatagtcttgacatccatctgatgtagctctaagtcaaaatgagctaccagtgccattatatttctaaaagaattctttgaagatactggagaaaaaggttttttta

SEQ ID NO: 6113 - DNA, 454 bp, Glycine max
tgtttacttgaatctggaatcctgcagcatgctcaagagtcttacaagcaaaattcacttaaaatctcttcaaaaactcagtctgagagattgttcaagtcttgaggagttttctgtgacttctgagaacatgggatgcttgaatttgagagggacatcaataaaagaattgccaacatcactttggcgcaataacaagctttttactttggttcttcattcctgtaaaaaacttgtgaattttcctgacagaccaaaacttgaggatctgcctctcattttcaatggggtatcctcctctgaaagtccaaatacggatgaaccatggactttgtcatccttagcagatttatctctaaaaggaagcagtattgagaatttacctgtaagcatcaaagatcttcctagtcttaaaaagcttaccttgactgagtgcaagaaacttcggtcttta

SEQ ID NO: 6114 - DNA, 338 bp, Glycine max
tataatatatcgatacgctcgaaattaaacatcggaaactctcgggatattcaaatagtcataactattcacacggttgtccgattcgggcgcataatatgtcgagaggctcggaattgaacaacggaagctcttgagaaattcaattggtataacttttcactcggatgtccgattcaggcaaatcacatatcgagacgctcaaaattgaacaacggaagctcctgaaaaattcaaatggtcataacttttcacacggatgtccgattcaggcctataatatatcgatacgcttgaaattaaacatcggaaactctcgggaaatgcaaatagtcata

SEQ ID NO: 6115 - DNA, 367 bp, Glycine max
tgcaaaatggaagcaaatatatctctctatgggtggcataataaccctcattaattatgttttaacagccttacgcatttacttgctgtcttttttcagaatccttaaaaaagtggttcacaagatagtctccattcagagaaactttctttggggaggtggcaatgaggcaacaaagatcccttgggtcaagtgggatacagtctgtctatttatgaataaaggggggttaaggattaaagacttgaacaagtttaatgaagccttggttggcaaatggggctgggagttcgtgaataaccagaaccagctatgggctagaatcttgatgtctaactatggtggatggaatgctttattctatggc

SEQ ID NO: 6116 - DNA, 567 bp, Glycine max
agcttgaaggtaggagaagatgagtggagagagaattgggcacgaaatttatgcctcaaatgaggtctgaactgtgaagtgtaatttctcaaataatcaaagttaaaaacatacacacacaaggcctctatttatagcttaagagtcacacaaaattggaaggaaatttgaattacaatttaaatttcacttgaatttgaatttgtggagccaaatttggagccaaaatttcactaattatgattagtgaatttcagctatggttcagcccactaatccaagatcaagtccaagattcttcactaagtgtgcttagatgtcatgagatatgtaaagcatgaaggatatgcacaaagtgtgactatatgatgtgacaatagaatgtaacaagcaaatgctcacctcccccttaagatggtccataatttaattggattgagcttctcctaattcaattaaaattctctctcaacacacacattcaatagtgcacttaatgcatgtgaaattacaaaattactcctaataccaaaactaattttagtgccctaaatacaagggctgaaa

SEQ ID NO: 6117 - DNA, 445 bp, Glycine max
agcttgaatagcactatagatatccagggcctcattgccatcacgaatgctacggactccatatgcttgccctttcgcgacaacaccatcacctatacataaacaggtaacccagtacacaataagcctttagatattgcaagacaatggtaaagattttagactaaatggaagaaatggacaaaatgaaaggaaaattacttggaatctgatatgaaatgggtgtgctgatagctcatccattgtttcggcatataaaaataactggggcctccaaaactgttgcaaaatttaaggcagcatggaaatgtccctatcattacacaatgcattagaatataacaagcaaattttttttcttaagttatcaaagatctttgaaaatgattgctgatgaaaggaaaaaacattgtattgcatccatttaaaaggatgtggccactgg

SEQ ID NO: 6118 - DNA, 461 bp, Glycine max
tactcaagcttgaaggttggaaaagatgagtggagggagagggtgataatgttctctaaattttgggcctcccatgagagtctgaacttttaaagtggaattctcaaatgatcaaagttgaaaaaatgtacacacatgacctctatttataaaccaagtgtcacacaaaattggaggaaaatttgaatttctattcaaatttcacttgaatttgaaactgaaatttgtggagccaaataagattggcgtatttctccagagcaggttggtgtatttctctgcaaattcaattagcaataaattcaattagtgtgttggataaatgacaattgaaactccaaagcagttagtgtatttctctgcagatttgcttataagagtgatcatatgaactcttggaccgttacacaatcttctcaagtatggggagtaatttattttacatgtacagtttaaaaaaa

SEQ ID NO: 6119 - DNA, 453 bp, Glycine max
tcatgctgaagtatgtatggcaaaacttcattactgttgttgaacacatactagtgagcttgtaaaaaatcttctacacttggagtgataacatgcagtcctcttgtacccttaccgcctactctgtcgtcatggcgatactcaggaaggccaacaggtttagccttttcaatgtagtctgaacaaaattcaatggcttcttctacaatgtatctttcaacaatagatgcttccgggcgatgtagattcttcgtatacccttttaagatcttcatgtatcgctcaaccgagtacatccacctcaaataaacaggaccacaacatttgatttctctgactagatgaacaattaagtgaattatgatgtcaaagaaagtagggggaaaatacatctccaactggcacagtattattgcggcctcattttccaggtgatcaaacttgacaggatca

SEQ ID NO: 6120 - DNA, 371 bp, Glycine max
gcttatgctgcatacatctacaacagaccttctcattctcagcagcaaaaacaaccacaacagaacaattatgacctctccagcaacaggtacaatcccgggtggaggaatcatcccaaccttagatggtcgaatccttcacgacagtagcaacaacaaccttattttcaaaatgttgctggcccaagcagaccatacgtccctccaccaatccagctgcaacaacagcaacagccccagaaacagcaaacagttgaggcccctccgcaaccttcccttgaagaacttgtgaggcaaatgactatgcaaaacatgcagtttcaacaagagaccagagcctccattcagagcttaaccaatcagatgggaca

SEQ ID NO: 6121 - DNA, 445 bp, Glycine max
  unsure (1)..(445): unsure at all n locations
tgtcaaagaatccaacctctcatggtagaagcacacacatattatcacgatttcactatcttacggatcaagtgaacaaagagaaactgaaagtggagtactgctacacatttgatcaacttgctgatattttaaccaaacccctcaaaggggagaggtttaaaatgttaaggggcataattggcttgatgaacttaggagatcagaattaagggagggtgtgagagtttaattttgttttgtgtggggtagatttgtttgtgctctgaatataagagagagtaacagaattttaaaattctgttataagtactagcctaagtgtgaagggttattactctgtttttgcttgtataaaagggcatacatacatcttaataaagaggatttattcattctatcantttcagtctctagtgctattcctagtangtgtgcaattctg

SEQ ID NO: 6122 - DNA, 383 bp, Glycine max
cgagcgtctcaatatattatcggcctgaatcagacatccgaatcaaaagttgtggctggtcaaatatgccatgtgcttccatgttcaaggttgaacatctcgatatattatgcacctgaatcgggcatctgagtgaaaagttatgccatatgagttagccgagagcttcgttggtcgattgcgagcgtctcgacatattattggcctgaatcggacatccgagtcaaaagttatggcagcttaaactctccatgtgcttccatgtttaattttgagcatctcgatatattatgcacctgaataggacatgtgagagaaacgatatggcgtatgagagatctgagagccttcgttgcttattttcgagcgactccatatattat

SEQ ID NO: 6123 - DNA, 436 bp, Glycine max
  unsure (1)..(436): unsure at all n locations
tccattgttcaatttcgagcgtcacgatatattatgcccctgaatcggacctccgagtgaaaagttatgaccatttgaattgctcaagagcttccattgttcaatttcgagcgtctcgatatattatgcgccataatccgacctgcgagttagaatttatgaccatttgaatttctcgagagcttccgttgttcaatttcgagcgtctcgatatattatgtgcctgaatcggacctccgagttggaaggtatgaccatttgaatttctcgagagcttccattactcaatttcgagcatctcgatatattatgtgctctaatcggacatccgagtgaaacgttttgaccatttgaatgtctcgggagcttccattngtcaatttcgagcgtctcgatatattatgcgcctgattcggacatccgagtgaaaagttat

SEQ ID NO: 6124 - DNA, 297 bp, Glycine max
agcttgtacacctctgtttctctacctttcatcacaaaccctggtggttgagtgacaaaaacttcttcttctagtgagccattaagaaatgcagattttacatccatttggtgtatttcccagcaatcgtagctagccattgctattacaagtctcactgtttccaacctagcaacaggggcaaatagttcatcataatccagaccttgcttctgcagaaatccctttgcaaccagtctggctttgaactttgttacttctcctctagaattcaacttagttttgtagacccattta

SEQ ID NO: 6125 - DNA, 331 bp, Glycine max
agcttgtgccttttcacgtctggaatgtgaatgttgcctatacatccaaagacccttaggtgctttgttgatggcttcttaccgttccaagcatcaattggagtcttgtcttttacagacttatttagacatctgttgagtatgtaaacagcactgtagactgcttcagcccaaaatgcgttaggtagtcccttatgcttgagcatcgatctagccatttctataactgggcgattctttctcttggacactccattttcgtgaggagaatacgcgactgtaagttgtcgctcaataccatcatcctcacaaaatctttcaaactagcgag

SEQ ID NO: 6126 - DNA, 401 bp, Glycine max
acaatggcagtgcaatcttactaatatcctgtatgaatctcctataaaaacctacatgtccaagaaaagaacgcatttcctgcataaaagcgaggtaaggtagagaagtaataacatcaatcttggccttatcgacctcaatacctctaatagataccaaatgccctaagattatatgtaaccacatggtacaaaaactattgttaagagtaaagacccttcccgtggcctttggacgtctagtttggtcattcagacccccaccattctgcttcttcttgggatataggcaatctctttgaatatgccttttctgtctgcaattgaaataggtcatgtcttcatcgacataatttgaggagatgtgccttggcttaccacacttgtaacaagtgatctga

SEQ ID NO: 6127 - DNA, 406 bp, Glycine max
gcagcttaacattaatttcagcgtctcgttaaatactggactcaatcagacatcggagtaaaaagttattgtcgtttgaattgcctcagaggttcaacattcaatttcgagcgtctcgatatatttcgggactcaatcagacatccgagtaaaaagttattgtcgtttcaattggctcagaggttcaacattcaattttgaccgtcccgatatattacgtcactgaatcggacatccaagtaaaaagttattgtcgtttgaatttgctcaaagcttaaacattcaatttcgagcgtctggatatattacgggactcaatcaaacatacgagaaaaatgttattgtcgtttgaatttgctctcagcttcaacattcaatttcgagcgtcccgattattacgagagtc

SEQ ID NO: 6128 - DNA, 457 bp, Glycine max
  unsure (1)..(457): unsure at all n locations
ttgccggcgctccataaacgttattgcttacgcctgttcgtgggtcctccactttcgagtttggagctgtgatccatgattgcctaagagaagaccctcaagcaaatcctccattcttaccctttttcggagccccatgaatgaattgcgttgtcattcatgtgtcttccatttttgagtttggagctgtgttccatgattgcctaagagaggaccctcaaggcaatcctccattctcatccttttccggagccacatgaatgaattgcattgtcattcatgtgtcctccactttngagtttggagttgtgttccctganttcctaagagaggaccctcaaggcaatcctccattctcatccttttccggagccacatgaatgaattgcgttgtcattcatgtgtcctccactnttgagtttggaagtgtgttccatgatttcctaagagaggaccc

SEQ ID NO: 6129 - DNA, 444 bp, Glycine max
cgtgaacttgccaaatctcctttctttatactaactctcttggtttcatccaaaggcaggtccaaccaatacgtaacatcatcatcatcattggaaccaccttgtggaaggttagagccatttggttctattgaactctcccttatgacaccctttcttttctcaattagtactgctccattagtgaaaaaccaatccacagaggaagggaggtactcctccataggatgcaagtacatatatggggaatatgccttgatcattgccttaatttgggataaattgggcatgtaagaaaagctacccttggtatttttcaaacaagaaataggtaaagctttggaattagtccctcctccactctgagctacgaaagttcctacactaaccccttgagcttcaatgcctctcttgattggcctaacatcatacacattgaacctc

SEQ ID NO: 6130 - DNA, 445 bp, Glycine max
  unsure (1)..(445): unsure at all n locations
tctggtgggacatcttgacttgctttccaatctgacattctccacagattctgccttcttctattttcagattggggatgcctctaacagcacctttgtcaatgattttcttcatgcctcttaagtgcagatgtccaaatctttgatgccatattctgacttcatcttctttggaggatagacatgtggaggagtagctggtttcttgaggtgtccataggtagcagttgtcctttgatctgctgcccttcattagaacttcactcttctcatttgtcaccaagcattatgactntgtgaagtttacattgaatccttcatcacacagctgactgatgctgatcaagtttgcagtcagtcccttcaccagcagtactttgttcagactangaagtccatcatgaactagctttcccattccaatgatctttcctttagagccatc

SEQ ID NO: 6131 - DNA, 323 bp, Glycine max
  unsure (1)..(323): unsure at all n locations
agccgtggctatacgagacatcttgccaaacaaagtcaggttagcgataactcacctgtgctttttcttccatgctatatgtagcaaagtcattgatctagtcaagtttgatgaagtggaaaatgaggccgcaattatactatgccagttggagatgcattttccccctgctttctttgacatcatgattcacttgatggtgcatcttgtcagagaaatcaaatgttgtggtcctgtntatctacgatggatgtacccggttgagcgatacatgaagatcttaaagggttacaaagaatctatgtcgttcagaacatctatta

SEQ ID NO: 6132 - DNA, 436 bp, Glycine max
  unsure (1)..(436): unsure at all n locations
tgtaagtctgattgctggaatcttgctatgaaatctgagttagatgctcttgcatcctcaaacacttggtctattgttgatctgcctgaaggtaagcaaccaattggttgcaaatgggtttacaagatcaagcatcatgctgatggatccattgaacgatacaaggcccgtttggtggcaaagggatacactcaactagagggtgtggattattttgacactttntcaccagttgctaagcttaccacaattcgcacccttctatctgtggctgctattaaggactggcacttagaacaacttgacgtcaacaatgctttccttcatggtgatctgcatgaggaagtatatatggatctgcctcctgngttcttactgcctggttcttcttctaataaagtctgcanattacataagtccttatatggactgaaac

SEQ ID NO: 6133 - DNA, 374 bp, Glycine max
ttgaatgcactattcaatggagttgacaagaacatcttcagactgatcaacacttgcacagtggccaaagatgcatgggagatcctgaaaatcactcatgaaggaacctccaaagtgaagatttccagattgcaactcttggctacaaaattcgaaaatctgaagatgaaggaggaagagtgtattcatgacttccacatgaacattcttgaaattgccaatgcctgcactgccttgggagagaggataacagatgataagctggtgagaaagatcctcagatccttgcctaagagatttgacatgaaagtcactgcaatagaggaggcccaagacatttgcaacatgagagtagatgaactcattggttctct

SEQ ID NO: 6134 - DNA, 341 bp, Glycine max
agcttcaacattcaatttgagcgtctcgattatgacgagactcaatcagacatccgagtaaaaagttattttcgttttaattggctcagaggttcaacattcaatttcgagcgtctcgctatattacgggactcaatctaacatccgagtaaaaagttattgtcgtttgaattggctcagagcttcaacattcaattttgagcgtctcgatatatgacgagactcaatcagacatccgagtaaaaagttattgtcgtttgaattgtctcagaggttaaacattcaatttcgagcgtctcgatatgttacgggactcaatcagacatccgaagaaaaagcta

SEQ ID NO: 6135 - DNA, 455 bp, Glycine max
  unsure (1)..(455): unsure at all n locations
ctaagcttgaatccctccatgtttcacaaagcagttcatcagacccttgtgaaaaagtagcaatggaagagtttacactgatgaatctagatgggggaaagaaccttgcaatgaatttttcctccacctcttcccaagtgttgaggcttttgtttggatgtgattaaagccatgtttttaccttacctgccaaggagaatgggaaatctctaaggtagacaactttagcatcttcgttagaagctcccatggtactgcaaaattccatgaaggtagacagaggtgtgtatggatcttcatgatccattttagcaaaacggtgtgagccaatcagactgagaagtgttggcttcaattccacaaccttgttgctgaaaggaggaatgactctggtgttgtaatgctttggtccttgttgataagcatagtcaccaagagtcctncatggtgatcta

SEQ ID NO: 6136 - DNA, 329 bp, Glycine max
  unsure (1)..(329): unsure at all n locations
tgagctcggcttgagttgaatacgtaaagcttgagttgacatatgctttgtttaaggctctgctcgacttacataaaagtctgacttacgagcctatttaaaagcttgcttaaagacgtcttttattaattaattattttaaaacctagtgaaatactaactaaaaaaagaaacttataaaatttcgtataaataatgtacaaatctaaaaataattgataaacaaaattatattgaattcaagtcgttaaagcacaaagtatataaaaaaaataaaaatagcataatattaaaaaatgtatggattagagatgatntacactaatata

SEQ ID NO: 6137 - DNA, 408 bp, Glycine max
tatgctgcatacatttatcatagacctcctcagcagcaaaaccaacaatagcagaataattatgacctttcaagcaacagatacaatccaggttggaggaatcatccaaatctaagatggacaagtcctccacaacaacaacagcctgtccctccttaccagaatgttgctggtccaagcaagccacatgttcctcctccaatacagcaacagcagcaacaatcacaacaaagacaaccaacaattgaggctcctcctcaaccttccttagaagagttagtgagggaaatgaccatccagaatatgcaatttcagaaagagacaagagcctctattcagaagttgacaaatcagatggagcagatggctactcagttgaaccaagctcagtcccaaaattctgacaaa

SEQ ID NO: 6138 - DNA, 391 bp, Glycine max
agcttaaatatgagcagatgttatcagaccttacaaagaatcacctgctaagaaaagttgtcgcatgtaagttgatgctaattcctttttctgctactaacagataagttacttattggaaattatgttttctttaatacctttctattaatgatatttggttacaactacagacatgtacacagtggaattccaaaaacgaggacttcctcatgtccatttatttttatttttacatgccaacaacaaatatccatctccaaacgatattgatcatattatatcagcagaaataccttcacagaaagatgatccagaactctataaattagtgcaaaatcacatggttcatggtccatgtggaaatttgaggcccgcatctctatgcatg

SEQ ID NO: 6139 - DNA, 448 bp, Glycine max
  unsure (1)..(448): unsure at all n locations
ntgaatgctctattcaatggagttgacaagaatatcttcaaactaatcaacacatgcacagtggccaaagatgcatgggagatcctgaaaaccactcatgaaggaacctccaaagtgaagatgtccaggttgcaactattggctacaaaattcgaaaatctgaagatgaaggaggaagagtgtattcatgacttccacatgaacattcttgaaattgccaatgcttgcactgccttgggagagaggataacagatgaaaagctggtgagaaagatcctcagatccttgcctaagagatttgacatgaaagtcactgcaatagaggaggcccaagacatttgcaacatgagagtggatgaactcattggttcccttcaaacctttgagctatgactctcggatggagctgannagaagagcaagaacgtggcgttcgtgtccaatgatg

SEQ ID NO: 6140 - DNA, 352 bp, Glycine max
  unsure (1)..(352): unsure at all n locations
ntgagcaaattcaaacaacaataactntntactcggatgtctgattgagtcccgtaatatgtcgagacgctagaaattgaataccgaagctctgaacaaattcaaacgacaataactttttactcggatgtgtgactgagtcgcgtaatatattgagacactcgaaattgattatcgaagctctgagcaaattcaaacgacagtaactttttactcggatgtctgattgactcccgtaatatatcgagaccctcgaaatggaataccgaagctctgagataattcaaacgacattaactttttactctgatgtctgattcagtcccgtaatatatcgaaacgctcgatattg

SEQ ID NO: 6141 - DNA, 303 bp, Glycine max
ttcttacccatggaaactcctaatatctcccacactctttgtggtgggccattcttggatggccttgattttctcagggtccacttggaccccatttctaccaactacaatacctaagaaaactatattatctacacaaaaggtacacttctctatatttgcatagagggtgtttttcctaaagactgaaagaacttgcctgagatgtcctaagtgatcatctaggctcctactgtacactaaaatatcatcataataaacaactacaaatctacctatgagatcccttaagacatgatgcat

SEQ ID NO: 6142 - DNA, 444 bp, Glycine max
  unsure (1)..(444): unsure at all n locations
tgtgcatccaataccctgatgaggatgtcccatatgttctttcttgtgaagacccacacaaacatctgaaagaattctcatattgtctgctccaccatgaaacccccagatgtccaggaggatcacatatttatgaaggcctttcctcatcttttatagggagtggcaaaggactggctttattaccttgctccacggtccatcacgagctaagatgacctcaagagagtattcttagaaaaaatattccctgctttcaggaccacgaccatcaaaaaagatatttcatgcattagacaactcagtggagagagcttatatgaatactgggagagatttaagaaactatgtgctagttgccatcaccaccagatttatgagcagcttttcctccaatatntttatgatggacttagcaacatggagagaagtatgatagatgct

SEQ ID NO: 6143 - DNA, 454 bp, Glycine max
  unsure (1)..(454): unsure at all n locations
ctccttcaactgcacaaggctcttaatatttgaagagtatccttgtggaaccttcacccgacgaagacactgacaaaaacttatcttctcctttttggacaaagtatggcaggctggtggcaagtaaattttcatcccatcagaccttggatgcaactgtgatcgtatgcccatatcagctagatcttaacgggtattcaagccatccttcgtcttgccttgaatgttaaggagcgtcccaatcacactgtcacaaacatttttctccacatgcataacatcaatacaatgtctaacgtcaagatcagaccagtacggaagatcaaagaatatggacctcttcttccatatgcaactcttacttttatccttcttttgggtctttccaaatatagtatttaagtgtngaacctgctgatataccagctcaccaatcaacggtatcggtgcaata

SEQ ID NO: 6144 - DNA, 396 bp, Glycine max
agcttcaagaaaaagatggcctcagcaaactccttatttccagaagggaattctatcaatagacctccaatctttaatggagagggttaccattactggaaaacccgaatgcaaatttttattgaggcaatagatctaaatatttgggaagccataaaaatagggccttatatacccaccacagtggaaagagtttcaatagatggtagttcatcaagtgaaagaataactatagaaaaacctagagatagatggtctgaagaggatagaaaacgagtactatacaacttagaagccaaaaatataataacatctgccctgagaatggatgaatatttcacggtttcaaattgtaagagtgctaaagaaatgtggaacactcttcgataacacatg

SEQ ID NO: 6145 - DNA, 308 bp, Glycine max
agcttgacttggatatacaagcgtctagtcgcaaatgctgcagccattgctggtacaccacgctcaagagcaaactgaatctgattttcatgaacatccttgggagcaacagacatggtgacgacattccgtgacagtaagtacgcaccaaaactagcaacaccacagccaacatcaagaaccacccttatatgcttaccaaaagtaatatcaggaatcatctacaatcacaaatgtccaacatcagattcctataagatgcacctacattctcctaacaaaaaggtgaaaccaaaaccaaagcatac

SEQ ID NO: 6146 - DNA, 402 bp, Glycine max
ctcgacccgggatccttaagtcacctgcagctgcagcttgtacaagcccaaagttgctcacgatcatagcctccaggtcttttgtttcttcgatgatggtgacaatatattcacaatttagatctaacgatctaagaattttctccataatgtttacatcatcaagcttttcaccacttctcttaagatgattggtgattgctaagactctagagaaatagtcggagatgacttcaccttctctcatatgcaaggtttgaaacttaactcttacactatgaagacgtaccttcttgatcggatctgctcccttatacgagggttgaagcttctcccaggcttctttcaccgactttgcttctgaaaccttcttgaaagcatcatcatctaatccttgataga

SEQ ID NO: 6147 - DNA, 374 bp, Glycine max
  unsure (1)..(374): unsure at all n locations
tctagaggttgtgcttatctaccccatctctgacagtgcgtgggtaagcccagtacaggtagttccaaagaaaagaggaatgacagttgtccaaaacaagaagaatgacttgatacccactcggactgtcactggctggtgaatatgcatcaactaccgcaagctgaatgaagccacaaggaaagaccactttcctctgcccttcatggatcagatgctggaaaggcttgtgggacaggcatactattgtttcttggatggatactcatgttaactaaattgtggtggaccccagggatcaagagaagatgacctctacatgcccttttggtgtctntgcctacagaaagatgccatttgngttatgtaatgca

SEQ ID NO: 6148 - DNA, 422 bp, Glycine max
agcttgtcaagcagtgtggcttgattcttttttacaggaactgaagatcaaagaagaaggtccagttgagctatatgtagataacaaatatgcaatcaagttagccaaacattcaattgcacatggaagatcaaagcacattgaaaccaaatttcatttcataagagaccaagttgcgaaggggaaattcaagttgaagttctgcagatcaaaagatcagcttgccgatatatttaccaagtccttgaaatctgaaaccttcaaaaacagagaagcatgctgaatattggtgatagcacgacactagcttaagggggtgtgttaaacattaagaataaataagctaggtattgaatgatatagatattgccacgtgtaataagtactctcctatatgctgaaccatattgagtattaactat

SEQ ID NO: 6149 - DNA, 300 bp, Glycine max
  unsure (1)..(300): unsure at all n locations
ttcagcanattcaaacgacaataactgtgtactcggatgtctgattaagtcccgtaatacatcgagacgctcgaaattgaatgttgaagctctcagcagattcaaacgacaataactttttactcggatgtctgattgagtcccgtaatatatcgagacgctcgaaattgaatgccgaagctctgaggattttcaaacgacgataactttttactcggatgtctgattgagtcccgtaatatatcgagaagctcaaaattgaatgacgaagctctgaggatattcaaacgacaataactt

SEQ ID NO: 6150 - DNA, 400 bp, Glycine max
taagcctatagatgaagacaatcctattattaggtggtacataaacaccaagtacttcctgcaggacaattggcagagaacctaggtattgctactgtggattggcgtgatgttaggtctatttgcctacaaatttgtgcagtataggagaaaagctgcatatgaagtgatgggccattgtgtatgcatggccaaaggtgcagccaaaacacttatattaaaggtgactaaaaaggaacatatgtatctactttgttctaatgattgttgagacttagtagctttcataagtcaataaggtaatgaaagttgaagtagtaagaacataatgagaagtatttttttacagtgtataactgtggcagtaacaattgaagttggtatacatggcatctaccat

SEQ ID NO: 6151 - DNA, 299 bp, Glycine max
  unsure (1)..(299): unsure at all n locations
tttatccatgtcttcctatggtggcgagcttcttcgttactcatcttctccttgaagtggcatctctaatcatatttcttccttctccattctacttccattcatcttcaggaagccaaggattcctttgatgaaccaaaggactccagtggagctccatcacctgtgaaacatataggaaaggatgttgagtcctaagacaacataaagcanaagacgttgagtcctatgaaacaaataggcgaggacgttgagccctatgaaaacataaagcaaatgacgttgagtcctatgaaaca

SEQ ID NO: 6152 - DNA, 467 bp, Glycine max
acactataaatctaagcttgtatctccttacagatggcgcatgcatgatgacccctgtcactgtaaccgtttagatttccatacgctagaaagtcattagtggtacagaaaagcattgcacgcatttcaaaagtctccttgcaaaatccatcaaacactaaaaccccctcgtcccacaactttctcaggtcttcaatcaacggacttagataaacatcaatgtcatttgctggctgtcttgggcccaatatcatcatagaaaacatcatgtatttttgtttcatgcacaaccaaggaggcaaattgtaaattactagtagaattggccatgaactatgttgagtgcttaaatttccatatgggttcattccaccactaggtagtccaagcctaagattacttgcctctgtgccaaaatctagatacaaaccatcaatcttctatcagtgggagcaatcagccggatg

SEQ ID NO: 6153 - DNA, 439 bp, Glycine max
  unsure (1)..(439): unsure at all n locations
ngctaacccatggaaactcctaatatctcccacactntntgttgtgggccattcttggatggccttgattttctcagggtccacttggaccccatttctaccaactacaatacctaagaaaactatattatctacacaaaaggtacacttctctatatttgcatagagggtgtttttcctaaggactgaaagaacttgcctgagatgtcctaagtgatcatctaggctcctactgtacactaaaatatcatcaaaataaacaactacaaatctacctatgaaatcccttaagacatgatgcataagcctcataaaggtgctnggtgcattagtgagcccaaaaggcatcactagccattcatacaaaccaaacttggtcttgaaagcgattntccactcatcancccttttagtcctgaattggtgataaccactttta

SEQ ID NO: 6154 - DNA, 421 bp, Glycine max
ctgggttcgatggccccaatgacatctattccccacatggtataaggccaaggggcggacataacattcataggatgtggtggaacattgacattgtccgcgtatgcctgacatttatgacatttccttacatgggcacaactatcgctttccatagtaagccagtaataaccgactctaaggatcttcctggccatagcatgcccattggcatgtgtcccatatgaacccacgtggatttcctcaatcatgaagttcgcctctttggcatctacgcatcgtaggagggtcatgtcgtggtttcgtttgtacaggatggtaccactcacaaagaaaccagtagccaatctccttaacgttcttttgtcattgtcagaaatccccggtggatattcttttgtctcaacatattgcttgatgt

SEQ ID NO: 6155 - DNA, 142 bp, Glycine max
aagctctcgacatattcatatggccggagctttccacacggatgtccgagtctggcgcattatatgtcgcgaggctcggacttgaacagcagaagctcttgccatattcaattggtcatgactctccacactgatgtccgat

SEQ ID NO: 6156 - DNA, 383 bp, Glycine max
agcttcagtgtgtccaagaaaatgtacaatgcacatatatccaggacaaaagaggaatactacctctgttcgtccaggcattataggcttcccaacaaacaactctgccagaatacatccagcactccacaaatccacagtaactccataatctgtagctccaagcaaaagttcaggtggtcggtaccacaaggttacgacacgactagttaaaggctgcccatgagatggctgaaacaaagctgcaagcccaaaatcaccaatcttcagattgccattactgtcaagcagaagaattgagcccttgatgtcacggtgcataacaccacgactgtgacaatgctcaagaccacgaagaaagctgtgcatgtaacacttgatct

SEQ ID NO: 6157 - DNA, 299 bp, Glycine max
agcttgaccaagaaattactcacagtccatcatcgcatgaaggagactatggataagcagaggagggaagtgcagttcactcaaggacactgggtcctcattaaacttcgttcatgtcgccagtcaacagcttcaggtggtcaatactccaagttatcaaaaaggttctacgacccatttcaaattgttcaaaggatcggacctgtagcatataaacttgacttaccttcaacctcaagaatccaccctgtcttccattggttcttactcaagccttatcactcttcactgaccacaac

SEQ ID NO: 6158 - DNA, 407 bp, Glycine max
  unsure (1)..(407): unsure at all n locations
agcttctaagcaccctctcagaaatgcttatattctntaaccactttagtttcccacacaagggatgtctgacaaggtcaatgcaccccccatggacatacacaacatacaatgtatgaacgtgggcaccatcaagtacaatgaccatggatgaattaaggctcctaagcatcccctcggaaatgcttagattctttaaccactctattttcccacaaaagggacatccgacaaggccaatgcaccccccccccccccacgaacatacacaacatgcacttgtcaatgcattttcaacatcatcaacattccattttaatggcatcaccaataaccacaacaacctcattccatattgacataaccatcaataataacatcgattcatgttgacatgatcaccatta

SEQ ID NO: 6159 - DNA, 295 bp, Glycine max
  unsure (1)..(295): unsure at all n locations
acccattgaagctactaatatcttccacactttttggggtggggcattcttggatggacttgattatctcacggtccacttgggccccatttctgccaactacaaaccctcagaaaactgtattgtctacacaaaaagtacacttctctatattngcatagaaggcgtttttcctaaggactgaaagaacttgcctgagatgtcctcagtgatcatctaggctcctactgtacactaaaatatcatcaaaatagacaactaccaatctatctatgaaatcccttaagacatgatg

SEQ ID NO: 6160 - DNA, 279 bp, Glycine max
  unsure (1)..(279): unsure at all n locations
ctggaactacttcacatggatttgatggggcctatgcangttgaaagccttggaggaaagaggtatgcctatgttgttgtggatgatatctccagatttacctgggtcaactttatcagagagaaatcagagacctttgaagtattcgaggagttgagtctaagacttcaaagagaaaaggactgtgtcatcaagagaatcaggagtgaccatggcagagagtttgaaaatagcaggttcactgaattctgcacatctgaaggcatcactcatgagttc

SEQ ID NO: 6161 - DNA, 420 bp, Glycine max
agcttctatagaaggttcattcctaatttctctacaattgcatcacttctcaatgagctggtgaagaataatgtggcatttacctagggtgaaaaacaagagcaagcctttgctttgctcaaagaaaagcttactaaggcacctgttctagctcttcctgacttttctaaaacttttgagctagaatgtgatgcctctagagtgggagttggagctgtattgttacaaggttggcaccctattgcttattttagtgaaaaacttcattgtgcgaccctcaactaccctacctatgataaagagctttatgccttaataagagccctccaaacttgggaacattaccttgtttctaaagaatgtgtcattcatagtgatcatcaatcacttaagtacattagagggaaaatcaagttaaac

SEQ ID NO: 6162 - DNA, 390 bp, Glycine max
  unsure (1)..(390): unsure at all n locations
gcttcacaaagagaatcatctcgatatgatagctttggaagtcctcttacatggctctgattntgaaactttaagattaacctcaagttagcatgaccaatcttcttatgccatatctagtgatgctctttaactgaaagtgagcatgacatgttttgactggacagatcaccaagtttaatcttataaagatttccttgtctcttagcagagaagaataaagaggttttcttgttctggatgatacacatatccttgttaaaggtgacattatatccactgtcacataattgatttatgcttagcaaattatgcttcaaccttttaacaagtaaaacattatctatagaaggatagggaggaatgcanactttacctacaccagttatc

SEQ ID NO: 6163 - DNA, 433 bp, Glycine max
  unsure (1)..(433): unsure at all n locations
agctnggtaccactgagttcaaatagctccctccagaacttactcacgaacaatgggtctctatctgatatgatgctacggggcaaaccgtgaagacaagtcaccatagctgtgaacagctccgccaccttccttgtagagtgcttagtgggtaacatcccagatgaagccccttcggagagcaatccactactacgaaaattcatgtatagcctttatacgaaggtaagcccataatgaagtccatgcttaaatcttcccacggccgatatggtaccggaagagggcacaatagccctgctggtttgcggttgtcgtacttagtaagttgacacgtgacgcaggctgcgacgaaagtgcgtacatcactccgcatggaggccacgtgaagttctcctgcaacctctgaaacgtcttctgagtcccatagtga

SEQ ID NO: 6164 - DNA, 421 bp, Glycine max
gtaattgtgaaatgtaggcttgcaacacatcattgatcttatcactaggctcttccagactttccttgatggggatgggaacacgatccagaagctttgctagctccatcttctcatcttgccttactgttacatacttgaattcttcactcaaagagaacaatcgacaaagctctatgtcccccattgtaggcttcaaatgctcgttatatgtggatatggatccgtgtgttatgtagtagtagctggcaatacgacccaagtcagtgacctgaaaatatccactcttcctatcatacttcaccaaattatttctatccaagatggttgcagccgtatgaatctgcaaaatttcagcaagatataaagatcaaaatcagcctatacataaaaaaagacaggatgaaccggctagaaaaaa

SEQ ID NO: 6165 - DNA, 429 bp, Glycine max
  unsure (1)..(429): unsure at all n locations
gtgaccaaattcaaacgatgataactntntactcggatgtctgattgagtcccgtaatatatcgagacgctcgaaattgaatgttgaagctctgaccaaattcaaacgatgataactttttactcggatgtctgattgagtcccgtaatatatcgagacgctcgaaattgaatgttgaagctctcagcaaattcaaacgataataaatttttactcggatgtctgattaagtcccgtaatacatcgagacgctcgaaattgaatgttgaagctctcagcaaattcaaacgacaataatttttttagtcagatgtctgattgagacccgtaatatatcgagacgatcgaaattgaattctgaagctctgagctaattcaaacgacaataacgttttgctcggatgtctgattgagtcctgtaatctattg

SEQ ID NO: 6166 - DNA, 448 bp, Glycine max
agcttgccttgccccttgatatatttgagggactcatggtcactatgaatgacaaattccttgggataaaggtagtgttgccatgttttcaaagcccgtactaaggcatacaactccttatcataagttgaatagttaagggtaggaccacttaacttttcactaaaataagcaattggatggccttcttgcatcaacacagccccaatcccaacatttgaagcatcacactgaatttcaaaatatttttgaaagtttggcaacgcaagtatggggcattagttagcttttgcttaagaacattgaaagcttcttcttgtttctctccccatttgaaaccagcatttttcttgagcacttcattgagaggtgctgccaatgtgctaaaatccttcacaaatcgtctataaaaacttgctaagccatgaaaactcctcacctcggtcac

SEQ ID NO: 6167 - DNA, 416 bp, Glycine max
agcttcttgtattatgcactccctggctatctcttcatggtcttaacattcttctcatggatatgttgggcatggccacatagcatcactgcacagcaaattggctcaggttatcacggacttgggattggtgccttcacacttgattgggcaaggatttcagcttatcatggcagtccccttgtttcaccatggtcttccattgttaatgtgggaattggatttatcatgttcatctacatcattctacctctctgttactggaagttcaacacttttgatgcacacaagtttcctatattttctaaccagttgttcacggccagtggacataaatatgacaccaccaagatcttaacccctgagtatgtccttaatgttgatgcatacaacaagtacagcaagttataccttac

SEQ ID NO: 6168 - DNA, 374 bp, Glycine max
  unsure (1)..(374): unsure at all n locations
tatcccatgcctccttagcttgaaagatgaggaaganagctttcttgtttctctttcttgaatcctttaaagtcttcttttgtgcttaggaaagtgaagtctcatcttgtcactccgtatagcctttttcaaccatttcctaaacatcatgtgtgatgcaatccgaccccccaagggcattggatagaagactccaagaagattaggctagagatgtaagagaaggtcctagggttctcatgagccttagggtagatttcaggcccacgggttaagtatgagtccacttatctttgtacatattagattaaggtttcattatttttgggccttgtatttagggctccataatgtaggtagggtaccctagaaat

SEQ ID NO: 6169 - DNA, 391 bp, Glycine max
  unsure (1)..(391): unsure at all n locations
agcttgtcagcattggatttgggtttaattttttcggtgggagtcttccctcgtctcttcttaaactcccatatctgcgagaaattaagctaccttttaatcaattcaatggttccttggatgagtttgtgattgcctcccctgtactggagatgcttgatttaggtagcaataatttgcatgggcctattcctntgtccatttttaatctcagaacccttggtgtcattcaacttaagtcaaacaaatttaatggcacaatacaattggacatgattcgcaggctgagtaatttaactaccgtttgcctctcacataacaatttgtcagttgatatatacactagagatggtcaggacctgtcaccctttccagctctaagaaatctaat

SEQ ID NO: 6170 - DNA, 458 bp, Glycine max
  unsure (1)..(458): unsure at all n locations
tgaagcctgcgagctntcgcgccatagttgccatggttcgcaatgattgtagcatcaacattacactntcttaagccagcattagctcttgtccatctcgagatgatagttatatatgaacaggaccgtgtctacgcgtttttttaaggcctttgccgagtatatttaaagactaatttaatataagttgtcaaatctcattttattttatcgattacaaaattgctcaccggagttatataattaagtatttctaaactcttaccatcaataatatataaaaaaaaacattcaatttatcttttaacatagtttatataaaaaaaaaattgagtagtttgaattttacaaaattactttcaacaataataaaaattacaagtattatcaataacactttgaaatataatgtatatanttngaattttaaataattaatattnttagtaaaatatgaa

SEQ ID NO: 6171 - DNA, 443 bp, Glycine max
tcaagaaaaatggcctcagcaaacttcttatttccagaaggaaattctatcaatagacctccaatctttaatggagagggttaccactactggaaaacccgaatgcaaatttttattgaggcaatagacttaagtatttgggaagccatagaaatagggccttatatacccaccacagtagaaagaattacaatagatggaagcacatcaagtgaaagcataacaatagaaaaacctagagatagatggtctgaagaggatagaagacgagtacaatacaatttaaaagccaaaaacataataacatctgccctgggaatggatgaatatttcagggtttcaaattgtaagagtgctaaggaaatgtgggacactctacaattaacacatgaaggaactacagatgttaaaagatctaggataaacacactaactcatgagta

SEQ ID NO: 6172 - DNA, 425 bp, Glycine max
  unsure (1)..(425): unsure at all n locations
agctnttcattatatatcaggacttctccgcctataattgtttcctcattgggtgcaaaaattcttgataaagtacagtttaaaatatcttgtagttntcagaatcagattcatagatatttatctatacaggtacaatttctaaggcaagttcatggtctgagcaacattttgataggtttggtctctagattcttctgagttacttcaccagtggataaatattcctacaagtatttctgcaataatgtatataaaatttttattaatttttggttatttatttatataaatgccatatgtttcttatcctttctgaatatgaataatatctagcttctgcttcaatcactttatttntcaagataaagagaatttatcaacaaacaattaaatcacataaatatccatacatgtgcaaatgt

SEQ ID NO: 6173 - DNA, 236 bp, Glycine max
agcttgttgtattatgttatcgctggctatgtgattatggtcttaacattcttctcatggatacgacgggcagggtcacataacattactgcacacaaaattggctcacggtattacggacttgcgatgggagcctatacactagaacgggccgggacttgaactcatcatgggggacccgatgttacaccatggtattccattgttaatgtgggaatcggatgtatgatgtacat

SEQ ID NO: 6174 - DNA, 363 bp, Glycine max
gtacgctcaatgactccgatcaaatatatgtgccatagagagaatggccaaggtgctaccaagacattcaatggtatgggtggagcgttaacattatcagtgaaggcttggcatttacagcatttcttcacatggatgcaacaatcgctctccacagtgagccagtaataccctactcttagaatcttctgagccatggcatgtctattggcatgtgttccaaaggatccttcatgcacctctaccagcatatgctcagtctctctggcatccacacatcaaagcaataccatgtcgtggttgcatttatataagatattcccgcttaggaagaagccggctgccaaccttcgtaacattctc

SEQ ID NO: 6175 - DNA, 473 bp, Glycine max
taagcacgttagcttacgctaagtttagcctacaatcctcagtctgatggccagatggtacggaccattcagtcgttggaggatcttttgagggcgtgtgtcatcgaacaaaagaggagttgggagagttttctgtcattgatagaattcacctataacaatagttttcattctaccattggcatggctccctacaaggctctgtatggtaaaaggtgtaggacacccctgtgctggctagaacccagagaaaacctcaccttaggacctaaagtggtacaacaaaccactaagaaggtcaagttaatccaagagaggatgatgactgctcaaagcatttataaaagttatcaggacaagaggaggaaagactaggaattcaaggttgatgattatgtattcttaagattcactccgtcgactagggttggtcaagcattgaaatctcagaaactcaccttcgtttatcgatc

SEQ ID NO: 6176 - DNA, 462 bp, Glycine max
gcttgtgtctcattagtgttatatatagagacaccttgtaagcttttatgtgcaagtaataaaaagttctcctagtatagccgtggacgtagacacatgcattgtgtgttgaaccacgttaaactttgtgtctttttctttcttccctttatttctttctcttcttttattgctctatactaacaagattagacttggtactgcagcattatatattattcacttgtcaagcatcaaagcaaagcgatattatgttaatttctaactaacccattgtttaagtaaccacaattacctgtaatttatgtgagcgccagcaccattccaatcaccctgttttgtaagaacataaccaaaatgacactaatcaatttcatcacaccaaattcaatattcatatatatatatatatatatatatatatatatatatatatatggtgtccaatattaatttatttac

SEQ ID NO: 6177 - DNA, 442 bp, Glycine max
  unsure (1)..(442): unsure at all n locations
tgcacgtgtaactcaacatctcanaggagtctgacaaacaataacttatttaataaaatagatcttaagcataaaaagaacattaacattttaacatgaaaaatcctccaataccaagagaaacaagacaaattctgaaaaatatttcactatattaatactctttcacataagaaatacaaaataggaaaatgttaaccagctcttaggatattgtttaagaaattaaaaagagaaaggtttttattaaaatgcgtaaaattgtgctttctatgactttnttttatattctcctataatttctacaataaatattttcttcttttaattctttaaccaatgccttaaggacattggttagcaagaccctacaaaatatagtgtttcttaaggagacccacttccatccaaatactagaagtcatagaaatgatactcaagc

SEQ ID NO: 6178 - DNA, 349 bp, Glycine max
  unsure (1)..(349): unsure at all n locations
agcntttgacaactattacatcattatataattttcaattgaataatattttcttaaaactcatcgtcgaattgaaaatttatttcgcatagatcatatatgcaaatttcatattaatctaaaatcatttgtcacctcattcatatagattaaaattgacgtagtataaacatcttaaaacatggataatttgattatcttcttgttgttggtcaatnttgacaaatttaacacacatgatcttagaaagatatagatataattcaacgattgggattaataaaatcatattatatattaagttattaaaatgatgtaatgattaaagaaaaattaacaaatgaaatga

SEQ ID NO: 6179 - DNA, 426 bp, Glycine max
  unsure (1)..(426): unsure at all n locations
taaacttgatacgaatttttatacattatggtttataagatgatntntaaatatcttttgtggaataccatcttacttaaaatgtataaaactattatagaagataaaattttctctttataaattaatacggtattgggattcattactaactagtatcagtattatttggaaccaatttcactctttatggagtgaaaaaaattatgtaaaatgagaagtaattatggatgggtctattattaatttgaaaaataggtacttctcgcttttatctttattcttataaattaaaaagaaaaaagaataagtaattaaagaaactagcgatggtaatttttttagagagtagtggcaacagttacatcttgaaggtgtaggaagacaataaaaacattatatatatatatatatatattaaaagat

SEQ ID NO: 6180 - DNA, 466 bp, Glycine max
gctcatgacaggctccccctttgaagatgaaacagcctattgagacttgttggcagacttttatatttaactacaaccaggcctaacattgctttcattgttcagcaacttagtcaattcatctctcagacattacaagttcatcactcagcagcaattagagtcctcaaatatctcaaaagtgctcctgccaagggattgttctattcttcctcctccacactcaaactctctggttttgcagactcagattgggcaagttgtcctgctactcgcagatcagtgactggttactgtgtctttcttggcacatctatgcagtcttggaaatccaaaaagcagtccacagtagccaggtcaagttcagaagcagaatatagagctttggctagcttaacttgtgaattacaatggctgcagtatttgtcaaggatcttcacatctctcttgatcaacctatctcagt

SEQ ID NO: 6181 - DNA, 370 bp, Glycine max
  unsure (1)..(370): unsure at all n locations
ngtcaaanagggaagcaagttaaaaattgttttcaaagtaaaaacgttgtttctacttcaaaaccccttgaactacttcacattgacttatttggtccctcgaaaactatgggttttggtggtaattactatgtcctagttataatagatgattactcaaggttcacatggactttatttttgaaaaccaaaagtgaagcttttgatgcttttcgcaaacttgccaaggtgattcaaaatgaaaaaggtctcaacattgtttcacttataagtgatcatggaggtgaatttcaaaatgagtatttgaaaacttttgtgaagaaaatgaaattcaccataatggttctacctcaagaacacctcaacaaaa

SEQ ID NO: 6182 - DNA, 435 bp, Glycine max
  unsure (1)..(435): unsure at all n locations
atgaagactctcctctaatctaaatgtaaatctgtgatctctatcagagactatgctagaaggaacaccgtgtagtctaactatctcactgatgtacaagctagtcaatctttctaaggaatatctgatgttaattgggatgaagtgagcagatttcatcaacttgtctacaataacccaaatggaatctaaacctttgggggtcctaggtaacccaaccacgaaatccatggagatgatatcccactttcactcaggtatgtctaaaggttgcaacttccctgaaggcttctggtgttctatcttagctatctgacacactangcacgcaaggacaaactcattaacttctttcttcatactcgaccaccaaaacatctgcctaaggtcctggtacatcttagtcactcccgggtggatacttatactacttct

SEQ ID NO: 6183 - DNA, 397 bp, Glycine max
  unsure (1)..(397): unsure at all n locations
tagctnntactgaaaagatcactcccagatgtaccaaggatgctatgcaagatcctcaatggttagctgcaatgaaggatgaatacatggctctcatgcaaaataaaacatgggatctcgtccctttgcctcctcataggaaggctattggttctaaatggatatatcggctgaaatacaatgttgatggctctgtagccagacataaagctagactagtggcttaggggtattctcaacgaccaggccttgattataatgagacattcagtcctgttattaaaccaacaaccattcaaacggtcttgagcattgttgtcaccagaaaatggtatatacgacacgtagacattaacaatgctttcctaaatggttccattcaagaagagtatatatg

SEQ ID NO: 6184 - DNA, 411 bp, Glycine max
  unsure (1)..(411): unsure at all n locations
atctatggnggcagaatcactctcattaattcagtcctattagccttacctatctacttactatccttctttaggatccctaaaaaagtggtgcacaaaattgtttccatccagagaaatttcctttggggaggtcaccaagaggccagcaagattccttgggtgaagtgggacacagtttgtcctcctaagaacaaagggggcctagggattaaagacttatctaaatttaatgaggctctacttggcaaatgggggctgggagctggctaataaccacaatcaaccttggtctangaatttactttctaagtatggtgggtggaaggagctgatttctggtggaaggaggaatttcacttcccaatggtgcaggatctgaagatcatctttcancagcagcacaacaac

SEQ ID NO: 6185 - DNA, 470 bp, Glycine max
  unsure (1)..(470): unsure at all n locations
cgtgattagttagatgattattattattatttgtttttttgactgaagattntaattnttattcaaatcgatattgtatagtactcctgtataaaagtaaaaaaaaaaaaaaggaaaaatggccaactccaacctccatatctagagatgatcaattgatcatatgttcgattgcttcatattaatcaaattcgaatcaatcatatttaattacatgactttgatttttttttcttgttaatttgaatcacaccaatttaataaagattgagttagttttttgagtaatcaagttatcataaagaaactaagttactatattctatttaagtttttatccccactaattgcctattttttaactaaattnttaaacattttaaaaaaattaaactgaatattaaactagctatttatattatttaatatataattttgtctatgattatcacttaacgtatttcattaat

SEQ ID NO: 6186 - DNA, 393 bp, Glycine max
  unsure (1)..(393): unsure at all n locations
agcttttagaagaatgttanaatcaaatgtcggtcctaataaatacacttttgcggccgtaatttctgcctgtgcaaatcttgctattgctaaatggggggaacagattcatggccatgtattgcgtttaggtttggtaaatgctatgtcagtggcaaattccattgttactctttattcaaaatctgggttgctaacctcaacttctctagtgtttcatggtataactagaaaagatattatctcttggagcactataattgctgtaaatctataagttggctagcccaattgatttattaattcccaatattctcgtggatagataacatctttcttcaagtttcatcaagaacttacgataaagtctaagatctattggcaccaagtgta

SEQ ID NO: 6187 - DNA, 403 bp, Glycine max
  unsure (1)..(403): unsure at all n locations
agcttgcttaagaagattcctaaagaagctagatcttagctacacacacctctctaatagctaagctcacctccttgagatgagaagctagagcttanctacacaccccctataataactaagctcacccctatgccaaaaaaaaacatgaaaatactaaaaaagtccttactacaaagactactcaaaatgccccgaaatacaaggctaaaaccctatactactagaatggcacaaatacaaggtctaaacgaaggaaaaacctattctaatatttacaaagataagcgggctcatacttagcccatgggctcgaaatctaccctaaggctcatgagaaccctagggccttcccttggatcacttgcctaatctacttggagtcttcaataaatgcccttgc

SEQ ID NO: 6188 - DNA, 410 bp, Glycine max
  unsure (1)..(410): unsure at all n locations
tatgctgcanacatctacaatagacccactcatctctcatctttgtaatcagccacattagagcagctatgacctctctagaaaaaggtccatcccgggtggaggaatcatcccaaccttagatggccaaatcattctcaacagcagctgcctcaacaactacagcttcgaccccagagacaacgtatagttgatgcttctgcacatcctacccttgaagaacttgtgaggcataagactatgcataacatgtcatttcaacaagagaccagagactccattcagagcttaactcatctaatgggacaatgggctacacagttcaataaacatcagtcccagaattctgacacattaccttctcaatctgcctagaatcccataaatgggagttccattacattgacatc

SEQ ID NO: 6189 - DNA, 453 bp, Glycine max
  unsure (1)..(453): unsure at all n locations
agcttaccaactaagctatcaaacatagataattactaaaatattcatcagagtcaaatttcattctgtaaataatgtggtcagaaaaaaagaagactatagatgcaggtttttctgttctttctaaatctcaatttgattggctcaccactgaagatttccctctgaagagtcttagcattgtaggagcaggtgaactcttgggaattgccacagttacatcataaatggcaggaacaaaagagcgcatatggtttactgctgaaacaaaaccctgaaagcaacatagcggagtaaatatttcagagcaaccaacagaaaagaacaataaaacctaatataatggttagcactgcctattaggtaatatatgtaagattgaatgtgttatgtaaatttaaaagaacaaagaagccaaagcatgaaagtaaaatacanagataaagtctatct

SEQ ID NO: 6190 - DNA, 393 bp, Glycine max
tctatagaaggttcattcctaatttctctacaattgcatcacttctcaatgagctggtgaagaagaatgtggcatttacctagggtgaaaaacaagagcaagcctttgctttgctcaaagaaaagcttactaaggcacctgttctagctcttcctgacttttctaaaacttttgagctagaatgtgatgcctctagagtgggagttggagctgtattgttacaaggttggcaccctattgcttattttagtgaaaaacttcattgtgcgaccctcaactaccctacctatgataaagagctttatgccttaataagagccctccaaacttgggaacattaccttgtttctaaggagattgtcattcatagtgatcatcaatcacttaagtaca

SEQ ID NO: 6191 - DNA, 423 bp, Glycine max
tgacgcttaggatatgacttaatgactagtagagagattaccataataccaatcccattttcttactacttttgtctttgtactattaagcattttttataaactaaactaatatgggtcctttgttttagtttatttattacaaaaagcacatttttaaaacaaaataagtaattcttttttgtttttataaataaaaattctggtttttaatatttttcttataatgtgtttacttaaataatagttttatgtgtttttaagaagaaaattctatttatttcttataaaaacgcttttattcataatattttataaatattatatacatttttaaaagactagctttaatatatattaatacttcaaatatgacattaacttcttttgttaattagtattattttcgacatctttaattta

SEQ ID NO: 6192 - DNA, 431 bp, Glycine max
  unsure (1)..(431): unsure at all n locations
agctngacaggttcaggcgcaggtgctgctactggtggaggcactntaaattggttgccaaacctcaaggtgatggcactcacatttttcagattctgcacagtttgtgaaggcaatttgttagaatttttggattgagcttggtttaactgagtagccatttgccccatctgatttgttagactttgaatggaggctcttgtctcttgctgaaattgcatattctggatggtcatttgcctcactaactcttctaaggaaggttaaggagaggcctcagttgcttgttgtctttgttggtggtgctgttgtattggaggaggaacatatggcttgcttggaccagtagcattctataaaggagggacaggttgttgttgttgtggaggacttgcccatctcagatttggatgatttcttcaacctggatt

SEQ ID NO: 6193 - DNA, 465 bp, Glycine max
  unsure (1)..(465): unsure at all n locations
tctttacgttattccattccaccatagcaatagcaacaagaactgcatagacaatctntgtaataattttataaagtcacattctttnntctttttatgntaataaatattttgtatnttttatgtaataatttctttcttttcaaacatntttattntatttttgagtcttgctaaccaaagcccttaggacattggttaaggaactaaaaggggaaagtatttagtgtgtaaatcatatggaagtgtaaaanaaatcatggacaatgcaattttctgtctcccaataaaaacatttctactttaagttccttaacanattatacacccgtccttgggatagaanaagagtaattctacatccctttacagngtatnttcactaattctcctacttagntaataaagaaagtatcaattntttttatgtctaaggattaatgcatttacattattaatacttct

SEQ ID NO: 6194 - DNA, 483 bp, Glycine max
  unsure (1)..(483): unsure at all n locations
agctngccccacttgaaaagcctcttttgaatggtgactctaatgtaagcaacaattatgttcccattaaggctagaggaaatgaaaatttaacctggtattcaaatgttggatttttcagcattcttactttctcatggatgattcctttaataactctagggaatgagaagactttagagcatgaggatctcccacatcttgctactgatgacagtgtggatgggattttgccaacttttacaaacaaacttgagtcagagtgtggtaatgtgataacaaccctactctagtttcataacaaccctacgaaaatatgaggttactgcacacatgaacaacactacactagtgtgataacaaccctgcttacactatgcaaacaaccctgcttccagtgtatgtttgtgataacactacgttacccattattcaatctcctcatgccctatccccaatgaacaacactacactacctcaatc

SEQ ID NO: 6195 - DNA, 345 bp, Glycine max
  unsure (1)..(345): unsure at all n locations
tgttgacactgttacctaatgcattcacattcagcggaagccttgcagggtctntaccagccactgtctgcacagggttgcttanggaatcgaagttngagctcgacacanactctggcaatatgtggaactgcactaattcgattttctggccttcgtttanggagttgaggaagcctgctntgaggttggaaaaggcagaatcatctggtgcaaggatggttatgccgccactctnggctgttatgagctgtgagttgatgttgttcatgatttctgtggttntgaggaggcggattangaactgagaacattttgcctttntcangattctggtgatgtcgt

SEQ ID NO: 6196 - DNA, 289 bp, Glycine max
  unsure (1)..(289): unsure at all n locations
ctgtacttggatcatggaatgtgtntcttccacttnctttagtgtggcagtcaatggatccatttatggtcacttcanagggcagcggggtcttagacaaggggatcctctctccccttatctgtttgtgctttgtttggagtacttttccagagatatgagcagccttaaggatgatgccaattntaaatttcatcccaactgtgcaagtattcagctatctcatttggcttttgcagatgatattatgcttctatctagaggagatatcccttctgtgtcaactatg

SEQ ID NO: 6197 - DNA, 348 bp, Glycine max
atgcgacaattgctgcacctctaaccaagcttctaacactggaaccttttcaatgggcccaagatgctcgtgcagcttttgctgctcttaagcagatgctgacctcaacccctgttctccggttgtcggacttcactcttccctatacggtggagacggatgcgtcaagaacgggcatgggcgcaatgttatcacaatatggccacccagttgcttactttagcaaaaattttccaccaaagctacttggtgcttccacgtacgttcgtgaattattcgccattacggccgccgtcaagaaatagtgtcaatacctccttggccggtgctatcacatcctcactgatc

SEQ ID NO: 6198 - DNA, 415 bp, Glycine max
  unsure (1)..(415): unsure at all n locations
agcttcaacatcagaccacttccagggtgctggaactacttcacatggacttgatggggcctatgcaagttgaaagccttggaggaaagaggtatgcctatgttgttgtggatgatttctccagatttacctgngtcaactntatcagagagaaatcagacacctttgaagtattcaaagagttgagtctaagacttcaaagagaaaaagactgtgtcatcaagagaattaggagtgaccatggcagagagtttgaaaacagcaagtttactgaattctgcacatctgaaggcatcactcatgagttctctgcagccattacaccacaacaaaatggcatagttgagaggaanaacaggactttgcaagaagctgctanggtcatgcttcatgccaaaagaacttcctataatct

SEQ ID NO: 6199 - DNA, 394 bp, Glycine max
  unsure (1)..(394): unsure at all n locations
ataaccggcctccataccananagtcaaagttatagatgctgttgttacaaaatatgaggctgacaatatggaacctgaaatccatgattgcttgatgctttctttcttgnggccttccatcgccattctgaacaaatntaaaatccttttctcagatgagaatgcagcaatagtcctatgattggtagtagcttccattgctaattgactaccctctctntgagcctttcttgctnntgcctgccatactttcatgagaatgttnnttgagtagaagcatacaatgatcaacggctgcattgcggtcataacaagagccaccctccatgtgacaattaaacttagtacaaaagccaagaaagccataacagaaacgttaactaacaatgacat

SEQ ID NO: 6200 - DNA, 300 bp, Glycine max
gatgtcttggttaacctgttaacccagctggccttgaatcaaaaataagtacctgtcgcacgactatgtggtttatgctcctctgccgaccaccatacagacctttgtccttctgtgtgcaagctggagcaactgaacaacctaaagcttatgctgcaaacatctacaatagacctcctcaacttcagcagctaaatacaccacaacgaaacaattatgacctctccagccacagatacaatcccagatggaggaatcaccctaatctcagatggtctagccctcaacaacaacaacagc

SEQ ID NO: 6201 - DNA, 347 bp, Glycine max
  unsure (1)..(347): unsure at all n locations
tgaccatgacatgtgttttaataataatcaacaatcaatgatcaatcatctntgaatcatctatctntcaatctattttcagcatcatctctcaacatctgtcaatcaatctttcaatatctttctacagaattgtgtgattcatctctcttcatttttctaaaagttntttatcaacactatctcttccaagaaaagttctntgttcacaaacttatgttattcatctttatcattctcttcttcctttgccaaaagaacgaaggactaaccgcctgaattcttttgtgctctcttatccctacaaaagatcataggactaaccgcctgagaattcttttgattct

SEQ ID NO: 6202 - DNA, 377 bp, Glycine max
  unsure (1)..(377): unsure at all n locations
agcttgacttacttggactgatcatattctcttatgaaatgatgatcaatgtcaatgtgctgggatcattcatgatgagcagggattgaagcaagacttatagcagatttattatcacaaaataacattacagagggcacatcaacttcaaagtgaagaagtaacttgggtaaccaaacaatttcactagtaacagaagacaagacacgatattcagcttcagtggatgaatttgaaacagtgggttgtttcttagaacgccaagaaagaaggatatttcccaaaaagacacaaaagccagaagtggatcttctggtatcaacacagctggcccaatcagcatccgcanaggcagtgaggctgagagagttctgagc

SEQ ID NO: 6203 - DNA, 441 bp, Glycine max
  unsure (1)..(441): unsure at all n locations
agcttgtactttaattgatattcatgatatatatattaanattcctaaatttcataattagggcttatacattagtaagagaaattatatcattcttggagaatcataaatttcataacacatgctctgataccacatgtgagaatccttaagggtttcctagactattaatgattggaaacaacaggatcttgacacctatggttctcacatacaatcaataaacaaccatagataatgatgtgtacctttctccataggaagacatgtacatttctctttggaacttctcttcggtgcactttgattctccttgaaagagaagagatataagatttacttcctatgtctttcttgctgtctctctcattcggatggcatgggtggagagaacctttctgtcagaagggaccctatttaacttatggtttcaacccttta

SEQ ID NO: 6204 - DNA, 504 bp, Glycine max
  unsure (1)..(504): unsure at all n locations
ctctatatatgtgtgtctgatntcgaanagaaaaaaagagatagatattctaagagaacttaattgccaaatgctctctcaacaactcttgagagaatacttgcaaatctattgagaattcatccagaaacttcaaattgtattatcatctctaaaagagagaaattcctctaggatcttcaatttgtatcatccactctaaagtatagaaatctttctatttatctcagaaagttagttgtaatcaagagactggttgtctcttggattgagagaatngtagtcaagagattggttgtctcttggagaatctntgaacacaagggtgagggatctcaaggtgtgttcaaagtctgtaaaggatttatagagatagtggaaaatctcaagtgcttgaggactggacgtatgcaccggaagtggccgaccaatataattgagttgcattcttcttccttatctattatttatacattgatgtgcttgctgttaagacatataaat

SEQ ID NO: 6205 - DNA, 280 bp, Glycine max
  unsure (1)..(280): unsure at all n locations
gatgtttntcaagatactagactcatctggcacttcaatattcaaacttcttgcatgatcgagaagagaggggaaagcaacttcaaacccgataggcatatgttctgcattttcatcctgaagcttgtacaaattctccttataaaatgacattcctgttacatatgaatgcatatatacacaatagaaacattaaattaacataaacgtgctgataaagaaataacatttatatcataatactctactatttcccggtcctcttcttttactatggaat

SEQ ID NO: 6206 - DNA, 458 bp, Glycine max
  unsure (1)..(458): unsure at all n locations
agcttgtgcatccaatactctgatgaggatgtcctatatgttcttaatactagactgatnccattgcttccaaagtttcatggccttgcgggtgaagacccacacaagcatctgaaagaattccatattgtctgctccaccatgaaaccaccagatgtccaggaggatcacatatttctgaaggcctttcctcattctttagagggagtgacaaaggaatgtctatattaccttgctccaaggtccatcacgagctgggatgacctaaagagagtattcttagataaatgtttccctgcttccaggaccatgaccatcagaaaagatatttcaggcattagacaactcagtggagaaagcctatataaatactgngagatatttaaaaaattatgtgctagttgccctcaccaccagatttcagagcagcttctcctccaatatttttatgatagatg

SEQ ID NO: 6207 - DNA, 468 bp, Glycine max
  unsure (1)..(468): unsure at all n locations
gaacttgcacatttatgatgttcttcatgtgctttgactgattcaacaagtctttacaagccttcattgcattgttatgtggtgagcaaggactatctccaatgtgattaagaaatgcacnaattttccagcattaacctttctacatgatctaaatccttgtctattaagacatgtgatccaaaaatgatcactttgcttngtactgaatagatagcataacaaacaataaactctatcattagatggggaatactctagcccagaaagaaaacatttaaaccaagtacattggaaatgccttggatgtntctctntacanaaaggataatattgtagttctatttgatatggaccccatttgatataagctcttcgaacttcatctcttttgatcatcagatattcatatatgtgaagggcatttctcaggtcacattccaaagaaataacatcaaattcatcaac

SEQ ID NO: 6208 - DNA, 463 bp, Glycine max
  unsure (1)..(463): unsure at all n locations
agcttttattgtaatcttgaaattcaggacagtactctaatttctgaaattnntgggataaaaatggtcattgaccagtcccttttccatgacttaaccaaattacccagtgacggtgtaccatttgaaggtacactgaatgacgactggaaatttgatttctctgcccatgatgcccgccagttggtttgcaccaacaatgcggatatgaccggacgtcttcttgacgggtcattggcttttgaaagccgcatccttcactatttaattgtgcgtattttgcttccacggccttccaaccttgcccaggtttctgagaaagatctaattatcatgtgggcctttcatacagggcgtcaacttgactgggcacacttagtcagatatcgcatgcataaggcattgcgattaaatgctccactaccatatccacagcttgtcactctcttttntcaccattttc

SEQ ID NO: 6209 - DNA, 414 bp, Glycine max
  unsure (1)..(414): unsure at all n locations
gtaagaatctgttntagaatttctaacatgtacacaattctttagttggatattccatgaaggtttagaatcatcaacagcatcacagaggtttatgtgctttctttctacattgtgcaaaaggcatgactggttattttcttttatccatattgctgtctgaacttgtcgtgcaatgagtctccagcacattgctgtagtcaaattcatcaacttatcccaaattacaggataatctttgtcttttctataagcagggggagctgaataaacaaagtacccattgaagcgaagaaggcgattcaactccttcagtaaaatcccatctgcaaaaaacagaataaattgacaataaacaagtctgtcagaataacgtgccagttcatgaatcactagaacaaaataaacaagtct

SEQ ID NO: 6210 - DNA, 389 bp, Glycine max
  unsure (1)..(389): unsure at all n locations
tggtcatacgttntcacacagatgtccaattcggggtcataatatatcgagacgctcgaaattgaacaacggaagctctcgagaaaatcgaatggtcataacttttcaaacgaatgttcgattcggggacataactcatctagacgctcgaaattgaacaatggatgctctcgagaaattcgaatggtcataagttttcacacggatgtccgattcgtggacatattatatcgagacgctcgaaattgaacaacggaagctcccgagaaatttgaatggtcataacatttcactcggatgcccgatctggaacataatatatcgagacgctctgaaatgaacaacggaagctctcgagataatcgaatggtcataacttttcacacgga

SEQ ID NO: 6211 - DNA, 349 bp, Glycine max
  unsure (1)..(349): unsure at all n locations
ctggagatgaagatgattggataagtaccagtggatntgtgttnttcatangatacacaaccttcacttggatgtcaaaaaagtagccgatattcactcttttgactcgtgaggcagaatacgtagcagctacttcatgtgtntgtcatgcaatctagcataagaatntattaaaagagttgggcatgtcacaagaagagttgaccaagatctttgtgtgataataagtagtcattgctctagcaaggaatccagtgttctatgatcgaagcaagcatattgataccccttaccactacataagggagtgcatagcaagaaaggatgtacatgcagaatatgtgaagtc

SEQ ID NO: 6212 - DNA, 483 bp, Glycine max
  unsure (1)..(483): unsure at all n locations
tcttaagccacctgcggcatgcaagctntctgctagatatcatcttgtttgtgcgacgaccatttccatctacagaaaactgatcatagtcgctcaaggaaacacagaaaatgaccaatccaacatcctcaaacatttctagccacttgcaattttctgctagccctctcgcatgtattgtaattagttgatacctgtaatcaaggagaacaaagcatggtacaggttagcaacattttagcagttgttgcaattggatcaatcagggctacccagaaaacttctcacatataacattaggcacaaatattttcacccacctaactaaagaattatgtagatcagcagtgtcaacagtttcctcgggagctggttgaggaaatgaaaactctacagaagccatcccattggatgaagtaactccttcagcatagaggatatctaaatccganggttcatactcagtcctcagtatctcaacag

SEQ ID NO: 6213 - DNA, 372 bp, Glycine max
  unsure (1)..(372): unsure at all n locations
agcttcatatggagccatgccgacggtagaatgtaaactatngttataagtgaactctatcaatggaagaaaactctcccagctttccttctgctctaagatacatgctcttaaaaggtcctccaatgactgaatggttcgttcagtttggccatcagtctgaagatagtaggctgaactcagtctaagcttggttcccaacactctgttcaagctctcccaaaatctagaggtaaatctaggatctctatcagatactatgctagatggcacaccatgcagcctacaacctcacttatatacaaggtggtcaacttctccaggaaaatctaatattaatgggaatgaagtgagcaaacttagtgaatctgt

SEQ ID NO: 6214 - DNA, 262 bp, Glycine max
  unsure (1)..(262): unsure at all n locations
tggcagaggaatggagaatgaggaaaggtgattggagatgccacttcaacgagaagatgagtcaagaacttaaaggtagaagaagatgagtggagggaaagggagagaatgggcacacaatttatgcctcacatgaggtttgaactctgaagtgtaatttctaatatgatcaaagttgataaaatgcacacacaaggcctctatttaagcctaagtgtcacacanaattggagggaaatctgaatntcaattcaaatttcgc

SEQ ID NO: 6215 - DNA, 420 bp, Glycine max
  unsure (1)..(420): unsure at all n locations
cacacacacacacacacacatatatatatatatatatgtgtgtgtatgtatatgacttgntaaaataaattangaattaatagttcaaataataaaattaaattgaacgaaattaatatattaagaatcaacaataaatactntcaatgaatttgtagattaattatctatgaactctctttaatctgaaataatatagttcgaattaatatatacatgttctgtgccatgtaaacattaataatgtgtgatgtttatatgattgatgacgtgtgatcacatgttgtgttgcgattataacattgtaatcgagattgagtgttcgtgataaattgagtatgtgttgaatcgtaagatacatgtgtatcgagatttcttacacattgagttgtgagctattaactgtacaatcacacaact

SEQ ID NO: 6216 - DNA, 456 bp, Glycine max
  unsure (1)..(456): unsure at all n locations
ccggatcttaagtcacctgcggcatgcaagcttcttggggcatgcagggttctacaggagattcatcaaggatntttcaaagattgctagacccctaagcaacctgttgaataaagatgtggccttcaagtttgatgacgaatgttcaacagcatttcagacactgaaagacaagcttactactgcacctgtgatgattgcacctgactggagtaaagactntgagctgatgtgcgatgccagtgattatgccataggagcagtccttggacagagacacgataaggtatttcatgctatttattatgctagcagggtcctgaatgaagcacagttgaattatgccaccacagagaaggaaatgctagctgttgtctttgccttggagaagttcagatcatacttgataggatcgaanggtcaccatttcacagatcatgctgccatcaagcacct

SEQ ID NO: 6217 - DNA, 410 bp, Glycine max
  unsure (1)..(410): unsure at all n locations
agctnggttcaactgagtagccatctgccccatctatattgtcanactcttaatggaggctcttgtctcttgctgaaattgcatattctggatggtcatttgcctcactaactcctctaaagaaggttgagaaggggcctgacttgcttgttgtctctgtcgctattgctgcattggaggaggaacatatggcctgcttaaactatcaacattctataaatgagggacaaattgttgttgctgctgttgtcgttgtggacgatttgcccatctcagatttggatgattcctccaacctggattgtatttgttgcttgaaagattactaatattctgctgcttgttggttttttgttgacggggtctattataaatgtttgcagcataagcttcaggttgctcattgactc

SEQ ID NO: 6218 - DNA, 367 bp, Glycine max
  unsure (1)..(367): unsure at all n locations
gctcgtctnngctgatattatcatgcacactnttctgatgatgacctatgaaccaatagggatctacttgaaacttatgtgcttcaagtgagaagaaatgcttctttntccacttgtgaagatgttcaaagtttggctatgaagatggttcagactgagaaacatttggtatttccattggtttataaacttattgagctagctttgatattgccggtgtcgacagcatccgttgaaagaagcttttcatcaatgaagaatatcaagtctaaattgcgcaataagatcaacgatgtgtggttcaatgacttgatggtatgtacaccgagcgggagatattcaagtcgcttgatgatattgatattat

SEQ ID NO: 6219 - DNA, 423 bp, Glycine max
  unsure (1)..(423): unsure at all n locations
agctngaatcttccttggtcgggtacatgagcatatgcaatgctcccaaatactctcaagtgatcaactcttggcttcactccactccatgcttcttgtggtgtttgatctttgacattctntgttggggagcgattggacaaataaacggcacacgcaacagcttctgcccaaaattcctttggcatatttttagccttcaacatacatctagttatattaagaatagttctattttttctctctgctaccccattttgttgtggagatctatgaaccgttagagggcgacgaatcccatattnttcacaaaattcattaaattcttttgatgtgaattcgccacctctcttggatcttagagcttngattacataaccactcttcttttcacaagagctntataattntaaaaactacaat

SEQ ID NO: 6220 - DNA, 291 bp, Glycine max
  unsure (1)..(291): unsure at all n locations
tgcaagcttnncagggacaccacattccttttgaaagtttgtgggcaatcacattctaaatggccttagcccactgtgagtttagacatatgaattagtagtatatgatattatatacacacatacatatacttttctgggcatgatcgagtctctatatatatatacccatacatttactntggntaatttaaacatgtgaacatntgttggtntacgaggaagacaaagctatattggtgcatgacacagggtcgcaattaaagcagataaataattgtgtcataaatc

SEQ ID NO: 6221 - DNA, 377 bp, Glycine max
tgccacattcttcttcaccagcttattgacaagtgaggcaattgtacaaaaattaagaacaaaccttctatagaagcttgctaagccatggaagctcctaatatgtcccacactttttggggtgggtcattcttggatggccttgattttctcaaggtccacttggaccccatttctaccaactacaaaccctaagtaaactatattatctaaacaaaatgtacacttctctatatttgcatagagggtgtttttcctaaagaaagaacttgcctgagatgtcctaaaagatcatctaggcttctactgtacactaaaatatcatcataataaaccactaccaatctacctatgaaatcccttaagacatgatgcat

SEQ ID NO: 6222 - DNA, 344 bp, Glycine max
  unsure (1)..(344): unsure at all n locations
atgcttggcaggaacctacacagggatgctagcttaccgttcagcttctgaacttcttggatgttggtggggctacgcatctctagtatggcagtgtatttgtcggggttggcttcaatccctcagtgagtgatcatgaagccgaggaacttgcttccacctaccctgaaagtacatattttaggagtgaggcacatgtcatatttgcagagttcctcaaagacttgttccatgtccgccacatgctggactatgctntgagacttgacgaccatgtcgcccatatatacctcgatgtttcatctgatctgctgataaagactcggtccatcagtcattggtat

SEQ ID NO: 6223 - DNA, 425 bp, Glycine max
  unsure (1)..(425): unsure at all n locations
tgaatattctatgcaacatgacatggttatctgacaagctatgaatatgcttcattcaacaatgctngatgcagaactatgatgcagttgttggtgatgtatcgatagtgtccacacgttatgaatatgcttcattcactcagccctatactgaaaccggactgatgatgattgttcctattaaatcaaagacaggtgatagaacgtggctattcatgaaacctttcacaaagcgcatgtggattctaatattggtcatcattgtctacaatggttttggtgtatggattattgaaagaaaccaccgccctgaaccggaggggcctattctgcagcaaaccacaactatgttatgggtggctntctgttctttgttctctctgaatgggaatttctttctgctgtggtcatctgttgatccatct

SEQ ID NO: 6224 - DNA, 447 bp, Glycine max
  unsure (1)..(447): unsure at all n locations
tcaagattcattgtttccaataacattaagcgaaagtcaagtagattggcagccattctgggatgctagcatacttagaagatggataaatatttggggttccccatgctttctggtagagtcaagaatgaagacttcccttatantttggaatgattgaacttgagattagcagggtggaaaacanaaactctgagtaggtctggacgtgttactttggttaagtcagtgtgaaactcaatccccatatattccatgcaaaatntctggattcctcangggatatgtgatgtgattgatagaatctcaagaagtttattttgggtaacaaccatcatcattgggtggggtgggacataataacttagccctttgaggaaggaaaacttggagtctgtaaagttagagaaacaaatacaactctcttagggaaacatatgtggtctc

SEQ ID NO: 6225 - DNA, 464 bp, Glycine max
  unsure (1)..(464): unsure at all n locations
tgtaagtggctntcaaagcctactctntattctatgaatattgttaatctgctaatggattcaatctctcctcaggatatcactattggagttgctattggatcgtctacacagatatctatgtttgtggtatggcctcgaactgttattaaatgttattaagttgtttggggtatacatttaccatatctttttgtgattaaactatcctgaatttcttcttgtcataggaggacatttcttgagtttattaactttttaaaattagttaatcagatgatgatcattggagaaagttgatggttcttgatctcttgaaaattgtagatccctttctgtgtagttgttggatggtgcatgggaaaagaaatggacttgaattttcaactattcgagactgccacgctttttatcactgtgttagtagttgcatttatgatgcangtatgttatttcttacttgc

SEQ ID NO: 6226 - DNA, 371 bp, Glycine max
agcttgtagggttaaagtctcactattgtcacgtgctcatgcaacaattgttaaccgcggctatacaagacatattgcccaacaaagtcagggtattcataactcgactgtgttttttcttccatgccatatgtagcaaagtcgttgatcctgtatagtttgatgagctggaaaatgaggccgcaattatactgtgctagatggagatgtatttgtcccctgctttctttgacatcatgattcacttgattgtgcatctggtcaaagaaatcaaatgttatggacctatttatctgcggtggatgtactcagttgagcgatacatgaagatcttaacagggtatacaaagaatctatatcatccagaaaca

SEQ ID NO: 6227 - DNA, 388 bp, Glycine max
  unsure (1)..(388): unsure at all n locations
agctttgtccgcaaaaatcactaaaaaccgttttaaggtccaacgccttaaacgatcctctttgtttttatcggttaacatggacctttcaaaagcataaaatcaacacgtaactttaccgtttttgcaagaactacgtaggtccgagttcctcaccacaaatcgaggatacgtaggagcagaagccccgcttttgtcgaccaccccttttcaaacaaaccaagagatcgttaatggtccaacgccttaacatttctctactttcaaaaaccaagagatcgttaatggtccaacgccttaacgtttctctcctttcanaaacaagagaccattaatggtccaatggccttaacgttctctcctttcaaaatcaaaagatcgtttaatg

SEQ ID NO: 6228 - DNA, 423 bp, Glycine max
  unsure (1)..(423): unsure at all n locations
agcttgtgaatntgttgtgttatttgtagctgtcatatcataatactgtaattatataatattattatgttaaatcttattgcaagtctacactttccttgagaccactcttgtgactatatcattactgccacatttcaaaacatacttttctgacggagaaattcctggaacacctggcactcttgccacaacttttcttacttttggttaggtcctgaaacatgttttctatttgagttgttggtttcatatttgactttttataacactgttggattgactgcagttttgaatctggccttttccttgagtgtcttgggatttcttgtcttgcacgtgtcattggtagcttctaatacaaccactattgaggtaagagtttgcactcttttccctttcccttntctactttagaaatct

SEQ ID NO: 6229 - DNA, 387 bp, Glycine max
  unsure (1)..(387): unsure at all n locations
cttgcttctacagaacacttgggttttcaaagagaacaagggatgggacatcccttgtggatctttggcttgtaaaggattntacaaggttgaaagaaatctcaagaaccgtaggttgcttgaggactggatgtaggcacgggttgttgccgaaccaatataaaatttttgtgtttgtcttcttcttccctacactctntaatttctgttgtatacttttcttttacgctttacttttgtttgaattacataacttagtagtaaagcctaattgaatctggtaacattaagaaggataagattntaattagtcaaagcacattaataattaattcaaccccccctttctaattattctgangtcacttgatccaacacaggtctatt

SEQ ID NO: 6230 - DNA, 428 bp, Glycine max
  unsure (1)..(428): unsure at all n locations
agctntgcagtagatgccactctactctaaattttngaatgatatgtngacaaggaagcacatgtacattcatcangaaaacatcatagtggaaggaaattgtagtgctgtaatccaaaagatccttccacctacgtgcaaagatcctgggagtgtaaccattccttgttcaataggagaagtcaatgtgggaaaggctctgnatgatctgggagccagcattaatttgatgccactctctatgtgcagaagactgggagagttggagattatgcccactcgaatgactttgcaattagctgaccgctccattaccaggccctacggagtgattgaagatgtgttggtcagggtaaagcattttatcttcccagcagactntgtggtcatggatatctctgaagatattgacatccctgtaatcttgg

SEQ ID NO: 6231 - DNA, 463 bp, Glycine max
  unsure (1)..(463): unsure at all n locations
tctttgaganaacttccttgggaagctagagcttagctacacacacccctttcataactaagctcacctccttgagaagcttgcttgagaagattcctaaagaagctagagcttagctacacacacctttctaatagctaagctcacctccttgagatgagaagctagagcttagctacacaccccctataatagctaagctcacccccatgacaaaatatatgaaaatacaaaaatgtccctactacaaagactattcaaaatgcctcgaaatacgaggctaaaaccctatactactagaatggccaaaatacaaggcccaaatgaaggaaaaacctattctaatatttacaaagataagcgggctcatacttatcccatgggctcaaaatctatcctaaggctcatgagaaccctanggccttcccttgggattttgtcccaatctacttggagtctttta

SEQ ID NO: 6232 - DNA, 388 bp, Glycine max
ctggagtttccaagtgccaattcgtcttcttctgtagaccactctttctctggcttcaattcatcagcgggctctccttctgtgtacaacatcttgcgatgttcccagcctttgatgacagctttccaggtactgctatccagtgagacgatgaaggccaccatccttgctttccagtattcatagttggttccatctaggattggtgggctgttcactggacctccttcgttgtgcatgctcatcacaacttatctgcctagatctcactctgtgatttcgagggttggctctgataccaattgaaattctgatgccaggggacagatgtcgtacatgatgtcacgacatcacgcttcataacatgcagtatatgtgggtctgtatg

SEQ ID NO: 6233 - DNA, 324 bp, Glycine max
agcttgtagcaaattcaaaccacaataactattatctcttatgtctgattgagtccggtaatttatctagacgctcgtaaatgaatacggaagcacgtatcaaatgcaaaccgcattaacatttaactcagatgtgcgaatgaatcccgtaatatatcgagacgctcggaattgaaaacagaagctctaagcaaattctatacgacaattactttttactcggatgtctgattgagtctcgtaatatatcgagacgcttgaaattgaaaacagatgctctgagcacattcaaaccacaataacatttaactcggatgtctgatt

(The sequence listing continues in the following parts.)

1-11. (canceled)

12. A transformed plant comprising a nucleic acid molecule which comprises:
(a) an exogenous promoter region which functions in a plant cell to cause production of an mRNA molecule; which is linked to;
(b) a structural nucleic acid molecule, wherein said structural nucleic acid molecule comprises a nucleic acid sequence, wherein said nucleic acid sequence shares at least 90% sequence identity to a nucleic acid sequence selected from the group consisting of SEQ ID NO: 1 through SEQ ID NO: 20082, or the complement of SEQ ID NO: 1 through SEQ ID NO: 20082, which is linked to
(c) a 3′ non-translated sequence that functions in said plant cell to cause the termination of transcription and the addition of polyadenylated ribonucleotides to said 3′ end of said mRNA molecule.

13. The transformed plant according to claim 12, wherein said nucleic acid sequence is the complement of a nucleic acid sequence selected from the group consisting of SEQ ID NO: 1 through SEQ ID NO: 20082.

14. The transformed plant according to claim 12, wherein said nucleic acid sequence is in the antisense orientation of a nucleic acid sequence selected from the group consisting of SEQ ID NO: 1 through SEQ ID NO: 20082.

15. The transformed plant according to claim 12, wherein said nucleic acid sequence shares at least 95% sequence identity with a nucleic acid sequence selected from the group consisting of SEQ ID NO: 1 through SEQ ID NO: 20082 or the complement of SEQ ID NO: 1 through SEQ ID NO: 20082.

16. The transformed plant according to claim 15, wherein said nucleic acid sequence shares at least 99% sequence identity with a nucleic acid sequence selected from the group consisting of SEQ ID NO: 1 through SEQ ID NO: 20082 or the complement of SEQ ID NO: 1 through SEQ ID NO: 20082.

17. The transformed plant according to claim 16, wherein said nucleic acid sequence shares 100% sequence identity with a nucleic acid sequence selected from the group consisting of SEQ ID NO: 1 through SEQ ID NO: 20082 and the complement of SEQ ID NO: 1 through SEQ ID NO: 20082.

18. A transformed seed comprising a transformed plant cell comprising a nucleic acid molecule which comprises:
(a) an exogenous promoter region which functions in said plant cell to cause production of an mRNA molecule; which is linked to;
(b) a structural nucleic acid molecule, wherein said structural nucleic acid molecule comprises a nucleic acid sequence, wherein said nucleic acid sequence shares at least 90% sequence identity to a nucleic acid sequence selected from the group consisting of SEQ ID NO: 1 through SEQ ID NO: 20082, or the complement of SEQ ID NO: 1 through SEQ ID NO: 20082, which is linked to
(c) a 3′ non-translated sequence that functions in said plant cell to cause the termination of transcription and the addition of polyadenylated ribonucleotides to said 3′ end of said mRNA molecule.

19. The transformed seed according to claim 18, wherein said nucleic acid sequence is the complement of a nucleic acid sequence selected from the group consisting of SEQ ID NO: 1 through SEQ ID NO: 20082.

20. The transformed seed according to claim 18, wherein said exogenous promoter region functions in a seed cell.

21. The transformed seed according to claim 18, wherein said nucleic acid sequence shares at least 95% sequence identity with a nucleic acid sequence selected from the group consisting of SEQ ID NO: 1 through SEQ ID NO: 20082 or the complement of SEQ ID NO: 1 through SEQ ID NO: 20082.

22. The transformed seed according to claim 21, wherein said nucleic acid sequence shares at least 99% sequence identity with a nucleic acid sequence selected from the group consisting of SEQ ID NO: 1 through SEQ ID NO: 20082 or the complement of SEQ ID NO: 1 through SEQ ID NO: 20082.

23. The transformed seed according to claim 22, wherein said nucleic acid sequence shares 100% sequence identity with a nucleic acid sequence selected from the group consisting of SEQ ID NO: 1 through SEQ ID NO: 20082 and the complement of SEQ ID NO: 1 through SEQ ID NO: 20082.

24. A method of growing a transgenic plant comprising
(a) planting a transformed seed comprising a structural nucleic acid molecule, wherein said structural nucleic acid molecule comprises a nucleic acid sequence, wherein said nucleic acid sequence shares at least 90% sequence identity to a nucleic acid sequence selected from the group consisting of SEQ ID NO: 1 through SEQ ID NO: 20082, or the complement of SEQ ID NO: 1 through SEQ ID NO: 20082, and
(b) growing a plant from said seed.

25. A substantially purified nucleic acid molecule comprising a nucleic acid sequence, wherein said nucleic acid sequence shares at least 90% sequence identity to a nucleic acid sequence selected from the group consisting of SEQ ID NO: 1 through SEQ ID NO: 20082, or the complement of SEQ ID NO: 1 through SEQ ID NO: 20082.

26. The substantially purified nucleic acid molecule of claim 25, wherein said nucleic acid molecule encodes a soybean protein or fragment thereof.
